United States Patent Application Publication US 2014/0259212 A1 - sequence listing, part 38

SEQ ID NO: 134563 - protein, 381 aa, Moorella thermoacetica ATCC 39073
MRRIVIAPDSFKESLSAPEVAAAIAQGIHRVLPEVETVNVPMADGGEGLTATLVAATGGREMTATVTGPLGEPVQASWGILGDGITAVVEMAQASGLPLVPREKRNPLVTTTYGTGELIHQALEAGCRRLIVGIGGSATNDGGAGMARALGVKLLDAEGADIPPGAGGLERLERIDIQGLDPRVKEVEILVACDVDNPLCGPRGASAVYGPQKGATPEMIPRLDAALARLADIVARDLKVDVRELPGAGAAGGLGAGLVAFLGATLRRGIELVIEAVNLDGILAAGADLVITGEGEINRQTAYGKVPAGVAGVAAKYGIPVVALVGSIGEGASAVYDHGIQGFMSIVPRPVPLSYCLENAASLLADAAERLMRLLSINIKK

SEQ ID NO: 134564 - DNA, 1185 bp, Burkholderia thailandensis E264
  CDS (1)..(1185): transl_table=11
atgaagatcgtgattgctcccgactcgttcaaggaaagcctgagcgccgtcgaaacggcgcggcagatcgaggccggattccgcgaagtgttcgccgacgccgagtaccggtgcctgccgatcgccgacggcggcgagggcacggtcgacgcgctcgtcgcggccgcgggcggcgagcgccgcagcgcgagcgtcgccgatccgctcggccggccgacgcgcgccgcgttcggcatcctgccggacggcaccgcggtgatcgagatggccgaggcgagcggcctgcatctcgtgccgcccgaatcgcgcgatccgcgcgtcacgtcgagccggggcacgggcgagctgatccgcgcggcgctcgacgcgggcgcgcggcgcttcatcgtcggcctcggcggcagcgcgacgaacgacggcggcgcgggcatgctgcaggcgctcggcgcgcatctggccgacgccgacggccggccgatcggcccgggcggcgcgccgctcgcgcggctcgcgcgcatcgacgccgccggcctcgacggccggctggcggcttgcgcgttcgaagtcgcatgcgatgtcgacaatccgctcgtcgggccgaacggcgcgtccgcggtgttcggcccgcagaagggcgcgacgccggaaatggccgcggatctcgatcgcaacctcgcgcatttcgcggcgatcgtcgcgcgcgacgtcggcccggacgtcgcgcggctgccgggcggcggcgcggcgggcggcctcggcgcggcgatgtccgcgttcctgaacgcggcgctgcgcccgggcgtcgagatcgtcaccgatgcgctgcggctgcgcgacgcgattcgcggcgcgagcctcgtcgtgacgggcgaaggctgcatcgacggccagacgctgcgcggcaaggccccgatcggcgtcgcgcggatcgcggccgaatgcggggtgcctgtcgtcgcgatcggcggcgcggtgacgaatcaggccggcgcgctgtacgcgcacggcttcgatgcggtcttcgcgtccgtcaggcgcgcgtgtacgatcgacgaggcgctgcgcgacgcggcggcgaacgtgcgcttcgcggcgcgcaacgtcgcggcggcgattcgcgtcggccgggagctcggccggcacgcgtcgccgcggcgcgtagcgcattcgtctcgcgcctcctag

SEQ ID NO: 134565 - protein, 394 aa, Burkholderia thailandensis E264
MKIVIAPDSFKESLSAVETARQIEAGFREVFADAEYRCLPIADGGEGTVDALVAAAGGERRSASVADPLGRPTRAAFGILPDGTAVIEMAEASGLHLVPPESRDPRVTSSRGTGELIRAALDAGARRFIVGLGGSATNDGGAGMLQALGAHLADADGRPIGPGGAPLARLARIDAAGLDGRLAACAFEVACDVDNPLVGPNGASAVFGPQKGATPEMAADLDRNLAHFAAIVARDVGPDVARLPGGGAAGGLGAAMSAFLNAALRPGVEIVTDALRLRDAIRGASLVVTGEGCIDGQTLRGKAPIGVARIAAECGVPVVAIGGAVTNQAGALYAHGFDAVFASVRRACTIDEALRDAAANVRFAARNVAAAIRVGRELGRHASPRRVAHSSRAS

SEQ ID NO: 134566 - DNA, 1557 bp, Burkholderia thailandensis E264
  CDS (1)..(1557): transl_table=11
ttgccgtgccagccttgcggcggacgcgccgtcgcgcaccttcgtctcgcccatgcgggcgcatcgagcgcgggccgcgcctggcggcgcgcggcccatgcgagccgtcggcggcttgaagcacggctttggccggaagaatcggctattctagcaaactattttcccctcaccgcgagttcgggcagtggcgcgccgcacgccgccgcccgccgcaagcggggcgcgcgattcccggcatgcgcgccgccggatcccgcacaggccagccatccggtaagctcccttcaaggccgtcgcccgccctcgcgcagcacgcacgcgcatgcatccgcccgcgccccctcggcccgcgcggcccgctcgccatcgagaaccgcatccggagacaccatgccgcagccctcgcccgtcgtcgtcgttgcgcccgattcgttcaagggatcgctatccgccgagcaggtcgcggccgcgatcgcggccggcgtcgcgcgggcgcgtcccgacgccgtcgtccggtgccgtccgatggcggacggcggcgaaggcacgctcgacgcgctgctcgcgcacggcggcgcacgccgcacgctgcgcgtgccgggcgcatcgtccgcgccacgcgacgcggccgtcggtctcatcgatgcgcacacggcaatcgtcgaaaccgcggagatcgtcggcatcaccgacccggcgggcatgcgcgcgcccgttgccacacgcagcacgcgcgggctcggcgacgcgatccgcgcgctcctcgacgacggtgtgcgcacgttctacgtcgcgctcggcggcagcagcacgaacgacgccggcgcggggctgctggccgggctcggcctgcgcgcgtacgatgcgcacggccgcgagatcgaaccgacgcccgagcggctcgcgcacgtcgcgagcgtcgacgcctccgggctcgacgcgcgcttggccgacgcgtcgttcgtcgcgatgtccgacgtcgacaatccgctcaccggcgaacacggcgcgaccgccgtgttcggcccgcaaaagggcgtgacgcccgcgcagctcgcgccgctcgatgccgcgctcggccatttcgcgacgctcgtcgaggcggcgctcgaccgccgccccgcgggggcttcctccggccgcgcccgcgacctgcccggcgccggcgcggcgggcgggctcggcttcgcgctgcacgtgctcggcgcgcgcttcgagccgggcgccgaggtcgtcgcgcgacagatcgggctcgacgcagcgcttgcgggcgcgaactggatgattacgggcgaaggtcgctcggacgtgcagacgctgcgcggcaaggctccgttcgtcgcgtgccgccatgcgcgcgcggcgggcgtgccggcgacgctgctgtcgggcgcgatcgacgcggcggcgctgcgccaattatccgaacatttcgacggctgcttctcgcccgcgccgggcccgatcacgctcgacgccgcgctgcgcgacgccgcgcgcctgctcgaaaacgcggcggagcaactgacgcggctgcgctacggccgcgcatga

SEQ ID NO: 134567 - protein, 518 aa, Burkholderia thailandensis E264
MPCQPCGGRAVAHLRLAHAGASSAGRAWRRAAHASRRRLEARLWPEESAILANYFPLTASSGSGAPHAAARRKRGARFPACAPPDPAQASHPVSSLQGRRPPSRSTHAHASARAPSARAARSPSRTASGDTMPQPSPVVVVAPDSFKGSLSAEQVAAAIAAGVARARPDAVVRCRPMADGGEGTLDALLAHGGARRTLRVPGASSAPRDAAVGLIDAHTAIVETAEIVGITDPAGMRAPVATRSTRGLGDAIRALLDDGVRTFYVALGGSSTNDAGAGLLAGLGLRAYDAHGREIEPTPERLAHVASVDASGLDARLADASFVAMSDVDNPLTGEHGATAVFGPQKGVTPAQLAPLDAALGHFATLVEAALDRRPAGASSGRARDLPGAGAAGGLGFALHVLGARFEPGAEVVARQIGLDAALAGANWMITGEGRSDVQTLRGKAPFVACRHARAAGVPATLLSGAIDAAALRQLSEHFDGCFSPAPGPITLDAALRDAARLLENAAEQLTRLRYGRA

SEQ ID NO: 134568 - DNA, 1143 bp, Desulfitobacterium hafniense Y51
  CDS (1)..(1143): transl_table=11
atgcatgtacttatagccgttgattcattcaaaggaagtttaagcagccaaaaggcaggggaagccattaccctgggcattcagcgggtttttcctgaagcgactgcggagattatcagtatggcagacggcggggaaggaaccgttgaggccattgtccatgccggtcgggggaaggtgttaaaaaccagagtcacctcacctttgggggaagaggccgaggccatcatgggccggcttcccgatggcactatcgtgctggaaatggcttcggcttcaggcttacctatggtcccccgccataagaggaatcctttgctgaccaccaccaggggtacaggggatctgattcgggctgccctggctctgcagccccgggaaattctcatcggtattggcggcagtgcgaccaatgatgggggagcgggaatggctcaggcccttggggcaagactccttgatcgggaaggacaggagctgagtcccggcggaggttgcctggatcagcttgccaggatcgactgttcagaacttgatccccgcttaaaagagacgaagatcacggtgatgtgcgatgtggataatcccttgtgcggcccgcggggagcttcggcagtttatggaccgcaaaaaggcgccacaccggagatggtggagattttggatgggaatcttgctcattttgcccggaaaatccgggaagatttaggagtggatctaaaagatgtgccaggggcaggagccgccggaggcctgggaatgggactgctggccttcacaggagctcagctgaagaccggtgtggaggctgtgcttgatacagtaaactttgatggtaaactgcaacaagcggatattgtcattaccggtgaagggcgcatcgacggtcagtcggtttatggcaaggtgcccatgggtgtggccaaacgagcccttcagtatggcaaacccaccctggctatcgtcggttccatcggtgccggatctgaagccctttatgaacatggcataagctctatccttactattgttaatggtcccatgaccttggaggaatctatggaaagagcctttgatttgacggtggacgctgcggagcggggattccgtatcttaaaaatggcctattccgacaaaagatga

SEQ ID NO: 134569 - protein, 380 aa, Desulfitobacterium hafniense Y51
MHVLIAVDSFKGSLSSQKAGEAITLGIQRVFPEATAEIISMADGGEGTVEAIVHAGRGKVLKTRVTSPLGEEAEAIMGRLPDGTIVLEMASASGLPMVPRHKRNPLLTTTRGTGDLIRAALALQPREILIGIGGSATNDGGAGMAQALGARLLDREGQELSPGGGCLDQLARIDCSELDPRLKETKITVMCDVDNPLCGPRGASAVYGPQKGATPEMVEILDGNLAHFARKIREDLGVDLKDVPGAGAAGGLGMGLLAFTGAQLKTGVEAVLDTVNFDGKLQQADIVITGEGRIDGQSVYGKVPMGVAKRALQYGKPTLAIVGSIGAGSEALYEHGISSILTIVNGPMTLEESMERAFDLTVDAAERGFRILKMAYSDKR

SEQ ID NO: 134570 - DNA, 1074 bp, Rhodococcus sp. RHA1
  CDS (1)..(1074): transl_table=11
atgcgagtgatgatcgcaccggactccttcggtgaaacgctgaccgccgtcgaggcgaccgctgcgatcgcggcgggatggtcggccgtgcgcccggacgaccagctgatcgaggcgccgcagtccgacggcggccccggattcgtggacgtgatcgccgcagcaggcggcaccgtccggaccgcggtcgtggaagggccgctcggcgccgacgtcaccgcccgctggctcctcgacggcaccgacgcctacctcgaatccgcccaggcctgcggactcggactgctgggcggaccgccgacgccccgcaccgcccgcgacgcgcacagccgaggcgtcggccaactcgtcgtggcggccctcgacgccggagcgcgcagaatcgtcgtcggcctcggcggcagcagctgcaccgacggcggccgtggcgtcgtcgaagccctcgcgcagggcttcgggagcgcggacgccgccgtcgcccgcctacgttcggtggaactggtcgccgcgtccgacgtcgagcacccgctgctcggcgagcacggcgccgcccgcgtgttcggaccgcagaagggtgccgaccccgacaccgtcgccttcctggaggacaggaacgccgcgtgggcggggcaactgcagcgggtgacggcccgggaggtcgccgccgaggccggtgccggcgccgccggtggcatcggcgccgcgctgctcgccctcggcgcgacccgcgaatccggtgctcacgtggtcgctcagcgcacccggcaggaccgccaactcgcctccgcccagctcgtgatcaccggggaaggccgcctcgaccagcagtcgctgcgcgggaaactcgtgatcgcgctcgccgctgccgcccgccggcggtcgattgcgacgctcgtcctggccgggcaggtactcctcgacgccgcggacctcgacagcgcgggcatcgacgacgcactgtccctggtcgatcacgcgggatcggtcgaactcgcgatgtcggacgcatacgcgcagctgagagacctcgccgcggccgcggcccggggttgggaaggtgtggccgcagggtag

SEQ ID NO: 134571 - protein, 357 aa, Rhodococcus sp. RHA1
MRVMIAPDSFGETLTAVEATAAIAAGWSAVRPDDQLIEAPQSDGGPGFVDVIAAAGGTVRTAVVEGPLGADVTARWLLDGTDAYLESAQACGLGLLGGPPTPRTARDAHSRGVGQLVVAALDAGARRIVVGLGGSSCTDGGRGVVEALAQGFGSADAAVARLRSVELVAASDVEHPLLGEHGAARVFGPQKGADPDTVAFLEDRNAAWAGQLQRVTAREVAAEAGAGAAGGIGAALLALGATRESGAHVVAQRTRQDRQLASAQLVITGEGRLDQQSLRGKLVIALAAAARRRSIATLVLAGQVLLDAADLDSAGIDDALSLVDHAGSVELAMSDAYAQLRDLAAAAARGWEGVAAG

SEQ ID NO: 134572 - DNA, 1152 bp, Rhodococcus sp. RHA1
  CDS (1)..(1152): transl_table=11
gtgacacgtgtactggtcgcacccgacaagttcaagggatccctcaccgccgcggaagtggcggacgccctcgccgccggactcgttgccggtgatccctcctgggtgatcgatcgtgtcccggtcgcggacggcggcgacggtaccgttgcggcggccgtcgcggcagggtggtctccggtcgcggtcgccaccacggggccgacgggtctacccgtcacctcgtcctacgcggtgcgcggctcgaccgcggtggtcgaactggcatcggccgtgggattggtactgctcccgaacggtgtggcggatcccttgggtgccagtacattcggactcggcaccgtcgtcaggcacgcgctggaggggggagcccgcgagatcatcgtcggtctcgggggcagcgcgtcaaccgacggcggtgccggcttgttacaggccctcggcgtgcatgtcctcgacgccggcggcaacgaggtcgcgcaggggggagcggcgctgctccgggccgcccgggtcgacctgaccggtctccacccggcggcgcgtgcggcgcacttccggctcgcctgcgacgtcgacaatccgctcctcggcccgaccggcgccaccgccgtgtacgcaagccagaagggcgccgccgcaggagaactggtcgtgctcgaggacgccatgacccggtgggcgcaggtcgtgcgcgccgcgaccggccgcgacgacagccggatcgcgggagcgggcgccgcgggaggcgcggcgttcggcgcgatctcggtgctgggggcggacacccggcccggcatcgacacggtcctcgggctcgtcgactttcccgggaggctcgccggggcagacctcgtcatcaccggtgaggggtcgctcgacgagcagagtctccacggcaaggcaccgatcggcgtcgccaccgaagcacgcagggccggaatccccgtcctggccgtctgcggccgaaacctgctcagcgacatccaattgcacagcgccggcatctccgcggcatacgcgctcgcggacctcgaaccggaccttcatcgatcgatcagagatgcggcggaactactgcgccggatcggctgcacgatcgcggcatcgactgccgaactcgcaccactcagcacacgaggagaatcatga

SEQ ID NO: 134573 - protein, 383 aa, Rhodococcus sp. RHA1
MTRVLVAPDKFKGSLTAAEVADALAAGLVAGDPSWVIDRVPVADGGDGTVAAAVAAGWSPVAVATTGPTGLPVTSSYAVRGSTAVVELASAVGLVLLPNGVADPLGASTFGLGTVVRHALEGGAREIIVGLGGSASTDGGAGLLQALGVHVLDAGGNEVAQGGAALLRAARVDLTGLHPAARAAHFRLACDVDNPLLGPTGATAVYASQKGAAAGELVVLEDAMTRWAQVVRAATGRDDSRIAGAGAAGGAAFGAISVLGADTRPGIDTVLGLVDFPGRLAGADLVITGEGSLDEQSLHGKAPIGVATEARRAGIPVLAVCGRNLLSDIQLHSAGISAAYALADLEPDLHRSIRDAAELLRRIGCTIAASTAELAPLSTRGES

SEQ ID NO: 134574 - DNA, 1140 bp, Rhodococcus sp. RHA1
  CDS (1)..(1140): transl_table=11
atgccccgtcatgtcgtcgtcgctcccgacaagttcaaggggtcgatctctgcggccgatgccgccgcggaaatcagccgaggactccagcggcgcgacccgacgatccggacgatcgagtgcccgatcgcggacggcggcgaggggacactcgccgccgctctggcggccggcttcgagaggatccccgtcgctgcgcccgggccgaccggcgagcggacgctgactgcctacgcacggaaagggcagctcgcggtgatcgaaatggcggacatctctggcttgcaccgactgcccgccggggtactgcgtccgatgaccgcgtcgagccgtggtctcggcacagtcctcgcccgcgccctcgacgacggatgccgagagatcgtgctcggtatcggtggcagcgcctgcaccgacggcggggccgggttcctgcgtgcgctcggcgccgaggtcgtcaacgctcacgggagcccgatccgagacggaggcggcgccctgtctcaggccacgatgctcgatgtttcctggttgcacccgggactcggagacgcgaagatcaccctcgccagcgatgtggacaacccactgtacgggcccactggtgccgccgcggtctacggaccccagaaaggcgccactcccacacaagtcgccgaactcgatgcggcactggcacattgggccgaccgcgtcgcagcggccaccggtcgcgacgcccgagacagccccggggcaggggcggccgggggagtgggattcgctgcgttgaccgttctgcaagcggagttccgccccggaatcgacctcatcttggagctggtgggcatcgatcagcacctcgacggcgcgtgcgcggtcatcaccggtgagggctctctcgatcaccagtccttgcacggcaaagccccgatcggggtgcgcctgcatgccaccgctcgcgacgttccgacatacgccattgtcggggtgtcgcggctttccccggaagaggaggcggcttctcagttcgccgccatctattccctacgggagcgtgaacccgacgtcgcacgttcgatggcgggggctgccgatctgatcgcttcggccgccgaagaactggccgccgaacatctgctcgcggtcgatcgaacctga

SEQ ID NO: 134575 - protein, 379 aa, Rhodococcus sp. RHA1
MPRHVVVAPDKFKGSISAADAAAEISRGLQRRDPTIRTIECPIADGGEGTLAAALAAGFERIPVAAPGPTGERTLTAYARKGQLAVIEMADISGLHRLPAGVLRPMTASSRGLGTVLARALDDGCREIVLGIGGSACTDGGAGFLRALGAEVVNAHGSPIRDGGGALSQATMLDVSWLHPGLGDAKITLASDVDNPLYGPTGAAAVYGPQKGATPTQVAELDAALAHWADRVAAATGRDARDSPGAGAAGGVGFAALTVLQAEFRPGIDLILELVGIDQHLDGACAVITGEGSLDHQSLHGKAPIGVRLHATARDVPTYAIVGVSRLSPEEEAASQFAAIYSLREREPDVARSMAGAADLIASAAEELAAEHLLAVDRT

SEQ ID NO: 134576 - DNA, 1143 bp, Haemophilus somnus 129PT
  CDS (1)..(1143): transl_table=11
atgaaaattgtcattgcaccggattcttttaaagaaagtttaaccgcacttgaagtggctcaagctattgaaaatggtttcaaaaaaatctaccccaatgcagattatgtaaaagttcccatggcagatggaggagaaggcacagtccaatctcttgccgatgcactacaaggcaaactgatttctgtagaggttaccgcacctttaggtaataaaacgcaagctgattttgccatatcgggtgatggaaaaatcgcaattattgaaatggcggcggcttccggtttacatttggtgccgatagaaaaacgcaatccttactacaccacaagctatggtacaggagaactaattaacgccgccttggatctaggggtgagccaaattattttgggtatcggtggcagtgcaaccaatgacggaggtgtcggtatgctacaagccttaggtatcaaattcaaagacgctcaaggaaaagaaatcggcttgggcggtctagctctgcaacaaatcgctcatatcgacactgcacatttagatcaacgtttgacacaagttcaatttaatgtagcttgcgacgtaaataatcctttatatggtgaaaaaggtgcttctgctactttcggtccacaaaaaggagcaacaccggaaatggtacaacaattggaccaagctctactgcattttagtcgtattgtagaacgagattgcggaaaacggattgctgagcgtcccggatcgggtgctgcaggcggtatgggtggtggattgctattattgcctcaagtacaactcaaatccggtgtgcagattgtcattgatacagtaaatttagcagaaattatcaaggatgccgatttggtcattaccggagaaggtagaatggattcacaaactattcacggcaaaacgcctattggggtagcaaaaactgccaaactggcaaataaacctgttatagccattacaggctgcttacgggaagattatgaagtagtctatgagcatggcattgatgcagtattccccattattcgtcaattagacagtttgcctgaaattttggctcaaggcagacaaaatctagaatctaccgctcaaaatatcgctagaatgcacttgctagtacaacgttctcattaa

SEQ ID NO: 134577 - protein, 380 aa, Haemophilus somnus 129PT
MKIVIAPDSFKESLTALEVAQAIENGFKKIYPNADYVKVPMADGGEGTVQSLADALQGKLISVEVTAPLGNKTQADFAISGDGKIAIIEMAAASGLHLVPIEKRNPYYTTSYGTGELINAALDLGVSQIILGIGGSATNDGGVGMLQALGIKFKDAQGKEIGLGGLALQQIAHIDTAHLDQRLTQVQFNVACDVNNPLYGEKGASATFGPQKGATPEMVQQLDQALLHFSRIVERDCGKRIAERPGSGAAGGMGGGLLLLPQVQLKSGVQIVIDTVNLAEIIKDADLVITGEGRMDSQTIHGKTPIGVAKTAKLANKPVIAITGCLREDYEVVYEHGIDAVFPIIRQLDSLPEILAQGRQNLESTAQNIARMHLLVQRSH

SEQ ID NO: 134578 - DNA, 1146 bp, Shewanella sp. MR-4
  CDS (1)..(1146): transl_table=11
atgaagatagttatcgcccccgattcctttaaagagagcttaagcgcacttgatgtggctaatgcgatcgaacaaggcttaacacaagtgatcccagactgtgagattgtcaaaatccccgtcgccgatggcggcgaaggcactgtgcaatctatggtcgatgccactggcggcagcattgtcaatttagaggtcatggggccactcggccataaagtcaaagcccattacggcattttaggccagcaagccaaaggcacgattgcggtgattgaaatggcctccgcctcgggtttacaccatgtaccaagggatcagcgtaacccgctgctcaccaccagttatggtacgggcgagctgatttgtgatgcgctcaatcgcgggataaaacacattattttaggcttgggcggcagtgcaaccaacgatggcggcgcaggtatggcccaagcgctggatattttactgctagataaacaaggtaaaaccttaagtgcaggtggcgctgcgctctctcaacttgccagtatcgatataagccacgcccatccactactgaaagaatgtacctttgaagtggcctgcgatgtcgataatccgctgtgtggcgagcgtggcgcttctgccatattcggcccgcaaaaaggcgcaacacccgagatggtgagtaccttagacgcagcactaagtcactatgccgatgtgattgcccaaagcggcgtcaccgatcaccgtaaccaagctggcgcgggcgcagcaggcggaatgggacttggcgtgatggcctttttaggcgccgagcttaaacccggtgttgagattgtgatgcaaacagtgggactggcagacaaaattcgcggcgcggatcttgtcatcaccggcgaaggccgaatcgatggccagaccatatttggcaaaaccccgatgggcgtattaaagcaagcgcagctgcaaaatattccgactatcgggattgcgggttgccttggcgacaatgctaatgccgtactcgagcaaggtatggcggcgatttttcccatcattccacacttaagtccactggacgatgtgctggcgaacgccaaaacgaatctgaccaataccgcccgtaatattggcgccgtcttgatgctgggcaagcgctaa

SEQ ID NO: 134579 - protein, 381 aa, Shewanella sp. MR-4
MKIVIAPDSFKESLSALDVANAIEQGLTQVIPDCEIVKIPVADGGEGTVQSMVDATGGSIVNLEVMGPLGHKVKAHYGILGQQAKGTIAVIEMASASGLHHVPRDQRNPLLTTSYGTGELICDALNRGIKHIILGLGGSATNDGGAGMAQALDILLLDKQGKTLSAGGAALSQLASIDISHAHPLLKECTFEVACDVDNPLCGERGASAIFGPQKGATPEMVSTLDAALSHYADVIAQSGVTDHRNQAGAGAAGGMGLGVMAFLGAELKPGVEIVMQTVGLADKIRGADLVITGEGRIDGQTIFGKTPMGVLKQAQLQNIPTIGIAGCLGDNANAVLEQGMAAIFPIIPHLSPLDDVLANAKTNLTNTARNIGAVLMLGKR

SEQ ID NO: 134580 - DNA, 1146 bp, Shewanella sp. MR-7
  CDS (1)..(1146): transl_table=11
atgaagatagttatcgcccccgattcctttaaagagagcttaagcgcactcgatgtggctaatgcgatcgaacaaggcttaacacaagtgatcccagactgtgagattgtcaaaatccccgtcgccgatggcggcgaaggcacagtgcaatctatggtcgatgccactggcggcagcattgtcaatttagaggtcatggggccactcggccataaagtcaaagcccattacggcattttaggccagcaagccaaaggcacgattgcggtgattgaaatggcctccgcctcgggtttacaccatgtaccaagggatcagcgtaatccgctgctcactaccagttatggtacgggcgagctgatttgtgatgcgctcaatcgtgggataaaacacattattttaggcttaggcggcagtgcaactaatgatggcggcgcaggtatggcccaagcactggatattttactgctagataaacaaggtaaaaccttaagtgctggcggcgcggcacttgctcagcttgccagcatcgatatgagccacgcccatccgctactgaaagaatgcacctttgaagtggcctgcgatgtcgataatccgctgtgcggcgagcgtggtgcttcggccatatttggcccgcaaaaaggcgcaacacccgagatggtgagcaccttagatgcagcactaagtcactatgccgatgtgatcgcccaaagcggcgtcaccgatcaccgcaatcaagctggcgcgggcgcggcaggcggaatgggacttggcgtgatggcatttttaggcgccgagcttaaacccggtgttgagattgtgatgcaaacggtaggactggcagacaaaattcgcggcgcggatcttgttatcaccggcgaaggccgaatcgatggccagacaatctttggcaaaaccccgatgggcgtattaaagcaagcgcagctgcaaaatattccgactataggaattgcgggttgccttggcgacaatgctaatgccgtgctcgagcaaggtatggcggcgattttccccatcattccacacttaagcccactggatgatgtgctggcgaatgccaaaacgaatctgaccaataccgcccgtaatattggcgccgtcttgatgctgggcaagcgctaa

SEQ ID NO: 134581 - protein, 381 aa, Shewanella sp. MR-7
MKIVIAPDSFKESLSALDVANAIEQGLTQVIPDCEIVKIPVADGGEGTVQSMVDATGGSIVNLEVMGPLGHKVKAHYGILGQQAKGTIAVIEMASASGLHHVPRDQRNPLLTTSYGTGELICDALNRGIKHIILGLGGSATNDGGAGMAQALDILLLDKQGKTLSAGGAALAQLASIDMSHAHPLLKECTFEVACDVDNPLCGERGASAIFGPQKGATPEMVSTLDAALSHYADVIAQSGVTDHRNQAGAGAAGGMGLGVMAFLGAELKPGVEIVMQTVGLADKIRGADLVITGEGRIDGQTIFGKTPMGVLKQAQLQNIPTIGIAGCLGDNANAVLEQGMAAIFPIIPHLSPLDDVLANAKTNLTNTARNIGAVLMLGKR

SEQ ID NO: 134582 - DNA, 1146 bp, Pseudomonas aeruginosa UCBPP-PA14
  CDS (1)..(1146): transl_table=11
atgaaaatcgtgattgctcctgattcgttcaaggaaagtctgtcagcgcccgacgtcgccgaggctatcgcccgcggttggcggcgagtcttcccgcaggccgaggtgttgctgcggccactggcggacggcggcgaaggcacggtcgatgcggtactcgccgccaccgccggcgaacgtcgcgaatgccgggtggaaggcccgcgcggtgagccgaccctggcgcactggggctggctggacgacgccaccgcagtgatcgaaatggcttccgccagcggcttgcacctggttccgcgcgaccgccgcgacgccacgcgcagcagcagccgtggcactggcgagctgatccgtgcggcgctggacgccggggcgcggaagatcatcctcggcctcggcggcagcgctaccaacgatgccggcgccggcctgctgggcgcgctcggcgtgcgtttcctggctgccgacggcgaggaactggcgcccggcggcgccgcgctggcgggcctgcacagtctcgacctgggcgggctggatccgcgcctggtggatgtcgcggtggaagtcgccgcggatgtcgacaacccgctatgcgggccgcgcggcgcgtcggcggtgttcggtccgcagaagggcgccagcgccgaacaggtggcgcaactggatgccgccctggcgcacttcgccaaggtggtcgcggcgaccctgggcgaggacttcagccgggtgccgggcgtcggcgccgccggcggcctgggtttcgccgcgagggcattcctccgtgcgcgtttccgcccaggcatcgaactggtggcggagctggccgggctggccgatgcgctggtcggtgccgacctggtgctgaccggcgagggccgcctggatgcgcagagcctgcacggcaagaccccggtgggcgtggcgcggatcgcgcgccaggccggcgttcccgtggtagccctggccggcagcctgggcgacggctaccagcgcctgcacgacgccggcatcgatgcggcgttcagcctggcgccgggaccgatcagcctggagcaggcctgtgccggagcggcggcggaactggaggcgcgcgccgagcagatcgcccggctctggcgcctggctcaggcttcgcgagaagggtag

SEQ ID NO: 134583 - protein, 381 aa, Pseudomonas aeruginosa UCBPP-PA14
MKIVIAPDSFKESLSAPDVAEAIARGWRRVFPQAEVLLRPLADGGEGTVDAVLAATAGERRECRVEGPRGEPTLAHWGWLDDATAVIEMASASGLHLVPRDRRDATRSSSRGTGELIRAALDAGARKIILGLGGSATNDAGAGLLGALGVRFLAADGEELAPGGAALAGLHSLDLGGLDPRLVDVAVEVAADVDNPLCGPRGASAVFGPQKGASAEQVAQLDAALAHFAKVVAATLGEDFSRVPGVGAAGGLGFAARAFLRARFRPGIELVAELAGLADALVGADLVLTGEGRLDAQSLHGKTPVGVARIARQAGVPVVALAGSLGDGYQRLHDAGIDAAFSLAPGPISLEQACAGAAAELEARAEQIARLWRLAQASREG

SEQ ID NO: 134584 - DNA, 1140 bp, Pediococcus pentosaceus ATCC 25745
  CDS (1)..(1140): transl_table=11
atgaaatttgttattgcaccagattcatttaagggtggattaactgccaaacaagcagccatcgcaatccaaaatggtattgctcgggtttatccgaaggctgattacacgttagtccctatggcagatgggggagaaggaaccgtgcaagcactggttgatgctactaatggaaaattaattaccgaaaaagtgactggtccattaggagatccagtagaagctacatttggtatcttaggtgatcataaaaccgcggtaattgagatgtcccaagcaagtggtattcaatttattaatcaaaatacacaaaatcctttaataactacaacctatggaaccggagaattaattttaaaggctttagattatcatatttcaaagctgattattggaatcggaggaagtgccactaatgatggaggggctggaatggctcaagccatcggggtccatttattggataataagcatcatgaaattggtcgtggaggtgaagcactaaagcatttagctcaaattgacatgactgacattgatccgcgtttagctaaagtccaacttttaatcgcttcagacgtgacgaatcctttagttggcccaaagggagcatccgtagtttttggaccccaaaaaggcgcgacgccggcaatgatccgaattttagatgaaagtctcacgcattatgctgaaattattaaacgcgatttaaatcaagacttagctaattatcctggagcaggtgcagctggggggctaggtacgggcttactagcttttaccaacgcatctatcaaaaagggaattgatattgttacagaatatagcggacttaaggaacaagctcaaggagctgattttgtttttaccggtgaaggtggtgttgattatcaaacgaagtttggtaaaacgccttatggagtggcattggcaactaaatctgttgctgcaagcgctccagtaattgtaatcactggtaatattggtgaaggtatcgatgaattgtattcagataaagcaatcgatgcggtgttttcaagtgtgtcaggtgttaaaactttagagcaagcattgatcgatgctccgcatgatattgcccaagttgctgagaatattgcccgattaattaataagttttaa

SEQ ID NO: 134585 - protein, 379 aa, Pediococcus pentosaceus ATCC 25745
MKFVIAPDSFKGGLTAKQAAIAIQNGIARVYPKADYTLVPMADGGEGTVQALVDATNGKLITEKVTGPLGDPVEATFGILGDHKTAVIEMSQASGIQFINQNTQNPLITTTYGTGELILKALDYHISKLIIGIGGSATNDGGAGMAQAIGVHLLDNKHHEIGRGGEALKHLAQIDMTDIDPRLAKVQLLIASDVTNPLVGPKGASVVFGPQKGATPAMIRILDESLTHYAEIIKRDLNQDLANYPGAGAAGGLGTGLLAFTNASIKKGIDIVTEYSGLKEQAQGADFVFTGEGGVDYQTKFGKTPYGVALATKSVAASAPVIVITGNIGEGIDELYSDKAIDAVFSSVSGVKTLEQALIDAPHDIAQVAENIARLINKF

SEQ ID NO: 134586 - DNA, 1137 bp, Oenococcus oeni PSU-1
  CDS (1)..(1137): transl_table=11
atgaaattcgtaatcgcaccagattcatttaaaggaagtctaacggcaaaggaagctgcagacgcaattcacgagggactgctgcgcatttttccccatgccgaatatgaaattattccaatggccgacggaggcgaaggtacggttcaatccttggttgatgcgaccaatggcgattttgagacgattgacgttttggatcccttggaaaaaaaggcaaaagctcgttatggcttattcggtaatcaaaaaacagctgtaattgaaatggctgccgccagtggtattcagtttgttaatgaggagacgaaaaatcctttgatcacaacaacttttggtacgggtcagatgatcctggacgccatgcataagggtgccagagaaattattatcgggattggaggcagtgcaacgaccgatggcggacaaggaatggcggaggcactcggggttcaatttctggatgcagacggtcatccaatcaagcgcggtggagctgggttggctgaactcgaccatattgatctttccaaagtcgatccactggttgctcaaacaaaaatcagaatcgcttcggatgttgtaaatcctttggttggaccgaaaggttcagctagggttttcggtccgcaaaaaggcgcaacaagatcaataatcgaaatcttggataaaaatttaaaacactatgccgatattattcaacatgatcttggcaaaaaattggctgattttcctggagccggagccgccggtggcttgggagccggcttattggccttcaccaattctcaaatggaaaaaggagttgaaattgttgtcgaaatgacgcgtttaaaagaacgttccaaaggggcagactatgttattactggcgaaggagcaatcgactctcaaactcagtacggcaaaactccgatgggaactgcacaggctgttaaggcagctgttcccaatgtgaaagtggttgccttagccgggaatgtcggcgatggaatcgatcaattgtatcaacttgggattgattcgatcttttgtattttgccgggggtggtcagcttggatcaggcaattaagaatgccaagaaaaacttaacgcaaaccgcagaaaatgtcggtcggttaatcagccaacaataa

SEQ ID NO: 134587 - protein, 378 aa, Oenococcus oeni PSU-1
MKFVIAPDSFKGSLTAKEAADAIHEGLLRIFPHAEYEIIPMADGGEGTVQSLVDATNGDFETIDVLDPLEKKAKARYGLFGNQKTAVIEMAAASGIQFVNEETKNPLITTTFGTGQMILDAMHKGAREIIIGIGGSATTDGGQGMAEALGVQFLDADGHPIKRGGAGLAELDHIDLSKVDPLVAQTKIRIASDVVNPLVGPKGSARVFGPQKGATRSIIEILDKNLKHYADIIQHDLGKKLADFPGAGAAGGLGAGLLAFTNSQMEKGVEIVVEMTRLKERSKGADYVITGEGAIDSQTQYGKTPMGTAQAVKAAVPNVKVVALAGNVGDGIDQLYQLGIDSIFCILPGVVSLDQAIKNAKKNLTQTAENVGRLISQQ

SEQ ID NO: 134588 - DNA, 1146 bp, Shewanella sp. ANA-3
  CDS (1)..(1146): transl_table=11
atgaagatagttatcgcccccgattcctttaaagagagcttaagcgcactcgatgtggctaatgcgatcgaacaaggcttaacacaagtgatcccagactgtgagattgtaaaaatccccgtcgccgatggcggcgaaggcactgtgcaatctatggtcgatgccactggcggcagcattgtcaatttagaggtcatggggccactcggccataaagtcaaagcccattacggcattttaggccagcaagccaaaggcacgattgctgtgattgaaatggcctccgcctcgggtttacaccatgtaccaagggatctgcgtaatccgctgctcaccaccagttatggtacgggcgagctgatttgtgatgcgctcaatcgcgggataaagcacattattttaggcttaggcggcagtgcgactaatgatggcggcgcaggtatggcccaagcgctggatattttactgctggataaacaaggtaaaaccttaagcgcgggcggcgcggcgctgtctcagcttgccagtatcgatataagccacgcccatccactactgaaagaatgcacctttgaagtggcctgcgatgtcgataatccgctgtgcggcgagcgtggcgcttctgccatatttggtccgcaaaaaggcgcaacatccgagatggtgagcaccttagatgctgcactaagtcactatgccgatgtgatcgcccaaagtggtgtcaccgatcaccgcaaccaagctggcgcgggcgcagcaggcggaatgggacttggcgttatggcctttttaggcgccgagcttaaacccggagttgagattgtgatgcaaacagtaggactagcagacaaaattcgcggcgcggatcttgttatcacgggcgaaggccgaatcgatggccagaccatctttggcaaaaccccgatgggcgtcttaaagcaagcgcagctgcaaaatattccgactatcggggttgcgggttgtcttggcgacaatgccaatgccgtgcttgagcaaggtatggcggcgattttccccatcattccacacttaagtccactggacgatgtactggcgaatgccaaaaccaatctgaccaatactgcccgtaatattggcgccgtcttgatgctgggcaagcgctaa

SEQ ID NO: 134589 - protein, 381 aa, Shewanella sp. ANA-3
MKIVIAPDSFKESLSALDVANAIEQGLTQVIPDCEIVKIPVADGGEGTVQSMVDATGGSIVNLEVMGPLGHKVKAHYGILGQQAKGTIAVIEMASASGLHHVPRDLRNPLLTTSYGTGELICDALNRGIKHIILGLGGSATNDGGAGMAQALDILLLDKQGKTLSAGGAALSQLASIDISHAHPLLKECTFEVACDVDNPLCGERGASAIFGPQKGATSEMVSTLDAALSHYADVIAQSGVTDHRNQAGAGAAGGMGLGVMAFLGAELKPGVEIVMQTVGLADKIRGADLVITGEGRIDGQTIFGKTPMGVLKQAQLQNIPTIGVAGCLGDNANAVLEQGMAAIFPIIPHLSPLDDVLANAKTNLTNTARNIGAVLMLGKR

SEQ ID NO: 134590 - DNA, 1065 bp, Mycobacterium avium 104
  CDS (1)..(1065): transl_table=11
gtggcgcccgactgttatgccgacagcatgtcggcgctggaggcgtccgccgcgatcgcgaccggctggacgcggtcgcgtcccggcgaccggttcatcgtcgccccgcagtccgacggcggtcccggtttcgtcgaggtactggccagccggctgggcgagacgcgccggctgcgggtgtccgggccactgaaagccatggtggaggccgaatgggtcttcgatcgggggtcggcgaccgcctacctggagtgcgcgcaggcgtgcgggttggcgctgctcggcggtccacccaccccggagaccgccatggcggcccacagcaaaggcgtgggccagctgatcgccgaggcgctgcgggtaggggcgacccggatcgtggtcggactcggcggcagcgcgtgcaccgacggcggccagggcatgatcgccgaactcggcggcctggacaccgcccgccggcaactgggcaacgtcgaactgatcgccgcctccgacaccgaatacccgctgctgggcccgtggggggcggcccgggtgttcgggccgcagaagggcgccgacaccgccacggtcgcggcgctggaagtccggctgcaggcctgggcgctgatcctggaggcggtcgccgggcgcgacgtcagcgccgagccgggcgcgggcgccgccggcggcatcggggccgggctgttggcgctgggcggccggtgcgagtcgggcgcggccatcatcgccgaacacacccggctgtccgacgacctggacacggcggagttgatcgtcaccggcgagggccgattcgacgagcagtcgctgcacggcaaggtggtgggtttcctcgccgacgcggcccggccgcgcgggattccggtgatcgtgctggccggccaggtcgatctggacaccgcgaccgtgcgctcggcgggcatcatggccgcgctgtcgatggccgaacacgccggatcggcgcggctggcccaggccgacgccgccaatcagctgatgggtctggcctcggttgcggcggcgcgactcgggaatagcggtccgtcaaggtaccgttga

SEQ ID NO: 134591 - protein, 354 aa, Mycobacterium avium 104
MAPDCYADSMSALEASAAIATGWTRSRPGDRFIVAPQSDGGPGFVEVLASRLGETRRLRVSGPLKAMVEAEWVFDRGSATAYLECAQACGLALLGGPPTPETAMAAHSKGVGQLIAEALRVGATRIVVGLGGSACTDGGQGMIAELGGLDTARRQLGNVELIAASDTEYPLLGPWGAARVFGPQKGADTATVAALEVRLQAWALILEAVAGRDVSAEPGAGAAGGIGAGLLALGGRCESGAAIIAEHTRLSDDLDTAELIVTGEGRFDEQSLHGKVVGFLADAARPRGIPVIVLAGQVDLDTATVRSAGIMAALSMAEHAGSARLAQADAANQLMGLASVAAARLGNSGPSRYR

SEQ ID NO: 134592 - DNA, 1125 bp, Mycobacterium smegmatis str. MC2 155
  CDS (1)..(1125): transl_table=11
atgaaaatcgttcttgccccggactccttcaaggagtcgatgaccgcctcccaggcggtgaccgcaatgcgcgagggtgtgcattcggtgttccccgacgccgaatgtgtcggcgtcccgatggccgacggtggtgagggcaccgtcgacgcggtcgtcgacgcccttgccggcgaacgcgtgagggtcgacgtgtccgatccactcggccgccctgtacgcgccgactacgggtacatccccgaacgcaagctcgcggtgatcgagatggccaccgcgtccgggttggagctcgtcgcaccggccgaccgagacgtactgagcgcgagcactttcggggtcggccagctcatcgcctcggcgctggatcgtggcgcggtcgatctgctgatcgggttgggcggctcggccaccaatgacggcggcaccgggatgctcaccgcgctcggcgcggtgctgctcgatgccgcaggcaatccgttgccaccgggcggcggggccctggcacagctggaccgcatcgatctgtccgggctcgacaagcgcctggcggacatccagatcaggatcgcgtccgacgtcacggctcccctcctcgggccgggcggtgccagtgccgttttcggcccgcagaagggtgcgaccccgttcgatgtcgagacgcttgaggccgcgctgacgcggttggccgtggtgaccgaggagacgctgggccgcgcgcggccagaactccccggcgcgggcgcagcgggcggtctcgggttcgcgctcctcgatttcctcggcgccgagtgcaggcccggtgtcgaggtgatcgccgagaccgtgggcctggcgcaggccgtggtcggtgccgactgggtgttcaccggcgagggcagcgtcgatgcgcagaccgtcctgggcaagaccccgttcggcgtcgcacaggtggcgcgcaccgcgggagcccgcgtggtgatattcgccggacgtgtcggagacgacgccggcgtgctcctcgagcacggcgtggaccgcctcgtcgcgatcaccgtgccgggcacgcccatcgagcaggcgttgcgcgaaggtccgcagtcactggcccgcgcgaccgccgaagtctgccgcgccctctcttga

SEQ ID NO: 134593 - protein, 374 aa, Mycobacterium smegmatis str. MC2 155
MKIVLAPDSFKESMTASQAVTAMREGVHSVFPDAECVGVPMADGGEGTVDAVVDALAGERVRVDVSDPLGRPVRADYGYIPERKLAVIEMATASGLELVAPADRDVLSASTFGVGQLIASALDRGAVDLLIGLGGSATNDGGTGMLTALGAVLLDAAGNPLPPGGGALAQLDRIDLSGLDKRLADIQIRIASDVTAPLLGPGGASAVFGPQKGATPFDVETLEAALTRLAVVTEETLGRARPELPGAGAAGGLGFALLDFLGAECRPGVEVIAETVGLAQAVVGADWVFTGEGSVDAQTVLGKTPFGVAQVARTAGARVVIFAGRVGDDAGVLLEHGVDRLVAITVPGTPIEQALREGPQSLARATAEVCRALS

SEQ ID NO: 134594 - DNA, 1110 bp, Mycobacterium sp. KMS
  CDS (1)..(1110): transl_table=11
atgaaaatcgttctcgcaccggactctttcaaggagtccatgagcgccgcgcaggccatcgccgccatgcgcgacggcgtacgcgccgcccttccggacgccgaatgcgtcggggtcccgatggccgacggcggtgagggcaccgtcgacgccgtggtggacgcgctcgacggtgagcgggtgacggtcgaggtggccgatgcgctcggccggcccgtgccggccacctacggttatgttcccggccgtcgtctcgcggtcatcgagatggccgccgcggcgggtctggaactcatccccgccgacgagcgtgatgtgctgcgcgccagtaccttcggtgtcggccagctgatggcttacgcgctcgaccggggcgccgccgagttcctgatcggcctcggtggatccgccaccaacgatggcggcgcggggttgctcaccgccctgggcgtcgagttgctcgacggctcggatgcgccgctgccaccgggcggcggtgcgctggccgatctgcaccgcatcgacaccgcgggcctcgatccgcggctggcgggcgtccacatccagttggcctgcgacgtcaccgcacccctgctcgggcccgcgggcgccagcgccgtgttcggcccgcagaagggtgcgacacccgccgacgtcgcccggttggaggctgcgctggcgcggttcgccgcggtggccgacgccgcgcacgcggagacacccggtgcgggtgcggctggcgggctcggcttcgcgctgctcgaattcctcggcgccacaagccgtcccggtgtcgaggtggtggccgagacggtcgggctggaacaggcgctacgcggtgcggcgtgggtgttcaccggtgagggcggcgtcgacgcgcagaccctgatgggcaagacgccgttcggggtcgcgcaggtggccgcccgcaccgggaccagggtggtcatcttcgccggccgggtcggcgcggacgcgtcggtgcttctcgagcacggcgtagatgagatcgtcgggatcaccgcacccggaacacctctcgccgaggcgctgcggaccggaccgcattcgctggcgcgggccgtcgagaacttcctccgccggctctga

SEQ ID NO: 134595 - protein, 369 aa, Mycobacterium sp. KMS
MKIVLAPDSFKESMSAAQAIAAMRDGVRAALPDAECVGVPMADGGEGTVDAVVDALDGERVTVEVADALGRPVPATYGYVPGRRLAVIEMAAAAGLELIPADERDVLRASTFGVGQLMAYALDRGAAEFLIGLGGSATNDGGAGLLTALGVELLDGSDAPLPPGGGALADLHRIDTAGLDPRLAGVHIQLACDVTAPLLGPAGASAVFGPQKGATPADVARLEAALARFAAVADAAHAETPGAGAAGGLGFALLEFLGATSRPGVEVVAETVGLEQALRGAAWVFTGEGGVDAQTLMGKTPFGVAQVAARTGTRVVIFAGRVGADASVLLEHGVDEIVGITAPGTPLAEALRTGPHSLARAVENFLRRL

SEQ ID NO: 134596 - DNA, 1116 bp, Neisseria meningitidis FAM18
  CDS (1)..(1116): transl_table=11
atgaagattgtaattgcaccggattcgtttaaggaaagcttgacagctcaacaggtagctgaagcaataaaaagaggcttccaacaatcgatagcagatgtggaatgtctcctctgtcctgtcggtgatgggggagaaggcactgtagatgctatccgacattctcttgacctagaagaaaaatgtctccaagtgacaggaccttttggacaaaaagaagtcatgcgctattttcaaaaagaacaactagccctattcgaagttgctgatttggttggtcttggaaaaatcccgctagagaaacgaaatccattacaaatccaaactcgtggtattggagaattgattcgccacctcattagtcaagaaattaaagaaatctatattggcgttggcggtacggccagtaatgatggaggtattgggattgctgctggtttaggttatcaattttatgatgaggatggaaatgccttacccgcttgcggtcaatccttactaaacctagcttctgtttcaacagaaaatcgctataaaattcctgaagatgttcacattcgtattttagcagatgttgtgagtcccttatgtggacaccaaggtgcgacctatacgtttggcaagcaaaaagggttggattctactatgtttgaggccgtagatcaggcaatacaagatttttatgaaaaagtctcccctgcaacattaaaacttaaaggagcaggagctggtggaggcatcgctggtggtttgtgcgcctttgctcaggcaagtatcgtatctggaattgacacctgcctggacttgattgactttgataagaaagtgtcagatgttgacttggttatcgttggtgaaggaagactagatcgtcaaagtttagcagggaaagcgcctattggtgtagcaaaaagaacccctgtcggagttcctgttgtcgctatttgtggcagtctcgttgaagatttgccttccctgccatttgaaaatatccaagctgccttttctattttggagaaaagtgaacctttagaagatagtttgaaaaatgccagtctctatttggagcatacggcttctaatattggacacttattaaatatgcctaagatttag

SEQ ID NO: 134597 - protein, 371 aa, Neisseria meningitidis FAM18
MKIVIAPDSFKESLTAQQVAEAIKRGFQQSIADVECLLCPVGDGGEGTVDAIRHSLDLEEKCLQVTGPFGQKEVMRYFQKEQLALFEVADLVGLGKIPLEKRNPLQIQTRGIGELIRHLISQEIKEIYIGVGGTASNDGGIGIAAGLGYQFYDEDGNALPACGQSLLNLASVSTENRYKIPEDVHIRILADVVSPLCGHQGATYTFGKQKGLDSTMFEAVDQAIQDFYEKVSPATLKLKGAGAGGGIAGGLCAFAQASIVSGIDTCLDLIDFDKKVSDVDLVIVGEGRLDRQSLAGKAPIGVAKRTPVGVPVVAICGSLVEDLPSLPFENIQAAFSILEKSEPLEDSLKNASLYLEHTASNIGHLLNMPKI

SEQ ID NO: 134598 - DNA, 1143 bp, Haemophilus somnus 2336
  CDS (1)..(1143): transl_table=11
atgaaaattgtcattgcaccggattcttttaaagaaagtttaaccgcacttgaagtggctcaagctattgaaaatggtttcaaaaaaatctaccccaatgcagattatgtaaaagttcccatggcagatggaggagaaggcacagtccaatctcttgccgatgcactacaaggcaaactgatttctgtagaggttaccgcacctctaggtaataaaacgcaagctgaatttgccatatcgggtgatggaaaaatcgcaattattgaaatggcggcggcttccggtttacatttagtgccgatagaaaaacgcaatccttactacaccacaagctatggtacaggagaactaattaacgccgccttggatctaggggtgagccaaattattttgggtatcggtggcagtgcaaccaatgacggtggtgtcggtatgctacaagccttaggtatcaaattcaaagacgctcaaggaaaagaaatcggcttgggcggtctagctctgcaacaaatcgctcatatcgacactgcacatttagatcaacgtttgacacaagttcaatttaatgtagcttgcgacgtaaataatcctttatgtggtgaaaaaggtgcttctgctactttcggtccacaaaaaggagcaacaccggaaatggtgcaacaattggaccaagctctactgcattttagccgtattgtagaacgagattgcggaaaacggattgctgagcgtcccggatcgggtgctgcaggcggtatgggtggtggattgctattattgcctcaagtacaactcaaatccggtgtacagattgtcattgatacagtaaatttagcagaaattatcaaggatgccgatttggtcattaccggagaaggtagaatagattcacaaactattcacggtaaaacgcctattggggtagcaaaaactgccaaactggcaaataaacctgttatagccattacaggctgcttacgggaagattatgaagtagtctatgagcatggcattgatgcagtattccccattattcgtcaattagacagtttgcctgaaattttggctcaaggcagacaaaatctagaatctaccgctcaaaatatcgccagaatgcacttgctagtacaacgttctcattaa

SEQ ID NO: 134599 - protein, 380 aa, Haemophilus somnus 2336
MKIVIAPDSFKESLTALEVAQAIENGFKKIYPNADYVKVPMADGGEGTVQSLADALQGKLISVEVTAPLGNKTQAEFAISGDGKIAIIEMAAASGLHLVPIEKRNPYYTTSYGTGELINAALDLGVSQIILGIGGSATNDGGVGMLQALGIKFKDAQGKEIGLGGLALQQIAHIDTAHLDQRLTQVQFNVACDVNNPLCGEKGASATFGPQKGATPEMVQQLDQALLHFSRIVERDCGKRIAERPGSGAAGGMGGGLLLLPQVQLKSGVQIVIDTVNLAEIIKDADLVITGEGRIDSQTIHGKTPIGVAKTAKLANKPVIAITGCLREDYEVVYEHGIDAVFPIIRQLDSLPEILAQGRQNLESTAQNIARMHLLVQRSH

SEQ ID NO: 134600 - DNA, 1137 bp, Haemophilus influenzae R2866
  CDS (1)..(1137): transl_table=11
atgaaatttgtgattgcacctgattcttttaaagaaagtttgaccgcacttgaagtagctaccgccattgaaacaggattcaaacgtgtattccccgatgcggactatgtaaaattgccaatggcagatgggggcgaaggtacagttcaatcccttgtggatgccacgcaaggcaagctcattgaatgtgaagtcaccgcgcctttgggtgacaaagtgaaaagtttcttcggtttatcgggagatggaaaaaccgcgattatcgaaatggcagcagcttctggtttacatcttgttccgcctgaaaaacgcaatcccttgcttaccaccagttacggcacaggggagttgattaaactggcattagatttaggcgtagagagtttcattcttggcattggcggtagcgcaaccaacgatggtggtgtaggaatgttgcaagcactagggatgcaatgtttagattcgcaagataagcctatcggttttggtggagcagagctagcaaatattgtgaagattgacgttcaacaattagatccacgtttgcaacaagttcacattgaagtagcgtgcgatgtgaataatccgctctgtggtgaatgtggtgcatctgccatttttggaccacaaaaaggcgcaacgcctgaaatggtgaaacaacttgatgttgcactttcgcattttgctgaaattgccgaacgtgattgcggtaaacaaattcgtgatcaggctggcgcaggtgctgctggtggtatgggtggtggcttgctattattaccaagcgtacaactgaaagcaggcatacaaattgtgttagaccggttacatttaattgactatgtaaaagatgctgatgtagtgattacgggtgaagggcgaatagatgcacaaagtattatgggtaaaacgccaattggtgtggcacgtacggcaaaacagttcaataagccagtgatcgccatcgcagggtgtttgcgtgaagattatgatgtggtgtttgatcacggtattgatgcggtgttccctattattcaccaacttggcgatttatcggatattctcaaacaaggcgaacaaaatttaatttctaccgctcaaaatgtggcgagagtactggcatttaaatttcattaa

SEQ ID NO: 134601 - protein, 378 aa, Haemophilus influenzae R2866
MKFVIAPDSFKESLTALEVATAIETGFKRVFPDADYVKLPMADGGEGTVQSLVDATQGKLIECEVTAPLGDKVKSFFGLSGDGKTAIIEMAAASGLHLVPPEKRNPLLTTSYGTGELIKLALDLGVESFILGIGGSATNDGGVGMLQALGMQCLDSQDKPIGFGGAELANIVKIDVQQLDPRLQQVHIEVACDVNNPLCGECGASAIFGPQKGATPEMVKQLDVALSHFAEIAERDCGKQIRDQAGAGAAGGMGGGLLLLPSVQLKAGIQIVLDRLHLIDYVKDADVVITGEGRIDAQSIMGKTPIGVARTAKQFNKPVIAIAGCLREDYDVVFDHGIDAVFPIIHQLGDLSDILKQGEQNLISTAQNVARVLAFKFH

SEQ ID NO: 134602 - DNA, 1134 bp, Listeria monocytogenes str. 4b H7858
  CDS (1)..(1134): transl_table=11
atgaaaatcgtcatcgcacctgattcattcaaagagagcgccactgctgttgaagtagcaaatgctataaaaaaaggctggactaaagcacgtccagccgatcaaattagccttgcccctgtttctgacgggggtgagggttttcttactgttttaagtgagtcttccgaggtggaattatttcaagcagaagtaaccaacctaaatggtcacaaaataacggcctcctacggtattctcgctagccaagaaactgcgattatcgagtccgccaacacgattggattagatttaatcccagccgtagaccgtaatccagcttacgcgagctctaaaggcgtcggtgaacttattttggcggcactgaatcacaacgtcaaaaaaatcattatcggccttggtggaagtggcacaaacgatggcggcgctgggctaatccaagctttgggcgttgcactacttgataaaaacaaacagcctattccgcccggtggcattcatttgcaagaactagcctacattgatgccagcaaccttaatccaaagctgaaaaacattcaattccaaatagcctgcgacgtcacgaatccacttcttggagaaaacggcgctaccttcgttttcggtgctcaaaaaggcgcaactcccgaaatgctcgttcaactagagcgcgccatgcagaactacggagcaaaactcgatcaattttcatctcaaaaaatcactacaaaaaaaggagccggagccgctggtggtatcgctgccggactaatgactttcctaaatacagacgtgttaagcggttcagctctagttatggaactttctaatatgaaggataaaatgaaagatgcggatatcgttattgttggtgaaggacgaatggacaagcaatcgatgatggggaaaatccctgttcaaattgctcaagaagctaaaaaacaaggttgtttcgtcctagcaatcgtcggtagccttgcactcgaaaacaatatcgcccaacaacacggtatcgatgcgtttttcccaaacatcccagaaataacagatttacccactcttttcgaaaatacaacaaagaacctcgaacgcacggcggaaaacattgccaaactaactttaattggcaaataa

SEQ ID NO: 134603 - protein, 377 aa, Listeria monocytogenes str. 4b H7858
MKIVIAPDSFKESATAVEVANAIKKGWTKARPADQISLAPVSDGGEGFLTVLSESSEVELFQAEVTNLNGHKITASYGILASQETAIIESANTIGLDLIPAVDRNPAYASSKGVGELILAALNHNVKKIIIGLGGSGTNDGGAGLIQALGVALLDKNKQPIPPGGIHLQELAYIDASNLNPKLKNIQFQIACDVTNPLLGENGATFVFGAQKGATPEMLVQLERAMQNYGAKLDQFSSQKITTKKGAGAAGGIAAGLMTFLNTDVLSGSALVMELSNMKDKMKDADIVIVGEGRMDKQSMMGKIPVQIAQEAKKQGCFVLAIVGSLALENNIAQQHGIDAFFPNIPEITDLPTLFENTTKNLERTAENIAKLTLIGK

SEQ ID NO: 134604 - DNA, 1134 bp, Listeria monocytogenes str. 1/2a F6854
  CDS (1)..(1134): transl_table=11
atgaaaatcgtcatcgcacctgattcattcaaagaaagcgccactgcggtggaagtagcaactgccattaaaaaaggctggactaaagctcgtccagccgatcaaataagccttgcccctgtttctgacgggggtgagggttttcttactgttttaagtgagtcttccgaggtggaattgttccaagcagaagtaaccaacttaaacggtcacaaaataatggcctcctacggtattcacgcccgccaagaaactgcgattatcgagtccgccaacacgattggattagatttaatcccagcggcagaccgtaatccagcccatgcaagctctgctggcgtcggtgaactaattttggcatcactgaatcacaacgtcaaaaaaatcattatcgggcttggtggaagtggtacaaacgatggcggcgctgggctaatccaagctttgggcgttgcactacttgataaaaacaaacagcctattccgcccggtggcattcatttgcaagaactagcctacattgatgccagcaaccttaatccaaagttgaaaaacattcaattccaaatagcctgcgacgtcacgaatccacttcttggagaaaacggcgctaccttcgttttcggtgctcaaaaaggcgcaactcccgaaatgctcgttcaactagagtacgccatgcagaactacggggcaaaaatcgatcaattttcatctcaaaaaatcactacaaaaaaaggagccggagccgccggtggtatcgctgccggactaatgactttcctaaatgcagacgtattaagcggttcagctcttgttatggaactttctaatatgaaggataaaatgaaagatgcggatatcgtcattgttggcgaaggacgaatggacaagcaatcgatgatggggaaaattcctgttcaaatcgctcaagaagctaaaaaacaaggttgtttcgttctggctattgtcggcagccttgcactcgaaaacaacctagcccaacagcacggcatcgatgcttttttcccaaacatccctgaaataacagatttacccactctttttgaaaatacgacgaaaaacctcgaacgtacggcggaaaacatcgccaaactaactttaattggcaaataa

SEQ ID NO: 134605 - protein, 377 aa, Listeria monocytogenes str. 1/2a F6854
MKIVIAPDSFKESATAVEVATAIKKGWTKARPADQISLAPVSDGGEGFLTVLSESSEVELFQAEVTNLNGHKIMASYGIHARQETAIIESANTIGLDLIPAADRNPAHASSAGVGELILASLNHNVKKIIIGLGGSGTNDGGAGLIQALGVALLDKNKQPIPPGGIHLQELAYIDASNLNPKLKNIQFQIACDVTNPLLGENGATFVFGAQKGATPEMLVQLEYAMQNYGAKIDQFSSQKITTKKGAGAAGGIAAGLMTFLNADVLSGSALVMELSNMKDKMKDADIVIVGEGRMDKQSMMGKIPVQIAQEAKKQGCFVLAIVGSLALENNLAQQHGIDAFFPNIPEITDLPTLFENTTKNLERTAENIAKLTLIGK

SEQ ID NO: 134606 - DNA, 1122 bp, Listeria monocytogenes str. 1/2a F6854
  CDS (1)..(1122): transl_table=11
atgaaaattgtcattgcaccggattcattcaaagaaagtttgacggcgcatgaggtggcagagtatattaaagagggctttcaagaaatttatccggatgctgattatcatttactccctgtcagtgatggcggggaaggtacgctagagattttaagtaaagctttagaggcgaaaaaaatgaaaatcgatgtgtccggcccttttagtgaaccagtttcagcgcaagttgctttcacggaagggaacaaaaaagctttaatagaaatggccgaggtttgtggtttgcacttagttccgacgactagacgcgatccacttcaagtgagtactaaaggagtgggcgagctaattttgcacgccatgaaaaaaggtgcgaccgagattattattgggattggtggaagcgcttcaaacgatggcggaattggcatggctagtgcgcttggttatgaattcctagatgcagaaaataatatcgtcaacccgattggcgtaaatttagctgatatagcaaccattcgttccgaaaaggtccccgctgaactagaaaacatcacagtaaatattgtcacggatgtcgaaaatctgctttgtggagaagctggcgcatcgtatgtgtttggtccgcaaaaagggctagccacaacagatttagctacggcagatgaagcaatgcgccatttttatcaattagcaaatcctgccatggttacaatgccgcgagcaggtgccgggggtgggattggtgctggacttgtgacgtttgcaaaagctaaccttttatcgggaattgattttgttattgaagcacttcaaatcaaaaccatttgtgaggatgcagatttggtcattgttggcgaagggaaaatggacgggcaaaccgcacaagggaaagctcctgtgggtgttgcgaaagtagtgccgaaagaaacaccagtttttgcaatttgtggaagtgttggtgaaggactagaagcagtatatgaagtcggaatcagcgcagtatttccatccattgccaaaccagcaactttagaaaatatactgaaagaaacaccaaataatttaagaagaactgcgcgaaatgttgcggcagtttggaaaggacgagtagaatga

SEQ ID NO: 134607 - protein, 373 aa, Listeria monocytogenes str. 1/2a F6854
MKIVIAPDSFKESLTAHEVAEYIKEGFQEIYPDADYHLLPVSDGGEGTLEILSKALEAKKMKIDVSGPFSEPVSAQVAFTEGNKKALIEMAEVCGLHLVPTTRRDPLQVSTKGVGELILHAMKKGATEIIIGIGGSASNDGGIGMASALGYEFLDAENNIVNPIGVNLADIATIRSEKVPAELENITVNIVTDVENLLCGEAGASYVFGPQKGLATTDLATADEAMRHFYQLANPAMVTMPRAGAGGGIGAGLVTFAKANLLSGIDFVIEALQIKTICEDADLVIVGEGKMDGQTAQGKAPVGVAKVVPKETPVFAICGSVGEGLEAVYEVGISAVFPSIAKPATLENILKETPNNLRRTARNVAAVWKGRVE

SEQ ID NO: 134608 - DNA, 1185 bp, Bacillus cereus G9241
  CDS (1)..(1185): transl_table=11
atgcgtattttagttgtaccatcaggatttaaagaaagtttaggggcgaaggaagctgctgatgtaatgaaagaagggattttaaaagttatgccacttgctactgtagagactttaccaatggttgatggcggggaagggtttacagagacaattataaatattactggtggaaaaatgtataaagtacaagtaatgggacctgttggagatgagatacaatcttattttggtgtttttgaaacgaggaatggtgagcgtacagctgttattgaaatggccgctgcggctgggctacgccttgtaccgagagatttacgtgatccaagaaaaacgactattcatggtgttggacagttaatagaattagctttaaacaaaggggtagatcgtatattaataggatgtggtgattcaggtacgtctgatggaggtgctggtatggctgaagcgttaggtgtaaagtttttaaatgaagatgaaaaggaaatacaaattcaaggtggtacctctttattacaagtttcaaaaatagatacgtcacaagtagatcctagactaaggcatgttcaaatcgatgttgcttgtaattggtttaatcaattatgtggcgaacagggagtagctagagtgttcggtccgcaaaaaggtgctaatgaagcacaagtaatagaactagaaaaagcattggagcgctatgcttctattataaaaaaagatataggtatagatgtacatcatacaccaggaagtggtgcatctggcggtcttggtgctggactggaagctttaattggggcaacgcttcatccgagatacgatattattatgaagtatatggatttaaataaactattgctaaagtgtgatcttgtatttaccgcggaaggaagtatagattttcaaacaccacgagggaaaattccggctgaggtggctaaatgtgcaaaaagatatggattaccagtaatagcgttagtagggacagtcggtaaaggagcacgtattaattacgattacggaattgatgcatatacaagcatattaccaatgccatcttcattagaaaatgcattttctaatgcggagaaatggcttcgtgattgtacagagagtacaatgcgtacagttttagttggctatcaaatcgcttctcgtttgaataaaagtgggtacgtatcatga

SEQ ID NO: 134609 - protein, 394 aa, Bacillus cereus G9241
MRILVVPSGFKESLGAKEAADVMKEGILKVMPLATVETLPMVDGGEGFTETIINITGGKMYKVQVMGPVGDEIQSYFGVFETRNGERTAVIEMAAAAGLRLVPRDLRDPRKTTIHGVGQLIELALNKGVDRILIGCGDSGTSDGGAGMAEALGVKFLNEDEKEIQIQGGTSLLQVSKIDTSQVDPRLRHVQIDVACNWFNQLCGEQGVARVFGPQKGANEAQVIELEKALERYASIIKKDIGIDVHHTPGSGASGGLGAGLEALIGATLHPRYDIIMKYMDLNKLLLKCDLVFTAEGSIDFQTPRGKIPAEVAKCAKRYGLPVIALVGTVGKGARINYDYGIDAYTSILPMPSSLENAFSNAEKWLRDCTESTMRTVLVGYQIASRLNKSGYVS

SEQ ID NO: 134610 - DNA, 1146 bp, Bacillus cereus G9241
  CDS (1)..(1146): transl_table=11
atgaaagttgttattgcatctgattcatataaagaaagcttaaaagctatagaagtatgtgaggccattgaaagaggttttggagcaattttccctaaagcagagtatgtaaaaataccaattggagatggaggtgaaggaacggttgattcccttgttgatgccacaagcgggaggattatatcatttcatgtgacaggaccgcttagagagagtatacaagctttttacggtatgtctaaagataaaaagacagcgtttattgaaatggcagcagcatcaggcttacaacatgttccggctaaaaaacgaaacccacttattacgacgacgaaaggaacaggagaacttatactacatgcgctagacgaaggagctgagcatatcattttaggacttggaggaagtgctacaaatgatggaggagcgggtatgttgtcagctttaggagtcaagttcataaatggaaaaggagaagtaatagagccatctggtggaacgttacattcgattgtctctattgatttttcacaaatggattcacgtttaaagcatataaagatagaagcagcatgtgatgtagataatccgttagttggaataagaggagcatctttggtatttgggcgacaaaagggtgcggatgaagagatgatgaaagagctggatgagaatttaaagcattatgcgcatatccttaaacaatacttatcttgcgacgtatctaaaatacctggtgcaggagctgcaggaggtatgggagcagctgttattgcagtgctaaagggaaacttgcggagaggaattgaaattgtattagattatacaaattttgataagcatatagaaggtgcagatttaattataactggcgaagggagaatagatgaacaaacagcatatggaaaggccccagtaggtgttgcggagcgtgcaaagcattttcatattcctgtcattgctatcgggggatcggtatctccgaattattcggctgttcatgaaaaaggaattgatgcagtatttagtattacaacaagtccgatgacgttagaggaggcatataaagtagcagaagagaatatcgaaatgacagcaaagaatattgcagcagtgtggaaaatagcatcaaaaaaacacttctaa

SEQ ID NO: 134611 - protein, 381 aa, Bacillus cereus G9241
MKVVIASDSYKESLKAIEVCEAIERGFGAIFPKAEYVKIPIGDGGEGTVDSLVDATSGRIISFHVTGPLRESIQAFYGMSKDKKTAFIEMAAASGLQHVPAKKRNPLITTTKGTGELILHALDEGAEHIILGLGGSATNDGGAGMLSALGVKFINGKGEVIEPSGGTLHSIVSIDFSQMDSRLKHIKIEAACDVDNPLVGIRGASLVFGRQKGADEEMMKELDENLKHYAHILKQYLSCDVSKIPGAGAAGGMGAAVIAVLKGNLRRGIEIVLDYTNFDKHIEGADLIITGEGRIDEQTAYGKAPVGVAERAKHFHIPVIAIGGSVSPNYSAVHEKGIDAVFSITTSPMTLEEAYKVAEENIEMTAKNIAAVWKIASKKHF

SEQ ID NO: 134612 - DNA, 1194 bp, Kineococcus radiotolerans SRS30216
  CDS (1)..(1194): transl_table=11
atgtcgtcccccttccacgtcgtcgtggcgccggacaagttcaaggggtcgctgagcgcggccgaggtcgcgcgcacgatcgccgacggcttccgcgagggcttcctcgccgccctcccggcgcccaccggcccgggcggcccggtgcccgcggtggagtcgaccgagatccccgtcgccgacgggggcgaggggacggtcgaggccgccctgcgttcggccggcttcgaggccgtcacgacccgggtggcgggaccgacgggggacctcgtggaggccacctccgcccggaacggcgacgtcgccctggtcgagatggcccaggcctcggggctggaccgcctgcccggcggcacccccgcccccctgacggccggcacccgcggcaccggccagctcgtccgcgccgccctcgacgccggggcccgcgaggtcgtcctcgccgtgggcggcagcgccggcaccgacggcggggccgggatcctcgccgccctcggggcgcgcctgctcgacgcccggggccgggacctgcccgacggcggggcggcactgctggacctcgaccggatcgacctgtccggcctcgacccgcgcgcccgggcggcgcgctggacgctcgcggccgacgtcgacaaccccctgctcggcccccggggcgccgcggcggtcttcggcccccagaagggcgcctcccccgacgacgtggccctgctcgaccgcgccctgacccgcttcgccgacgtcctggccgccacgaccggtcacgacgcgcgcgacacccccggggccggggcggccggcgggacggggctggtcgcgctcgggctcttcggcgcggcgcgccggcccggtgtcgaggtcgtcctggacctcgtgggctgggagcggcgggccaccggcgccgacctggtcatcaccggggagggcagcttcgacgagcagtcgctcggcggcaagacccccgtcggggtggcggccgcggcggcgcgccgcggggtgcccgtcgtggtgctcagcgggcggcggcagctgcccgaggagcgctggcgggcggccggcttcgccgacgcccggtcgctgaccgacctcgaacccgatccgcgggtctgcgtgcgcgaggccggccccctcctgcaccggctggcgcgggacctcggcgccgagcacggggcccgggtcgcgggcgggcgctga

SEQ ID NO: 134613 - protein, 397 aa, Kineococcus radiotolerans SRS30216
MSSPFHVVVAPDKFKGSLSAAEVARTIADGFREGFLAALPAPTGPGGPVPAVESTEIPVADGGEGTVEAALRSAGFEAVTTRVAGPTGDLVEATSARNGDVALVEMAQASGLDRLPGGTPAPLTAGTRGTGQLVRAALDAGAREVVLAVGGSAGTDGGAGILAALGARLLDARGRDLPDGGAALLDLDRIDLSGLDPRARAARWTLAADVDNPLLGPRGAAAVFGPQKGASPDDVALLDRALTRFADVLAATTGHDARDTPGAGAAGGTGLVALGLFGAARRPGVEVVLDLVGWERRATGADLVITGEGSFDEQSLGGKTPVGVAAAAARRGVPVVVLSGRRQLPEERWRAAGFADARSLTDLEPDPRVCVREAGPLLHRLARDLGAEHGARVAGGR

SEQ ID NO: 134614 - DNA, 1128 bp, Streptococcus suis 89/1591
  CDS (1)..(1128): transl_table=11
atgcatattctcattgctccggattcatttaaagagtctctttcagctacaaaggttgctgaagcgattaaaaaaggattttctaaggtttacccacaagcagggtatgacttaattcccctaggagatggtggcgaagggacagttgagagtctaatgcaggccttatccttggatgggacccagacttgggtgacaggtccatttggagataaaattaaggtttcctatgcggttaaagatgatcttgcggtttttgaaatggctgagattgtagggctggcaagcatcccgcatgaaagaaggagtcctctctttattaagacacaaggggttggggagctgattgtggagctcgttcaaaatggtgtcaaacgcatatttataggagtaggtggctctgccagtcatgatggtggtatcggaatggcggcaggtttaggagtgaaattttataatcgagagggaaaagaagtagaggcaattggagctcatatcggggagattgtcagcttttccacagaggatatgttggtagatctatctcaggtcaggattgatttggtaacggatgtggagaatccgctttgcggaccagcgggtgccacatttgtttttgcaggtcagaaaggtcttgcccctgctgaatttgaactagtagacaagaaaatggagtccttttataaattagttaatccaatgctactcgatttggcaggagcgggtgctggaggaggtatggcagcaggtttagtccaatttgctggtgctcgcattcaaaaaggcatcgactttgtcttggatcagttggactttgctcatcgcgtcaccaaagcggatctggttgtggtcggagaagggcggatggatgcccaaagcttatcagggaagactccgataggagtagctagacggacgccgacggggattcccatcattgcaatttgtggtagcctcaaagacgatcttcccgagtttccttttgaaaatatctgtgccgcttttccgataattgcaagcgttgaaagtttggaggacacgcttcaaaaagcagaaaaaaacctggtccgcacggcagagcaggtggcaagaattcttcagttaggaggtcaacaaagatggaattag

SEQ ID NO: 134615 - protein, 375 aa, Streptococcus suis 89/1591
MHILIAPDSFKESLSATKVAEAIKKGFSKVYPQAGYDLIPLGDGGEGTVESLMQALSLDGTQTWVTGPFGDKIKVSYAVKDDLAVFEMAEIVGLASIPHERRSPLFIKTQGVGELIVELVQNGVKRIFIGVGGSASHDGGIGMAAGLGVKFYNREGKEVEAIGAHIGEIVSFSTEDMLVDLSQVRIDLVTDVENPLCGPAGATFVFAGQKGLAPAEFELVDKKMESFYKLVNPMLLDLAGAGAGGGMAAGLVQFAGARIQKGIDFVLDQLDFAHRVTKADLVVVGEGRMDAQSLSGKTPIGVARRTPTGIPIIAICGSLKDDLPEFPFENICAAFPIIASVESLEDTLQKAEKNLVRTAEQVARILQLGGQQRWN

SEQ ID NO: 134616 - DNA, 1137 bp, Photobacterium sp. SKA34
  CDS (1)..(1137): transl_table=11
atgaaaattgttattgctcctgattcttacaaagaaagcctgacggcaatggaagtggctaccgcgattgaaaacggttttcgccaagtattaccaaacgcagaatacattaaacttcccatggctgatggcggtgaaggcacagtgcaatcaatggtagatgctagcagtggtcgcattattgagtgcacagtaacagggcctttaggcgaacaggtaagtagctttttcggtttaatgggtgataacaaaaccgccattatcgaaatggcggcggcatctggtttatatcttgttagctctgagcaacgcaacccaatgatgaccaccagctttggtactggtgaattaattatcgccgcattagacaaaggtgtagagcacatcattattggtattggcgggagcgcaactaacgacggtggtgccggtatggcacaagcgttgggtgtacgtctactggatgaaaacaacaaccacatttgcttcggcggtggcgcattagatcgcttgcaccatattgatatcagtaacatcgaccctcgccttactaaggtaaaattagacgttgcgtgtgatgtcgataatccactgtgtggcgagaaaggcgcatcacgaatcttcggccctcagaaaggcgcaactcctgagatggttgatcagcttgataacaaccttgcctattatgccaagatcataaaacgtgatttaggaatagatataaaaaatagggctggtgcgggtgctgctggcggtatgggagcagctttgcttggactctttaacgcacagttacgttcaggaatagaaatagtcatggatgcggtcaatttagctgacgtattaaaagacgctgatttagtgattactggtgaaggtcgcattgatagccaaactattcatggtaaaactccaattggggtcgcacgcacagcaaaacgtttcaacaaaattgtcataggtattgctgggtgtctatcttacgactgtgatgtggtgtatgaccacggtattgatgccgtattcagtgtcgtaccacgctcggttagtttggctgaagcgctagtagaagctgcaattaacgttgagcttacagcacgtaatgtggctgcgatttacgcaataactcgtgaataa

SEQ ID NO: 134617 - protein, 378 aa, Photobacterium sp. SKA34
MKIVIAPDSYKESLTAMEVATAIENGFRQVLPNAEYIKLPMADGGEGTVQSMVDASSGRIIECTVTGPLGEQVSSFFGLMGDNKTAIIEMAAASGLYLVSSEQRNPMMTTSFGTGELIIAALDKGVEHIIIGIGGSATNDGGAGMAQALGVRLLDENNNHICFGGGALDRLHHIDISNIDPRLTKVKLDVACDVDNPLCGEKGASRIFGPQKGATPEMVDQLDNNLAYYAKIIKRDLGIDIKNRAGAGAAGGMGAALLGLFNAQLRSGIEIVMDAVNLADVLKDADLVITGEGRIDSQTIHGKTPIGVARTAKRFNKIVIGIAGCLSYDCDVVYDHGIDAVFSVVPRSVSLAEALVEAAINVELTARNVAAIYAITRE

SEQ ID NO: 134618 - DNA, 1128 bp, Streptococcus pneumoniae TIGR4
  CDS (1)..(1128): transl_table=11
atgagggaaaatatgaagattgtaattgcaccggattcgtttaaggaaagcttgacagctcaacaggtagctgaagcaataaaaagaggcttccaacaatcgatagcagatgtagaatgtctcctctgccctgttggtgatgggggagaaggtactgtagatgctatccgacattctcttgacctaaaagaaaaatggatccaagtgacagacccttttggacaaaaagaagccatgcgctattttcaaaaaggggaactggcactatttgaagtagctgacttggttggtcttggaaaaattccgctagagaaacgaaatccacttcaaatccaaacttgtggtattggagagttgattcttcatctcatctctaaagggattaaagatatttatatcggtgttggtggcacggccagtaatgatggaggactggggattgctgctggtttaggttatcaattttatgatagggatggaaatgtcttgcctgcttccggtcaatccttattaaacttagcttctgtttcaacagaaaattgctataaaattcctgaaggtgttcaaattcatattttagcagatgtcgtgagtcccttatgtggtcatcaaggtgcgacttacacttttggcaatcaaaaaggtctacatccgactatgtttgcagtcgtagatcaggcgatccaagatttttatgaaaaattctcacctgcaacattagaaattaaaggagcaggagcaggtggaggccttgctggtggtttgtgtgcctttgctcaggcaagtatcgtgtctggaattgatacctgcttggacttaatcaactttgataagaaagtttcagatgctgacttggttgttgttggagaaggaagacttgatagtcaaagctttgctgggaaagcgcctataggtgttgcaaaaagaacccctgttggagttcctgttattgctatttgcggtagtcttgctgaagatttacctcccctaccatttgaaaatatccaagctgtcttttctattttggagaaaagtgaacctttagaagatagtttgaaaaatgccagtttctatctggagcgcacggctgccaatattgggcacttattaaatatgtgcaagatttag

SEQ ID NO: 134619 - protein, 375 aa, Streptococcus pneumoniae TIGR4
MRENMKIVIAPDSFKESLTAQQVAEAIKRGFQQSIADVECLLCPVGDGGEGTVDAIRHSLDLKEKWIQVTDPFGQKEAMRYFQKGELALFEVADLVGLGKIPLEKRNPLQIQTCGIGELILHLISKGIKDIYIGVGGTASNDGGLGIAAGLGYQFYDRDGNVLPASGQSLLNLASVSTENCYKIPEGVQIHILADVVSPLCGHQGATYTFGNQKGLHPTMFAVVDQAIQDFYEKFSPATLEIKGAGAGGGLAGGLCAFAQASIVSGIDTCLDLINFDKKVSDADLVVVGEGRLDSQSFAGKAPIGVAKRTPVGVPVIAICGSLAEDLPPLPFENIQAVFSILEKSEPLEDSLKNASFYLERTAANIGHLLNMCKI

SEQ ID NO: 134620 - DNA, 1137 bp, Vibrio sp. Ex25
  CDS (1)..(1137): transl_table=11
atgaaagtggtaattgcacctgattcatttaaagaaagcttaaccgccaaacaagtgagcgaggcgatcaaaacgggtcttgctcgtgtatggcatgatgccgagtttgttacagttccggtcgcagacggtggcgaaggcacggttcaatctttgattgatgcaactcaaggcgaacaagtcttcacaacggtgaccgcgccattagggaatgatgttgaagcgttttatggcatcctcggcgacggcgaaaccgcggttattgaaatggcggaggccagtgggctgcaccttgtgcagagtgatgctcgcgacccaaaactgaccagcagcattggtaccggacagctgatcaaacacgcgctagacagaggtattcaacgcttaatcattggtttgggtggcagcgctaccaatgatggtggcgtgggcatgttgaccgcgttgggggtggcgtttcttgatgaatctggtcatgcaattaccccaaatggagacgggttagcggcgcttgcgtccatcgatatttctggtcttgaccctcgtttagcaacttgcgaagtgttggtagcgtgcgatgttgataacccactctgtggtgacaaaggcgcgtcggctatctttggcccacaaaagggagcgacggcgtcagacgtcactctgctcgataacgcattgcgcaagtttggcgagttgacggaacaagcgacgggtaagcacgtactgactcgtgaaggggcgggtgctgctggtggtatgggagcggccttgcttgggtacacgccagcacgtttgcaaccgggaattgagattgtgcttgaaacggtcaaacttgctcagcatgttgcggatgcggatatcgtatttacaggcgagggtcgaatcgatcatcaaaccgcacatggcaaaacgccgatgggcgttgctcaggtggctaagcagtgtaatttaccagtcattgcattagcaggctgtgtgggcgacaactatcaggcggtttatgagtgcggcattgatgcggtgtttgcttgtgtaccaagggcgatgagcttacctgaggccatgaaagaagccgacgtcaacgttgccaatttagccgaaaacgtcgcgagaatgtggcaaattcagtcgcactga

SEQ ID NO: 134621 - protein, 378 aa, Vibrio sp. Ex25
MKVVIAPDSFKESLTAKQVSEAIKTGLARVWHDAEFVTVPVADGGEGTVQSLIDATQGEQVFTTVTAPLGNDVEAFYGILGDGETAVIEMAEASGLHLVQSDARDPKLTSSIGTGQLIKHALDRGIQRLIIGLGGSATNDGGVGMLTALGVAFLDESGHAITPNGDGLAALASIDISGLDPRLATCEVLVACDVDNPLCGDKGASAIFGPQKGATASDVTLLDNALRKFGELTEQATGKHVLTREGAGAAGGMGAALLGYTPARLQPGIEIVLETVKLAQHVADADIVFTGEGRIDHQTAHGKTPMGVAQVAKQCNLPVIALAGCVGDNYQAVYECGIDAVFACVPRAMSLPEAMKEADVNVANLAENVARMWQIQSH

SEQ ID NO: 134622 - DNA, 1146 bp, Pseudomonas putida GB-1
  CDS (1)..(1146): transl_table=11
atgaagatcgtcattgcccccgactcgttcaaggacagcctcgacgctgcaggtgtcgcccgcgccatcgctgcgggccttggccaagtgtggccggacgctgaacgggtcgagtgcccgatggccgacggcggcgaaggcaccatggaggcgatccttgctgccagccatggcgaacttcgccgtcaggccgtgcgcgggccactggggcactgcgtcgaggccggttggggctggttgccacaaagtcgcacggcgatcatcgagatggcccaggccagtggcctgcaattggtgccaaccggccagcgcgatgcatgccgcagcagcacctggggcaccggcgagctgatcgcagcggccctggccgctggcgcgcagcgggtggtgctggccatcggcggcagcgccaccaatgacgccggcagtggcatgttacgcgcgcttggcctgcgcctgctggataccgacggccatgcgctggaggagggcggcctggccctggccaagttggcacgtatcgatgccagcgacctcgatccgcgcttggccgaggtgcaatttgaagtggccgcagacgtcgacaacccgctgtgcggcgtcaacggggcatcggcgatcttcggcccgcagaagggtgccagcgcgcagcaggtgcaggcgctggacctggcactgggacattttgccgaccattgtgcacggctgctgggggaagatgtacgtgactatccgggttgcggcgccgcaggtggcatgggtttcgccgcgcgggccttcatgggcgcgcagttccgcccaggcgtggaggtggtggccgagctggccggcctcgatgcgctggtacagggcgcggacctggtggtaaccggcgaaggccgtttcgatgcgcagacgctgcgcggcaaaacccctatgggggtggctcgagtggccaagcgccatggagtgccggtggtggtactggccgggaccttgggtgagggctatcagcagttgtatgcccatggggtggatgctgcatttgccctggccagcgggccgatgagcctggaacaggcgtgtgccaatgcggctgaattgttgcaggctcgggcttgcgacattgggcggctgtggcgtagcgcgacccaaggccacgcctag

SEQ ID NO: 134623 - protein, 381 aa, Pseudomonas putida GB-1
MKIVIAPDSFKDSLDAAGVARAIAAGLGQVWPDAERVECPMADGGEGTMEAILAASHGELRRQAVRGPLGHCVEAGWGWLPQSRTAIIEMAQASGLQLVPTGQRDACRSSTWGTGELIAAALAAGAQRVVLAIGGSATNDAGSGMLRALGLRLLDTDGHALEEGGLALAKLARIDASDLDPRLAEVQFEVAADVDNPLCGVNGASAIFGPQKGASAQQVQALDLALGHFADHCARLLGEDVRDYPGCGAAGGMGFAARAFMGAQFRPGVEVVAELAGLDALVQGADLVVTGEGRFDAQTLRGKTPMGVARVAKRHGVPVVVLAGTLGEGYQQLYAHGVDAAFALASGPMSLEQACANAAELLQARACDIGRLWRSATQGHA

SEQ ID NO: 134624 - DNA, 1134 bp, Marinobacter sp. ELB17
  CDS (1)..(1134): transl_table=11
atgcgtgtactcattgcccctgattcgttcaaagagtgtctgacggcgaaagccgtcgctgacgcgatcgccgttggttggttgcgtggtgctccggctgaccaggtgattaaaatccccctggcagatggcggtgaaggcacaacagccactctcgtgggggctatgcacggcaagttgcaccagacacgggtaagcggtccttccggctacccggtcaatgccagttacgggctgatagataatggcaaaaccgccattgttgaagttgctgaggcaagcggcctgcactgtgtggccgagcctgaccgtaatgcgatgtcagcgtccagttatggcaccggtcagctcatcatggctgctttgaaacaccggccgaagacccttatcgtttgcttgggtggcagtgccaccaccgatggtggcgcgggtttgctgcaagctatgggcgcacaattattggacagtaaaggccgatccatacctcccggtggagagggtttaaaatacatcagtcactttgacattgccgacgcgaaagcagagctggcaggtatagacgttgtggtcgcatgcgatgtgacgaatcccctactcggcaacttgggcgccgcagcagtgtttgggccacaaaaaggtgcttcgccagacgacgtcaaagtgctcgacgccaaccttggtcactttgcccagtgtgtggcgctaaatggttacgacataagcagctttgcaggaagtggcgcagcaggcggcattgggggaacggtcgctgggattcttggtgggcttttaaaacccggtatcgaattggtaatggcggccgtgggtatggacgcacagatgaaggtagccgacttggtgattacggctgaaggggcgattgacggccaaagtgcttctggcaaaacgccgacaggcgttgccaagctggcacaacgctatcaggtacctgttattggccttgccggcatgttggggggcaaaaatatgacggccattcatgaggcgggcattacatcggttttctcgattgcccctggacccatcagtaaaagcgacgctatcgcacatgcatcgcactatcttgaaagcaccagcgagcagctggctcggcttgtttcaaggctgaaataa

SEQ ID NO: 134625 - protein, 377 aa, Marinobacter sp. ELB17
MRVLIAPDSFKECLTAKAVADAIAVGWLRGAPADQVIKIPLADGGEGTTATLVGAMHGKLHQTRVSGPSGYPVNASYGLIDNGKTAIVEVAEASGLHCVAEPDRNAMSASSYGTGQLIMAALKHRPKTLIVCLGGSATTDGGAGLLQAMGAQLLDSKGRSIPPGGEGLKYISHFDIADAKAELAGIDVVVACDVTNPLLGNLGAAAVFGPQKGASPDDVKVLDANLGHFAQCVALNGYDISSFAGSGAAGGIGGTVAGILGGLLKPGIELVMAAVGMDAQMKVADLVITAEGAIDGQSASGKTPTGVAKLAQRYQVPVIGLAGMLGGKNMTAIHEAGITSVFSIAPGPISKSDAIAHASHYLESTSEQLARLVSRLK

SEQ ID NO: 134626 - DNA, 1143 bp, Pasteurella haemolytica
  CDS (1)..(1143): transl_table=11
atgaaaattgtgattgcaccggattcatttaaagagagtttgaccgcattagaagtggctcaagcaattcaacagggttttgcccgtgttttccctgaggcggagtatcagctcgtaccgatggcagacggtggcgaaggctcggtacagtcgctggttgatgccactcacggcagtttgcaaaaaatcagcgtaattgcaccgcttgcaaatgaggtggagggcttttttggcttgtcgggggatcaaaaaaccgcctttattgaaatggcggcggcaagtggcttgcatttagtgccaatggagcaacgaaatccgctggttaccaccagctacggcacggggcagttaattaaagccgccttagatttaggggtggaaaaaatcattctcggcattggcggcagtgcgactaacgatggcggtgtcggaatgctacaagccttaggagcgaaatttctaaatgccgaacagcgggaaatcggctttggtggcgaggcattaagccaaattcagcagattgatttaagcggtttggattcacgcttaaagcaagtggaatttgaggttgcttgcgatgtcgataatccgctgtgtggcgagcgaggggcttcggcaatttttgggccacagaaaggagctacaccggaaatggttaaaatgctcgaccacgccctgttgcattttgccgaaaccgtaaaatcccaattaggcattgagattgccgagaaagccggtgccggtgcagccggtggaatgggcggtggtttactgctactgcctaacgtaacattacgttccggcgtgcaaattattcttgaggcaaccgatcttgctgagaaacttgccgatgcggatttggtggtgacaggggaagggcgaatggacgctcaatctatcgccggtaaaaccccgattggggtggcgaaagtcgctaagcagtttggcaagccggtgattgcgatagttggctcattgaaagaagattaccctgtggtgtaccaacacggcattgatgcggtatttccgattattcgacaggtcagcaatttagaagcggtgttaaaatcaggcaaagagaacctgatttcaactgccgaaaatgtagcgagattgtggaaaatatcggccttgcaagaatag

SEQ ID NO: 134627 - protein, 380 aa, Pasteurella haemolytica
MKIVIAPDSFKESLTALEVAQAIQQGFARVFPEAEYQLVPMADGGEGSVQSLVDATHGSLQKISVIAPLANEVEGFFGLSGDQKTAFIEMAAASGLHLVPMEQRNPLVTTSYGTGQLIKAALDLGVEKIILGIGGSATNDGGVGMLQALGAKFLNAEQREIGFGGEALSQIQQIDLSGLDSRLKQVEFEVACDVDNPLCGERGASAIFGPQKGATPEMVKMLDHALLHFAETVKSQLGIEIAEKAGAGAAGGMGGGLLLLPNVTLRSGVQIILEATDLAEKLADADLVVTGEGRMDAQSIAGKTPIGVAKVAKQFGKPVIAIVGSLKEDYPVVYQHGIDAVFPIIRQVSNLEAVLKSGKENLISTAENVARLWKISALQE

SEQ ID NO: 134628 - DNA, 1143 bp, Escherichia coli
  CDS (1)..(1143): transl_table=11
atgaagatagttatctcccccgactcctttaaagaatgccttcctgcatggaaagtcgccgaagcgctggcaatcggctggcgcaaggtcctgcctggcagccaactggtgtgtttgcccgtggctgatggcggcgaaggcacgctcgaaacactcattcatgcgactgacggtacgttttacactaaaaaagtcaccggaccgcttggcgaatcaatacatgcgcaatacggtattttaggcaaccaaaccaccgcagtgatagaactggcacaagcttcagggctggaactggtttctcctgtcctgcgttctcccctttatacgacgtcgtttggtactggcgaacttattctcgccgccctggaacacaatattgataccgttattctatgcctgggtggcagtgctacaaatgatggcggtattgggttgatgtcggcacttggcgcatcgtttacagacgccgaagggctatcagtctctgttaatgggatggggctggcggcaattcaccacattgacttacagcacctcgatccacgattgaaaaatgtgaaatttattgcggcctgtgatgtcaccaacccactaaccggcgataacggcgcgacccgggtttttgctcaacaaaaaggggccagtgctgacgaccttgagcaactggaacagggaatgaaaaactatgcccgttgcatctaccgttgttgtggtaaagacgtcgatacgatacccggttctggggcggctggcggcgttggcgcggccttgatggcttttctcgatgctcgcttacaaccgggtatttcgctcgtgctggaagcgattcaatatacccaacatttaaaatacgcagcattggccattgtcggtgaagggaaattagatagtcagagcctgaatggcaaagcgcccgtaggcgcagccaaagttgcccagatgatgggcgttccggttatcgcaattgccgggtatatcgatgatcaacttgatctgaatgagttacgccagtgtggaatagaagcctgtttttctgtcgtcaacggcccttgcaatttaccgaccgcgctgagtcagggagaaaataatttaattcgtcttggagaaaatctggcgggatattttcgtgcgatcctgagttaa

SEQ ID NO: 134629 - protein, 380 aa, Escherichia coli
MKIVISPDSFKECLPAWKVAEALAIGWRKVLPGSQLVCLPVADGGEGTLETLIHATDGTFYTKKVTGPLGESIHAQYGILGNQTTAVIELAQASGLELVSPVLRSPLYTTSFGTGELILAALEHNIDTVILCLGGSATNDGGIGLMSALGASFTDAEGLSVSVNGMGLAAIHHIDLQHLDPRLKNVKFIAACDVTNPLTGDNGATRVFAQQKGASADDLEQLEQGMKNYARCIYRCCGKDVDTIPGSGAAGGVGAALMAFLDARLQPGISLVLEAIQYTQHLKYAALAIVGEGKLDSQSLNGKAPVGAAKVAQMMGVPVIAIAGYIDDQLDLNELRQCGIEACFSVVNGPCNLPTALSQGENNLIRLGENLAGYFRAILS

SEQ ID NO: 134630 - DNA, 1146 bp, Klebsiella pneumoniae
  CDS (1)..(1146): transl_table=11
atgaaaattattattgcaccagactcgttcaaagaaagcgtcagcgccagtcgctgcgctcaggcgattaaggcgggcttcgtctccattttcccccaggcggagtgcatctgcctgccgatcgccgacggcggcgaggggacggttgaggcaatggttgaggcgaccgacggcaaaatggtgatgctgccggcgatgggaccgctgggagaggtggtaggcgccttctatggcctgagcggcgacgggcaaaccgcgtttattgaaatggcagcagccagcgggctgatgttggttcccgccgggagacgtgatcccttgcgggccaccagcttcgggactggggagctgattcgccatgcgctggacgccggcgttcgccatattatcctcggtattggcggcagcgccacggtagatggtggaatgggcatggcccaggccctgggggcacgttttcttgacgagcgcggcgagagcgtaggattcggtggcggcgcgctggcgcggctggctagcattgacttacgcgacctcgacccgcgcctgcgcaaatgccggattgatgtggcctgcgatgttgataatccactgctcggcgaacgcggcgcggcggcggtctttggtccgcaaaaaggagccagcgctgagatggtcgctgccctcgagcgtggtttgcaaaattacgcacaggtgctgctcacggcaacgggtacggaggtgacgaagattgtcggcggcggcgcggcgggcggtatgggcgtggcagcttgcgtattccttaacgcggcgctgaagccgggcatcgatatcgtgattgaggcgatgcaactggaggaggcgctgcgcgacgcgaatctggtaattaccggtgaagggcgaatggattcgcaaaccgtcggcggcaaagcgccgattggcgtggcgcggctcgcgaaaaagcatggcatcccagtgatcggtatcgctggcgttctgggggacggcgtggaagcggtgcatcagcatggcattgatgcggtatttagcattctgcccgcgctggcgccgcttgccgaagtgctggaacgcggtgagcaaaatctgtatgcctgcgcgcgcaatatcgcctgtgctatcaagctcggccagaacattcccgcctga

SEQ ID NO: 134631 - protein, 381 aa, Klebsiella pneumoniae
MKIIIAPDSFKESVSASRCAQAIKAGFVSIFPQAECICLPIADGGEGTVEAMVEATDGKMVMLPAMGPLGEVVGAFYGLSGDGQTAFIEMAAASGLMLVPAGRRDPLRATSFGTGELIRHALDAGVRHIILGIGGSATVDGGMGMAQALGARFLDERGESVGFGGGALARLASIDLRDLDPRLRKCRIDVACDVDNPLLGERGAAAVFGPQKGASAEMVAALERGLQNYAQVLLTATGTEVTKIVGGGAAGGMGVAACVFLNAALKPGIDIVIEAMQLEEALRDANLVITGEGRMDSQTVGGKAPIGVARLAKKHGIPVIGIAGVLGDGVEAVHQHGIDAVFSILPALAPLAEVLERGEQNLYACARNIACAIKLGQNIPA

SEQ ID NO: 134632 - DNA, 1227 bp, Escherichia coli O157
  CDS (1)..(1227): transl_table=11
atggcgtattgcaatccgggcctggaatccaggccgaataagagaaacgccctccggcgtcatgtggtaacaggcataggtatgaaaatcgtaatcgccccagactcttataaagaaagtttatctgccagcgaggttgcgcaggcgatagaaaaaggatttcgggaaatttttcctgatgcacagtacgtttctgttcctgttgccgacggtggcgaaggaacggtggaagcgatgattgcagccacccagggttccgaacgtcacgcctgggttacagggccgctgggcgagaaagtgaatgccagttgggggatctccggcgatggcaaaaccgcgtttattgaaatggcggcggccagtgggctggagctggtacctgcggaaaaacgcgatccactcgtgaccacttcacgcggcacaggcgagttaatcctgcaggcgctggagagcggcgcgacaaacattattatcggcattggcggcagcgctacaaatgatggcggcgcaggcatggtacaggcgctgggggcgaaattatgcgacgccaacggcaatgaaattggttttggcggcggtagtcttaatactctgaatgatattgatatttccggcctcgatccgcgcttaaaagattgcgtcattcgcgtcgcttgtgatgtcaccaatccgctggtgggcgataacggcgcatcgcgcatctttggcccacaaaagggagccagtgaagcgatgattgttgagctggacaataacctctctcactatgccgaggtcattaaaaaagcgctgcatgttgatgtgaaagatgtccccggcgcaggagctgcgggtggtatgggcgcggcgctaatggcgtttcttggtgcggaactgaaaagtggtattgaaatcgtcactacggcgctgaatctggaggaacatattcacgattgtacgctggtgatcaccggtgaagggcgtattgacagccagagtattcacggcaaggtaccgattggtgtcgcaaacgtggcgaagaagtaccataaaccggtgattggcattgcgggtagcctgaccgatgatgttggcgttgtacatcagcatggcattgatgcggtcttcagcgtattgaccagcataggtacgttggacgaagcattccgcggggcttatgacaatatctgccgtgcttcacgtaatatcgccgcgacactggcgattggaatgcgcaacgcggggtga

SEQ ID NO: 134633 - protein, 408 aa, Escherichia coli O157
MAYCNPGLESRPNKRNALRRHVVTGIGMKIVIAPDSYKESLSASEVAQAIEKGFREIFPDAQYVSVPVADGGEGTVEAMIAATQGSERHAWVTGPLGEKVNASWGISGDGKTAFIEMAAASGLELVPAEKRDPLVTTSRGTGELILQALESGATNIIIGIGGSATNDGGAGMVQALGAKLCDANGNEIGFGGGSLNTLNDIDISGLDPRLKDCVIRVACDVTNPLVGDNGASRIFGPQKGASEAMIVELDNNLSHYAEVIKKALHVDVKDVPGAGAAGGMGAALMAFLGAELKSGIEIVTTALNLEEHIHDCTLVITGEGRIDSQSIHGKVPIGVANVAKKYHKPVIGIAGSLTDDVGVVHQHGIDAVFSVLTSIGTLDEAFRGAYDNICRASRNIAATLAIGMRNAG

SEQ ID NO: 134634 - DNA, 1170 bp, Arthrobacter nicotinovorans
  CDS (1)..(1170): transl_table=11
atggaccttgccaatccgcgcccgaatgaacacgcacgggttctcatcgcatcagataaattcaagggctccctttcctcacgagaggtcgccgcccatctcactgctggtcttcgcagcgtgcatccagacgttcaggtcaaacagctgcaggtcgctgatggtggcgaaggcacagtaaaagcggtgatcagtgcaggcttcagcagccatctcgttcaagtcagcggtcccacgggacgtccagttgtcgcagaatttgcaacacggggcaacgaagccgttattgagatggcaaatgccgctggcttagcccttctcccagggggtgcctccgctccgctgaccgctagtagtagaggagtaggagaactcgtctgcgcagccctcgacctgggctgtaacaagatcatcatcggggctggaggaagcgcctgcactgacggtggggctggattgctggcggcactcggtgccgaatttctcgatgccaagggtcaacctctgcacgagggcggggggtttctgatggacctcgcctccgtgaaactggacaacctggataagagacttcgtcgggcgcgattcgttttggcaacagacgttaacaacccattgctcggtcctgagggtgcagcagcgatattcgcgccccaaaagggggctacgatgaccgacatcgcgcgcctcgaagccggacttgagcagctagtcgcaagtatggagcaagaaatcggtcctcgggctattagagccgccgcagtaccaggagcgggatctgccggcgggctcggttacgctgccatcgcagtcctggctgcgcaaacccaaccaggagtcgttgccttccaaaacatcctggaactgaaccactacatcgcggactcaacactcgtaataaccggtgagggaaacatggacgagcaaagcctcggcgggaagctgcccctgggcatcagtcgcatcgcttcagaacacggtataccagtgattgcagtctgcggaaacatcgccctggacgcttcgcaagttgagctcgccggtttcacccgggcctactctctgcgggaactgcagcccgatctgtcccgatgcatcaaccaagctgggccactgttagaacaaattgggagcaccatcggatctgatcttcacaaactgggtgcatga

SEQ ID NO: 134635 - protein, 389 aa, Arthrobacter nicotinovorans
MDLANPRPNEHARVLIASDKFKGSLSSREVAAHLTAGLRSVHPDVQVKQLQVADGGEGTVKAVISAGFSSHLVQVSGPTGRPVVAEFATRGNEAVIEMANAAGLALLPGGASAPLTASSRGVGELVCAALDLGCNKIIIGAGGSACTDGGAGLLAALGAEFLDAKGQPLHEGGGFLMDLASVKLDNLDKRLRRARFVLATDVNNPLLGPEGAAAIFAPQKGATMTDIARLEAGLEQLVASMEQEIGPRAIRAAAVPGAGSAGGLGYAAIAVLAAQTQPGVVAFQNILELNHYIADSTLVITGEGNMDEQSLGGKLPLGISRIASEHGIPVIAVCGNIALDASQVELAGFTRAYSLRELQPDLSRCINQAGPLLEQIGSTIGSDLHKLGA

SEQ ID NO: 134636 - DNA, 1146 bp, Bacillus cereus
  CDS (1)..(1146): transl_table=11
atgaaagttgttattgcatctgattcatataaagaaagcttaaaagctatagaagtatgtgaagctattgaaagaggttttggagcaatttttcctaaagcagagtatgtaaaaataccaattggagacggaggggaaggaacggttgattcccttgttgatgctacaagcgggaggattatatcatttcatgtgacaggaccgcttagagagagcgtacaagccttttacggtatgtctaaagataaaaagacagcgtttattgaaatggcagcagcatcaggcttacaacacgttccagctaaaaagcgaaacccacttattacgacgacgaaaggaacaggagaacttatactacatgcgctagacgaaggagctgagcatatcattttaggactgggaggaagtgctacaaatgatggaggagcgggtatgttgtcagctttaggagtcaggtttataaatggaaaaggagaagtaatagagccgtctggtggaacgttacattcgattgtctctattgatttttcacaaatggattcacgcttaaagcatataaagatagaagcagcatgtgatgtagataatccgttagttggaataagaggagcatctttcgtatttgggcgacaaaagggtgcggatgaagagatgatgaaagagctggatgagaatttaaagcattatgcgcatatccttaaacaatacctattttgcgacgtatctaaaatacctggtgcaggagctgcaggaggtatgggagcagctgttattgcagtgctgaagggaagcttgcggaggggaattgaaattgtattagattatacaaattttgataagcatatagaaggtgcagatttaattataactggcgaagggagaatagatgaacaaacagcatatggaaaggccccagtaggtgttgcggagcgtgcaaagctttttcatattcctgtcattgcgattgggggatcagtatctccgaattactcggctgttcatgaaaaaggaattgatgcagtatttagtattacaacaagtccgacgacattagaggaggcatataaagtagcagaagagaatattgaaatgacagcaaagaatattgcagcagtgtggaaaatagcatcagaaaaacacttctaa

SEQ ID NO: 134637 - protein, 381 aa, Bacillus cereus
MKVVIASDSYKESLKAIEVCEAIERGFGAIFPKAEYVKIPIGDGGEGTVDSLVDATSGRIISFHVTGPLRESVQAFYGMSKDKKTAFIEMAAASGLQHVPAKKRNPLITTTKGTGELILHALDEGAEHIILGLGGSATNDGGAGMLSALGVRFINGKGEVIEPSGGTLHSIVSIDFSQMDSRLKHIKIEAACDVDNPLVGIRGASFVFGRQKGADEEMMKELDENLKHYAHILKQYLFCDVSKIPGAGAAGGMGAAVIAVLKGSLRRGIEIVLDYTNFDKHIEGADLIITGEGRIDEQTAYGKAPVGVAERAKLFHIPVIAIGGSVSPNYSAVHEKGIDAVFSITTSPTTLEEAYKVAEENIEMTAKNIAAVWKIASEKHF

SEQ ID NO: 134638 - DNA, 1149 bp, Bacillus subtilis
  CDS (1)..(1149): transl_table=11
atgaaaatcatcattgcacctgattcttttaaggaaagcttatcagctctggaggcagccgaagcgatagaaagaggtttcaaatcggtctttccgggtgctgattacagaaaattgccggtggcggatggcggcgagggaaccgttcaatctctggtcgatgcgaccaatggaaggatcatagagcaagttgtcacagggccgctgggggaaccggtgagagctttctttggcatgatgggagatgggagaacagctgtgattgaaatggctgctgcttcagggctgcatctggtgcctgtagataagcgaaatccgctcatcactacaacaaggggaacgggagaattaatcggagcagctcttgatgcgggagcggagcgattgatcatcggaatcggcggaagcgccacgaacgacgggggagccgggatgattcaggcattgggcggaaggcttcttgataactcaggcagcgagattggcccagggggcggcgcgttatctcagcttgcatcaatagatgtgagcgggcttgattccagattgcggaatgtcaaactggaagttgcctgtaacgtggacaatccgttaacaggaccaaagggtgctacggctgttttcgggccgcaaaaaggcgcgacggccgacatgttggatgtactagaccagaacgtaagccatttcgctgatatggcagaaaaagcgctcggatcaaccttccgagatacagagggcgccggtgcagcgggcggtcttggatggagcctgctaacttatcttcaggctgacctgaaaagaggcattgatattgtccttgaagcggttgattttgaaagtatcgttcaggatgcagaccttgtgattaccggcgagggacgaatcgacagccaaacggttcatggaaaaacaccgatcggggtggccaaggccgctaaatcatacgatgtgcccgttatcggcattgcgggatcaatttcccgagacagtaatgccgtctatcaacacggaatcgatgcgcttttcagcatcgtccccggagccgtgccactagaagacgcgtttgaacatgccgcggaatatatggaaagaacggcgcgggacattgcagcgtctatcaaattggcgaaaacgatgtttctgatatag

SEQ ID NO: 134639 - protein, 382 aa, Bacillus subtilis
MKIIIAPDSFKESLSALEAAEAIERGFKSVFPGADYRKLPVADGGEGTVQSLVDATNGRIIEQVVTGPLGEPVRAFFGMMGDGRTAVIEMAAASGLHLVPVDKRNPLITTTRGTGELIGAALDAGAERLIIGIGGSATNDGGAGMIQALGGRLLDNSGSEIGPGGGALSQLASIDVSGLDSRLRNVKLEVACNVDNPLTGPKGATAVFGPQKGATADMLDVLDQNVSHFADMAEKALGSTFRDTEGAGAAGGLGWSLLTYLQADLKRGIDIVLEAVDFESIVQDADLVITGEGRIDSQTVHGKTPIGVAKAAKSYDVPVIGIAGSISRDSNAVYQHGIDALFSIVPGAVPLEDAFEHAAEYMERTARDIAASIKLAKTMFLI

SEQ ID NO: 134640 - DNA, 1116 bp, Neisseria meningitidis serogroup A
  CDS (1)..(1116): transl_table=11
atgaagattgtaattgcaccggattcgtttaaggaaagcttgacagctcaacaggtagctgaagcaataaaaagaggcttccaacaatcgatagcagatgtggaatgtctcctctgtcctgtcggtgatgggggagaaggcactgtagatgctatccgacattctcttgacctagaagaaaaatgtctccaagtgacaggatcttttggacaaaaagaagtcatgcgctattttcaaaaagaacaactagccctattcgaagttgctgatttggttggtcttggaaaaatcccgctagagaaacgaaatccattacaaatccaaactcgtggtattggagaattgattcgccacctcattagtcaagaaattaaagaaatctatattggcgttggcggtacggccagtaatgatggaggtattgggattgctgctggtttaggttatcaattttatgatgaggatggaaatgccttacccgcttgcggtcaatccttactaaacctagcttctgtttcaacagaaaatcgctataaaattcctgaagatgttcacattcgtattttagcagatgttgtgagtcccttatgtggacaccaaggtgcgacctatacgtttggcaagcaaaaagggttggattctactatgtttgaggtcgtagatcaggcaatacaagatttttatgaaaaagtctcccctgcaacattaaaacttaaaggagcaggagctggtggaggcatcgctggtggtttgtgcgcctttgctcaggcaagtatcgtatctggaattgacacctgcctggacttgattgactttgataagaaagtgtcagatgttgacttggttatcgttggtgaaggaagactagatcgtcaaagtttagcagggaaagcgcctattggtgtagcaaaaagaacccctgtcggagttcctgttgtcgctatttgtggcagtctcgttgaagatttgccttccctgccatttgaaaatatccaagctgccttttctattttggagaaaagtgaacctttagaagatagtttgaaaaatgccagtctctatttggagcatacggcttctaatattggacacttattaaatatgcctaagatttag

SEQ ID NO: 134641 - protein, 371 aa, Neisseria meningitidis serogroup A
MKIVIAPDSFKESLTAQQVAEAIKRGFQQSIADVECLLCPVGDGGEGTVDAIRHSLDLEEKCLQVTGSFGQKEVMRYFQKEQLALFEVADLVGLGKIPLEKRNPLQIQTRGIGELIRHLISQEIKEIYIGVGGTASNDGGIGIAAGLGYQFYDEDGNALPACGQSLLNLASVSTENRYKIPEDVHIRILADVVSPLCGHQGATYTFGKQKGLDSTMFEVVDQAIQDFYEKVSPATLKLKGAGAGGGIAGGLCAFAQASIVSGIDTCLDLIDFDKKVSDVDLVIVGEGRLDRQSLAGKAPIGVAKRTPVGVPVVAICGSLVEDLPSLPFENIQAAFSILEKSEPLEDSLKNASLYLEHTASNIGHLLNMPKI

SEQ ID NO: 134642 - DNA, 1116 bp, Neisseria meningitidis serogroup B
  CDS (1)..(1116): transl_table=11
atgaagattgtaattgcaccggattcgtttaaggaaagcttgacagctcaacaggtagctgaagcaataaaaagaggcttccaacaatcgatagcagatgtggaatgtctcctctgtcctgtcggtgatgggggagaaggcactgtagatgctatccgacattctcttgacctagaagaaaaatgtctccaagtgacaggaccttttggacaaaaagaagtcatgcgctattttcaaaaagaacaactagccctattcgaagttgctgatttggttggtcttggaaaaatcccgctagagaaacgaaatccattacaaatccaaactcgtggtattggagaattgattcgccacctcattagtcaagaaattaaagaaatctatattggcgttggcggtacggccagtaatgatggaggtattgggattgctgctggtttaggttatcaattttatgatgaggatggaaatgccttacccgtttgcggtcaatccttactaaacctagcttctgtttcaacagaaaatcgctatgaaattcctgaagatgttcacattcgtattttagcagatgttgtgagtcccttatgtggacaccaaggtgcgacctatacgtttggcaagcaaaaagggttggattctactatgtttgaggccgtagatcaggcaatacaagatttttatgaaaaagtctcccctgcaacattaaaacttaaaggagcaggagctggtggaggcatcgctggtggtttgtgcgcctttgctcaggcaagtatcgtatctggaattgacacctgcctggacttgattgactttgataagaaagtgtcagatgttgacttggttatcgttggtgaaggaagactagatcgtcaaagtttagcagggaaagcgcctattggtgtagcaaaaagaacccctgtcggagttcctgttgtcgctatttgtggcagtctcgttgaagatttgccttccctgccatttgaaaatatccaagctgccttttctattttggagaaaagtgaacctttagaagatagtttgaaaaatgccagcctctatttggagcatacggcttctaatattggacacttattaaatatgcctaagatttag

SEQ ID NO: 134643 - protein, 371 aa, Neisseria meningitidis serogroup B
MKIVIAPDSFKESLTAQQVAEAIKRGFQQSIADVECLLCPVGDGGEGTVDAIRHSLDLEEKCLQVTGPFGQKEVMRYFQKEQLALFEVADLVGLGKIPLEKRNPLQIQTRGIGELIRHLISQEIKEIYIGVGGTASNDGGIGIAAGLGYQFYDEDGNALPVCGQSLLNLASVSTENRYEIPEDVHIRILADVVSPLCGHQGATYTFGKQKGLDSTMFEAVDQAIQDFYEKVSPATLKLKGAGAGGGIAGGLCAFAQASIVSGIDTCLDLIDFDKKVSDVDLVIVGEGRLDRQSLAGKAPIGVAKRTPVGVPVVAICGSLVEDLPSLPFENIQAAFSILEKSEPLEDSLKNASLYLEHTASNIGHLLNMPKI

SEQ ID NO: 134644 - DNA, 1077 bp, Mycobacterium tuberculosis
  CDS (1)..(1077): transl_table=11
atgcgggtgttggtggcaccggactgctacggcgacagcctgtctgcggtggaggccgccgcggccattgcgaccggctggacgcggtcgcgaccaggcgattcgttcatcgtcgccccccaatccgatggcggtccgggttttgttgaggtgctgggcagccggctaggagagacccgccggctgcgtgtttgcgggccactgaacaccgtcgtgaacgcggcgtgggtgttcgatccgggctcggcaaccgcgtatttggagtgtgcgcaggcttgtggtctggggttgcttggcggcccgcccacgcccgaaaccgcgctggcggcccacagcaagggcgtcggccagctcatcgccgcggcactgcgggccggggcggctcggatcgtggtggggttggggggcagcgcatgtaccgacggggggaaggggatgattgccgagcttggcggcctggacgcggcccgccgacagttggccgacgtcgaggtgatcgccgcctcggatgtcgaatacccattgctgggaccatggggcacggccagggtgttcgcgccgcagaagggcgcggacatggccaccgtcgcagtgttggaaggccgtctggcggcatgggcgattgaactggacgcggccgccgggcgcggggtgagcgccgagccgggcgcgggcgccgccggtggtatcggggctgggctgctcgcggttggcggccggtaccagtcgggtgcggcaatcatcgcagagcacacgcattttgccgacgaccttgccgatgcggagctgatcgtcaccggtgagggccgattcgacgagcaatccctgcacgggaaggtggttggtgcgatcgcggctgcggcccgcccgctcgcaattccggtgatagtgttggccggccaggtgtcgctggacaagtccgcgttgcggtcggcgggcattatggccgcattgtccatcgctgagtacgccggttcggtgcggttggcgctggccgatgcggccaatcagctcatgggcttggcgtctcaggtagcggcgcgactcgggaatagcggtccttcagggtaccgttga

SEQ ID NO: 134645 - protein, 358 aa, Mycobacterium tuberculosis
MRVLVAPDCYGDSLSAVEAAAAIATGWTRSRPGDSFIVAPQSDGGPGFVEVLGSRLGETRRLRVCGPLNTVVNAAWVFDPGSATAYLECAQACGLGLLGGPPTPETALAAHSKGVGQLIAAALRAGAARIVVGLGGSACTDGGKGMIAELGGLDAARRQLADVEVIAASDVEYPLLGPWGTARVFAPQKGADMATVAVLEGRLAAWAIELDAAAGRGVSAEPGAGAAGGIGAGLLAVGGRYQSGAAIIAEHTHFADDLADAELIVTGEGRFDEQSLHGKVVGAIAAAARPLAIPVIVLAGQVSLDKSALRSAGIMAALSIAEYAGSVRLALADAANQLMGLASQVAARLGNSGPSGYR

SEQ ID NO: 134646 - DNA, 24 bp, Artificial sequence
  primer
atgaagattgtcattgcgccagac

SEQ ID NO: 134647 - DNA, 25 bp, Artificial sequence
  primer
ttagtttttaattccctgacctatt

SEQ ID NO: 134648 - protein, 390 aa, Artificial sequence
  consensus sequence
  Variant (7)..(7): Xaa in position 7 is any amino acid
  Variant (9)..(10): Xaa in position 9 to 10 is any amino acid
  Variant (12)..(20): Xaa in position 12 to 20 is any amino acid
  Variant (22)..(32): Xaa in position 22 to 32 is any amino acid
  Variant (33)..(48): Xaa in position 33 to 48 is any or no amino acid
  Variant (50)..(51): Xaa in position 50 to 51 is any amino acid
  Variant (58)..(69): Xaa in position 58 to 69 is any amino acid
  Variant (70)..(73): Xaa in position 70 to 73 is any or no amino acid
  Variant (75)..(76): Xaa in position 75 to 76 is any amino acid
  Variant (78)..(92): Xaa in position 78 to 92 is any amino acid
  Variant (93)..(103): Xaa in position 93 to 103 is any or no amino acid
  Variant (105)..(106): Xaa in position 105 to 106 is any amino acid
  Variant (108)..(108): Xaa in position 108 is any amino acid
  Variant (110)..(112): Xaa in position 110 to 112 is any amino acid
  Variant (115)..(120): Xaa in position 115 to 120 is any amino acid
  Variant (121)..(126): Xaa in position 121 to 126 is any or no amino acid
  Variant (128)..(133): Xaa in position 128 to 133 is any amino acid
  Variant (134)..(135): Xaa in position 134 to 135 is any or no amino acid
  Variant (137)..(137): Xaa in position 137 is any amino acid
  Variant (139)..(139): Xaa in position 139 is any amino acid
  Variant (142)..(143): Xaa in position 142 to 143 is any amino acid
  Variant (146)..(147): Xaa in position 146 to 147 is any amino acid
  Variant (149)..(154): Xaa in position 149 to 154 is any amino acid
  Variant (156)..(156): Xaa in position 156 is any amino acid
  Variant (162)..(162): Xaa in position 162 is any amino acid
  Variant (166)..(166): Xaa in position 166 is any amino acid
  Variant (168)..(170): Xaa in position 168 to 170 is any amino acid
  Variant (174)..(174): Xaa in position 174 is any amino acid
  Variant (175)..(177): Xaa in position 175 to 177 is any or no amino acid
  Variant (179)..(183): Xaa in position 179 to 183 is any amino acid
  Variant (184)..(191): Xaa in position 184 to 191 is any or no amino acid
  Variant (193)..(194): Xaa in position 193 to 194 is any amino acid
  Variant (196)..(201): Xaa in position 196 to 201 is any amino acid
  Variant (203)..(209): Xaa in position 203 to 209 is any amino acid
  Variant (211)..(217): Xaa in position 211 to 217 is any amino acid
  Variant (218)..(219): Xaa in position 218 to 219 is any or no amino acid
  Variant (221)..(221): Xaa in position 221 is any amino acid
  Variant (224)..(224): Xaa in position 224 is any amino acid
  Variant (228)..(228): Xaa in position 228 is any amino acid
  Variant (230)..(231): Xaa in position 230 to 231 is any amino acid
  Variant (234)..(236): Xaa in position 234 to 236 is any amino acid
  Variant (244)..(250): Xaa in position 244 to 250 is any amino acid
  Variant (252)..(269): Xaa in position 252 to 269 is any amino acid
  Variant (270)..(282): Xaa in position 270 to 282 is any or no amino acid
  Variant (284)..(284): Xaa in position 284 is any amino acid
  Variant (290)..(290): Xaa in position 290 is any amino acid
  Variant (292)..(303): Xaa in position 292 to 303 is any amino acid
  Variant (304)..(312): Xaa in position 304 to 312 is any or no amino acid
  Variant (314)..(329): Xaa in position 314 to 329 is any amino acid
  Variant (330)..(333): Xaa in position 330 to 333 is any or no amino acid
  Variant (335)..(336): Xaa in position 335 to 336 is any amino acid
  Variant (338)..(338): Xaa in position 338 is any amino acid
  Variant (343)..(344): Xaa in position 343 to 344 is any amino acid
  Variant (346)..(346): Xaa in position 346 is any amino acid
  Variant (348)..(350): Xaa in position 348 to 350 is any amino acid
  Variant (353)..(353): Xaa in position 353 is any amino acid
  Variant (355)..(355): Xaa in position 355 is any amino acid
  Variant (359)..(360): Xaa in position 359 to 360 is any amino acid
  Variant (362)..(365): Xaa in position 362 to 365 is any amino acid
  Variant (366)..(368): Xaa in position 366 to 368 is any or no amino acid
  Variant (371)..(374): Xaa in position 371 to 374 is any amino acid
  Variant (376)..(379): Xaa in position 376 to 379 is any amino acid
  Variant (380)..(389): Xaa in position 380 to 389 is any or no amino acid
APDSFKXSXXAXXXXXXXXXGXXXXXXXXXXXXXXXXXXXXXXXXXXXPXXDGGEGTXXXXXXXXXXXXXXXXVXXPXXXXXXXXXXXXXXXXXXXXXXXXXXAXXEXAXXXGLXXXXXXXXXXXXRXXXXXXXXGXGXLIXXALXXGXXXXXXGXGGSATXDGGXGXXXALGXXXXDXXXXXXXXXXXXXGXXLXXXXXXDXXXXXXXLXXXXXXXXXAXDVXNPLXGXXGAXXXFGPQKGAXXXXXXXLXXXXXXXXXXXXXXXXXXXXXXXXXXXXXXXGXGAAGGXGXXXXXXXXXXXXXXXXXXXXXGXXXXXXXXXXXXXXXXXXXXAXXVXTGEGXXDXQXXXGKXPXGVAXXAXXXXXXXPVXXXXGXXXXXXXXXXXXXXG

SEQ ID NO: 134649 - protein, 32 aa, Artificial sequence
  protein pattern
  Variant (2)..(4): Xaa in position 2 to 4 is any amino acid
  Variant (6)..(6): Xaa in position 6 is Ile, Leu, Met or Val
  Variant (7)..(8): Xaa in position 7 to 8 is any amino acid
  Variant (10)..(10): Xaa in position 10 is Ile, Leu, Met or Val
  Variant (11)..(18): Xaa in position 11 to 18 is any amino acid
  Variant (19)..(19): Xaa in position 19 is Phe, Ile, Leu or Val
  Variant (20)..(20): Xaa in position 20 is Ala, Cys or Gly
  Variant (21)..(21): Xaa in position 21 is any amino acid
  Variant (23)..(23): Xaa in position 23 is Asp or Gly
  Variant (25)..(25): Xaa in position 25 is Ala, Gly or Ser
  Variant (26)..(26): Xaa in position 26 is Cys, Gly, Ser, Thr or Val
  Variant (27)..(27): Xaa in position 27 is Cys, Asn, Ser, Thr or Val
  Variant (29)..(29): Xaa in position 29 is Ala or Gly
  Variant (31)..(31): Xaa in position 31 is any amino acid
GXXXLXXXAXXXXXXXXXXXXGXSXXXDXGXG

SEQ ID NO: 134650 - protein, 27 aa, Artificial sequence
  protein pattern
  Variant (2)..(3): Xaa in position 2 to 3 is any amino acid
  Variant (6)..(6): Xaa in position 6 is Ala, Ser or Thr
  Variant (7)..(8): Xaa in position 7 to 8 is any amino acid
  Variant (9)..(9): Xaa in position 9 is Phe or Tyr
  Variant (11)..(11): Xaa in position 11 is any amino acid
  Variant (15)..(15): Xaa in position 15 is Ala, Leu or Val
  Variant (16)..(23): Xaa in position 16 to 23 is any amino acid
  Variant (24)..(24): Xaa in position 24 is Asp or Glu
  Variant (25)..(26): Xaa in position 25 to 26 is any amino acid
  Variant (27)..(27): Xaa in position 27 is Ile, Leu, Met or Val
GXXGAXXXXGXQKGXXXXXXXXXXXXX

SEQ ID NO: 134651 - protein, 25 aa, Artificial sequence
  protein pattern
  Variant (2)..(2): Xaa in position 2 is Phe, Ile, Leu or Val
  Variant (3)..(3): Xaa in position 3 is Thr or Val
  Variant (4)..(4): Xaa in position 4 is Ala or Gly
  Variant (7)..(8): Xaa in position 7 to 8 is any amino acid
  Variant (10)..(10): Xaa in position 10 is any amino acid
  Variant (12)..(12): Xaa in position 12 is Ser or Thr
  Variant (13)..(14): Xaa in position 13 to 14 is any amino acid
  Variant (17)..(17): Xaa in position 17 is any amino acid
  Variant (19)..(21): Xaa in position 19 to 21 is any amino acid
  Variant (22)..(24): Xaa in position 22 to 24 is any or no amino acid
VXXXEGXXDXQXXXGKXPXXXXXXA

SEQ ID NO: 134652 - protein, 10 aa, Artificial sequence
  protein pattern
  Variant (2)..(2): Xaa in position 2 is Ile, Leu, Met or Val
  Variant (3)..(3): Xaa in position 3 is Ala, Gly, Ser or Val
  Variant (9)..(9): Xaa in position 9 is any or no amino acid
PXXDGGEGXT

SEQ ID NO: 134653 - protein, 14 aa, Artificial sequence
  protein pattern
  Variant (2)..(2): Xaa in position 2 is Phe, Ile, Leu or Val
  Variant (3)..(3): Xaa in position 3 is Phe, Ile or Val
  Variant (5)..(5): Xaa in position 5 is any amino acid
  Variant (7)..(9): Xaa in position 7 to 9 is any amino acid
  Variant (12)..(13): Xaa in position 12 to 13 is any amino acid
  Variant (14)..(14): Xaa in position 14 is Ala, Ile, Leu or Val
AXXEXAXXXGLXXX

SEQ ID NO: 134654 - protein, 11 aa, Artificial sequence
  protein pattern
  Variant (2)..(2): Xaa in position 2 is Ala, Gly or Ser
  Variant (5)..(5): Xaa in position 5 is any or no amino acid
  Variant (8)..(8): Xaa in position 8 is Ile, Leu or Met
  Variant (9)..(9): Xaa in position 9 is Ala or Gly
  Variant (10)..(10): Xaa in position 10 is any amino acid
  Variant (11)..(11): Xaa in position 11 is Ala or Gly
GXGAXGGXXXX

SEQ ID NO: 134655 - DNA, 1986 bp, Escherichia coli
  CDS (1)..(1986): transl_table=11
atgaaaaccgttagggagtccacaacgttgtacaactttctcggatcgcacaatccatactggcggttgacggaaagcagcgatgttttgcgcttttctaccaccgaaaccacagaacctgatcgtacattgcagttatctgccgaacaggctgctcgcatcagggaaatgacggtcatcacctccagcctgatgatgagtctgaccgtcgatgaaagcgatctttctgtgcatctggtaggacgaaaaatcaataaacgggaatgggctggcaacgcgtctgcatggcatgacacaccggcggttgctcgtgatttatcacacgggctttcctttgctgagcaggtagtttctgaagcacattccgcaatagtgattctcgacagccgggggaatatccaacgcttcaatcggttatgtgaagattacacagggttgaaagaacacgacgtcattgggcaaagcgtgtttaaactgtttatgagccgtcgtgaagctgcggcatccaggcgcaataaccgtgtattttttcgaagcggcaatgcatatgaagtcgaactgtggataccaacatgtaaaggccagcggctgtttctgtttcgcaataaatttgtccacagcggcagtggcaaaaacgagatttttttaatctgttccggcaccgacattaccgaagagcgccgcgctcaggagcgactgcgtattctggcaaataccgacagtatcaccggactgccgaatcgtaacgcaatgcaggatttaatcgatcacgctattaatcatgcagataacaataaagttggggttgtgtatcttgatttggataatttcaaaaaggtcaacgacgcctatgggcatttgtttggtgaccagttattacgcgacgtgtcattggctattttaagctgtctcgaacatgaccaggtgttggcgcgtccaggtggggatgagtttctggtactggcatccaacacctcacaaagcgcgctggaagcaatggcatcacgaattttgacccgcttacggctcccctttcgcattggtttaattgaagtttataccagctgttcagtaggtattgcactctctcccgaacatggttcagacagcacggctattattcgtcacgccgacacagcaatgtacacagcgaaggaaggcggacgaggacaattttgcgtttttaccccagaaatgaatcaacgggtatttgaatatctctggctggataccaacttgcgtaaagcactggaaaacgatcagttggttattcactatcaaccgaaaatcacctggcgtggcgaagtgcgcagtctggaagcactagtacgttggcagtcacctgaacgtgggttgattccaccgttggacttcatttcctacgccgaagagtcagggctaattgtgcctttaggccgttgggtgattctcgatgtcgtacgccaggtggcaaagtggcgggataaaggcataaacctgcgagtggcggtaaatatttctgcacgtcagctcgccgatcaaaccattttcaccgccctgaaacaggttctccaggaactcaattttgaatactgccctatagatgttgaactgacagagagttgtctgattgagaatgatgaactggcactgtctgttattcaacaatttagccaactaggtgcgcaagtgcatctggatgattttggtaccggctactcttcactttcgcaactggcgcgctttccgatcgatgccatcaaacttgaccaggtttttgttcgagatattcacaaacaacctgtctcgcagtcactggtccgggcgatcgtcgctgtggcccaggcattgaatcttcaggtgatcgccgaaggtgtagagagtgcaaaggaagatgcttttttaaccaagaacgggatcaatgagcggcaaggatttttgtttgccaaaccgatgcccgccgtcgccttcgaacgctggtataaacgctatctgaagcgcgcataa

SEQ ID NO: 134656 - protein, 661 aa, Escherichia coli
MKTVRESTTLYNFLGSHNPYWRLTESSDVLRFSTTETTEPDRTLQLSAEQAARIREMTVITSSLMMSLTVDESDLSVHLVGRKINKREWAGNASAWHDTPAVARDLSHGLSFAEQVVSEAHSAIVILDSRGNIQRFNRLCEDYTGLKEHDVIGQSVFKLFMSRREAAASRRNNRVFFRSGNAYEVELWIPTCKGQRLFLFRNKFVHSGSGKNEIFLICSGTDITEERRAQERLRILANTDSITGLPNRNAMQDLIDHAINHADNNKVGVVYLDLDNFKKVNDAYGHLFGDQLLRDVSLAILSCLEHDQVLARPGGDEFLVLASNTSQSALEAMASRILTRLRLPFRIGLIEVYTSCSVGIALSPEHGSDSTAIIRHADTAMYTAKEGGRGQFCVFTPEMNQRVFEYLWLDTNLRKALENDQLVIHYQPKITWRGEVRSLEALVRWQSPERGLIPPLDFISYAEESGLIVPLGRWVILDVVRQVAKWRDKGINLRVAVNISARQLADQTIFTALKQVLQELNFEYCPIDVELTESCLIENDELALSVIQQFSQLGAQVHLDDFGTGYSSLSQLARFPIDAIKLDQVFVRDIHKQPVSQSLVRAIVAVAQALNLQVIAEGVESAKEDAFLTKNGINERQGFLFAKPMPAVAFERWYKRYLKRA

SEQ ID NO: 134657 - DNA, 1983 bp, Salmonella enterica subsp. enterica serovar Typhi str. CT18
  CDS (1)..(1983): transl_table=11
atgatgaaacagattcaggaacaaacggcgctaaatccccttcactctcactggcgtctggctgatgaccgcaacgtgctgtatctctccccgacaggtgaaacggatgcagaaaaaacggttgagctatcgccggagcaagccgggcgtatccgggaaataacggcgattacgtccagtctgctgataacgttgttgatagaaaaacaggttaccgctgtgcacctggtaggccgtaagattaataaccgtgaatgggctggcagcctggcaacctggcctgatacgcctgccgtcgcgccaacgcaggcgcaggaactctcttttgccgagcaaatcgtatcagaagccaactcagtcattgcgatactggatagtcggggaaaaatctgtcgatttaatcggttatgcgaagagtacacgggcttaaaagagcgagatgtaattggtcaaagcgtatttaaattatttatgagtcgccgggaggcggttgcctcccgacactacattgagaatttttttcgcaatggcaatgcctatgaaatcgaacgctggataaagactcgtaaaggccaacgtctgttcttatttcgtaataaattcgtccataacggtagcggaaaaaacgaaatctttctgatctgcgcaggcacggatatcaccgaagaaaggcgggctcaggagcgtttacgcatactggcgaatacagacaccgtcaccggcctgcccaatcgcaatgctattcatgaatttattaatcatgctattgcctcggctggcgagtcgcaggtgggtatcgtttatctcgatctggataacttcaagaaaattaatgacgcctatgggcatatgtttggcgatcagctcttacaggccgtttcactggcgctgttgagttgtctggaggaagatcaattgctggccagactggggggagatgaattcattgtcctcgttgcccatacgtctcaggccgcgctggaagcagtagcctcacgaatccttacccggctgcggcaaccgtttcgcattggactcattgaagtttacacgggatgcgccattggcatttcgttggccccccggcacggacaggacagcgaaagtctcattcgcactgccgacaccgcaatgtataacgccaaagaaggcggccgcggtcagttctgcgttttttcgccggaaatgaatcagcgcgtatttgactatcactggctggatacaaacctgcgaaaagcgctggaaaacgaccagttacttattcactatcagcccaaaattacctggcgcggcgaagtacgtagcctggaagcgctggtacgctggcaatcgccggaacgcggattaattccgccgctggagttcatctcatacgccgaagagtcaggactcatcgtcccgctgggccgctgggtgattctggatgtagttcgccagattgcgaaatggcgcgataaggggattaacttgcgcgtagccgttaacttttcggcgcgacaactggccgaccagacgctttttactgcgcttaaacaggctttgtacgatctgaattttgagtattgcccaatcgatgtcgagctaacggaaagctgcctgatcgaaaacgacacgctggcgctatcggttatccagcaatttagtcagctcggcgcccagattcatctggatgattttggcacagggtattcttcgctttctcaactcgcccggttccctattgatgccgttaaactggatcaggctttcgtcagagatatccataagcaaccgctgtcgcaatctctggctcgggcgattgtcgcggtggctcaggcgctaaatttacaagtgattgccgaaggcgtggaaaatgctaaagaagatgccttcctgacaaaaaacggcgtcaatgaacgacagggctttttattcgccaaacctatgcccgccgtttcttttgaacgctggtacaaacgttatcagacgaaaaaaatgcgttaa

SEQ ID NO: 134658 - protein, 660 aa, Salmonella enterica subsp. enterica serovar Typhi str. CT18
MMKQIQEQTALNPLHSHWRLADDRNVLYLSPTGETDAEKTVELSPEQAGRIREITAITSSLLITLLIEKQVTAVHLVGRKINNREWAGSLATWPDTPAVAPTQAQELSFAEQIVSEANSVIAILDSRGKICRFNRLCEEYTGLKERDVIGQSVFKLFMSRREAVASRHYIENFFRNGNAYEIERWIKTRKGQRLFLFRNKFVHNGSGKNEIFLICAGTDITEERRAQERLRILANTDTVTGLPNRNAIHEFINHAIASAGESQVGIVYLDLDNFKKINDAYGHMFGDQLLQAVSLALLSCLEEDQLLARLGGDEFIVLVAHTSQAALEAVASRILTRLRQPFRIGLIEVYTGCAIGISLAPRHGQDSESLIRTADTAMYNAKEGGRGQFCVFSPEMNQRVFDYHWLDTNLRKALENDQLLIHYQPKITWRGEVRSLEALVRWQSPERGLIPPLEFISYAEESGLIVPLGRWVILDVVRQIAKWRDKGINLRVAVNFSARQLADQTLFTALKQALYDLNFEYCPIDVELTESCLIENDTLALSVIQQFSQLGAQIHLDDFGTGYSSLSQLARFPIDAVKLDQAFVRDIHKQPLSQSLARAIVAVAQALNLQVIAEGVENAKEDAFLTKNGVNERQGFLFAKPMPAVSFERWYKRYQTKKMR

SEQ ID NO: 134659 - DNA, 1983 bp, Salmonella typhimurium LT2
  CDS (1)..(1983): transl_table=11
atgatgaaacagattcaggaacaaacggcgctaaatccccttcactctcactggcgtctggctgatgaccgcaacgtgctgtatctctccccgacaggtgaaacggatgcagaaaaaacggttgagctatcgccggaacaagccgggcgtatccgggaaataacggcgattacgtccagtctgctgataacgttgttgatagaaaaacaggttaccgctgtgcacctggtaggccgtaagattaataaccgtgaatgggctggcagcctggcaacctggcctgatacgcctgccgtctcgccaacgcaggcgcaggagctctcttttgccgagcaaatcgtatcagaagccaactcagtcattgcgatactggatagtcggggaaaaatctgtcgatttaatcggttatgcgaagagtacacaggcttaaaagagcgagatgtaattggtcaaagcgtctttaaattatttatgagccgccgggaggcggttgcctcccgacactacattgagaatttttttcgcaatggcaatgcctatgaaatcgaacgctggataaagacccgtaaaggccaacgcctgttcttatttcgtaataaattcgtccataacggtagcggaaaaaacgaaattttcctgatctgcgcaggcacggatatcaccgaagaaaggcgggctcaggagcgtttacgcatactggcgaatacagacaccgtcaccggcctgcccaatcgcaatgctattcatgaatttattaatcatgctattgcctcggctggcgagtcgcaggtgggtatcgtttatctcgatctggataacttcaagaaaattaatgacgcctatgggcatatgtttggcgatcagctcttacaggccgtttcgctggcgctgttgagttgtctggaggaagatcaattgctggccagactggggggagatgaattcattgtcctcgctgcccatacgtctcaggccgcgctggaagcagtagcctcacgaatccttacccgtctgcggcaaccgtttcgtattggactcattgaagtttacacgggatgcgccattggcatttcgttggccccccggcacggacaggacagcgaaagtctcattcgcactgccgacaccgcaatgtataacgccaaagaaggcggccgcggtcagttctgcgttttttcgccggaaatgaatcagcgcgtatttgactatcactggctggatacaaacctgcgaaaagcgctggaaaacgaccagttacttattcactatcagcccaaaattacctggcgcggcgaagtacgtagcctggaagcgctggtacgctggcaatcgccggaacgcggattaattccgccgctggagttcatctcatacgccgaagagtcaggactcatcgtcccgctgggccgctgggtgattctggatgtagttcgccagattgcgaaatggcgcgataaggggattaacttgcgcgtagccgttaacttttcggcgcgacaactggccgaccagacgctttttactgcgcttaaacaggctttgtacgatctgaattttgagtattgcccgatcgatgtcgagctaacggaaagctgcctgatcgaaaacgacacgctggcgctatcggttatccagcaatttagtcagctcggcgcccagattcatctggatgattttggcacagggtattcttcgctttctcaactcgcccggttccctattgatgccgttaaactggatcaggctttcgtcagagatatccataagcaaccgctgtcgcaatctctggttagggcgattgtcgcggtggctcaggcgctaaatttacaagtgattgccgaaggtgtagaaaatgctaaagaagatgccttcctgacaaaaaacggcgtcaatgaacgacagggctttttattcgccaaacctatgcccgccgtttcttttgaacgctggtacaaacgttatcagacgaaaaaaatgcgttaa

SEQ ID NO: 134660 - protein, 660 aa, Salmonella typhimurium LT2
MMKQIQEQTALNPLHSHWRLADDRNVLYLSPTGETDAEKTVELSPEQAGRIREITAITSSLLITLLIEKQVTAVHLVGRKINNREWAGSLATWPDTPAVSPTQAQELSFAEQIVSEANSVIAILDSRGKICRFNRLCEEYTGLKERDVIGQSVFKLFMSRREAVASRHYIENFFRNGNAYEIERWIKTRKGQRLFLFRNKFVHNGSGKNEIFLICAGTDITEERRAQERLRILANTDTVTGLPNRNAIHEFINHAIASAGESQVGIVYLDLDNFKKINDAYGHMFGDQLLQAVSLALLSCLEEDQLLARLGGDEFIVLAAHTSQAALEAVASRILTRLRQPFRIGLIEVYTGCAIGISLAPRHGQDSESLIRTADTAMYNAKEGGRGQFCVFSPEMNQRVFDYHWLDTNLRKALENDQLLIHYQPKITWRGEVRSLEALVRWQSPERGLIPPLEFISYAEESGLIVPLGRWVILDVVRQIAKWRDKGINLRVAVNFSARQLADQTLFTALKQALYDLNFEYCPIDVELTESCLIENDTLALSVIQQFSQLGAQIHLDDFGTGYSSLSQLARFPIDAVKLDQAFVRDIHKQPLSQSLVRAIVAVAQALNLQVIAEGVENAKEDAFLTKNGVNERQGFLFAKPMPAVSFERWYKRYQTKKMR

SEQ ID NO: 134661 - DNA, 3831 bp, Pseudomonas putida KT2440
  CDS (1)..(3831): transl_table=11
ttgaccaaccttactcatccgtcgtcattgcgttccgccccacaagcacccgcgactctcctgcgcgggtcgatcaagggtgcgctggcgctgctggccctgatcctgctgggcctgctgctgtggcagctgttcgcccagttcaatcatacccaggccgaattgcgcaaacagagcctggacgcctccgcggaactggccgaccacctgagcctgaacatggcgctcaaggcgcaacaggccgtgaacgtggtgcaaccctaccctgatgcaccgacacctgccgccctgcccagcctgctcggtaccctgcgcgaacgccttcccgccctgcagagcgtggcctggctggacaacgtcgggcagctacgcgccgacagcctggccggcagccccgaccgccagtcacttgacgagttgctcgtgctgagccagggacgcccgtacttcttcaccaattcggccgacaaccacctcctgtacctgttgctgcgccaggatgccgcacagggtagcggctactggctgctgcgcctgtcaccggactattaccgcgagctcaccctccacctcgagggcagtggccacccgcagtggctgctggaaaacagccgcagcggcgaggtgctgcagcgccatgccgcagccgacaccagcgacgagccgctgcaaagcgtgatgctggcctttatcgaaaacagcacctggcagctacgcggtctgttcgacgccaaactggcccagcaaaaattattgccggcgctgctcggcaagtgcctgctggtgctgttctgcgccctgctgccagtgctggcgctgatcaacatgcgtcgccgccaacgggctctgcaggaagaccgccggcgttatcaggaaatttttgaaggcaccggcgttgccctgtgcgtgctcgacctgtccagcctgcccggccagctcgaccgctaccacctgcgtaaccgggccgcgctcaagcacagcctggcgctggacccgaacctgcgccgctcgctgctgctggagctgaagatcaccgaggtcaaccaagtggcgcgccagctgctgaacatcgactgccacgaaggtgcctggcagcggctgatcgatggcactggcgacagccgagacagcgtcggcatgcaactgatcgacgcactgatcgaacaacgcccgttgctggagctggaagtgcgcctgccgacaccgcagggcaccgagctgcacctgtggctgatggcgcgcctgccgctgcagcgccgtgattatcaggcggtgatcctcagcatcagcgatatcaccagccgcaaacaggtggagctgtcgctactggaacgcgaaagtttctggtcggacgtggtacgcaccgtacccgaccagttgtatgtgcaggatgtgccgagccagcggatgatcttcagcaaccgccacctcggccagaccctgggctacgaccgcaccgagctggcacagatgggcgaccgcttctgggagctgctgctgcaccccgaggacgccgcacactaccaggcactgcgccgccaacagcgcgacaactgtcatgaccaaccgctgcactgccagctgcgcttccgccaccgcgacggaagctggcgctgctacgacatccgcgagcaggtgctgacccgcaacgccgaaggcctggtgacgcgcatcatcggtgtgggcaaggatgtgaccgttcagatcgaggccagccagtcgctacgtgacagcgagcaacgctaccgcatgctcgccgaaagcatcagcgacgtgatcttttccaccgacaaccagctcaagctcaactatgtcagcccctcggtacagagcgtgctgggctaccaggccgactggatcttcgccaacggctggcagtcgatcgtcgccaacccggcccagctcactggcatctacagcctgatggagcgtgtcagcaaggccatgggcgatccggcgcagatggcgcaactgtgcagccagttacccacccaactgttcctgttcgactgcctgcgtgccgatggccgcaagatcccgatcgagctgcgcctggtgctggtgtgggacgatgaccagcgcttcgaaggcgtactcggggtgggccgcgacatcagccagcaacgtcgtgccgaaaaagacctgcgcatggccgcgaccgtattcgaacattccacgtcggcgatcctcatcaccgacccggccggctatatcgttcaggccaacgaggcgttcagccgcgtcagcggttacgccgtcagtgaagtgctcgaccaactgccgggcatgctcactgtcgacgaacagcaggaaggccacctgcgctatgtggtcaagcaactgcaccagcgcggcagctgggaaggtgaggtgtggctcaagcgccgtgacggcgaccactacccggcctgggtcggcatcaccgcggtactggacgacgaaggcgacctggccagctacgtgtgcttcttcaccgacatcagcgaacgcaaggccagcgaacagcgcatccaccgcctggcctactacgacgcccttacccacctgcccaaccgcacactgttccaggaccgtttgtacaacgccctgcagcaggccgagcggcagaaggcctgggtggtgctgatgttcctcgacctcgaccgcttcaaaccgatcaacgactccctcggccatgcggccggcgaccgcatgctcaaggacatggccctgcgcctgctggcctgcgtggatgacgacgacacggtggcacgcatgggcggcgacgagttcaccctgttgctgcaaccgcgccccacccgtgaaatggccctgaaccgcgccatccacgtggccgagaacatcctcggcagcctggtgcggccgttcgtgctggaaaaccgcgagttcttcgttaccgccagcatcggcatcgccctcagcccgcaggatggcagtgagctgagccagctgatgaagaacgccgacaccgccatgtaccacgccaaggagcgcggcaagaacaacttccagttctaccaggccgaaatgaacgccagcgccctggagcgcctggagctggaaagcgacctgcgccatgccatggagcagaacgaattcatcctctattaccagccgcagttcagcggcgacggcaagcgcctgaccggcgccgaagcgctgctgcgctggcgtcacccgacccgaggcctggtgccgccgggcgacttcatcccggtgatcgaggaactgggcctggtggtggacgtgggcgactgggtgctgcgcgaggccagccgccagctcaaggcctggcacaaggccaaggtgcgggtgccgaaagtgtcggtgaatatttcggcgcggcagttctccgacggccagctaggcacgcggattgccaacatcctggaagaaagcggcctgccgccggcatgcctggaactggagttgactgaaagcatcctgatgcgcgaggtgaacgaggcgctgcagattcttgccagcctgaagaacctcggcctgagcattgcggtagacgacttcggcaccggctactcgtcgctcaactacctcaagcagttccccatcgacgtcctgaagatcgaccggaccttcgtcgacggcctgcccgaaggcgagcaggacgcgcagattgcccgggcgatcatcgccatggcccacagcctcaacctggcagtcatcgccgagggcgtggaaacccacgaacagctggagttcctgcgcgagcatggttgcgacgaggtgcagggctatctgttcgggcggccgatgccagcgcatcagttcgaggcgcaattctccaacgagaccttgttcatgttccattga

SEQ ID NO: 134662 - protein, 1276 aa, Pseudomonas putida KT2440
MTNLTHPSSLRSAPQAPATLLRGSIKGALALLALILLGLLLWQLFAQFNHTQAELRKQSLDASAELADHLSLNMALKAQQAVNVVQPYPDAPTPAALPSLLGTLRERLPALQSVAWLDNVGQLRADSLAGSPDRQSLDELLVLSQGRPYFFTNSADNHLLYLLLRQDAAQGSGYWLLRLSPDYYRELTLHLEGSGHPQWLLENSRSGEVLQRHAAADTSDEPLQSVMLAFIENSTWQLRGLFDAKLAQQKLLPALLGKCLLVLFCALLPVLALINMRRRQRALQEDRRRYQEIFEGTGVALCVLDLSSLPGQLDRYHLRNRAALKHSLALDPNLRRSLLLELKITEVNQVARQLLNIDCHEGAWQRLIDGTGDSRDSVGMQLIDALIEQRPLLELEVRLPTPQGTELHLWLMARLPLQRRDYQAVILSISDITSRKQVELSLLERESFWSDVVRTVPDQLYVQDVPSQRMIFSNRHLGQTLGYDRTELAQMGDRFWELLLHPEDAAHYQALRRQQRDNCHDQPLHCQLRFRHRDGSWRCYDIREQVLTRNAEGLVTRIIGVGKDVTVQIEASQSLRDSEQRYRMLAESISDVIFSTDNQLKLNYVSPSVQSVLGYQADWIFANGWQSIVANPAQLTGIYSLMERVSKAMGDPAQMAQLCSQLPTQLFLFDCLRADGRKIPIELRLVLVWDDDQRFEGVLGVGRDISQQRRAEKDLRMAATVFEHSTSAILITDPAGYIVQANEAFSRVSGYAVSEVLDQLPGMLTVDEQQEGHLRYVVKQLHQRGSWEGEVWLKRRDGDHYPAWVGITAVLDDEGDLASYVCFFTDISERKASEQRIHRLAYYDALTHLPNRTLFQDRLYNALQQAERQKAWVVLMFLDLDRFKPINDSLGHAAGDRMLKDMALRLLACVDDDDTVARMGGDEFTLLLQPRPTREMALNRAIHVAENILGSLVRPFVLENREFFVTASIGIALSPQDGSELSQLMKNADTAMYHAKERGKNNFQFYQAEMNASALERLELESDLRHAMEQNEFILYYQPQFSGDGKRLTGAEALLRWRHPTRGLVPPGDFIPVIEELGLVVDVGDWVLREASRQLKAWHKAKVRVPKVSVNISARQFSDGQLGTRIANILEESGLPPACLELELTESILMREVNEALQILASLKNLGLSIAVDDFGTGYSSLNYLKQFPIDVLKIDRTFVDGLPEGEQDAQIARAIIAMAHSLNLAVIAEGVETHEQLEFLREHGCDEVQGYLFGRPMPAHQFEAQFSNETLFMFH

SEQ ID NO: 134663 - DNA, 1986 bp, Escherichia coli CFT073
  CDS (1)..(1986): transl_table=11
atgaaaaccgttagggagtccacaacgttgtacaactttctcggatcgcacaatccatactggcggttgacggaaagcagcgatgttttgcgcttttctaccaccgaaatcacagaacccgatcgtattttgcaactatctgccgaacaggctgctcgcatcagggaaatgacggtcatcacctccagcctgatgatgagtctgaccgtcgatgaaagcgatctttctgtgcatctggtaggacgaaaaatcaataaacgagaatggggaggcaacgcgtctgcatggcatgacacaccggcggttgctcgtgatttatcacatgggctttcctttgctgagcaggtagtttctgaagcacattccgcaatagtgattctcgacagccgggggaatatccagcgcttcaatcggttatgtgaagattacacagggttgaaagaacacgacgtcattgggcaaagcgtgtttaaactgtttatgagtcgtcgtgaagctgcggcatccaggcgcaataaccgtgtattttttcgaagcggcaatgcatatgaagtcgaactatggataccaacacgtaaaggccagcggctgtttctgtttcgcaataaatttgtccacagcggcagtggcaaaaacgagatttttttaatctgttccggcaccgacattaccgaagagcgccgcgctcaggagcgactgcgtattctggcaaataccgacagtatcaccggactgccgaatcgtaacgcgatgcaggagttaatcgatcacgctattaatcaggcagataacaataaagttggggttgtgtatcttgatttggataattttaaaaaggtcaacgacgcctatgggcatttgtttggtgaccagttattacgcgacgtgtcattggctattttaagctgtctcgaacatgaccaagtattggcgcgtccaggtggcgatgagtttctggtactggcatccaatacctcacaaagcgcgctggaagcattggcatcacgaattttgacccgcttacgactcccctttcgcattggtttaattgaagtttataccagctgttcagtaggtatttcactctctcccgaacatggttcggacagcgcggctattattcgtcacgccgacacagcaatgtacacagcgaaggaaggcggacgaggacaattttgcgtttttaccccagaaatgaatcagcgggtatttgaatatctctggctggataccaacttgcgtaaagcactggaaaacgatcagttggttattcactatcaaccgaaaatcacctggcgtggcgaagtgcgcagtctggaagcactagtacgttggcagtcacctgaacgtgggttgattccaccgttggacttcatttcctacgccgaagaatcagggctaattgtgcctttaggccgttgggtgattctcgatgtcgtacgccaggtagcgaagtggcgggataaaggcattaacctgcgagtggcggtaaatatttctgcacgtcagctcgccgatcaaaccattttcaccgccctgaaacaggttctccaggaactcaattttgaatactgccctatagatgttgaactgacggagagctgcctgattgagaatgatgaactggcactgtctgttattcaacaatttagccgattaggtgcgcaagttcatctggacgattttggtaccggctactcttcactttcgcaactggcgcgctttccgatcgatgccatcaaacttgaccaggtttttgttcgggatattcacaaacagcctgtctcgcaatcactggtccgggcgatcgtcgctgtggcccaggcattgaatcttcaggtgatcgccgaaggtgtagaaagtgcaaaggaagatgcttttttaaccaagaacgggatcaatgagcgacaaggatttttgtttgccaaaccgatgcccgccgttgccttcgaacgctggtataaacgctatctgaagcgcgcataa

SEQ ID NO: 134664 - protein, 661 aa, Escherichia coli CFT073
MKTVRESTTLYNFLGSHNPYWRLTESSDVLRFSTTEITEPDRILQLSAEQAARIREMTVITSSLMMSLTVDESDLSVHLVGRKINKREWGGNASAWHDTPAVARDLSHGLSFAEQVVSEAHSAIVILDSRGNIQRFNRLCEDYTGLKEHDVIGQSVFKLFMSRREAAASRRNNRVFFRSGNAYEVELWIPTRKGQRLFLFRNKFVHSGSGKNEIFLICSGTDITEERRAQERLRILANTDSITGLPNRNAMQELIDHAINQADNNKVGVVYLDLDNFKKVNDAYGHLFGDQLLRDVSLAILSCLEHDQVLARPGGDEFLVLASNTSQSALEALASRILTRLRLPFRIGLIEVYTSCSVGISLSPEHGSDSAAIIRHADTAMYTAKEGGRGQFCVFTPEMNQRVFEYLWLDTNLRKALENDQLVIHYQPKITWRGEVRSLEALVRWQSPERGLIPPLDFISYAEESGLIVPLGRWVILDVVRQVAKWRDKGINLRVAVNISARQLADQTIFTALKQVLQELNFEYCPIDVELTESCLIENDELALSVIQQFSRLGAQVHLDDFGTGYSSLSQLARFPIDAIKLDQVFVRDIHKQPVSQSLVRAIVAVAQALNLQVIAEGVESAKEDAFLTKNGINERQGFLFAKPMPAVAFERWYKRYLKRA

SEQ ID NO: 134665 - DNA, 3837 bp, Pseudomonas syringae pv. tomato str. DC3000
  CDS (1)..(3837): transl_table=11
ttgcccacttcaacgcctttgccgtcatcccatgttgctgcagacagtgcgacaaggcctctgcgtgggtcagtgaaaggtgtattggcggcgctggtcttggtgatgcttgccatgttgctctggcaattgatcgagcagtttcaccagactcaggaacgccagcgtcagcgcagcctggaatacagcatccagctttccgaccggatgagcctgaacatggcgctcaaggcgcagatcgccatgaacctgctggacgaggcgcaatcgtccggggaacgtctggagcagcccgtcatgctggcaggcctgcgcactgccctgcccgcgctgcgcagcgttgctcgcctgaacccggccggtgacatcgtcagcgacagcgccgaagtgccccgcgacggcgacttcctcaggcatgccatgaggcaggcgctgggccgcccttatttctacaccagtaccgacgacggcaaccagctctacgtgctgattcgccagggcggcggcattaccggtgactattgggcgctgcgcatggcaccggacgcgctgaaagacctggccagccagccggctcaggactttcagcacgtgtggcgtctggagcaacgcaagacacaacgggtcatcctccgcgaaccgctgccctccaatgatgccgacagcggtctgtccgaaaccattcttctgcaaccgctcagcaacagtgactggcagctgcgcggcctgttcgacacctacaaggcgcgcagcgaactgctcacgccactgatcggcaaatgtgtgatcggcctgctgctctcgatcctgccattgatcgcactgatcagcctgcgccgacgtcagcgccagatgctgcaaagtcgacgccgctatcgggacatcttcgaaggcgcgggcgtggcgatctgcgtgatggatatgtctggcctgcaggagcaactcgacgcccttcagatcagcacgggcgaagagtttgatcggctgctcaagagccagcctgcctcgctgaaaaggctgctgcagcaactgcgcatcaacgagctcaacgaagttgcgcttggcctgctggaaatcgagtgcaacgaacaggcctggcagcagttgatcgagggcgaatcgcgcacgcgcccaggcatcggcattcaggtgatacatgccgtgcttgccagacagacacgattggaactggaaatctgcctgacacgtgcaagtggtcaggaccagcatctgtggctggtcatgcgcctgcccgaagcgcgtagcgacttcgatgccgtgattctcagcatcggcgacatcaccagccgcaaacagaccgagctgtcactgctggaccgcgaaagcttctggtccgatgtgatccgcaccgtgccggaccacctgtatgtgcaggacgtgctcagccagcgcatgatctacagcaaccaccattttggccatacgctgggctacaacaagttcgaactgcgcgcgatgggcgagttcttctgggaaatactgctgcacccggacgatgccaagagctatcaggacatgcgcctgcgccagcgccaccacgggcacaacgagttgctgcaatgcgtgctgcgctttcgcgatcacgagaacaactggcgttgcttcgacgtgcgcgagcaggcactggcctgggacacagaacatcttgtcacgcgcatcatcggcattgccaaggacatcaccgagcaggttgcgtccagccagtcgctgcgcgacagcgaacagcgctaccgtatgctcgccgaaagcatcagcgacgtgatcttttccaccgacgcccatctgaccgtcaattacgtcagcccctcggtcgagcgcgcgctgggctacagcgccgactggattacccggaacggctggtctgccgccattgccaacccccagcaactgaccggttttgatgcgctcatcagccgcatcagcaaagtcctccacaagccgcaggagctggcgcggttgcgcgacgaagtgaccacccggatgtttctgttcgactgcctgcgtgcagacggtcgcaagatcccggtggaactgcgcgtggtactggtatgggatgaacacggcaatttcgagggcattttcggcgtcggcagggacatcagccagcaacgccgcgccgaaaaagacctgcgcatggctgccacagtatttgagcattccgcctcggccatcctcatcaccgaccccgcaggctatatcgtgcaggccaacgaggccttcacgcgcgtcagcggctacgaagtcgctcaggtgctcgaccaactgccgggcatgctcaccgttgaaagcgaacaggaagcgcacttgcgctacatcctcaggcagttgaacgggcaaggcacctgggaaggtgaaatcaggctcaagcgacgcaacggcgaacactatccggcctgggtcggcatcacggcagtggtcgatgacgaaggcgacctggccagttatgtgtgcttcttcagcgacatcagcgagcgcaaggccagtgaggaccgcatccaccgcctggcttattacgacgcgctgacgcacctgcccaaccgcacactgtttcaggatcgcctgcattcggcgttgcagcaggcagagcgccagcaggcctgggtggtgctgatgttcctcgatctcgaccgtttcaaaccgatcaatgactctctgggccatgccgccggcgaccggatgctgcaggaaatggccacgcgcctgctggcctgtgtatccgctgacgacaccgtggcacgcatgggcggtgatgaattcacgctgttgctgcaaccggacatcacgcgcgaagccgcgctgacgcgcgccattcacgtggccgagcggatcctgaccagtctggtgacgccgtttgtgcttgaaggccgtgagttctttgtcaccgccagtatcggcatcgcgctcagcccgcaggacggtagcgaactgagcaagttgatgaagaacgccgacacggcgatgtatcacgccaaagagcgcggcaaaaataacttccagttctaccagaccgacatgaacgccacggcgctggagcgtctggagctggagagcgatctgcgtcacgccctggaacagcaggagttcaccctctattaccagccgcagttcagtggtgacggcaaacgcctgacgggcgcagaagcgttgctgcgctggcgccatccgcgtcgcgggctggtgccgccgaacgacttcatcccggtgctcgaagagctcgggctggtggtggaagtcggcgactgggtgctcaccgaagcctgtcgccagctcaagcactggcatcaggcgaaagttcgcgtgccgaaagtatcggtgaacatctcggcgcggcaattctcggacggccagttgggtaaacgcatcgcccacatactggaacagacgggtctgtcgcctgcctgtcttgagctggaactgaccgaaagcatcctgatgcgcgaggtcaacgaggccatgcagatcctcgacggcctgaaaaaccttggcttgagcatcgccgtcgatgacttcggcaccggatactcgtcgctgaattacctcaaacagttcccgatcgacgtgctgaagatcgatcgcaccttcgtcgatggcctgccctcaggcgaacaggacgcccagatcgcccgcgccatcatcgccatggcccacagcctgaacctctcggtcatcgccgagggcgtggaaacccacgaacaactggagttcctgcgtgagcacggctgtgacgaagtccagggctacctcttcggccgccctatgccacccagccagttcgaagcgcaattcagcaacgatgccctgttcatgctggattaa

SEQ ID NO: 134666 - protein, 1278 aa, Pseudomonas syringae pv. tomato str. DC3000
MPTSTPLPSSHVAADSATRPLRGSVKGVLAALVLVMLAMLLWQLIEQFHQTQERQRQRSLEYSIQLSDRMSLNMALKAQIAMNLLDEAQSSGERLEQPVMLAGLRTALPALRSVARLNPAGDIVSDSAEVPRDGDFLRHAMRQALGRPYFYTSTDDGNQLYVLIRQGGGITGDYWALRMAPDALKDLASQPAQDFQHVWRLEQRKTQRVILREPLPSNDADSGLSETILLQPLSNSDWQLRGLFDTYKARSELLTPLIGKCVIGLLLSILPLIALISLRRRQRQMLQSRRRYRDIFEGAGVAICVMDMSGLQEQLDALQISTGEEFDRLLKSQPASLKRLLQQLRINELNEVALGLLEIECNEQAWQQLIEGESRTRPGIGIQVIHAVLARQTRLELEICLTRASGQDQHLWLVMRLPEARSDFDAVILSIGDITSRKQTELSLLDRESFWSDVIRTVPDHLYVQDVLSQRMIYSNHHFGHTLGYNKFELRAMGEFFWEILLHPDDAKSYQDMRLRQRHHGHNELLQCVLRFRDHENNWRCFDVREQALAWDTEHLVTRIIGIAKDITEQVASSQSLRDSEQRYRMLAESISDVIFSTDAHLTVNYVSPSVERALGYSADWITRNGWSAAIANPQQLTGFDALISRISKVLHKPQELARLRDEVTTRMFLFDCLRADGRKIPVELRVVLVWDEHGNFEGIFGVGRDISQQRRAEKDLRMAATVFEHSASAILITDPAGYIVQANEAFTRVSGYEVAQVLDQLPGMLTVESEQEAHLRYILRQLNGQGTWEGEIRLKRRNGEHYPAWVGITAVVDDEGDLASYVCFFSDISERKASEDRIHRLAYYDALTHLPNRTLFQDRLHSALQQAERQQAWVVLMFLDLDRFKPINDSLGHAAGDRMLQEMATRLLACVSADDTVARMGGDEFTLLLQPDITREAALTRAIHVAERILTSLVTPFVLEGREFFVTASIGIALSPQDGSELSKLMKNADTAMYHAKERGKNNFQFYQTDMNATALERLELESDLRHALEQQEFTLYYQPQFSGDGKRLTGAEALLRWRHPRRGLVPPNDFIPVLEELGLVVEVGDWVLTEACRQLKHWHQAKVRVPKVSVNISARQFSDGQLGKRIAHILEQTGLSPACLELELTESILMREVNEAMQILDGLKNLGLSIAVDDFGTGYSSLNYLKQFPIDVLKIDRTFVDGLPSGEQDAQIARAIIAMAHSLNLSVIAEGVETHEQLEFLREHGCDEVQGYLFGRPMPPSQFEAQFSNDALFMLD

SEQ ID NO: 134667 - DNA, 2379 bp, Geobacter sulfurreducens PCA
  CDS (1)..(2379): transl_table=11
atggatttcacaaaaatctccgcactccactaccgccttccttcaccggtgcggcagttcatcgtgctgctttcgatcatttttctgatcgaaatgctgctcatggcggtcctgccccaagttaccggccgtgaagtcgagtttaaggatgcacttgtcgacagcatggggctcgtcacggttgccgcgccgtttctgtgggctttcattgtgcgtcccctgcgccgcacggccgttgcggccgttttccgggaggaggtactcctccgccagatggtcgacggggtgattactttcggggaagacggcacgatccgttccctcaatccggccgccgagcggatgttcggctatcgggacgatgaggccgccggcatggccatcgactgcctgctgtcggccgacgggggctatttccgatttgcggtacaggcatccggcggccatggcacacgccagctcgcctatgaactggaagggatccgccgggatggcagccgcttcgttgccgatctttccgtcagccggatcgtttttgaagatcaccgggcagtgatcggcattgtccgggacatcaccgcccgcaaacgggacgagcagaatctcctcgtcttcaaacgggccatcgagtcgagcgtaaacggcatcactatcaccgacgcgactaacggcgaaaacctaatcatttacgtgaatcctgcattcgagcggatgaccggctacgcgggacacgaggttcttgggaagaacccgcgttttctcaggggggatgaccgggaccaggtggaactcaggaagctggccatggccctggaggaacgcagggagggctactttgtcctgcgcaactaccgcaaggacggcagccagttcatgaacgaactttacgtggcgccggtgcgcgaccgtgatggcgcagtcaccaattacatcggcatcatgaatgatatcagcgaccagcggcgctacgaggaacagctggtctaccaggccactcacgaccccctgaccggccttcccaaccgtaatctcctgcaggaccgccttgggcaggcgctcgctctggaatccttccgccgtcgcaatcccatcggcgtcatgttcctggatctcgacaacttcaaaaagatcaacgataccctggggcacacggtgggagacatgctgctcaaggccgtcgccaaccgcctgcgcaactgcgtgcgcggcggcgacacggtttcgcggctgggaggggacgaatacatccttatccttcccaatgtaaaggaaatgcatgacgtgaccactgtggccaagaagctgctcggcgtattttccacgccgttcctgctcatgggacacgagctctacatcacggcaagcatcggtatcaccctcttcccctccgatggcgacacggtggatgcgctcctcaagaatgccgatgccgccatgtatcatgccaaggagcaggggaagaacaactaccagttctattcagaggagatgaacacgcgggtcttcgagcggatggctctggaaacgagcctccatcgggcgattcggcagcatgagtttctgctctgctaccagcctcgggtcgatctgcggaccggaaggatcagcggggtggaagcccttgtgcgttggaaccacccggagatggggctcgtgccgccggccaggttcatccctctggccgaggaaacggggctcatcgtgcccatcggcgagtgggtcctgcgcaccgcctgcgcccagaacaaggcatggcaggatgcggggctcccgccactgaggatggcggtgaacctttcggcccggcagttccgtcaggaaaatctcatccagatggtcgccgacgccttggccgaaacgggtctcgacccccgctggctggagctggagctgaccgaaagcctcctcatggagcgggccgagcagtccgtgtcgatcctccgctccctggcggatatggggatcgacatcgccgtggacgatttcggcaccggctattcgtctctggggtatctcaagcggttcccgattacgaacctgaagatcgatcaatcgttcatccgcgacatagcgagcgatccggacgacgccattctggtgcggaccatcatcaccatggcccacggcctcggcatgaagaccgtcggcgaaggggtcgaatctcttgagcagattgatttcctctatcggcacggctgcgaagaagtgcagggatactatttcagcaggccgcttaccgctgagggatgcgaggagctgcttcgcgaggagaggtttctggatcttcgggcgctccgggatgggttgccgggccagaggagcgaggagcgcattcgcgccctggcgtcatccgctgatgactgccgcgttacagcgtaa

SEQ ID NO: 134668 - protein, 792 aa, Geobacter sulfurreducens PCA
MDFTKISALHYRLPSPVRQFIVLLSIIFLIEMLLMAVLPQVTGREVEFKDALVDSMGLVTVAAPFLWAFIVRPLRRTAVAAVFREEVLLRQMVDGVITFGEDGTIRSLNPAAERMFGYRDDEAAGMAIDCLLSADGGYFRFAVQASGGHGTRQLAYELEGIRRDGSRFVADLSVSRIVFEDHRAVIGIVRDITARKRDEQNLLVFKRAIESSVNGITITDATNGENLIIYVNPAFERMTGYAGHEVLGKNPRFLRGDDRDQVELRKLAMALEERREGYFVLRNYRKDGSQFMNELYVAPVRDRDGAVTNYIGIMNDISDQRRYEEQLVYQATHDPLTGLPNRNLLQDRLGQALALESFRRRNPIGVMFLDLDNFKKINDTLGHTVGDMLLKAVANRLRNCVRGGDTVSRLGGDEYILILPNVKEMHDVTTVAKKLLGVFSTPFLLMGHELYITASIGITLFPSDGDTVDALLKNADAAMYHAKEQGKNNYQFYSEEMNTRVFERMALETSLHRAIRQHEFLLCYQPRVDLRTGRISGVEALVRWNHPEMGLVPPARFIPLAEETGLIVPIGEWVLRTACAQNKAWQDAGLPPLRMAVNLSARQFRQENLIQMVADALAETGLDPRWLELELTESLLMERAEQSVSILRSLADMGIDIAVDDFGTGYSSLGYLKRFPITNLKIDQSFIRDIASDPDDAILVRTIITMAHGLGMKTVGEGVESLEQIDFLYRHGCEEVQGYYFSRPLTAEGCEELLREERFLDLRALRDGLPGQRSEERIRALASSADDCRVTA

SEQ ID NO: 134669 - DNA, 3120 bp, Azoarcus sp. EbN1
  CDS (1)..(3120): transl_table=11
atggcgaactggccggagtacgttcggcagcgccgtccgctcgtcgtcggcatcgtcgttttccttgtcgcggcaatggtttctggcgtgctcgtgctcggcctcgggcacccgggcgacaacctggggctgtcgctgaacgccgccgtggtgttgctgttcagcctgctgctcggcgggttggccaaccagatggcgcagttgcgcgcgcaccgggccgatctgcagcgactggtggcggcacgcagcgccgaagtgcgggcgcgcgaggcggaactggatcgtgcccagtcggtggcgcatgtcggcgaacagcagttgcgcaagttgtcgacagcaatcgaatgcagcccggcatcgatcgtgatcaccgaccgcagcggaaccatcgagtacgtcaatccgcagttcgaacgcagcaccggctacaccgcccaggaagtggtgggaaagaatccgcgcatcctcaagtcgggcaatcgttcggcggacgaatacgcggcaatgtgggcgacgatcactcacggccacgtgtggcgcggcgaattcgagaacgtgcgcaaagacggtgcgcattactgggagagagcctcgatcgccccgatccgggcagacgacgggatgatttcgggttttgtcgcggtcaaggaagacatcacgttgcagaagcgggccgagcgcgagctgcgcgatcgggaaatgaagctcgccgcgctgattgcgtcgttgcccgacctgatgttcgtcgttgaccaaaaccggtgcatcgcggagttccacgcccctgatcccggactgctgctgacgccgccggagtgttttctcggccgtccgtatgcgcgaacgctgccgccggcagtggtcgtgaagctcgatgaggcgctggaggaaatttccgccacgggaggggcgaagcaggtcgaatacacgctcgatttgccgcgcggcaggcaccatttcagcgcatcggtcagtcgcctcgccggcagcggcctcgtcccggaaggcttcatcgtgctggtgcgcgaccttaccgagcgcgtgcgcatggaacaggcgctgatcgaaagcgagttgcgctaccgcgagctgttcgcgaacagccgtgtcgtgatgctcgtcatcgaccccgtcgacggtcgtatcgtcgaggcgaacgcgaaggcctgcgaatactacggctacgacccggtctcgctgacacgcatgaagatcgaggacatcaatgtgcctggtcgcgagccgctccgcttcgagatggtgcaggcgcgcaagcccgacacgttccgctgctgccaccggctcgccggcgggcagttgcgcgacgtcgaggtggcgagcagtccaatcgagattgccggcaggaagctgctctactcgatcgtccgggatgtcactgaacgcaagcgcttcgaggagcgcatgcgccaggcgatggtggtgttcaaagcctccagccaaggcatcatgacgaccgatgcgcaaggcgtgatcacgtccgtcaaccccgcgttctgcaccatcaccggctacctcgccgccgaagtcatcggccgcaagtcgtcgatgttcaagcccgaacgccacgaggcaacgtttttcgatgcgatgtggacgtcgatcgtcgagagcggcagttgggcgggcgaagtgtggagccggcgcagcgacggcgacaggtatccgcagtgggtcacgatcactgccgtgcgcgacaccgacggcaggatcgccgagtacgtcacgctgttcagcgatatcaccgagcgcaagcagcaggaagtcgcgatgtggcgccaggccaacttcgacccactcaccgggctagccaaccgcagcctgctgcaggaccgcctcgatcgcgcgctcgcccacgcccgtcgtcatgggtgcaaggtcgggttgctgttcctcgacctcgacggcttcaagtggatcaacgattcgctcggccacgacgtcggcgacgagttgctggtggatgtcgcgcgccgcctcaacagctgcgtgcgcgacgaggacacggtcgcgcgcctgggcggcgacgagttcacggtcgtcgtgcacgaccttgccgaccgtgcggacctcggcgcgatcgccgacaagctcgtcgccgtgctgcgcgagcctttcgcgctgcgtggtgcgcgtcaccatatttccggcagcgtcggcatcacggtgtttcccgatgacggtgacgacgtccagacgctgctgcgcaacgccgacatcgcgatgtacaaggccaagcaggcgggcaagaaccgcgcccagccctatgccccccacatgcaggccgatgcgctcgcgcgcgtgcacctcgaagcggatctgcgcatggccgtcgaacagcgcgcgttcgagctgcattaccagccgatcgtcgactgcgcgagcggcgcgctcgtcggagccgaagcgctgatccgctggaagcatcccgagcgcggcatgatctcgccgctcgaattcatcccggtggcggaagagtgcgggctgatcgtcccgatcggagaatgggtgctgcgcgaagtcgtgcgccaacggcgcgactggctggcgcgcggccatccgccgctgcgtctcacgctgaacgtgtcgggagtccagttccgggaagccggcctgccggagctcgtgcgtacgctgctcgcggaattcggcacggcccgcagctccctggtcttcgagatcaccgaatcggtgctgatgggcgggagcgaaaacgtcgaggcccgcatgtgcgacatcaaggagcagggcatctgcttcgcgctcgacgatttcggcaccggtttctcgtcgctgtcctacctcaagcgcttccccgtcgatatcgtcaagatcgatcgcagcttcgtgcgcgactgcccggacgaccgcaacgacgcgactctcgtcgaagcgatcatcaacatggcgcacagcctcgggttgcgcgtcaccgccgaaggcgtcgaatcggccgaacagcgcgaattcctgcgcgcgctgggctgcgactacctgcaaggctacctgatcggcaaaccgttggcggccgacgcgttcgaggcgctcatggcgccgctgcgaagcgctgccgcggcgccgcactgcaccgagtcatgctga

SEQ ID NO: 134670 - protein, 1039 aa, Azoarcus sp. EbN1
MANWPEYVRQRRPLVVGIVVFLVAAMVSGVLVLGLGHPGDNLGLSLNAAVVLLFSLLLGGLANQMAQLRAHRADLQRLVAARSAEVRAREAELDRAQSVAHVGEQQLRKLSTAIECSPASIVITDRSGTIEYVNPQFERSTGYTAQEVVGKNPRILKSGNRSADEYAAMWATITHGHVWRGEFENVRKDGAHYWERASIAPIRADDGMISGFVAVKEDITLQKRAERELRDREMKLAALIASLPDLMFVVDQNRCIAEFHAPDPGLLLTPPECFLGRPYARTLPPAVVVKLDEALEEISATGGAKQVEYTLDLPRGRHHFSASVSRLAGSGLVPEGFIVLVRDLTERVRMEQALIESELRYRELFANSRVVMLVIDPVDGRIVEANAKACEYYGYDPVSLTRMKIEDINVPGREPLRFEMVQARKPDTFRCCHRLAGGQLRDVEVASSPIEIAGRKLLYSIVRDVTERKRFEERMRQAMVVFKASSQGIMTTDAQGVITSVNPAFCTITGYLAAEVIGRKSSMFKPERHEATFFDAMWTSIVESGSWAGEVWSRRSDGDRYPQWVTITAVRDTDGRIAEYVTLFSDITERKQQEVAMWRQANFDPLTGLANRSLLQDRLDRALAHARRHGCKVGLLFLDLDGFKWINDSLGHDVGDELLVDVARRLNSCVRDEDTVARLGGDEFTVVVHDLADRADLGAIADKLVAVLREPFALRGARHHISGSVGITVFPDDGDDVQTLLRNADIAMYKAKQAGKNRAQPYAPHMQADALARVHLEADLRMAVEQRAFELHYQPIVDCASGALVGAEALIRWKHPERGMISPLEFIPVAEECGLIVPIGEWVLREVVRQRRDWLARGHPPLRLTLNVSGVQFREAGLPELVRTLLAEFGTARSSLVFEITESVLMGGSENVEARMCDIKEQGICFALDDFGTGFSSLSYLKRFPVDIVKIDRSFVRDCPDDRNDATLVEAIINMAHSLGLRVTAEGVESAEQREFLRALGCDYLQGYLIGKPLAADAFEALMAPLRSAAAAPHCTESC

SEQ ID NO: 134671 - DNA, 3639 bp, Thiobacillus denitrificans ATCC 25259
  CDS (1)..(3639): transl_table=11
gtgacgaatcttccgatctcgactcgactgctgttgagctacctcctcgtcgccgtgctgccgcttgccggcctcgcggcgttctatctcgcctcgttcgaggcctcgctgacgcaaaccgtgctcgcgaacatggcgagcgtcgccgacaagaaagccgcgcagatcgacagctacctgcgcgagcgctcggaggacgtcgcccagctcgccctgcgccccgcggtccgcaacgggttgctcgaactcacgcgcgcgtttcgcgcgggcggccccgctgcgccggcctatctcgacgccacgcttcaactgcggcgggcgctcgaagatggcggagccgcgtcgggtttctacgacctgctgctggtcgacgccgaaggcaacgtgctgttcacgctcaagcgcgagcccgacctgctctcgaatttgcgccacggcccctaccgcgacaccgaactcgcagcgggatacgcgcgcgcgatgcggagcggcaagccgctgctcacgcgctttgcgccctacgcgccatccgacaaccgcccgacggcgttttacgtgacgcccctgcgcatcgacggcgaggtccacggcgcgctcgccttgcagctcgacgtgcagcgcctcatgacggtcacggtcgaccgcatcggcctcggacgcactggcgaaacggttctggcgcaacgcgacggggacgaggcgtattacaccggcccgctgcgccacgtgcgtgacgccgcctaccgctatcgcgtgccgctcaagcagggggctgccccgatgatcgcggcgctcgccggcaggaatggcgacggggtcgtgcgcgactacgccgggatcgagacggtcgcggcgtggcgtcatcttccggccctggactggggcatggtcgtgaaaatcgacgccgacgaggcgctcgcgcccgcgcaccatttgcgccagctgacctacgtggcgctcgcgctgtttctactgctctcggctgcaaccgcctttttgctcggccgccgcttcgcccgcccgattcgcgcgatgacgcgcgtcgcggaccagatcgccgccggcgatctgcgtcagcgcgtgccgcaggacggaggcgacgaactcggacgtctggccgctgcattcaatcgcatggccgacacgctggcggcgtcctatgacaacctcgaagccgaggtggaaaaacgctcgcgcgaattgcgcgaactttccgcgctgcagggcgcgatcctcgagcacgcgggggcgctggtcgtggtcctcgaccgcgagggccgcatccgccgcttcaaccgtgcgtgcgaggctttgacgcagtattcgttttccgaggtcgaaggccgccaggtatgggatttcatcccgcccgaggaacgacggatcgtgcaggacgaggcgtttgcggtcctcttcaacgatccggagcagtcccggagcacgctcaccaatcactgggtcgcgcgcgacggaggtcgccgtctgatcgaatggtccaattccgtgttgcacgacgcgcagggcaaagtcgaattcgtcgtcgccgtgggcaacgacgtcaccgataaaatgcgggccgaagccgcgctcaaggaaagcgagagccggctcaaagaggcgcagcgtatcgcccaggtcggcagctgggcgctcgatctcgtcacgggtaaattgatctggtcggacgagatgtttcgcattttcgaaaccgacgaggcggcgttcggccagtcgtacgaggccttcctcgatgcactccatccggaagaccgggagcacgtgaacaaggcctacatgcattcggtcaccaaccacacgccctatgacctcgtccaccggcttcttctgccggacggccgggtcaaatggctgcatgggcgcggcgagacacgctacggcaagaacggcgatccgatcgcttcctgcggtaccgtgcaggacatcacggcccgcaagaagcaggaagacgcgctgcggctctacgcgagcattttcgagcacagcggcgaagcgatcctgatcgccgaccaggcgcgccacatcatcgcggtgaaccctgcgttcaccaacctgacgggctatgcgctcgacgacatccgcggcgaggaaccgaccattcttgccggggggcaagcgtccgaagagagctatcgcagcacctgggcgtcgctcgagcaaactggctattggcagggcgaaatcatcgaccgccgcaaggacgggacgctctatccgaagtggatggcggtatcggtcgtgcgcgatgcggacggcgtcctcacccattacgtcgcgagtttcaccgacatcaccgagcgcaagctcgcagaggcacagatcaaacatctcgcctatcacgacccgctcaccgggctcagcaaccgcttcagccttcagacgcaactcgaccagaccctcgcgctggcgcgtcgcgaacagcgcaccctggcggtcgtcttcctcgacctcgaccgcttcaagtcgatcaacgatagcctcggtcacgcgctcggcgaccagttgctcgtcgaggtcgcccgtcgtctgcgcgacaacgtacgcgacagcgacatcgtcgcacgcctcggcggcgacgagttcgtcgtcgtgctgaccgaagtgggcgacgcagcaggcgcggcgcgcgtggccgacaagctgctgggcgcgctggttccgcgctaccggatcggcgggcacgcgctgcacaccaccgcgagcatcgggatctcgctctatccgcacgacggcgacgacgctgacgctttgatgaagaacgccgataccgcgatgtatcacgccaaatcgcaaggtcgcgacaacgtgcagttctttacgcccgagatgaatcagtcggtgctcaaacgcctgcagttcgaccacgatcttcgggtggccgtcgaagcaggccagttcgaattgcattaccagccgcagatcaacagcacgagcggccgggtcgtgaaggtcgaagcgctggttcgctggcagcacccgcgcgagggcttggtgtcgccggcagaattcattccgatcgccgaggagacaggactgattctgccgcttggtgagtgggtgctcaacgaggcctgtcgccaactcaggctctggcgcgacgcgggtatcaccgacctgaccgtcgcggtcaatctttcggcgcatcagttgcactcgcccgccctgattcccatggtcgcgcgcacactcggcaaccacggactcgagggcgccgacctctgtctcgaaatcaccgagtcggtcgccatgcgcgacacgacggcaagcatcgcgcaactccaggcgctgcgcgacctcggcattcatctgtcaatcgacgacttcggcacaggctactcgtcgttgagttacctcaagctgctgccgatagacacgctgaaactcgatcagtccttcgtgtgcgagatcgagttcaaccccagcgacgtcgcgatctgtgcggcgacgatcgcgctcgcgcacagtctcggtctcgaggtcgtcgccgaaggtatcgagaccgagacccagcgcaggctgctcgcctcgcatcgctgcgacttcatgcagggctatctgttcagcgcgccgctgccggcagagcgcgcgcttgcctacatacgcgagcagcaggccgcgtga

SEQ ID NO: 134672 - protein, 1212 aa, Thiobacillus denitrificans ATCC 25259
MTNLPISTRLLLSYLLVAVLPLAGLAAFYLASFEASLTQTVLANMASVADKKAAQIDSYLRERSEDVAQLALRPAVRNGLLELTRAFRAGGPAAPAYLDATLQLRRALEDGGAASGFYDLLLVDAEGNVLFTLKREPDLLSNLRHGPYRDTELAAGYARAMRSGKPLLTRFAPYAPSDNRPTAFYVTPLRIDGEVHGALALQLDVQRLMTVTVDRIGLGRTGETVLAQRDGDEAYYTGPLRHVRDAAYRYRVPLKQGAAPMIAALAGRNGDGVVRDYAGIETVAAWRHLPALDWGMVVKIDADEALAPAHHLRQLTYVALALFLLLSAATAFLLGRRFARPIRAMTRVADQIAAGDLRQRVPQDGGDELGRLAAAFNRMADTLAASYDNLEAEVEKRSRELRELSALQGAILEHAGALVVVLDREGRIRRFNRACEALTQYSFSEVEGRQVWDFIPPEERRIVQDEAFAVLFNDPEQSRSTLTNHWVARDGGRRLIEWSNSVLHDAQGKVEFVVAVGNDVTDKMRAEAALKESESRLKEAQRIAQVGSWALDLVTGKLIWSDEMFRIFETDEAAFGQSYEAFLDALHPEDREHVNKAYMHSVTNHTPYDLVHRLLLPDGRVKWLHGRGETRYGKNGDPIASCGTVQDITARKKQEDALRLYASIFEHSGEAILIADQARHIIAVNPAFTNLTGYALDDIRGEEPTILAGGQASEESYRSTWASLEQTGYWQGEIIDRRKDGTLYPKWMAVSVVRDADGVLTHYVASFTDITERKLAEAQIKHLAYHDPLTGLSNRFSLQTQLDQTLALARREQRTLAVVFLDLDRFKSINDSLGHALGDQLLVEVARRLRDNVRDSDIVARLGGDEFVVVLTEVGDAAGAARVADKLLGALVPRYRIGGHALHTTASIGISLYPHDGDDADALMKNADTAMYHAKSQGRDNVQFFTPEMNQSVLKRLQFDHDLRVAVEAGQFELHYQPQINSTSGRVVKVEALVRWQHPREGLVSPAEFIPIAEETGLILPLGEWVLNEACRQLRLWRDAGITDLTVAVNLSAHQLHSPALIPMVARTLGNHGLEGADLCLEITESVAMRDTTASIAQLQALRDLGIHLSIDDFGTGYSSLSYLKLLPIDTLKLDQSFVCEIEFNPSDVAICAATIALAHSLGLEVVAEGIETETQRRLLASHRCDFMQGYLFSAPLPAERALAYIREQQAA

SEQ ID NO: 134673 - DNA, 2004 bp, Burkholderia sp. 383
  CDS (1)..(2004): transl_table=11
atggatgacgaaaacgatagcgcggtgctcgaggcgcacgtcggtacgcgcagcccctgctggcgtctcggcagcgacagcaatgcactcgaactggcggccgtccgcggcctgaccaacgttgccgtcgcgctgacgggcgaacaggccgcgcacatccgcgcgctgaccggtgtcacgtcgcacctcgtgctcgacatcacgctgttcggcgaaccggttcgcctccatctcgtcggccggaaggtcgacacgaccaactgggccggcacggcgtccgcctattccgatgccgagtccgtcgcgggcgatctcgcgaacgggcttgcgttcgccgagcaggtcgtgtccgaagtgaattcgctcgtggtgattctcgaccgcaacgggatggtgcagcgcttcaaccgcctgtgcgaggaagtgacgggcaagcgcgaggtcgacgtgatcggccgcagcgcgttcgagctgttcatgacccccgagcagggcgcgcagtcgcgcagcaacatcacgggctttttcgcgagcaaccactcgttcgcggtcgagcgctacatcaacacggtcaacgggccgcgcctgttccagttccgcaacaagttcgtgcagagcggcagcggcgtcgaagagcagttcctgatctgctcgggcatcgacattaccgaggagcgcagcgcgcagcagcggctcagcgaactcgcgaacaccgacgtgctgaccggcctgccgaaccgccatgcgatcagcgagcgcatccacgcggcgatcgcggccgagacggccgcgacgcgcgggcaggtcggcatcctgttcctcgatctcgacaacttcaagcgcgtcaacgatcactacgggcacatcaccggcgaccggctgctgcaggacgtgtcggcgatcatcagcggttgcctgccgtccggcgcgacgctcgcgcggctcggtggcgacgaattcctcgtgctgttcgagcacggcacgcggccgctgctcgaagcgaccgcgcagatcattctcgaacggctgcgcacgccgattcatctcgggctgatggaggtctacacgagctgctcgatcggcatcgcgatgcatccgcagcacggcgattcgctcgagacgctgatccgcagcgccgatacggccatgtacgtcgcgaaggaagagggcaagcatacgtatcgcgtgttctcgctggagatgaaccagaaggtcgcgaagtacatgtggctcgacacgaacctgcgcaaagcgctcgaagaggagcagttcgtgctgcactaccagccggtcgtcgatatcgcgaccggcgacgtgcacggggtcgaggcgctggtccgctggcagtcgcccgatcgcgggctcgtcgcgccggtcgagttcatccgcttcgcggaggagtcgggcctgatcgcgccgctcgggcgctgggtgatgcgtaccgcggccgcgcaggccgccgcatggaaggcgaaggggctcggcatccggatcgcggtgaacgtgtccgcgcggcagttgcaggacatgaacatcgtgcaccagatggcgtcgatcctcgacgcggcggggctcaagcccggcctgctcgacatcgagctgaccgagagctgcttcatcgaggacgaagacgcggccaacggcttgatgcggcagttccgccagcttggcgcggagatccatctcgacgatttcggcactggctattcgtcgctgtcgcagttgtcgcgcctgccgctcgacgcgatcaagctcgatcgcacgttcatcacggccatcgaccgcaatccgcgctcgcaggcgctggtgcgctcggttgtgtcgctcgcgaaggcgctgaatttcgcggtggtcgccgagggcgtcgaaacgcatgcggaagccgaattcctcaagcagctcgacgtcgatcatgcgcagggctactactacgcccgcccgatgccggcacaggcgtttgaggcgtggctcgcggagacgagaaagctcaggctgatcgcctga

SEQ ID NO: 134674 - protein, 667 aa, Burkholderia sp. 383
MDDENDSAVLEAHVGTRSPCWRLGSDSNALELAAVRGLTNVAVALTGEQAAHIRALTGVTSHLVLDITLFGEPVRLHLVGRKVDTTNWAGTASAYSDAESVAGDLANGLAFAEQVVSEVNSLVVILDRNGMVQRFNRLCEEVTGKREVDVIGRSAFELFMTPEQGAQSRSNITGFFASNHSFAVERYINTVNGPRLFQFRNKFVQSGSGVEEQFLICSGIDITEERSAQQRLSELANTDVLTGLPNRHAISERIHAAIAAETAATRGQVGILFLDLDNFKRVNDHYGHITGDRLLQDVSAIISGCLPSGATLARLGGDEFLVLFEHGTRPLLEATAQIILERLRTPIHLGLMEVYTSCSIGIAMHPQHGDSLETLIRSADTAMYVAKEEGKHTYRVFSLEMNQKVAKYMWLDTNLRKALEEEQFVLHYQPVVDIATGDVHGVEALVRWQSPDRGLVAPVEFIRFAEESGLIAPLGRWVMRTAAAQAAAWKAKGLGIRIAVNVSARQLQDMNIVHQMASILDAAGLKPGLLDIELTESCFIEDEDAANGLMRQFRQLGAEIHLDDFGTGYSSLSQLSRLPLDAIKLDRTFITAIDRNPRSQALVRSVVSLAKALNFAVVAEGVETHAEAEFLKQLDVDHAQGYYYARPMPAQAFEAWLAETRKLRLIA

SEQ ID NO: 134675 - DNA, 3906 bp, Rhodospirillum rubrum ATCC 11170
  CDS (1)..(3906): transl_table=11
atgatcccttcgacgacagatgacgcgaggccggacctcccctcggatcaggcggagcgccatcccgagggaggggccgatttcgaggcgattttcagggcgcttccgggcccccatctgattctggacgcggacttgaagatcgccgccgtcaatgacgcctaccttcaggcgacgctgacccgtcgcggcgagatccttggccggggcatattcgaggtctttcccgacaaccccaatgatccggtcagcgagggcgtgcgcaatctgcgggcctcgctcctgcgcgtcctgtcaagccggacccaggatgtgatgtccattcagaagtatgacgtgcgcaagccgggcggcggggcgggcgacttcgagctgcgctattggagtccgatcaatacccccgtgcttggcgccgatggcgcggtcgtctacatcgttcactatgcccaggatctaaccgaatactatgcttcctccgggcaacaggatttcgccgagggcgggaaggacgacatcgtccggcagatggaagcggaaatctttcagcgctccaaagaagtcgccaaatcaaacctgaaattgaaggaagccaattcagaactggcgatcctttacgaaaaaacccgcgaactcgatgatatcaaaacccagttcttcgccaacgtcagccacgagctgcgcaccccgctgaccttgatcctcgggccggtcaccagccgtcaggaggacccgacgctcgccccggccgaaaagcgggtgcttgatatggtggcgcgcaatgcccgactgctgctccgccacgtcaacgacctgcttgatatcgctaaactcgaagccgggcagatgcggatgcaatatgtccgcaccgatgtgacccggctctgccgcttcgccctgtcgcacttcgactcgttggccgaggaacgggccatcgccttcaccctggaggcgcccgccgtcctttgggccgagatcgatccggaaaagttccggcgggtcctgctcaaccttctgtccaacgccttcaaattcacccccaaccagggggagatcaccgtgtcgctgatcgatcgcggcgatgatgtgatcttgcgggtgagcgacaacgggccggggattcccgaaagcatgtggaccgccgtgttcgagcgcttccgccaagtcgatggcggcagcgaccgccgccatggcggaaccgggcttggtctggccatcgtcagggaattcgtcgatctccacggcggcgaggtgagcatcgggcaggcctcggaaggcggggcggcgttcaccgtcgtcctgcccaaaaaggccccgcccgacgtcgcggtctatcccgaaatcggcgacaccctggccgaaggcccggggttctatcgtgacatcgataaggggcttgagggcgaggaccgcctgacggacctcgccccgtctgccgccgccagcgggcccgccagcgggcccgctggcggcgtcggcatcaacgccccgctcgttcttgtcgtggaggacaaccccgacatgaacgcctttgtcagcgagatcgtcgctggacactatcgggtgatctcggccttcgacggccaggaggggctggagaaggcccacgaaaccctgcccgatctgatcatcagcgatgtcatgatgccaaggatgagcggcgagaccatggccgacaccctgcgtcaggatggtctgaccagcgatattccgatcatcatgctcaccgccaaagccgatgaggccatgcgcgcgcgcatgctgcgcggcgtggtgcaggactatctgttcaaaccgttttcccgcctggaactgctggcccgcgccgatgggctgatcgccgaccaccgccgcaagcagatggtattgcgcgagagcgaagcccgcttccgcgccaccttcgaacaagccgccgtcggcatcgcccatctcgatcccgatggccattggctgcgggtgaaccacaagctctgcgatatcgtcggctatccccccgacgagttgctcacgctcagcttccaagacatcacccatcccgatgacctgcgggccgatcttcgccagatggaggccctgctcgccggccagatcgacacctataccatcgaaaagcgctacatccgcaaaacgggggaaagcctgtggatcaacctgaccgtctccctggtgcgcgacatccataacgccccggcctatttcatctcggtggtcgaaaacatccaaagccgcaaggaggccgaacttcagttgctgctggcctcggcggtgttttccaacagcatggaggggatcttcgtcaccgacctcaaaggttcgatcctggcggtcaatccggccttcagccagatcaccctctatgaagccgccgaggttctggggcgcaacgcccgcatcttgcaatcgggtcgccaaaaccgcgagttctatgtcgccttgtggcaagacgtcctgaccatcggatcctggcgcggggaaatctggaaccgccgccgcgatggcgaggttttccccgaatggctcagcatcagctcggtgcgcaaccatcagggcgaagtcaccaattacatcggcattttctccgatctgtcgcggatcaagcattccgaagccaaattccaccacctcgcccaccacgatccgctaaccggcctgcctaaccgcctgctgttgcgcagccgcctcgatcacgcgatcgaacgggcgcggcgcaccggcgggcggtgcgccgtgttgtttctcgaccttgaccgcttcaagatgatcaacgacagcctgggtcaccgggcaggtgataccttgctgcgcaccctgggggcgcgcctgaccgcctgcctgggcgataccggcaccctcgcccgcctgggcggcgatgaattcgtcgcggtgattgaagacatcgatggcatcccggccgtcggcacgatcgccctcaccatgctcgagcgcctgcgcgaaccctgccggttgagcgaaggccccgaggtttgcatcggcggcagcgttggcatcagcctattccccgaagacggcgacaaccccgataccttgctccaacatgccgataccgcgctgggccaggtcaaaggcgccggagggggggcttatggattttacacccggaccttgaccgaacggatctccgcccgccttggcctggaggccggattgcgccacgccttggaacagggggattttctcctccactaccaacccttgatcgcgctggggaccggcgaggtcgaaggggtggaggcgctggtccgctgggcgggcggcgacggcctgcttattccccccgaccgctttattcccctggccgaagacaccgggttgatcgttcccttgggcgaatgggtgctcggggaagcctgccgaaccatgcagcgctggcgcagccagggcatgcccctgacggtgctggccgtcaatctgtcaccccgccagttccgcgaccacgccattcccgccctggtccgccgggtccttgaacaaaccggcttgccggccagcgtccttgagctggaaatcaccgaaagcgccatcatggaacaaggtgccgccgccgaggcccagatgaccgggcttaagcacttgggcgtgcggctggcgatcgatgatttcggcaccggctattcgtcgctggccaacctccgccgcttccccatcgataagatcaagatcgaccaaagcttcgtgcgcgatatcccgcgcgatgccgccgccgaagagatcaccgcgacgatcatcgccatggggcgcacgctcaagctccatgtcctggccgaaggggtggaaaccaccgatcagcttgatttcctgtcgcgcaagcaatgcgacagcgcccagggctatctgttcagccggccgatcaccgccgccgccctggaaaagtggctcgccctacgctga

SEQ ID NO: 134676 - protein, 1301 aa, Rhodospirillum rubrum ATCC 11170
MIPSTTDDARPDLPSDQAERHPEGGADFEAIFRALPGPHLILDADLKIAAVNDAYLQATLTRRGEILGRGIFEVFPDNPNDPVSEGVRNLRASLLRVLSSRTQDVMSIQKYDVRKPGGGAGDFELRYWSPINTPVLGADGAVVYIVHYAQDLTEYYASSGQQDFAEGGKDDIVRQMEAEIFQRSKEVAKSNLKLKEANSELAILYEKTRELDDIKTQFFANVSHELRTPLTLILGPVTSRQEDPTLAPAEKRVLDMVARNARLLLRHVNDLLDIAKLEAGQMRMQYVRTDVTRLCRFALSHFDSLAEERAIAFTLEAPAVLWAEIDPEKFRRVLLNLLSNAFKFTPNQGEITVSLIDRGDDVILRVSDNGPGIPESMWTAVFERFRQVDGGSDRRHGGTGLGLAIVREFVDLHGGEVSIGQASEGGAAFTVVLPKKAPPDVAVYPEIGDTLAEGPGFYRDIDKGLEGEDRLTDLAPSAAASGPASGPAGGVGINAPLVLVVEDNPDMNAFVSEIVAGHYRVISAFDGQEGLEKAHETLPDLIISDVMMPRMSGETMADTLRQDGLTSDIPIIMLTAKADEAMRARMLRGVVQDYLFKPFSRLELLARADGLIADHRRKQMVLRESEARFRATFEQAAVGIAHLDPDGHWLRVNHKLCDIVGYPPDELLTLSFQDITHPDDLRADLRQMEALLAGQIDTYTIEKRYIRKTGESLWINLTVSLVRDIHNAPAYFISVVENIQSRKEAELQLLLASAVFSNSMEGIFVTDLKGSILAVNPAFSQITLYEAAEVLGRNARILQSGRQNREFYVALWQDVLTIGSWRGEIWNRRRDGEVFPEWLSISSVRNHQGEVTNYIGIFSDLSRIKHSEAKFHHLAHHDPLTGLPNRLLLRSRLDHAIERARRTGGRCAVLFLDLDRFKMINDSLGHRAGDTLLRTLGARLTACLGDTGTLARLGGDEFVAVIEDIDGIPAVGTIALTMLERLREPCRLSEGPEVCIGGSVGISLFPEDGDNPDTLLQHADTALGQVKGAGGGAYGFYTRTLTERISARLGLEAGLRHALEQGDFLLHYQPLIALGTGEVEGVEALVRWAGGDGLLIPPDRFIPLAEDTGLIVPLGEWVLGEACRTMQRWRSQGMPLTVLAVNLSPRQFRDHAIPALVRRVLEQTGLPASVLELEITESAIMEQGAAAEAQMTGLKHLGVRLAIDDFGTGYSSLANLRRFPIDKIKIDQSFVRDIPRDAAAEEITATIIAMGRTLKLHVLAEGVETTDQLDFLSRKQCDSAQGYLFSRPITAAALEKWLALR

SEQ ID NO: 134677 - DNA, 2004 bp, Burkholderia xenovorans LB400
  CDS (1)..(2004): transl_table=11
atgaacgacgaccaacacgaccaggtgctttttgcgcagttcggcacaagcagcccatgctggcgtctgtcgaacgacagcaacgcgctcgaactcacgcccgtgaccggcgacgtgcccgccaatgtcgccattccgctgaatcctcaacaagcctcgcaaatccgctgcctcaccggcgtcacctcgcatctcgtgctcgacgtgcggctattcggcgaaccgttgcgtctgcacctggtgggtaaaaagctcaccagcaactcctgggccggcaccgcctcggcctatgacgacaccgagtccgtcgcgcgcgatctggtccacggtctttcgttcgccgaacaggttgtctccgaagtgaattcggtcgtcgtgatcctcgaccggcacggccggatacagcgcttcaaccggctcgcggaagaactcaccggcgtcaaggaagagaacatcatcggccgcaacgtgtgggcgctgttcatgtctactgaagatggcgcggcgtccagtcagaacattgcgggcttcttcaatcgcggcgtgtcgtacgaagtcgagcggcgcatcaaaacggtgcacggcgaacggctctttctgtttcgcaacaagttcgttcacagcggcagcggcgtcgaagaacagttcctgatctgctcaggcacggacatcaccgaagaacggctcgcgcaggaacgcctcaccgaactcgcgaacaccgactcgctcaccggcctcgcgaaccgcaacgcgatccaggacaggatccgcgccgccattgaagacgccacgccgggcgaagcggtcggcgtgctgttcctcgacctcgacaacttcaagaaggtcaacgatcactacggccacgtcttcggcgaccgcctgattcgcgacgtatcgtcggccatcagcctctgtctgaacgaaggcgatacgctcgcgcgactcggcggcgacgaattcatcgtgctcgcggccaggggcacggcgcatgaactcgaagtcaccgcgcagcgcattctcgaacgcatgcgcacacccttcagcctcgggctcgtggaggtctacacgggctgctcgatcggcatcgcgcggtatccggaacacggcgacagcctcgaatcgctgatccgttcagcggacaccgccatgtacgtcgccaaagacgaaggcaagcgtacgcaccgcgtgttctcgccggagatgaaccgcaaggtcgccgagtacatgtggctcgacaccaacctgcggcgcggcctcgatgaaggccaactgacactgcattaccagccgaaactgtcgctcgccaccggcgtggtccagggcgccgaggcgctggtgcgctggaattcgccggagcgcgggcagatcatgcccaccaagttcatccgttatgcagaagagtcgggtctgattggcgtgctgggccgctgggtcatggaaacggccgcgaaacaggccgccaaatggaaagcggacggctacaacctgcgcatcgcgatcaacgtgtcggcgcggcaactcgtcgacacggcggtggtccgccatttcagcgaggcgctccagcatgcgaacctcgacccctgtctgatcgatctcgaactgaccgagagttgcctgatcgaagacgaaacggccgcgatcgatctgatcaagcaattccgccagctcggcgctcaggttcatctggatgacttcggcacgggttattcgtcgctgtcgcaactcggccgtattccgctcgacgtgatcaagctcgatcgcagcttcgttcgctcgatcaacgccgaccccaaagcgcaagcgctggtgcgctcaatggtggtcgtcgcgcaggagctgaatttcaaggtggttgccgaagggatcgaaaccgagtcggaagaattgttcatgaggggtctgggcgtcgattacgtgcagggttttctgtacggccaggccatgccggcggctgaattcgagcgctggttgcaggatagacagaagctcagactgattgcctga

SEQ ID NO: 134678 - protein, 667 aa, Burkholderia xenovorans LB400
MNDDQHDQVLFAQFGTSSPCWRLSNDSNALELTPVTGDVPANVAIPLNPQQASQIRCLTGVTSHLVLDVRLFGEPLRLHLVGKKLTSNSWAGTASAYDDTESVARDLVHGLSFAEQVVSEVNSVVVILDRHGRIQRFNRLAEELTGVKEENIIGRNVWALFMSTEDGAASSQNIAGFFNRGVSYEVERRIKTVHGERLFLFRNKFVHSGSGVEEQFLICSGTDITEERLAQERLTELANTDSLTGLANRNAIQDRIRAAIEDATPGEAVGVLFLDLDNFKKVNDHYGHVFGDRLIRDVSSAISLCLNEGDTLARLGGDEFIVLAARGTAHELEVTAQRILERMRTPFSLGLVEVYTGCSIGIARYPEHGDSLESLIRSADTAMYVAKDEGKRTHRVFSPEMNRKVAEYMWLDTNLRRGLDEGQLTLHYQPKLSLATGVVQGAEALVRWNSPERGQIMPTKFIRYAEESGLIGVLGRWVMETAAKQAAKWKADGYNLRIAINVSARQLVDTAVVRHFSEALQHANLDPCLIDLELTESCLIEDETAAIDLIKQFRQLGAQVHLDDFGTGYSSLSQLGRIPLDVIKLDRSFVRSINADPKAQALVRSMVVVAQELNFKVVAEGIETESEELFMRGLGVDYVQGFLYGQAMPAAEFERWLQDRQKLRLIA

SEQ ID NO: 134679 - DNA, 3234 bp, Shewanella sp. MR-4
  CDS (1)..(3234): transl_table=11
atgccatccatgctacagcatctcagcctgaagcagaaactcattctgttttcactgctacctttgctgatgatgagtatttttgtactgtcgcggatgtatgtacttgtgaaggaatatcgctccgccaatcagaaccatctggcaatccaagcgacagcacaaaccactgaattactcttccaactgcacaatgaatacggcctcagtgcccagctttctggccccgcgtctcctcaagaagaaacacgcctcctacagcagcaacagatcacctccgatgccttagatgcgctactcaatggctcggcattgagcaacttgatgcccgctttaggccgcaatcaactcgccgccgtgcagttgcaggagcaactcaatactctaacgctgctaagtcataggttagcgtcggggcgccaagaggctctagatcagcatcccaaggcctttatcgatttgtataatcagttcaataccgagctggttaaactcatccagcaactacagctacaaaccaacgatattagccaatctagagcctacacagatttgcttaatttgcttatggtgcaacagctggcggtaaaagagcgcagtgccattaatcatatgttgttgtcgcaggtgctgaacattaatgattaccgtgcgattagcaccataatgtacgaatacggccaagccatagaacatgccagtaatgcctcgatttccaaccgtcagtccttaatccgcaagatgcaaacctctccggaaaatctgcgtatcctcaagattagccagcaaatagagcaacaaatccgcgtcagcaccttagtacagaatatcaatgcccacttgggctacggtggtttaatcgatagttttcaagactatttgattaagggagacaatgccgcgctggataaatttactaaggcactgtcgattattcagctcaatctcgatgagttaaatcatgagatccgcaatattcctgatcttaagcctgcggtgaaaaccattgaagacggtatagaccaatatcagttctgcatgaaccagttgcagcagttgaagcgtcaacagctatcactcgaagagatcagcgcccttatccatgtgaatgacaacgacctgagtgccgccatcaataaactattgatgccaccgcatccggtcagcagtaagcactggtggtcgctcaccagcgataggatcaataagctgcacactatcagtgatgaaatcaccgcaaacatggcacatcagagtgaagtagaacagactaagtcgctcacattgctcgggttatatctattctccgcactttttaccgccgcgattaccctctggctcggccgcaaaattattcgcagctttatggttaaaatcactagaattgccaatgatatgcagcgaatggccgccgatccgcagctcaatatcaatatcgatgcttctggctccgacgagctggcacgcatggctcaggccatgaatcgaatgatcagcgaacgccaaaaggccaaccacgccttaagccgcgccgccgccgtatttaactattctgccgaaggcattatggtcacggatgccgacaatcatatcgagttggttaaccccgcctttagccagatcacaggttacagcctcgaagaggttaagggccgcagcccatcactgttaagctccaatcgccatcccagccatttctatacggctatgtgggaagcattacaaaaagaaggtaaatgggaaggcgagatctggaataaacgtaaagatggccaagtgtatcccgagtatcttgctattactgtggtacgtaatgaacggggtgaaataatccaacatattggtttatttatggatatcagtaagcgtaagcaatatgagcaggatctctggtatcaagcaaacttcgacacactcactgggctacccaatcgtaagctgtttaacgagcgcctgcagcatgaaatccaactcgcccaacacgactcccgcaagctggcgattctgctgatcgatttagaccaattcaaatatatcaatgacgtccaaggccatgccatgggcgatctcttgttacaagacgtggctaagcgactggaaaatattgctggtaagaacgactttctcgcccgcatcggtggcgacgaatttgtgcttatcctcccccgcgtcaccaatgagttcgcgattgaacatatggcgagccggatcattgaaaccttagccgcgccctttaacttgaatgagcgggaaatccaaatttctgccagcttcggcattggcgtctaccccgaagacgggctagatgtgagctccctgacccgcaataccgaaatggccatgtatcaagcaaaggacgccggacgcaataacttcaagtacttcacctctggcatgaaccaagccatgtttgcccgcatggagcttgaacaacggctgcgccgtgccgtggcacaaaatgaatttaccttacattatcaaccgattgtggatatgaaaacgggacaaatctgtagtgtcgaggcgctgatccgctggcaagatcccgacttaggactgatcccgccagaccagtttatcggtatcgccgaagaaactggactcatcgagcctatgggcgaatgggtgctcaaccaagccatgcatgatttaagacaatggcaacatatgggactcaacctgaatgtcgccatcaatgtctccagccgtcagtgcattaacacccgtggcctcggcttcgaccaagtattgcaggaatgctttaaccgtcaccatatcaatcccagaaacgtgcatatcgagatcaccgagagcatgctgatgggcgatgcgagccactgcctaagcaccctagaatctattcgccacctaggctcgcagatttatatcgatgactttggtacaggctattcatctttgagttatttgaagaaattccctatttcggtaatcaagatcgaccgcagttttgtggaaaacgccctcgataacagttctaacgccaatctagtcaaagccattgtgatgatgggccagagccttgaaatggagcttgtcgccgaggggatagaaaccgaggcccaatggaaattcctccgcgacttaggttgccactatgcacaaggctatttgatctctaagcctctgccatttgatgagattacgccactgctcaaccaaaccttgccgaaaatcttgtgcttagcgccacaagagaagagcataaatacttga

SEQ ID NO: 134680 - protein, 1077 aa, Shewanella sp. MR-4
MPSMLQHLSLKQKLILFSLLPLLMMSIFVLSRMYVLVKEYRSANQNHLAIQATAQTTELLFQLHNEYGLSAQLSGPASPQEETRLLQQQQITSDALDALLNGSALSNLMPALGRNQLAAVQLQEQLNTLTLLSHRLASGRQEALDQHPKAFIDLYNQFNTELVKLIQQLQLQTNDISQSRAYTDLLNLLMVQQLAVKERSAINHMLLSQVLNINDYRAISTIMYEYGQAIEHASNASISNRQSLIRKMQTSPENLRILKISQQIEQQIRVSTLVQNINAHLGYGGLIDSFQDYLIKGDNAALDKFTKALSIIQLNLDELNHEIRNIPDLKPAVKTIEDGIDQYQFCMNQLQQLKRQQLSLEEISALIHVNDNDLSAAINKLLMPPHPVSSKHWWSLTSDRINKLHTISDEITANMAHQSEVEQTKSLTLLGLYLFSALFTAAITLWLGRKIIRSFMVKITRIANDMQRMAADPQLNINIDASGSDELARMAQAMNRMISERQKANHALSRAAAVFNYSAEGIMVTDADNHIELVNPAFSQITGYSLEEVKGRSPSLLSSNRHPSHFYTAMWEALQKEGKWEGEIWNKRKDGQVYPEYLAITVVRNERGEIIQHIGLFMDISKRKQYEQDLWYQANFDTLTGLPNRKLFNERLQHEIQLAQHDSRKLAILLIDLDQFKYINDVQGHAMGDLLLQDVAKRLENIAGKNDFLARIGGDEFVLILPRVTNEFAIEHMASRIIETLAAPFNLNEREIQISASFGIGVYPEDGLDVSSLTRNTEMAMYQAKDAGRNNFKYFTSGMNQAMFARMELEQRLRRAVAQNEFTLHYQPIVDMKTGQICSVEALIRWQDPDLGLIPPDQFIGIAEETGLIEPMGEWVLNQAMHDLRQWQHMGLNLNVAINVSSRQCINTRGLGFDQVLQECFNRHHINPRNVHIEITESMLMGDASHCLSTLESIRHLGSQIYIDDFGTGYSSLSYLKKFPISVIKIDRSFVENALDNSSNANLVKAIVMMGQSLEMELVAEGIETEAQWKFLRDLGCHYAQGYLISKPLPFDEITPLLNQTLPKILCLAPQEKSINT

SEQ ID NO: 134681 - DNA, 2004 bp, Burkholderia vietnamiensis G4
  CDS (1)..(2004): transl_table=11
atggatgacgaaaacgattgcgcggtgctcgaagcgcatctcggtacgcgcagcccatgctggcgcctcggtagcgacagcaatgcactcgaactggccgcgcagcgcggctgtaccaatgtcgccgtcgcgctgaccggcgagcaggccgcgcgcatccgcgcgctcaccggcgtcacgtcgcacctcgtgctcgaactcgcgttgttcggcgatccggtgagcctgcacctcgtcggccgcaaggtcgacaccgccaactgggccggcaccgcgtccgcctactcggataccgagtccgtcgcggccgacctcgcccacgggctcgcgttcgccgagcaggtcgtgtccgaagtgaattcgctcgtcgtgattctcgaccgcaacggcatggtgcagcgcttcaaccgtctgtgcgaggaagtgacgggtaagcgcgaagtcgacgtgatcggccgcagcgcgttcgagctgttcatgagcgaggagcagggcgagcagtcgcgcagcaacatcaccggcttttttgcgagcaaccgcccgttcgcggtcgagcgctacatcaacacggtcaacgggccgcgcctgttccagttccgcaacaagttcgtgcagagcggcagcggcgtcgacgagcagtacctgatctgctcgggcatcgacatcaccgaggagcgcaacgcgcagcagcggctcaccgagctcgcgaataccgacgtgctgaccgggctgccgaaccgccatgcgatcagcgagcgcatccgcatcgcgctcgcggccgatcgcagcgacgtgcgcggccaggtcggcatcctgttcctggatctcgacaacttcaagcgcgtcaacgaccactacgggcacatcaccggcgaccggctgctgcaggacgtgtcggccgtgatcggcggctgcctgccgtcgggcgcgacgctggcgcggctcggcggcgacgagttcctcgtgctgttcgagcacggcacgcggccgctgctcgaggcgaccgcacagatcatcctcgagcggctgcgcacgccgatccatctggggctcgtggaggtctacacgagttgctcgatcggcatcgcgatgtatccgcagcacggcgattcgctcgagacgctgatccgcagcgcggacaccgcgatgtacgtcgcgaaggaagaaggcaagcacacgtaccgcgtgttctcgctggagatgaaccagaaggtcgcgaagtacatgtggctcgacaccaacctgcgcaaggcgctcgaggacgagcagttcgtgctgcattaccagccggtcgtcgacatcgccaccggcgacgtgcgcagcgtcgaggcgctgatccgctggcagtcgcccgatcgcgggctcgtcgcgccggtcgagttcatccgcttcgccgaggagtcggggctgatcgcgccgctcgggcgctgggtgatgcgtaccgcggccgcgcaggccgccgcatggaaggcgcaggggctcggcgtgcggatcgcggtgaacgtgtccgcgcggcagttgcaggacatgaacgtggtcgatcagttcgcgtcgatcctcgacagcgccggactgaagccgagcctcgtcgacgtcgagctgaccgagagcagcttcatcgaggacgagaacgcggcgcacgggctgatgaagcagttccgccagctcggcgcgcagattcacctcgacgatttcggcaccggctattcgtcgctgtcgcagttgtcgcggctgccgctcgattcgatcaagctcgatcgcagcttcatcaccggcatcgatcgcaacacgcgctcgcaggcgctggtgagttcggtcgtgtcgctcgcgcgggcgctgagcttctcggtggtcgccgaaggcgtcgagacgcgcgcggaggccgagttcctgaagcagatcgacgtcgaccgcgcgcagggtttctactatgcgcggccgatgccggcccaggccttcgaggcgtggctcgccgaaacgagaaagctcaggctgatcgcctga

SEQ ID NO: 134682 - protein, 667 aa, Burkholderia vietnamiensis G4
MDDENDCAVLEAHLGTRSPCWRLGSDSNALELAAQRGCTNVAVALTGEQAARIRALTGVTSHLVLELALFGDPVSLHLVGRKVDTANWAGTASAYSDTESVAADLAHGLAFAEQVVSEVNSLVVILDRNGMVQRFNRLCEEVTGKREVDVIGRSAFELFMSEEQGEQSRSNITGFFASNRPFAVERYINTVNGPRLFQFRNKFVQSGSGVDEQYLICSGIDITEERNAQQRLTELANTDVLTGLPNRHAISERIRIALAADRSDVRGQVGILFLDLDNFKRVNDHYGHITGDRLLQDVSAVIGGCLPSGATLARLGGDEFLVLFEHGTRPLLEATAQIILERLRTPIHLGLVEVYTSCSIGIAMYPQHGDSLETLIRSADTAMYVAKEEGKHTYRVFSLEMNQKVAKYMWLDTNLRKALEDEQFVLHYQPVVDIATGDVRSVEALIRWQSPDRGLVAPVEFIRFAEESGLIAPLGRWVMRTAAAQAAAWKAQGLGVRIAVNVSARQLQDMNVVDQFASILDSAGLKPSLVDVELTESSFIEDENAAHGLMKQFRQLGAQIHLDDFGTGYSSLSQLSRLPLDSIKLDRSFITGIDRNTRSQALVSSVVSLARALSFSVVAEGVETRAEAEFLKQIDVDRAQGFYYARPMPAQAFEAWLAETRKLRLIA

SEQ ID NO: 134683 - DNA, 2256 bp, delta proteobacterium MLMS-1
  CDS (1)..(2256): transl_table=11
atgaataccttgagcaacccccaaatccgctacgccttgcgcctggccgccgtgtatgcccttttcgggttactgtggatattcttcagcgaccggctggtgcttgccatctcctgggaccaggaaagccttactgccatgcagacctacaagggctggttctatgtggcggttaccgcgatcctggttttttttctggtcctgcgcgccgaatatcgcttccgccgcaccgaggaacgtttccgtaacctcaccgagaccagcaacgactggatctgggaggtggataccagcggtagctacacctatgtcagcccccaagtgaaaaccttgctgggctatcgacccgacgaagtaatcggccgcaccccctttgatttcatgccctccggggaggcggagcgggtccgcgaccggtttgccgccatcagtgccgaacaggaagcaatcatcaacctggtcaacaccaacctccatcgtcagggccggcgggtgatcctggagaccagtggggtgcctttctatgatcagcacggaacctggcagggttaccggggcattgaccgggatatcaccgtacgtcagcaacttgaggagtggctgcggcaatcagccatggtttatgaaaatatgtgggaaggggcggtgattaccgaccccgctgggaccattcttgacgtcaaccccgccttcagccggatcaccggctatgccaaggatgaggttatcggcaagaatccgcggattctcaaatccgatcgccatgagcaggccttttatcagcacatgtggagagaactcattgaaaaggggcaatggcgcggagagatctggaaccggcgtaaaaacggtgaagtttacccggagtggctatccatcagcggggtctccgatgcccgggggcaaacatcttattacgtgggggtttttaccgatctcagtcagcttaaacaatcggaagcaaagttggagtctctggcctattacgacccgctgaccgctctgcccaaccggctgctgcttcactcccggctggagcacgccctggagtgggccgaacgtcatcaaaccaaagtcggggtttatttcattgatctcgaccagttcagggtggtcaatgagagtttgagttaccaggccggcgaccaactgctggtaatggtcagtaaacgttttctctcctgcctgcgggttgatgataccctggcccggcccggtggtgacgaatttgtcctgatccaggaggccctcgccgatccccaggaggccacggagacggcccgggaactgctggccagcctggaccaacccttccagcttgatggtggccaagagatctacctgggcgccagtatcgggatcacggttttccccggtgacggcaccaccccgccggacctgctgaaaaatgccgaggccgccatgtaccacgccaaagagaacggacgtaaccggttctctttttatgccgagcagatgaatgccgacgccctggcccggctgcaaatggagatggccctgcggcaggccgtggaaaaccgggagctgcttctctactatcagccccaatggcaattggccgattccccttccgtaatcggagccgaggccctgatccgttggcgcaacaaggaaggtgagctcattgctcccgatcaattcatccccctggccgaaaagagcggcttgatcggggccatcggcgactgggtaatcgacgaggcctgtcggcagttgcggatctggcgtgatcaggggaaaaagcaattacgggtggcggtcaatgtctccgcccgccagttccgggccggcaatctggccgaagtggtggcccaggccttgcgaaaacatgaaattcccgcccactgctttgagctggaattgaccgaaagcatcctgatggaaaaacccgaagaggcggcggaattgctcaaccgctgtgccgctctgggggtgggaatcgccctggacgacttcggcaccggctactccagtttggcctacctcagccgcttccccatcactgttttgaagatagaccgctcttttgtccgtgacctcaaccaccgttccgaggccgctttgattgccgattccatcatcgctctggcccatcggatgggcctgcaggtggtggccgaaggggtggagaccgaagagcagcgggcctatctccagagccggggctgcgacctggcccagggttttctcttcagcccaccgctgccggcggaacagtttgccgaattttcgtaa

SEQ ID NO: 134684 - protein, 751 aa, delta proteobacterium MLMS-1
MNTLSNPQIRYALRLAAVYALFGLLWIFFSDRLVLAISWDQESLTAMQTYKGWFYVAVTAILVFFLVLRAEYRFRRTEERFRNLTETSNDWIWEVDTSGSYTYVSPQVKTLLGYRPDEVIGRTPFDFMPSGEAERVRDRFAAISAEQEAIINLVNTNLHRQGRRVILETSGVPFYDQHGTWQGYRGIDRDITVRQQLEEWLRQSAMVYENMWEGAVITDPAGTILDVNPAFSRITGYAKDEVIGKNPRILKSDRHEQAFYQHMWRELIEKGQWRGEIWNRRKNGEVYPEWLSISGVSDARGQTSYYVGVFTDLSQLKQSEAKLESLAYYDPLTALPNRLLLHSRLEHALEWAERHQTKVGVYFIDLDQFRVVNESLSYQAGDQLLVMVSKRFLSCLRVDDTLARPGGDEFVLIQEALADPQEATETARELLASLDQPFQLDGGQEIYLGASIGITVFPGDGTTPPDLLKNAEAAMYHAKENGRNRFSFYAEQMNADALARLQMEMALRQAVENRELLLYYQPQWQLADSPSVIGAEALIRWRNKEGELIAPDQFIPLAEKSGLIGAIGDWVIDEACRQLRIWRDQGKKQLRVAVNVSARQFRAGNLAEVVAQALRKHEIPAHCFELELTESILMEKPEEAAELLNRCAALGVGIALDDFGTGYSSLAYLSRFPITVLKIDRSFVRDLNHRSEAALIADSIIALAHRMGLQVVAEGVETEEQRAYLQSRGCDLAQGFLFSPPLPAEQFAEFS

SEQ ID NO: 134685 - DNA, 2679 bp, Bacillus cereus
  CDS (1)..(2679): transl_table=11
atgattaatcaaaaaaaatatgtacaatttgtcataatatacatatctatatttgctctttggatactctttattccaaatgaatcgcatataaaggagattggaattcttttcttattctgtttcgctgcacttttttcttgtcactgtttatataaagctattaagagaatgaaacgcagcgataaactattttggattttattactatgtacttgcctatgtgggttagttatggagataaccctatttcttagttcactttctatacatgatcaatctatattttcatataaagcattacctttttttatcatacaatatattttgctctttgttggatttgctataaagtttataaaaaattattctattaaggggctttctcaattttcattcgatagcatctttattattattatgaacatttatttcaccttaacttttatcttagacctttcaagcttccgcatgttaacaaaggatacttggattttaattgggtatttcattgcacaatcattagtaatttacgccgttattagcctatatagaagagaacaatattcttctagtagaattgcattaattatcggtttcactattatactcgtatacggttatattcatctgtttcaattgaattttgggatgaaaacttctgctgaaattaattatttaatacacactgcttctattttattaattggactttcttccatactatatattttagataaaccaatgcagcatgaaacgaaaacaaaatattatcgattcgattatgtacgttttatactaccttattttagtataattattactttttcttttattatcattcaaccttgggatgataaattcatgttaatcggtctcgtattatcacttattttgttattcttgcggcaactttacatgtggaaagataatcaagcactaattcatacatatgaacagttgactacacaactagaggacgaagttgaagaaggtgcatttgcattatcaaaaagtgaacaacgttataaatctttattcgaggaccatcccgatgccgttttctctttaaatatgaatggcatttttcaacaatctaataaggcgtgcgaaagcttatttactgcctattattgcgaagtggcaagctattctctggtacacttcattgattcaaaagaccacgaactactaaagaaggctttacaaattacaaaggaaggtaggccacaaacgttagaagttcgtacaaaagaacaagaaggctattattattatctccatattacacttatccctacttttataaacaaagaagtggtcggaatgtttgggatagcacgtgatattaccaccttatatgaaaaacaaaaacaagtagaacatttagcctttcacgatgcacttactggattaccaaatcgtcgaaagttcgaaaaagatttaaaagccattttaaatacagcccaaactaacgcaaatgatgtcgccgtcatattccttgatttagatcgatttaaaaaaattaacgatagacttggccatgagttgggagatttattattaattgaagtagcaaaaagattacgcggttgcttgcgttcaaaagatatcgtcgctcgccaaggtggagatgagtttacaattctattaccagaaatgtactcagaaaaaagtgcaatttttatagctgaacagattttaactattttaaacaaaccattcttcattcaaggcgaagaactctctattacaccaagtatcggaattgcgatgtaccctgattatggaactgatgtaaatgagttaatgaaaaatgctgatatggctatgtatcgtgcgaaagcaaatggaaaaaacagatttgttttcttctcaaaagaaatgagtatcgctcaaaatgaaattcaattcttagaaggtgaactttcaaaagcattacaacaaaatgaatttttccttgaataccagccacaagtaagcacaaaaacaaaacaaattatcggttttgaagcattaatacgttggaagcatccaaaactcggtatcgtatctcctgcccaatttatccctctagcagaggaaactggttttattattgaacttggcaattggattttacgtactgcttgtttagaggcaaaaagatggcataatcaaggtttctctcacttaaaagttggtgtaaatttatctgttgttcaatttaaccatgcagatttaatcccaactatttcaaaggtattggaagaaacagaactgaaaccagaagcactagatattgaaattacggaaagcatcgcaattaatcaaaatcaatctgtagttgcaaaactagaacaacttcaaaatctcggtattcaaatttcaatcgacgactttggaactggttatagttctttagcttatttaacaaaatatccaatcaacacattaaaaatcgctcgagagtttatttgtggaattacaactagccctttagaagaagcaattgtctcttccattattacactatcaaaacaactaaatttagaagtgattgcagaaggtgtagaaacggaagaagaatgggaatttttacataaacaaaattgtgatcacattcaaggattctttattagcaaacctgtttctagtaaagacgtttggatgttactccataaaaaaacaaccgcctaa

SEQ ID NO: 134686 - protein, 892 aa, Bacillus cereus
MINQKKYVQFVIIYISIFALWILFIPNESHIKEIGILFLFCFAALFSCHCLYKAIKRMKRSDKLFWILLLCTCLCGLVMEITLFLSSLSIHDQSIFSYKALPFFIIQYILLFVGFAIKFIKNYSIKGLSQFSFDSIFIIIMNIYFTLTFILDLSSFRMLTKDTWILIGYFIAQSLVIYAVISLYRREQYSSSRIALIIGFTIILVYGYIHLFQLNFGMKTSAEINYLIHTASILLIGLSSILYILDKPMQHETKTKYYRFDYVRFILPYFSIIITFSFIIIQPWDDKFMLIGLVLSLILLFLRQLYMWKDNQALIHTYEQLTTQLEDEVEEGAFALSKSEQRYKSLFEDHPDAVFSLNMNGIFQQSNKACESLFTAYYCEVASYSLVHFIDSKDHELLKKALQITKEGRPQTLEVRTKEQEGYYYYLHITLIPTFINKEVVGMFGIARDITTLYEKQKQVEHLAFHDALTGLPNRRKFEKDLKAILNTAQTNANDVAVIFLDLDRFKKINDRLGHELGDLLLIEVAKRLRGCLRSKDIVARQGGDEFTILLPEMYSEKSAIFIAEQILTILNKPFFIQGEELSITPSIGIAMYPDYGTDVNELMKNADMAMYRAKANGKNRFVFFSKEMSIAQNEIQFLEGELSKALQQNEFFLEYQPQVSTKTKQIIGFEALIRWKHPKLGIVSPAQFIPLAEETGFIIELGNWILRTACLEAKRWHNQGFSHLKVGVNLSVVQFNHADLIPTISKVLEETELKPEALDIEITESIAINQNQSVVAKLEQLQNLGIQISIDDFGTGYSSLAYLTKYPINTLKIAREFICGITTSPLEEAIVSSIITLSKQLNLEVIAEGVETEEEWEFLHKQNCDHIQGFFISKPVSSKDVWMLLHKKTTA

SEQ ID NO: 134687 - DNA, 22 bp, Artificial sequence
  primer
atgaaaaccgttagggagtcca

SEQ ID NO: 134688 - DNA, 23 bp, Artificial sequence
  primer
ttatgcgcgcttcagatagcgtt

SEQ ID NO: 134689 - protein, 556 aa, Artificial sequence
  consensus sequence
  Variant (2)..(18): Xaa in position 2 to 18 is any amino acid
  Variant (20)..(21): Xaa in position 20 to 21 is any amino acid
  Variant (23)..(23): Xaa in position 23 is any amino acid
  Variant (24)..(26): Xaa in position 24 to 26 is any or no amino acid
  Variant (28)..(30): Xaa in position 28 to 30 is any amino acid
  Variant (32)..(37): Xaa in position 32 to 37 is any amino acid
  Variant (40)..(44): Xaa in position 40 to 44 is any amino acid
  Variant (46)..(46): Xaa in position 46 is any amino acid
  Variant (48)..(52): Xaa in position 48 to 52 is any amino acid
  Variant (54)..(71): Xaa in position 54 to 71 is any amino acid
  Variant (72)..(73): Xaa in position 72 to 73 is any or no amino acid
  Variant (75)..(78): Xaa in position 75 to 78 is any amino acid
  Variant (79)..(79): Xaa in position 79 is any or no amino acid
  Variant (81)..(87): Xaa in position 81 to 87 is any amino acid
  Variant (89)..(114): Xaa in position 89 to 114 is any amino acid
  Variant (115)..(115): Xaa in position 115 is any or no amino acid
  Variant (118)..(129): Xaa in position 118 to 129 is any amino acid
  Variant (132)..(133): Xaa in position 132 to 133 is any amino acid
  Variant (135)..(136): Xaa in position 135 to 136 is any amino acid
  Variant (143)..(151): Xaa in position 143 to 151 is any amino acid
  Variant (153)..(155): Xaa in position 153 to 155 is any amino acid
  Variant (157)..(165): Xaa in position 157 to 165 is any amino acid
  Variant (166)..(168): Xaa in position 166 to 168 is any or no amino acid
  Variant (173)..(173): Xaa in position 173 is any amino acid
  Variant (176)..(177): Xaa in position 176 to 177 is any amino acid
  Variant (180)..(181): Xaa in position 180 to 181 is any amino acid
  Variant (184)..(185): Xaa in position 184 to 185 is any amino acid
  Variant (188)..(188): Xaa in position 188 is any amino acid
  Variant (191)..(192): Xaa in position 191 to 192 is any amino acid
  Variant (194)..(199): Xaa in position 194 to 199 is any amino acid
  Variant (201)..(207): Xaa in position 201 to 207 is any amino acid
  Variant (210)..(210): Xaa in position 210 is any amino acid
  Variant (216)..(230): Xaa in position 216 to 230 is any amino acid
  Variant (231)..(235): Xaa in position 231 to 235 is any or no amino acid
  Variant (237)..(239): Xaa in position 237 to 239 is any amino acid
  Variant (241)..(242): Xaa in position 241 to 242 is any amino acid
  Variant (244)..(245): Xaa in position 244 to 245 is any amino acid
  Variant (247)..(252): Xaa in position 247 to 252 is any amino acid
  Variant (253)..(253): Xaa in position 253 is any or no amino acid
  Variant (255)..(259): Xaa in position 255 to 259 is any amino acid
  Variant (261)..(261): Xaa in position 261 is any amino acid
  Variant (264)..(266): Xaa in position 264 to 266 is any amino acid
  Variant (268)..(269): Xaa in position 268 to 269 is any amino acid
  Variant (271)..(275): Xaa in position 271 to 275 is any amino acid
  Variant (277)..(279): Xaa in position 277 to 279 is any amino acid
  Variant (282)..(282): Xaa in position 282 is any amino acid
  Variant (286)..(286): Xaa in position 286 is any amino acid
  Variant (289)..(290): Xaa in position 289 to 290 is any amino acid
  Variant (292)..(301): Xaa in position 292 to 301 is any amino acid
  Variant (304)..(311): Xaa in position 304 to 311 is any amino acid
  Variant (313)..(315): Xaa in position 313 to 315 is any amino acid
  Variant (318)..(318): Xaa in position 318 is any amino acid
  Variant (320)..(328): Xaa in position 320 to 328 is any amino acid
  Variant (332)..(336): Xaa in position 332 to 336 is any amino acid
  Variant (337)..(337): Xaa in position 337 is any or no amino acid
  Variant (339)..(343): Xaa in position 339 to 343 is any amino acid
  Variant (344)..(344): Xaa in position 344 is any or no amino acid
  Variant (348)..(348): Xaa in position 348 is any amino acid
  Variant (351)..(352): Xaa in position 351 to 352 is any amino acid
  Variant (354)..(355): Xaa in position 354 to 355 is any amino acid
  Variant (358)..(359): Xaa in position 358 to 359 is any amino acid
  Variant (361)..(362): Xaa in position 361 to 362 is any amino acid
  Variant (365)..(366): Xaa in position 365 to 366 is any amino acid
  Variant (370)..(370): Xaa in position 370 is any amino acid
  Variant (374)..(376): Xaa in position 374 to 376 is any amino acid
  Variant (378)..(378): Xaa in position 378 is any amino acid
  Variant (381)..(386): Xaa in position 381 to 386 is any amino acid
  Variant (388)..(390): Xaa in position 388 to 390 is any amino acid
  Variant (392)..(394): Xaa in position 392 to 394 is any amino acid
  Variant (396)..(401): Xaa in position 396 to 401 is any amino acid
  Variant (402)..(402): Xaa in position 402 is any or no amino acid
  Variant (405)..(405): Xaa in position 405 is any amino acid
  Variant (407)..(407): Xaa in position 407 is any amino acid
  Variant (410)..(422): Xaa in position 410 to 422 is any amino acid
  Variant (423)..(425): Xaa in position 423 to 425 is any or no amino acid
  Variant (427)..(438): Xaa in position 427 to 438 is any amino acid
  Variant (440)..(440): Xaa in position 440 is any amino acid
  Variant (444)..(461): Xaa in position 444 to 461 is any amino acid
  Variant (464)..(468): Xaa in position 464 to 468 is any amino acid
  Variant (479)..(480): Xaa in position 479 to 480 is any amino acid
  Variant (482)..(484): Xaa in position 482 to 484 is any amino acid
  Variant (486)..(489): Xaa in position 486 to 489 is any amino acid
  Variant (491)..(491): Xaa in position 491 is any amino acid
  Variant (493)..(494): Xaa in position 493 to 494 is any amino acid
  Variant (496)..(515): Xaa in position 496 to 515 is any amino acid
  Variant (517)..(518): Xaa in position 517 to 518 is any amino acid
  Variant (520)..(522): Xaa in position 520 to 522 is any amino acid
  Variant (524)..(524): Xaa in position 524 is any amino acid
  Variant (530)..(535): Xaa in position 530 to 535 is any amino acid
  Variant (538)..(545): Xaa in position 538 to 545 is any amino acid
  Variant (548)..(552): Xaa in position 548 to 552 is any amino acid
  Variant (554)..(555): Xaa in position 554 to 555 is any amino acid
LXXXXXXXXXXXXXXXXXDXXGXXXXIXXXNXXXXXXTGXXXXXVXGXXXXXLXXXXXXXXXXXXXXXXXXXXGXXXXXEXXXXXXXGXXXXXXXXXXXXXXXXXXXXXXXXXXXDIXXXXXXXXXXXXLAXXDXXTGLPNRXXXXXXXXXAXXXAXXXXXXXXXXXXLDLDXFKXXNDXXGHXXGDXLLXXVXXXXXXCXXXXXXXARXGGDEFXXXXXXXXXXXXXXXXXXXXAXXXLXXLXXPXXXXXXXEXXXXXSXGIXXXPXXGXXXXXLXXXADXAMYXAKXXGXXXXXXXXXXMNXXXXXXXXLXXXLRXAXXXXXXXXXYQPXXXXXXGXXXXXXEALXRWXXPXXGLXXPXXFIXXAEEXGLIXXXGXWVXXXXXXQXXXWXXXGXXXXXXXVNXSXRQXXXXXXXXXXXXXXXXLXXXXXXXXXXXXEXTESXXXXXXXXXXXXXXXXXXLGXXXXXDDFGTGYSSLXXLXXXPXXXXKXDXXFXXXXXXXXXXXXXXXXXXXXAXXLXXXVXAEGVEXXXXXXFLXXXXXXXXQGXXXXXPXXA

SEQ ID NO: 134690 - protein, 60 aa, Artificial sequence
  protein pattern
  Variant (11)..(11): Xaa in position 11 is Ala, Gly, Asn or Ser
  Variant (12)..(12): Xaa in position 12 is any amino acid
  Variant (14)..(15): Xaa in position 14 to 15 is any amino acid
  Variant (16)..(16): Xaa in position 16 is Phe, Ile or Leu
  Variant (18)..(18): Xaa in position 18 is Ile or Leu
  Variant (19)..(19): Xaa in position 19 is Asp, Ser or Thr
  Variant (20)..(20): Xaa in position 20 is any amino acid
  Variant (21)..(21): Xaa in position 21 is Ile, Leu or Val
  Variant (23)..(23): Xaa in position 23 is Ile or Leu
  Variant (25)..(25): Xaa in position 25 is Gln or Arg
  Variant (26)..(26): Xaa in position 26 is Ala, Ser, Thr or Val
  Variant (28)..(28): Xaa in position 28 is Ile or Val
  Variant (29)..(29): Xaa in position 29 is any amino acid
  Variant (30)..(30): Xaa in position 30 is Ala, Asp, Glu, Gly, Asn or Ser
  Variant (31)..(31): Xaa in position 31 is Ala, Ile or Leu
  Variant (32)..(33): Xaa in position 32 to 33 is any amino acid
  Variant (34)..(34): Xaa in position 34 is Asp, Gly, Asn or Gln
  Variant (35)..(36): Xaa in position 35 to 36 is any amino acid
  Variant (37)..(37): Xaa in position 37 is Ala, Asp, Asn or Ser
  Variant (38)..(39): Xaa in position 38 to 39 is any amino acid
  Variant (40)..(40): Xaa in position 40 is Ile or Leu
  Variant (41)..(41): Xaa in position 41 is Ala, Cys, Thr or Val
  Variant (42)..(42): Xaa in position 42 is any amino acid
  Variant (43)..(43): Xaa in position 43 is Ala, Ser or Thr
  Variant (44)..(44): Xaa in position 44 is any amino acid
  Variant (45)..(45): Xaa in position 45 is Ile or Val
  Variant (46)..(46): Xaa in position 46 is any amino acid
  Variant (47)..(47): Xaa in position 47 is Leu, Met or Val
  Variant (48)..(48): Xaa in position 48 is Ala or Gly
  Variant (49)..(49): Xaa in position 49 is any amino acid
  Variant (50)..(50): Xaa in position 50 is Ala, Glu, Gly, Ser or Thr
  Variant (52)..(54): Xaa in position 52 to 54 is any amino acid
  Variant (55)..(55): Xaa in position 55 is any or no amino acid
  Variant (57)..(57): Xaa in position 57 is Ala, Gly, Ile, Leu or Val
  Variant (58)..(58): Xaa in position 58 is Ala or Glu
  Variant (59)..(59): Xaa in position 59 is Glu or Gly
  Variant (60)..(60): Xaa in position 60 is Gly, Ile or Val
DDFGTGYSSLXXLXXXPXXXXKXDXXFXXXXXXXXXXXXXXXXXXXXXXXLXXXXVXXXX

SEQ ID NO: 134691 - protein, 48 aa, Artificial sequence
  protein pattern
  Variant (4)..(4): Xaa in position 4 is Ile, Leu or Val
  Variant (7)..(8): Xaa in position 7 to 8 is any amino acid
  Variant (10)..(11): Xaa in position 10 to 11 is any amino acid
  Variant (13)..(14): Xaa in position 13 to 14 is any amino acid
  Variant (15)..(15): Xaa in position 15 is any or no amino acid
  Variant (17)..(18): Xaa in position 17 to 18 is any amino acid
  Variant (19)..(19): Xaa in position 19 is any or no amino acid
  Variant (22)..(23): Xaa in position 22 to 23 is any amino acid
  Variant (24)..(24): Xaa in position 24 is Ala, Ile or Leu
  Variant (27)..(27): Xaa in position 27 is any amino acid
  Variant (30)..(30): Xaa in position 30 is Ile or Val
  Variant (31)..(32): Xaa in position 31 to 32 is any amino acid
  Variant (33)..(33): Xaa in position 33 is Ile, Leu, Met or Val
  Variant (35)..(35): Xaa in position 35 is Asp, Glu or Arg
  Variant (38)..(38): Xaa in position 38 is Ile, Leu or Met
  Variant (39)..(39): Xaa in position 39 is any amino acid
  Variant (40)..(40): Xaa in position 40 is Asp, Glu, Gln or Thr
  Variant (41)..(41): Xaa in position 41 is Ala or Val
  Variant (42)..(43): Xaa in position 42 to 43 is any amino acid
  Variant (44)..(44): Xaa in position 44 is Asp or Gln
  Variant (45)..(47): Xaa in position 45 to 47 is any amino acid
EALXRWXXPXXGXXXPXXXFIXXXEEXGLXXXXGXWVXXXXXXXXXXW

SEQ ID NO: 134692 - protein, 56 aa, Artificial sequence
  protein pattern
  Variant (2)..(2): Xaa in position 2 is any amino acid
  Variant (3)..(3): Xaa in position 3 is any or no amino acid
  Variant (5)..(7): Xaa in position 5 to 7 is any or no amino acid
  Variant (11)..(11): Xaa in position 11 is any amino acid
  Variant (14)..(14): Xaa in position 14 is any amino acid
  Variant (15)..(15): Xaa in position 15 is Ile or Val
  Variant (18)..(19): Xaa in position 18 to 19 is any amino acid
  Variant (22)..(23): Xaa in position 22 to 23 is any amino acid
  Variant (26)..(26): Xaa in position 26 is any amino acid
  Variant (27)..(27): Xaa in position 27 is Leu or Met
  Variant (29)..(29): Xaa in position 29 is any amino acid
  Variant (30)..(30): Xaa in position 30 is Ala, Asp, Glu or Thr
  Variant (31)..(31): Xaa in position 31 is Leu, Met or Val
  Variant (32)..(32): Xaa in position 32 is Ala, Gly or Ser
  Variant (33)..(34): Xaa in position 33 to 34 is any amino acid
  Variant (35)..(35): Xaa in position 35 is Ile or Leu
  Variant (36)..(36): Xaa in position 36 is any amino acid
  Variant (37)..(37): Xaa in position 37 is Ala, Asp, Gly, Asn or Ser
  Variant (38)..(38): Xaa in position 38 is Cys or Asn
  Variant (39)..(39): Xaa in position 39 is Leu or Val
  Variant (40)..(42): Xaa in position 40 to 42 is any amino acid
  Variant (43)..(43): Xaa in position 43 is Ala, Asp, Gly or Gln
  Variant (44)..(44): Xaa in position 44 is any amino acid
  Variant (45)..(45): Xaa in position 45 is Leu or Val
  Variant (46)..(46): Xaa in position 46 is Ala or Ser
  Variant (48)..(48): Xaa in position 48 is any amino acid
  Variant (53)..(53): Xaa in position 53 is Phe or Tyr
  Variant (54)..(54): Xaa in position 54 is any amino acid
  Variant (55)..(55): Xaa in position 55 is Ala, Ile, Leu or Val
  Variant (56)..(56): Xaa in position 56 is Ile, Leu or Val
VXXLXXXDLDXFKXXNDXXGHXXGDXXLXXXXXXXXXXXXXXXXXXRXGGDEXXXX

SEQ ID NO: 134693 - protein, 20 aa, Artificial sequence
  protein pattern
  Variant (3)..(5): Xaa in position 3 to 5 is any amino acid
  Variant (6)..(6): Xaa in position 6 is Asp, Gly, Asn or Gln
  Variant (7)..(10): Xaa in position 7 to 10 is any amino acid
  Variant (13)..(13): Xaa in position 13 is Phe or Tyr
  Variant (14)..(15): Xaa in position 14 to 15 is any amino acid
  Variant (16)..(16): Xaa in position 16 is Ala, Gly or Ser
  Variant (17)..(17): Xaa in position 17 is Lys or Arg
  Variant (19)..(19): Xaa in position 19 is Ile, Leu, Met or Val
  Variant (20)..(20): Xaa in position 20 is Ala, Pro, Ser or Thr
FLXXXXXXXXQGXXXXXPXX

SEQ ID NO: 134694 - protein, 16 aa, Artificial sequence
  protein pattern
  Variant (3)..(3): Xaa in position 3 is any amino acid
  Variant (5)..(5): Xaa in position 5 is Leu, Met or Val
  Variant (6)..(6): Xaa in position 6 is Ala or Glu
  Variant (7)..(7): Xaa in position 7 is Ala, Asp, Glu, Asn or Gln
  Variant (8)..(8): Xaa in position 8 is any amino acid
  Variant (9)..(9): Xaa in position 9 is Ala, Asp, Glu or Gln
  Variant (10)..(10): Xaa in position 10 is Phe or Leu
  Variant (11)..(11): Xaa in position 11 is any amino acid
  Variant (12)..(12): Xaa in position 12 is Ile or Leu
  Variant (13)..(13): Xaa in position 13 is His or Tyr
LRXAXXXXXXXXXYQP

SEQ ID NO: 134695 - protein, 19 aa, Artificial sequence
  protein pattern
  Variant (2)..(3): Xaa in position 2 to 3 is any amino acid
  Variant (5)..(5): Xaa in position 5 is any amino acid
  Variant (6)..(6): Xaa in position 6 is Ile, Leu or Val
  Variant (10)..(10): Xaa in position 10 is Ala, Pro or Ser
  Variant (13)..(14): Xaa in position 13 to 14 is any amino acid
  Variant (15)..(15): Xaa in position 15 is Phe, Ile, Leu or Met
  Variant (16)..(18): Xaa in position 16 to 18 is any amino acid
  Variant (19)..(19): Xaa in position 19 is Ile or Leu
AXXDXXTGLXNRXXXXXXX

SEQ ID NO: 134696 - protein, 21 aa, Artificial sequence
  protein pattern
  Variant (2)..(2): Xaa in position 2 is any amino acid
  Variant (3)..(3): Xaa in position 3 is Ala, Asp, Glu, Asn, Gln or Ser
  Variant (4)..(4): Xaa in position 4 is any amino acid
  Variant (5)..(5): Xaa in position 5 is Glu, Gly or Asn
  Variant (6)..(10): Xaa in position 6 to 10 is any amino acid
  Variant (11)..(11): Xaa in position 11 is Ile, Leu or Val
  Variant (12)..(12): Xaa in position 12 is any amino acid
  Variant (13)..(13): Xaa in position 13 is Phe, Ile, Leu or Val
  Variant (15)..(15): Xaa in position 15 is Ile or Leu
  Variant (19)..(20): Xaa in position 19 to 20 is any amino acid
  Variant (21)..(21): Xaa in position 21 is Ile or Met
LXXXXXXXXXXXXEXTESXXX

SEQ ID NO: 134697 - DNA, 747 bp, Escherichia coli
  CDS (1)..(747): transl_table=11
atgaatcagttaacggcttacaccttgcgcctgggcgataactgcctggtgctctcccagcggttgggtgaatggtgcggtcacgcaccggaactggaaatcgatctcgcactggcaaacattggcctcgatttattaggtcaggcacgcaacttcttatcgtatgccgctgaattagcgggagaaggcgatgaagataccctggccttcacccgagacgagcgccagttcagcaacttattgttggttgaacaaccaaacggcaattttgccgacaccattgcacgccagtatttcatcgatgcatggcatgtggcgctctttacccgtctgatggaaagccgtgatccgcaactggcggcgatttctgccaaagcaattaaagaagcgcgctatcacctgcgttttagtcgtggctggctggagcgactgggcaatggtactgacgtatcagggcaaaagatgcagcaggccatcaacaagttgtggcgttttaccgccgaactgttcgatgccgacgagattgatattgcactgagtgaagagggtattgcggttgatccacgcactttacgcgcagcgtgggaagccgaagtttttgccgggatcaacgaagccacattgaacgtaccgcaagagcaggcgtatcgcactggcggtaaaaaaggactgcataccgaacaccttggacccatgctggcagaaatgcagtatctccagcgtgtcttgcccggtcagcaatggtaa

SEQ ID NO: 134698 - protein, 248 aa, Escherichia coli
MNQLTAYTLRLGDNCLVLSQRLGEWCGHAPELEIDLALANIGLDLLGQARNFLSYAAELAGEGDEDTLAFTRDERQFSNLLLVEQPNGNFADTIARQYFIDAWHVALFTRLMESRDPQLAAISAKAIKEARYHLRFSRGWLERLGNGTDVSGQKMQQAINKLWRFTAELFDADEIDIALSEEGIAVDPRTLRAAWEAEVFAGINEATLNVPQEQAYRTGGKKGLHTEHLGPMLAEMQYLQRVLPGQQW

SEQ ID NO: 134699 - DNA, 786 bp, Sinorhizobium meliloti 1021
  CDS (1)..(786): transl_table=11
atggttcaggcaaccgcgatgcaggcggtcgtcgacagggccgctctcttcgacttcctgctcggcatgggcgacaatacattgatcctcggccatcgtctttcggaatggtgcggccacgccccggctctcgaagaggacatcgcgctcgccaacacggcactcgacctcatcggccagacgcagctctggctcggccttgcaggcgaggtcgaaggaaagggccgcagcgcggacgatcttgcctatctccgcgacgcgcgcgacttccgcaatctgctgctcaccgagcggccgaacggcgattacggcgggacgctgatgcgtcagtttctgttcgatgcatggcactatctcgcactgaaaggccttcgcagctcctgcgagccgcgcatcgccgcgatcgccgagaaagcgtcgaaggaggtggcctaccatctcgaacggagccgcgatctcgtgatccgcctcggtgacggaacggcggaaagtcacgcccgtatgcaggaggcgctggtcgatatctggccctataccggcgagatgttcgtgagcgcggcgcacgacctcgtccttgcggccgccggcgtcgcgccggagccggagaacttgaaggccgaatggcatgcgctggccgctgagacgcttcgcgcggcgacgctcgaaaaaccggaggaccgctatatgcacaagggcggcaagcgcggcctccatacggagcatctcggctatgtgctcgccgagatgcagttcctgcagcgcgcctatcccggcgccagctggtag

SEQ ID NO: 134700 - protein, 261 aa, Sinorhizobium meliloti 1021
MVQATAMQAVVDRAALFDFLLGMGDNTLILGHRLSEWCGHAPALEEDIALANTALDLIGQTQLWLGLAGEVEGKGRSADDLAYLRDARDFRNLLLTERPNGDYGGTLMRQFLFDAWHYLALKGLRSSCEPRIAAIAEKASKEVAYHLERSRDLVIRLGDGTAESHARMQEALVDIWPYTGEMFVSAAHDLVLAAAGVAPEPENLKAEWHALAAETLRAATLEKPEDRYMHKGGKRGLHTEHLGYVLAEMQFLQRAYPGASW

SEQ ID NO: 134701 - DNA, 828 bp, Streptomyces coelicolor A3(2)
  CDS (1)..(828): transl_table=11
atgagcgacgaccacgtctacctcaccctggccgaggggcacgaggacgacacccgctgggcctacggcaccggcttcgaggacccgctgcacggcgtcgacaccaccgtgcccgagggcgtcgacgccacagcgctggccgccgagtgcgtcgcgctcgccgacgacgccctggtgagcgcccagcggctggccgagtgggtcacccgggcgccggagcttgaggaggaggtggcgctggccaacatcgggctcgacctgctcggccaggcccgcctgctgtactcgcgcgccggtcaggccgacggcaccggccgcggcgaggacgcgtacgcctacttccgcgatgccggcgacttccgcaacgtccgcctgaccgaactcccgggcggcgacttcgcgttcgccgtcgtgcggctgctggtgctctccagctggcggctggcccacttccggcggctggagacacaccccgacccggtgctcgcggcggtcgccgccaagggcgtcaaggagctgacctaccaccggcagtacgccgccgagtggtgcgtgcgcctgggcgacggcaccgacgagtcgcaccgccggatgcgcgccgcactggacgaggtcgccccgtacctgggtgagctgcacacggcgtacgacgtccgggacgaggtcgccgacgacctgcgccaggtcacggaggccgccgggctgcccctgcccgtgtaccggccgctgcccggctcgggccgggccggcgagcacaccgaacacctggcgccgctcctgaccgagctgcagggcatcgcccgcgcccacccggaggcgacatggtga

SEQ ID NO: 134702 - protein, 275 aa, Streptomyces coelicolor A3(2)
MSDDHVYLTLAEGHEDDTRWAYGTGFEDPLHGVDTTVPEGVDATALAAECVALADDALVSAQRLAEWVTRAPELEEEVALANIGLDLLGQARLLYSRAGQADGTGRGEDAYAYFRDAGDFRNVRLTELPGGDFAFAVVRLLVLSSWRLAHFRRLETHPDPVLAAVAAKGVKELTYHRQYAAEWCVRLGDGTDESHRRMRAALDEVAPYLGELHTAYDVRDEVADDLRQVTEAAGLPLPVYRPLPGSGRAGEHTEHLAPLLTELQGIARAHPEATW

SEQ ID NO: 134703 - DNA, 759 bp, Pseudomonas putida KT2440
  CDS (1)..(759): transl_table=11
atgcataaagaagcccttatcccctacctgctgttgctcggcgacagcgccctggtccagggccagcgcctctgcgaatggtgtggccgtgccccggccatcgaggaagagctggccctgatgaacgtcggcctcgatctggtcggccaggcccgcaactggctggagtatgccgccgagctgctcgacgatggccgagatgccgatgccctggcgttccgccgtgacgagcgcgcctaccgcaacctgctgctggtcgagcaacccaacggtgattttgccgtgaccatgaccaagcagttcctctacgacgcgtggcacttcgccgtgctgcaggggttggtcgagtccagcgatgcgcgaatcgcggggattgccgccaaggccctgaaggaagtcacctaccacctgcgccggtccagcgaatgggtacaacgtctgggcggtggtaccgatgccagccgccagcgcatgctcgccgccgtcccggcactgtggcgcttcaccgtcgaactcgctgctggcagcgacaacgaagtccgtctggcggaatgcggtatcgccgccgacccagcgaccgtcggcgccacctggctgaagcaggtcgccgcgacgtttgcttcggtcgaactgccgctgcccaaggccgccagccacttctacctggatggccgcaaaggcctgcacaccgagcatctgggcctgctgctggccgaaatgcagttcctgccaagggcctaccccgatgcaacctggtga

SEQ ID NO: 134704 - protein, 252 aa, Pseudomonas putida KT2440
MHKEALIPYLLLLGDSALVQGQRLCEWCGRAPAIEEELALMNVGLDLVGQARNWLEYAAELLDDGRDADALAFRRDERAYRNLLLVEQPNGDFAVTMTKQFLYDAWHFAVLQGLVESSDARIAGIAAKALKEVTYHLRRSSEWVQRLGGGTDASRQRMLAAVPALWRFTVELAAGSDNEVRLAECGIAADPATVGATWLKQVAATFASVELPLPKAASHFYLDGRKGLHTEHLGLLLAEMQFLPRAYPDATW

SEQ ID NO: 134705 - DNA, 780 bp, Bradyrhizobium japonicum USDA 110
  CDS (1)..(780): transl_table=11
gtgatgccggtcgccaacacccaggtctccgaaacgccgctggtgctctacgccctgcgccgcgccgacgatgcgctgatcctcggtcaccggttgtcggaatggtgcgggcatgcgccgatgctggaagaggacatggcgctctccaacatcgcgctcgacctcatcggccaggcacgcgagctctacacctatgccgccaaggccgaaggcaaggagaatgatgaggacaagctcgcctacctgcgcgacgtccggcagtaccgcaacctgctgctggtcgagcagcccaacggcgattttgcccagaccttggtgcggcagttcttctattccgccttcgccgacctctactggcgcgccatgatgacctcgcgcgacacgacgctcgccgccattgccgccaagtccgagaaggagagcgcctatcatctgcgtcatgcctcggaatggatcatccggctcggcgacggcacagacgagagccatcgacgagcgcaagccgcgattgatcacctctgggccttcaccggtgagatgtttgccgtcgatgacggcgaacgcgccctgatccatgcgggtatcgccgtcgatccgggtatcttgcgcggtcgttggctgaagatgctttccgatgtcgtcagcgaggccacgctcgagctgccgcagaatgactggatgcagcagggcggccgcgtgggccggcacagcgagcatctcggccatctcctgtcggagctgcaatcgatgcagcgcaccttcccggggcagacatggtga

SEQ ID NO: 134706 - protein, 259 aa, Bradyrhizobium japonicum USDA 110
MMPVANTQVSETPLVLYALRRADDALILGHRLSEWCGHAPMLEEDMALSNIALDLIGQARELYTYAAKAEGKENDEDKLAYLRDVRQYRNLLLVEQPNGDFAQTLVRQFFYSAFADLYWRAMMTSRDTTLAAIAAKSEKESAYHLRHASEWIIRLGDGTDESHRRAQAAIDHLWAFTGEMFAVDDGERALIHAGIAVDPGILRGRWLKMLSDVVSEATLELPQNDWMQQGGRVGRHSEHLGHLLSELQSMQRTFPGQTW

SEQ ID NO: 134707 - DNA, 720 bp, Streptomyces avermitilis MA-4680
  CDS (1)..(720): transl_table=11
gtgaccgtcaccgtgcacaccgcggccgccctggccctcggcgacgacgccctggtgctctcccaccgactgggggagtgggcggggcacgcacccgtgctcgaagaggaggtcgccctcgccaacatcgcgctggacctgctgggccaggcccgcgtgctgctgtcgatggccggcgacgaggacgagctggcctacctccgtgaggagcgcgccttccgcaacctccagctggtggagcagccgaacggcgacttcgcgcacacgatcgcccgccagctgtacttctccacgtaccagcggctgctgtacggacaactggcggccggaagcggcgagttcgccggtctcgcggccaaggcggtcaaggaggtcgcctaccaccaggaccacgccgagcagtggacgctgcggctcggcgacggcaccgaggtcagtcatgagcggatgcggcaggcgtgcggggcgctgtggcggttcacgggtgagatgctccagcccgtcgagggggtggacgtcgactgggacgggatgaagtccgcctggctggagtccgtcggcgacgtgctgcgccgcgccaccctggagctccccgaggggccgcagtacggggcgtggacggcgggcgcgggacgccaaggactgcacaccgaacccttcgggcggatgctcgccgagatgcagcatctgcaccgcagccacccgggggcgtcatggtga

SEQ ID NO: 134708 - protein, 239 aa, Streptomyces avermitilis MA-4680
MTVTVHTAAALALGDDALVLSHRLGEWAGHAPVLEEEVALANIALDLLGQARVLLSMAGDEDELAYLREERAFRNLQLVEQPNGDFAHTIARQLYFSTYQRLLYGQLAAGSGEFAGLAAKAVKEVAYHQDHAEQWTLRLGDGTEVSHERMRQACGALWRFTGEMLQPVEGVDVDWDGMKSAWLESVGDVLRRATLELPEGPQYGAWTAGAGRQGLHTEPFGRMLAEMQHLHRSHPGASW

SEQ ID NO: 134709 - DNA, 765 bp, Bordetella bronchiseptica RB50
  CDS (1)..(765): transl_table=11
atggacaagtcattgtttgagtacctgctgcggctgggcgacaccaccctggtgctgtcgcagcgcctgggccagtggtgcggccacgggcccgtgctggaagaggacctggcgctgaccaataccgcgctcgacctgctgggccaggcccgcatgtggctgacgctggccggcgaggtcgagggggccgggcgcgacgaggaccggctggcgtacctgcgcgatgcgccgcagttccgcaacctgctgctggtcgagcggcccaatggccactatggcgacaccatggcgcgccagttcctgttcgacacctggcactacttcctgctgatccgcctggccaggtcggccgacgaacgcgtggcggcgattgccgccaaggcgttgaaggaggtcacctaccacgcgcgccgttccgccgacctggtggtgcggctgggcgatggcacggcgctcagccacgcgcggatgcaggcggcgatcgacgcggcctggccctacgtgggcgagatgttcgtcgacgatgccatcgaccaggatcttgccgcgcgcggcatcgcctgcgagctgtccagcctgcgcgacgagtggctggcgcaggtgcgcgaagtgctggacgaggccaccctggccatgccgcaggaggacgaggccttccatcccgcccatcgcggcggacggcaggggcgccataccgagcacctgggctacatcctggccgagatgcagcacctgcagcgcgcctatcccggagcctcgtggtga

SEQ ID NO: 134710 - protein, 254 aa, Bordetella bronchiseptica RB50
MDKSLFEYLLRLGDTTLVLSQRLGQWCGHGPVLEEDLALTNTALDLLGQARMWLTLAGEVEGAGRDEDRLAYLRDAPQFRNLLLVERPNGHYGDTMARQFLFDTWHYFLLIRLARSADERVAAIAAKALKEVTYHARRSADLVVRLGDGTALSHARMQAAIDAAWPYVGEMFVDDAIDQDLAARGIACELSSLRDEWLAQVREVLDEATLAMPQEDEAFHPAHRGGRQGRHTEHLGYILAEMQHLQRAYPGASW

SEQ ID NO: 134711 - DNA, 777 bp, Rhodopseudomonas palustris CGA009
  CDS (1)..(777): transl_table=11
atgcctgccgcctcgatagaaatcaacgacaccccgctgttcaccaccacgctgcgccgcgccgatgatgcgctcgtgctcggtcatcggctgtcggaatggtgcgggcatgcgccgatgctggaagaggacatggcgctgtccaacatcgcgctcgacctgatcgggcaggcgcgcgagctctacagctatgcgggccaggttgaggggaagggccgcggagaggatcagctcgcgtacttgcgcgaggaaaggcagtaccagaatctgctgctggtcgagcagccgaacggcgatttcgcccgcaccatcgcacggcaattgttctattcggcattcgccgatccgtattggcgggcgatgatgcaatcgtccgacgccacgctcgccgcgattgcagccaagtcggaaaaggaaagcgcctatcaccttcgtcacgcggccgaatggatgatccggctcggcgacggcaccgatgaaagccacgcccgcgcgcaggatgcggttgaagcgctgtgggcattcaccggcgagctgttcgaggccgacaatgccgagcgccggctgatcgaaaccggcgtcgcggtcgatccggcgagcctgcgcgccacttggcagagcacaatcgacacggtgctgcgcgaagcgacgctgacggcaccgagcaatccgtggatgcagcagggtggccgcagcggccgtcacaccgagcatctcggccggctgctcgccgagctgcagcacatgcagcggacctatccggggctgacatggtga

SEQ ID NO: 134712 - protein, 258 aa, Rhodopseudomonas palustris CGA009
MPAASIEINDTPLFTTTLRRADDALVLGHRLSEWCGHAPMLEEDMALSNIALDLIGQARELYSYAGQVEGKGRGEDQLAYLREERQYQNLLLVEQPNGDFARTIARQLFYSAFADPYWRAMMQSSDATLAAIAAKSEKESAYHLRHAAEWMIRLGDGTDESHARAQDAVEALWAFTGELFEADNAERRLIETGVAVDPASLRATWQSTIDTVLREATLTAPSNPWMQQGGRSGRHTEHLGRLLAELQHMQRTYPGLTW

SEQ ID NO: 134713 - DNA, 768 bp, Azoarcus sp. EbN1
  CDS (1)..(768): transl_table=11
atgacccaacagatgacaagccccgaacatatcgaatacgtgctgcgcctcggcgacaacgcgctgattcttggccagcgcctgtccgagtggtgcggccacgcgccggtgctcgaagaggacatggcgctcgcgaacatgtcgctcgacctgattggccaggcgcgcatgctgctcacgcacgccggtcggctcgaaggccgcggtcgcgacgaggaccagctcgcgttcctgcgcaccgagccgaactaccgcaacctgacgctgtgcgagctgccgaaccaggacttcgcgcgcacgatggtgcgcaacttcctctacagcagcttccagaagctgctgtgggaacgcctgatgacgtcgagcgatgccgaactggccgcgatcgccgcgaaaagcatcaaggaagcgcgctaccacgcgcagcacgccggcgactgggtgatccgcctcggcgacggcacggccgaatcgtacgcgcgggcgcaaggcgcgctcgactacctgtggccctacacggccgagttcttcgtcgcgacaccggtcgacgacacggtcgcggcggccggcgtcggcccggcgtggagcgaactggaaacggcctgggaagcgctcgccatgccggtgctggccgaggcgacgctgacggtgccggcacgcacgccgttccgttcgtacggcaagttcggtcgccacagcgagcacatgggccatctgctcgccgagatgcagatcatgcagcgcacctaccccggcgcgcagtggtga

SEQ ID NO: 134714 - protein, 255 aa, Azoarcus sp. EbN1
MTQQMTSPEHIEYVLRLGDNALILGQRLSEWCGHAPVLEEDMALANMSLDLIGQARMLLTHAGRLEGRGRDEDQLAFLRTEPNYRNLTLCELPNQDFARTMVRNFLYSSFQKLLWERLMTSSDAELAAIAAKSIKEARYHAQHAGDWVIRLGDGTAESYARAQGALDYLWPYTAEFFVATPVDDTVAAAGVGPAWSELETAWEALAMPVLAEATLTVPARTPFRSYGKFGRHSEHMGHLLAEMQIMQRTYPGAQW

SEQ ID NO: 134715 - DNA, 756 bp, Azoarcus sp. EbN1
  CDS (1)..(756): transl_table=11
atgctgctcgatgacaagtccgtttatctgatgcgcctcggcgacaacgcgctggtgctgtcgcagcgcctttccgaatggtgcggcaagggcccggccttcgaggaggacatggcgctgaccaacattgcgctcgacctgatcggccaggcgcggatgtggctgtcctacgccggcgaggtcgaaggacgcggccgcgacgaggacgcgctggccttccgccgcgactcgcacgagttcaccaacctgctgctggtcgagcagccgaacggcgattacgcccagacgttggtgcgccagttcttcttcgacgcgtggcatcaactggtgctggacgcactgaggcgctcggccgatgaccgcatcgccgacatcgcctcgaaggcgatcaaggaagtcgcctaccacctgcgtcgcagcatcgatctggtcgtgcgtctgggcgacggcagcgcagagagccggcgccgcatgcaggcggcggtggaggagctgtggatgtacaccggcgagatgttcaacgccgacgagaccgaggagctgctgggcgcgcaggggctggcgtgcgacccctcgacgctgaaggacgcgtggctggcgatggtgagcgaagtcttcgccgaggcgacgctcgagcttcccgcgggcgaatggatgcagaagggcggcaagcaggggcggcacggggaacacctcggcctgctgctcgccgagatgcagttcctgcagcgcgcttatcccggcgcgacctggtga

SEQ ID NO: 134716 - protein, 251 aa, Azoarcus sp. EbN1
MLLDDKSVYLMRLGDNALVLSQRLSEWCGKGPAFEEDMALTNIALDLIGQARMWLSYAGEVEGRGRDEDALAFRRDSHEFTNLLLVEQPNGDYAQTLVRQFFFDAWHQLVLDALRRSADDRIADIASKAIKEVAYHLRRSIDLVVRLGDGSAESRRRMQAAVEELWMYTGEMFNADETEELLGAQGLACDPSTLKDAWLAMVSEVFAEATLELPAGEWMQKGGKQGRHGEHLGLLLAEMQFLQRAYPGATW

SEQ ID NO: 134717 - DNA, 762 bp, Pseudomonas fluorescens Pf-5
  CDS (1)..(762): transl_table=11
atgaaccctgcaaacgatctgctcaaccatctgctgcgcctgggcgacagtgccctggtccagggccagcgcctgtgcgaatggtgcggccgggccccggccctggaagaagaactggcactgatgaacgtcggtctcgacctggtgggccaggcccgcaactggctggactatgccgccgaactgctggcggacgggcgggatgccgaccatctggcctttcgccgcgacgaacgcgcctaccgcaacctgctgctggtggaacaacccaatggcgacttcgcggtgaccatgctcaagcagttcttctacgacgcctggcacctggaaacccttcgtggcctgtgcctttccagcgatccacgcatcgccggggtcgccgccaaggcgttcaaggaagtcacctaccacctgcgtcgctccagcgaatgggtcgagcgcctgggggatggcaccgaggaaagccaccggcgcatgctccaggccctgccgcggctgtggcgctttaccggggaactgatcgccaccgatcctgcggagaacgcgttgcaccaggccgggctgctggcagacccggctcaggtcgccaccgcctggcaggacagggtcgccgcggtgttcgcccgggccaccctgcctgtgcccgaagcgcccagccacttctacctggatgcgcgcaaaggcctgcataccgaacacctgggcctgctgctggcccagatgcaatcactgccgcgagcctatcccgatgcggtctggtga

SEQ ID NO: 134718 - protein, 253 aa, Pseudomonas fluorescens Pf-5
MNPANDLLNHLLRLGDSALVQGQRLCEWCGRAPALEEELALMNVGLDLVGQARNWLDYAAELLADGRDADHLAFRRDERAYRNLLLVEQPNGDFAVTMLKQFFYDAWHLETLRGLCLSSDPRIAGVAAKAFKEVTYHLRRSSEWVERLGDGTEESHRRMLQALPRLWRFTGELIATDPAENALHQAGLLADPAQVATAWQDRVAAVFARATLPVPEAPSHFYLDARKGLHTEHLGLLLAQMQSLPRAYPDAVW

SEQ ID NO: 134719 - DNA, 783 bp, Dechloromonas aromatica RCB
  CDS (1)..(783): transl_table=11
atgagtgccgccatcgattacctgctgcatctggctgacaatgccctggtcctcggccagcgcaatgccgaatggtgcggccacgggccgatccttgaagaagacattgcgctgtccaacgtcagcctcgacctgattggccaggcccgcatgctctatcagctggttgcacagctgaagggcggcgatgccaccgaagacaagctggcctacttccgcgataccggcgaattccgcaactacacgctgctcgaactgccgcaccatggcccgctgtccggctatgcccacagcagcctcgactacggcacgaccatcgtccgcaacttcctgtacagcgccctgatggccctgctctgggaagcgctggccaagtcgaacaacgccgatctggccgccatcgccgccaagtcgctgaaggaagtacgctatcacctgcgccactcccgcgactggctggttcgcctcggcgatggcaccgaggaatcgcatgcccgcgttcaggcctcactcgatcacctgatgccctacacccaggaattctgggcccacagcccggccgaagccgccgcggtgaaggatggtattgccgttgatctgaacacgctgaaggccgactgggatggcatcgtcgatgccgcgctggaagaagcgacgctgcagcgcccgaaagccggcggttacgtttcggacggcaagaacggcgtgcattccgagcatctcggcttcctgctggccgaaatgcaaagcctggcccgcgcccatccgaacggggtctggtaa

SEQ ID NO: 134720 - protein, 260 aa, Dechloromonas aromatica RCB
MSAAIDYLLHLADNALVLGQRNAEWCGHGPILEEDIALSNVSLDLIGQARMLYQLVAQLKGGDATEDKLAYFRDTGEFRNYTLLELPHHGPLSGYAHSSLDYGTTIVRNFLYSALMALLWEALAKSNNADLAAIAAKSLKEVRYHLRHSRDWLVRLGDGTEESHARVQASLDHLMPYTQEFWAHSPAEAAAVKDGIAVDLNTLKADWDGIVDAALEEATLQRPKAGGYVSDGKNGVHSEHLGFLLAEMQSLARAHPNGVW

SEQ ID NO: 134721 - DNA, 753 bp, Ralstonia eutropha JMP134
  CDS (1)..(753): transl_table=11
atggaccaacacaagttcgaatatctgcagcgcctgggcgataccacgctggtgctcggccagcgcctgtcggaatggtgcggccgcggccccgcgctggaagaggacattgcgctgaccaacgtcgcgctggatctcgtcggccagacccgcctgtggctcggctacgcggcggaagtcgaaggcgtgggccgcaacgctgaccagcttgcctacctgcgcgatgcccaccagttccgcaacctgctgctcgtcgaacagcccaacggcagctacgccgacacgctggcccgccagttcctgttcgatacctggcactacttcctgcttgagcggctgcagcactcgaccgatgcgcgcattgcagagattgcggccaagtcgctgaaggaagtgacctaccacgtgcgccgcagcggggacctcgtcgttcgccttggtgacggcaccgaggagagccatcgccgcatgcaggatgccttcgacgacctgtggatgttcaccggcgaactgttcgagtccgatgctgccgaagtcgcgctggttgcacagggcgttgcggtcgatccggcctcgctggccgagtcgtggcagcgccatgtgggcgaggtactggaggaagccacgttgcgcatccccgctggcaattggtcgcagaccggtggccgccagggccgccatactgaacatcttggctacctgctggccgagatgcagttcctgcagcgcgcctatcctggcgcccggtggtga

SEQ ID NO: 134722 - protein, 250 aa, Ralstonia eutropha JMP134
MDQHKFEYLQRLGDTTLVLGQRLSEWCGRGPALEEDIALTNVALDLVGQTRLWLGYAAEVEGVGRNADQLAYLRDAHQFRNLLLVEQPNGSYADTLARQFLFDTWHYFLLERLQHSTDARIAEIAAKSLKEVTYHVRRSGDLVVRLGDGTEESHRRMQDAFDDLWMFTGELFESDAAEVALVAQGVAVDPASLAESWQRHVGEVLEEATLRIPAGNWSQTGGRQGRHTEHLGYLLAEMQFLQRAYPGARW

SEQ ID NO: 134723 - DNA, 804 bp, Burkholderia sp. 383
  CDS (1)..(804): transl_table=11
atgacgatcacgcccgaacacctctcctacgtgctgcgcctcgcggacaacacgctgatcctcggtcagcgcaacgccgaatggtgcggccacggcccgatcctcgaggaagacatcgcgctcaccaacatgagcctcgacctcatcggccaggcgcgcatgctgtacacgcacgcggccgaactcgagcgccagctcaccggcgcgacgaagaccgaggacgactacgcgtacttccgcaccgaacgcgagttcgcgaacttcacgctcgccgagctgccgcactacggcccgatcgccggcaccgcgcacgccgacaacgactacgcggtgacgatcgtgcgcaacttcctgtactcggcgctgatgctgcacgtgtggaccgcgctcgaaacgtccaccgacacgcagctcgccgcgatcgccgcgaaatcggtgaaggaaacccgctaccacgtgcagcacgcgcgcgagtggctggttcgcctcggtgacggcaccgacgaatcgcaccgccgcgcacagaacgcgctcgactacctgacgccgtacacgcgcgaattcttcgccgccgatgcgatcgacgacgcggtcgccgccgagggcatcgcccccgcgccggccgcactcgaagcggcatggcgcgcggatgtggacgacgcgctcgcggaagcgacgctcacgctgccggccgccgtgcagcatgtgacgaccggcaagcagggcgagcactcggagcacatgggctacctgctcgcggaaatgcagagcctcgcgcgccagcatcccggctcgagctggtaa

SEQ ID NO: 134724 - protein, 267 aa, Burkholderia sp. 383
MTITPEHLSYVLRLADNTLILGQRNAEWCGHGPILEEDIALTNMSLDLIGQARMLYTHAAELERQLTGATKTEDDYAYFRTEREFANFTLAELPHYGPIAGTAHADNDYAVTIVRNFLYSALMLHVWTALETSTDTQLAAIAAKSVKETRYHVQHAREWLVRLGDGTDESHRRAQNALDYLTPYTREFFAADAIDDAVAAEGIAPAPAALEAAWRADVDDALAEATLTLPAAVQHVTTGKQGEHSEHMGYLLAEMQSLARQHPGSSW

SEQ ID NO: 134725 - DNA, 858 bp, Ralstonia metallidurans CH34
  CDS (1)..(858): transl_table=11
atgaattcatccatcactgccgcctccaacggcgacgcctcattggccggccttccgctcactcgctccgcgccgctgcagtatgtgctccgcctggccgacaatgcgctgatcctgggacagcgcaatgccgaatggtgtggccacggcccggcgctagaggaagacatcgcgctgaccaacatcagtctcgacctgatcgggcaggcccggctgctctacagccatgccggcgtgcttgaaggccagttgaccggccgcacccggcatgaagacgactacgcctactggcgtggcgagcgcgagtttcacaactggacgctgctggaactgccgcaccacggaccgctggccggcactgcgcgcgcggatcgtgactacgccatcaccatcatgcgcaactttctgttcggcgcgttgatggtggagttgtggcccgcgctggagcgcagccgcgacgccgagctcgccgccatcgccgccaagtcgataaaggaagcgcgctaccacctgcaccatgccgccggctgggtcgtgcggcttggcgatggcaccgaaacgtctcacctccggatgcaacgcgcgctcgagcatctgatgccgtatatgaacgagtgcttcgccgtcgatccgatcgagcgggaagccgcggagcaaggcatcggcgtgctgaccgccgacttgcgcgatgcatgggacgccacggtacgcgccacactcgaagaagcgacgttgcgcctgccgaccgagtccgcgttcctctcgacaggcaagcagggcgtgcactcggaacacatgggctatctgctggccgagttgcaggggcttgcgcgcgcccatcccggcgcgcagtggtaa

SEQ ID NO: 134726 - protein, 285 aa, Ralstonia metallidurans CH34
MNSSITAASNGDASLAGLPLTRSAPLQYVLRLADNALILGQRNAEWCGHGPALEEDIALTNISLDLIGQARLLYSHAGVLEGQLTGRTRHEDDYAYWRGEREFHNWTLLELPHHGPLAGTARADRDYAITIMRNFLFGALMVELWPALERSRDAELAAIAAKSIKEARYHLHHAAGWVVRLGDGTETSHLRMQRALEHLMPYMNECFAVDPIEREAAEQGIGVLTADLRDAWDATVRATLEEATLRLPTESAFLSTGKQGVHSEHMGYLLAELQGLARAHPGAQW

SEQ ID NO: 134727 - DNA, 762 bp, Silicibacter sp. TM1040
  CDS (1)..(762): transl_table=11
atgtcgcacgacgctgccttttatgaattcctcttgcggatgggggacaacaccctgatcctcggccatcgcgtcagcgaatggtgcggtcatgcgcctgttcttgaagaggatatcgcgcttgccaacaccgcgctcgatctcatcggtcagacccagatgtggcttggacttgcggctgaagtacagggcgagggcaagaccgcagatgatctggccttcctgcgcgacgcctgggattttcgcaatctgctgctggtcgagatgccaaacggcgactttggccaaaccttgatgcgccagttcctgtttgatgcctggcatgtgctgcaactgcgcgcgctgactgggtcgtctgacgaacgcatcgccgcgattgcggcaaaagcggtgaaggaagcgacctaccatctcgaacgctctgccgagacggtggtaggccttggcgacggaaccgaggaaagccacgccagaatgcaggcggcgcttgattacctttacccctatgtgggtgaaatgttcctgagcgacgtggtcgatgccgcgctggtcgaggccgggattgcgccggatcctgcgagtttgcgcgcggactacgatgacacgctcgcccgcgttcttggcgaagcgacgctggcgctccccaaggcgcgccgcgcccgtggtgggggccgcgatggtaagatgcacaccgaacacctcggccatctgctgaccacgatgcagtggatgcagcgcgcctatccgggcgcgacgtggtaa

SEQ ID NO: 134728 - protein, 253 aa, Silicibacter sp. TM1040
MSHDAAFYEFLLRMGDNTLILGHRVSEWCGHAPVLEEDIALANTALDLIGQTQMWLGLAAEVQGEGKTADDLAFLRDAWDFRNLLLVEMPNGDFGQTLMRQFLFDAWHVLQLRALTGSSDERIAAIAAKAVKEATYHLERSAETVVGLGDGTEESHARMQAALDYLYPYVGEMFLSDVVDAALVEAGIAPDPASLRADYDDTLARVLGEATLALPKARRARGGGRDGKMHTEHLGHLLTTMQWMQRAYPGATW

SEQ ID NO: 134729 - DNA, 930 bp, Rhodococcus sp. RHA1
  CDS (1)..(930): transl_table=11
gtgaggctgacgatgaccgaccacgacaatgcttacgaaggcctcgtcgacgaagacagccacggccagtgggcgttcggcaccagcttcgacgaccccctcgcgggtgtcgacaccacggttccggaggacgtcgacctctccgcgctggccggctactgcctgatgctcggtgacgatgcactgatcagctcacagcgtctcgccgagtggagcacgcgcgcaccggaactcgaggaagaggttgcgctcgcgaacgtcgggctcgacctgctcggtcaggcgcgactgctgctcgcccgggcggccgcggcggacgcgtcggtggtgccgtacatctcggagacgagccccattcccgccgaggacgcgctcgcgttcttccgggacgagaatcggttccgcaacacccggctggccgaactcgacaacggcgacttcgctcagtcgatcacgcgactgctggtgttctcgacgtggcgtctcgcgctgttcgatcgtctccgcacgtcccgggacccggtcctcgcggcggtcgcggtgaagggcgtcaaggaagtcacctaccaccgcgactacgcggcccgctgggttgtgacgctcggctgcggcacggaggagtcgaagaccaggatggaagcggcgctcacccacgtgtggccgtatgtcgaggaattgttcgtcccgaccaccgaggagctcgcgctcgcggcggtgggggtgggcgtcgacccgcgggacgtgcgtgaggaattcgattccgtgctcgaacaggtgctgcgcgccgccgagctcaccgcaccgaccggccggaccgtcggcaccgtcggcggccgggcaggacggcagggattgcacaccgagtcgctcggactgctgctcgccgagatgcagagcgtggcccgggcgcaccccgaaggagtgtggtga

SEQ ID NO: 134730 - protein, 309 aa, Rhodococcus sp. RHA1
MRLTMTDHDNAYEGLVDEDSHGQWAFGTSFDDPLAGVDTTVPEDVDLSALAGYCLMLGDDALISSQRLAEWSTRAPELEEEVALANVGLDLLGQARLLLARAAAADASVVPYISETSPIPAEDALAFFRDENRFRNTRLAELDNGDFAQSITRLLVFSTWRLALFDRLRTSRDPVLAAVAVKGVKEVTYHRDYAARWVVTLGCGTEESKTRMEAALTHVWPYVEELFVPTTEELALAAVGVGVDPRDVREEFDSVLEQVLRAAELTAPTGRTVGTVGGRAGRQGLHTESLGLLLAEMQSVARAHPEGVW

SEQ ID NO: 134731 - DNA, 744 bp, Nocardioides sp. JS614
  CDS (1)..(744): transl_table=11
gtgagtgcgcacctcgactacgtggtcgggctcgcggacgacgcgctggtcgccgcgcagcgcaccggctggtggatcagccgggcgccgcagctcgaggaggacgtcgcgctggccaacatcggcctcgaccagctcggccaggcccggggcctgctcgcgcacgccgccaccatcgagggcgccggccgcaccgaggacgacctcgcctacctgcgcgacgagcgcgagttccgcaacgtgtggctggtcgagcgccagcagagcgacttcggggtcgcgatggcgcggctgctggtgctctccgcctggcaggccgagctgtacgccgccctcgtgcacagcaccgacccggtgctggccgccgtggccggcaaggccgtcaaggaggtggcctaccacctcgaccacgccggccactgggtgctgcggctcggcgacgggaccgaggattcgcaccggcggatgcaggccgcgctcgacgccgagtggccctacgtcgaggagctgttcaccccggtcgaccccgcgctggtcgcatccggcgtggccgtcgaccccgtcggcctgcgtgcgggcgtcctgcacacgatcgagtccgtggtccggcaggcgaccctcacggtgcccgacgtcaccccggcgcgcggcggcggccggcatggcctgcacaccgaggagctcggctacctgctcgccgagatgcagcacctgcaccgctcgcacccaggggcgacctggtga

SEQ ID NO: 134732 - protein, 247 aa, Nocardioides sp. JS614
MSAHLDYVVGLADDALVAAQRTGWWISRAPQLEEDVALANIGLDQLGQARGLLAHAATIEGAGRTEDDLAYLRDEREFRNVWLVERQQSDFGVAMARLLVLSAWQAELYAALVHSTDPVLAAVAGKAVKEVAYHLDHAGHWVLRLGDGTEDSHRRMQAALDAEWPYVEELFTPVDPALVASGVAVDPVGLRAGVLHTIESVVRQATLTVPDVTPARGGGRHGLHTEELGYLLAEMQHLHRSHPGATW

SEQ ID NO: 134733 - DNA, 756 bp, Croceibacter atlanticus HTCC2559
  CDS (1)..(756): transl_table=11
atgagcaatcaaactttaataaattatatccttggcatcgccgataactcactcatccttgggcaacgcctaggaactttaactggtcatggaccaagcttagagacagatatcgcttgcactaacatctcattagacttgttcggacaagttcgtggctactaccaatacgcagccgatttatctgaagaggacaaaactgaagatgatttcgcattcctcagaaaagaacgtgagtataaaaatgtgcttttggttgagcaaccaaatcgcgatttcgcttacgtcatcgcaagacagtatttgtttgatgttttccacattttacaaatgcaagaacttcagaatagtaaagatgaaaacttagctgcaatcgctaaaaagggaattaaagaagtaagttatcacgtgcgattttctggagattggatgaaacgtttaggcgatggaactgaagaaagccataataaaattcaggaagccgtgaataatctttggggttataccaatgaattatttatgatgactgaagcagacaaagaagctgctgaagctggtattggtgtagatgtttcaaaactaaaagatacctattacaatcgcgttgagaatcttctaaaagaagcaactatcgaaatccctgaaagtaaatactggcaaaaaggtggcaaagaaggtattcatacagaacatcttggttatctattaagcgatatgcaatatatgcaacgcacctatcctaatatgaaatggtag

SEQ ID NO: 134734 - protein, 251 aa, Croceibacter atlanticus HTCC2559
MSNQTLINYILGIADNSLILGQRLGTLTGHGPSLETDIACTNISLDLFGQVRGYYQYAADLSEEDKTEDDFAFLRKEREYKNVLLVEQPNRDFAYVIARQYLFDVFHILQMQELQNSKDENLAAIAKKGIKEVSYHVRFSGDWMKRLGDGTEESHNKIQEAVNNLWGYTNELFMMTEADKEAAEAGIGVDVSKLKDTYYNRVENLLKEATIEIPESKYWQKGGKEGIHTEHLGYLLSDMQYMQRTYPNMKW

SEQ ID NO: 134735 - DNA, 762 bp, Oceanospirillum sp. MED92
  CDS (1)..(762): transl_table=11
atgagtgatatcaaagctgcaacgcttgaatacgcaacccgcctgggtgatgactctgttgttctgggtcaccgcatctctgagtgggtaagctacggtcctttcctggaagaagacatcgcatacggtaacgtatctttggactacatcggtcgtgctcgtatgttctacacatacgctgctgaactggctgctgatggtcgtgacgaagacgatttcgcatttatgcgtaacgatcgtgaataccgcaacctgctgttgatggagatgccaaaaggcgacttcgcatactctcaggttcgccagctattcgcagacgtttactacacagttctactaccagaattgctgcagtctaaagacgaaacactatctgctattgcggcaaaagcgatcaaagaaactaaataccacctgcgccgcagccgtgactgggttctgcgtctgggtgacggtactgaagagagccacaagcgcactcagaaagctgtcgaccagctgtggggctacacgcacgaaatgttcgatatggacgaaacggagcagctactggctgacgaaggtatcggcgttgacgtttccaagctgcgtgatgcatggctgaaaatggtaacggacatcctgactgaagcaacgatcacagtaccggaagatagctgggctgttcgtggcggccgtaccggttaccacacagagaatctgggtcacatgctgactgagatgcagatcgtgcaccgctctaacccaggttgtaagtggtaa

SEQ ID NO: 134736 - protein, 253 aa, Oceanospirillum sp. MED92
MSDIKAATLEYATRLGDDSVVLGHRISEWVSYGPFLEEDIAYGNVSLDYIGRARMFYTYAAELAADGRDEDDFAFMRNDREYRNLLLMEMPKGDFAYSQVRQLFADVYYTVLLPELLQSKDETLSAIAAKAIKETKYHLRRSRDWVLRLGDGTEESHKRTQKAVDQLWGYTHEMFDMDETEQLLADEGIGVDVSKLRDAWLKMVTDILTEATITVPEDSWAVRGGRTGYHTENLGHMLTEMQIVHRSNPGCKW

SEQ ID NO: 134737 - DNA, 777 bp, Xanthobacter autotrophicus Py2
  CDS (1)..(777): transl_table=11
atggccaccacctccatcaccgtgcgcgagacgccgctggtgcgctacctgctgcgccgggccgacgacgcgctcattctcggccatcgcctgtcggaatggtgcggccatgcgcccaccatggaagaagagatggcgctggccaacatgggcctcgacctcctgggtcaggcgcgctcgctttatacctacgctgccgaagtggaaggcgcgggccgcaccgaggatgatttcgcctatctgcgcggcgagcgcgcctacggcaacctgctgctggtggaacagcccaacggcgacttcgcccagaccatggcgcggcagctgttctattcggccttcatcgatccctattggcgggcgctgatggcgtcgagcgacgcgacgctttccgccattgccgccaaggcagagaaggaaagcgcctatcacgtgcgccattgcgccgaatggctgatccgcctcggcgacggcacggcggaaagccacgcccgcgcacaggcggcggtggatggcctgtggcccttcaccggcgagctgttcgatgcggacgcgggcgaagccggcctcatcaccgagggcattgtgccggatcccgacagcctgcgcgcggcgtggcaggccaccgtgtccaccgtgctggctgaggccaccttgaagctgccgcaagccggctggatgcagaagggcgggcgtgacggccgccattccgagcacctggggccgctgctcaccgagctgcaatatctccagcgcaccttcccgggagccgtctggtga

SEQ ID NO: 134738 - protein, 258 aa, Xanthobacter autotrophicus Py2
MATTSITVRETPLVRYLLRRADDALILGHRLSEWCGHAPTMEEEMALANMGLDLLGQARSLYTYAAEVEGAGRTEDDFAYLRGERAYGNLLLVEQPNGDFAQTMARQLFYSAFIDPYWRALMASSDATLSAIAAKAEKESAYHVRHCAEWLIRLGDGTAESHARAQAAVDGLWPFTGELFDADAGEAGLITEGIVPDPDSLRAAWQATVSTVLAEATLKLPQAGWMQKGGRDGRHSEHLGPLLTELQYLQRTFPGAVW

SEQ ID NO: 134739 - DNA, 759 bp, marine gamma proteobacterium HTCC2080
  CDS (1)..(759): transl_table=11
atgaagttgcatgatccgctgacgcgttatgttgtgcgactaggagacgatgctttgattatgggccatcgtttgtccgaatggatgagccgagccccctttcttgaggaagatatagcactctccaatgttgctcttgattttgtgggaagggcgcgcttgttttaccaatatgcggccgatctcatgggaggagaggtgactgagaataccttcgcttaccagcgcgatgttcgtgattttactaatctgctgctttgtgaacttcctcggggcgacttcgccttcaccttgtgtcgccagtttttatatgatgcctactcgctacccttcactcaggcgctgtgtaagagcgcggatagccagttggcggcgattgcggccaaggcagagaaagagagtcgctatcacctgcgtcgcagtcgggattggatgttgcgtctgggggatggcactgccgagagtcacgagcgctgccaagatgccttggatcagctttggatttataccgacgagatgtttgagtgcgacgcattgctcgatggcttaatagcggcgggtatcgcagtgaataccgagggtttacgttcagagtggcttgataccgttaccgaaacactgcatgcggcgaccctggtgatccccgaggcccaagggaacgttacagggggtagggaggggattcacacggatgacctcggattcttactcgctgaaatgcagtttatgcagcgcgcttatccgggtttacagtggtga

SEQ ID NO: 134740 - protein, 252 aa, marine gamma proteobacterium HTCC2080
MKLHDPLTRYVVRLGDDALIMGHRLSEWMSRAPFLEEDIALSNVALDFVGRARLFYQYAADLMGGEVTENTFAYQRDVRDFTNLLLCELPRGDFAFTLCRQFLYDAYSLPFTQALCKSADSQLAAIAAKAEKESRYHLRRSRDWMLRLGDGTAESHERCQDALDQLWIYTDEMFECDALLDGLIAAGIAVNTEGLRSEWLDTVTETLHAATLVIPEAQGNVTGGREGIHTDDLGFLLAEMQFMQRAYPGLQW

SEQ ID NO: 134741 - DNA, 759 bp, Pseudomonas putida GB-1
  CDS (1)..(759): transl_table=11
atgcataaagaagcccttgttccttacctgctgctgctcggcgacagtgccctggtgcagggccagcgcctttgcgaatggtgtggccgtgcgcctgccatcgaagaagagctggccttgatgaacgtcggcctcgacctggtcgggcaggcgcgcaactggctggagtatgccgccgagctgctcgatgacggccgtgatgccgatgccctggctttgcgccgtgacgagcgcgcctaccgcaacctgctgctggtcgagcaacccaacggcgactttgccgtgaccatgaccaagcagtttctctacgacgcctggcacttcgccgtgcttcaggggctggtcgagtccagcgatgcgcgtgtcgccggcatcgccgccaaggccctgaaggaagtcacctaccacttgcgccgctccagcgagtgggtacaacgcctgggtgatggcaccgaagaaagccgccagcgcatgctcgtcgctatcccgtcactgtggcgtttcactgtcgaactcacgaccggcagcgacaacgaagtgcatttggccgaagccggtatcggcgccaaccctgccgctgtcggtgccgcctggctccaacaggtcacaacgaccttcacttcggtcgagctgccgctgcccaaggccgccagccacttctacctggatggccgcaaagggctgcacaccgagcacttgggcctgctgctggccgagatgcagttcctgccaagggcctaccccgatgcaacctggtga

SEQ ID NO: 134742 - protein, 252 aa, Pseudomonas putida GB-1
MHKEALVPYLLLLGDSALVQGQRLCEWCGRAPAIEEELALMNVGLDLVGQARNWLEYAAELLDDGRDADALALRRDERAYRNLLLVEQPNGDFAVTMTKQFLYDAWHFAVLQGLVESSDARVAGIAAKALKEVTYHLRRSSEWVQRLGDGTEESRQRMLVAIPSLWRFTVELTTGSDNEVHLAEAGIGANPAAVGAAWLQQVTTTFTSVELPLPKAASHFYLDGRKGLHTEHLGLLLAEMQFLPRAYPDATW

SEQ ID NO: 134743 - DNA, 759 bp, Pseudomonas putida
  CDS (1)..(759): transl_table=11
atgcacaacgaagccctgatcccttacctgttgctgctcggcgacagtgccctggtccaaggccagcgcctctgcgaatggtgtggccacgcccctgccatcgaagaagagctggccctgatgaacgttggcctggacctggtcggccaggcccgcaactggctggaatacgcagccgaactgcttgacgacggtcgcgacgccgacgccctggccttccgccgagacgagcgcgcctaccgcaacctgctgctggtcgagcaacccaacggtgatttcgccgtgaccatgaccaagcagttcctctacgacgcctggcacttcgccgtgctacagggcctggtcgggtcccgcgacgagcgtatcgccggtatcgccgccaaggcactcaaggaagtcacctaccacctgcgccgttccagcgagtgggtacagcgtatggggggcggtacagaacaaagccgccaacgcatgctcgccgccattccggcactgtggcgcttcaccgtcgaactgacggccgccagcgacaacgaggtgcggttggccgaagcgggtattgccgctgccccggcaactgtgggtgccgcgtggctcaaacaggtgagcgagactttcgcttcggtcgagctgccgctgcccaaggctgccagccacttctacctggacagtcgcaaaggcctgcacaccgagcacctgggcctgctgctggccgagatgcagttcctgccaagggcttaccccgatgcaacctggtga

SEQ ID NO: 134744 - protein, 252 aa, Pseudomonas putida
MHNEALIPYLLLLGDSALVQGQRLCEWCGHAPAIEEELALMNVGLDLVGQARNWLEYAAELLDDGRDADALAFRRDERAYRNLLLVEQPNGDFAVTMTKQFLYDAWHFAVLQGLVGSRDERIAGIAAKALKEVTYHLRRSSEWVQRMGGGTEQSRQRMLAAIPALWRFTVELTAASDNEVRLAEAGIAAAPATVGAAWLKQVSETFASVELPLPKAASHFYLDSRKGLHTEHLGLLLAEMQFLPRAYPDATW

SEQ ID NO: 134745 - DNA, 834 bp, Corynebacterium glutamicum
  CDS (1)..(834): transl_table=11
atgagttttgcaactaacgattcagcgacgcgccaaactcagggcgacgcaatgacgccggaggacgtcgtagcatccggccaagtagcaagcgacgccgtagcaaactacgcgctcatgcttgccgacgattccctcatgcttgcacaacgccttggctggtggatatctcgcggtccagaaatggaagaggacatcgcgcttggcaatatcggccttgacctcttgggacatgctcgcttcttctactcttacgcaggaactgcgtggggcaaaactgaagatgatctcgcatacttccgtaccgaagaggaattccgttccgctgccatcatggagcaggaaaacggcgatttcgcgcagacgattgctcgtcacctcattgtcagctactacctcatcggtttgtacagcaagcttgaatcatctgcagatcagatgcttgccagcatcgcggcaaaagcagtgaaagagcttgaataccacgttgaccacgcaaaccagtgggttctccgcttgggcgatggcaccgaagaatcgcatcgtcgcatgcaagacggcctgaactacatgtggccatatgtgaatgagatttttgaagatctgccactgcacaccgaacttgctgctcaaggcattgccgttcttccctcggagctgcgcgcagattttgatacccgcgttgaagcagttattgaagccgcaaccttgaaagtgcccgcggtcccacaagctgtgagcggtcatcgtaccggtcgtttcagcgaataccgaggattcatcctggccgaaatgcaatcacttgcacgccagcatcccggcgccacttggtag

SEQ ID NO: 134746 - protein, 277 aa, Corynebacterium glutamicum
MSFATNDSATRQTQGDAMTPEDVVASGQVASDAVANYALMLADDSLMLAQRLGWWISRGPEMEEDIALGNIGLDLLGHARFFYSYAGTAWGKTEDDLAYFRTEEEFRSAAIMEQENGDFAQTIARHLIVSYYLIGLYSKLESSADQMLASIAAKAVKELEYHVDHANQWVLRLGDGTEESHRRMQDGLNYMWPYVNEIFEDLPLHTELAAQGIAVLPSELRADFDTRVEAVIEAATLKVPAVPQAVSGHRTGRFSEYRGFILAEMQSLARQHPGATW

SEQ ID NO: 134747 - DNA, 768 bp, Rhizobium meliloti
  CDS (1)..(768): transl_table=11
atgcaggcggtcgtcgacagggccgctcttttcgatttcctgctcggcatgggcgacaatgcgttgatcctcggccatcgtctttcggaatggtgcggccacgccccggctctcgaagaggacatcgcgctcgccaacacggcactcgacctcatcggccagacgcagctctggctcggctttgcaggcgaggtcgaaggaaagggccgcagcgcggacgatcttgcctatctccgcgacgcgcgcgacttccgcaacctgctgctcaccgagcggccgaacggcgattacggcgggacgctgatgcgtcagtttctgttcgatgcatggcactatctcgcgctgaaaggccttcgcagctcctgcgagccgcgcatcgccgcgatcgccgagaaggcgtcgaaggaggtggcctaccatctcgaacggagccgcgatctcgtgatccgcctcggtgacggaacggcggaaagccacgcccgtatgcaggaggcgctggtcgatatctggccctataccggcgagatgttcgtgagcgaggcgcacgacctcgtccttgcggctgccggcgtcgcgccggagccggagagcttgaaggccgaatggcatgcgctggccgctgagacacttcgcgcggcgacgctcgaaaaaccggaggaccgctatatgcacaagggcggcaagcgcggcctccatacggagcatctcggctatgtgctcgccgagatgcagttcctgcagcgcgcctatcccggcgccagctggtag

SEQ ID NO: 134748 - protein, 255 aa, Rhizobium meliloti
MQAVVDRAALFDFLLGMGDNALILGHRLSEWCGHAPALEEDIALANTALDLIGQTQLWLGFAGEVEGKGRSADDLAYLRDARDFRNLLLTERPNGDYGGTLMRQFLFDAWHYLALKGLRSSCEPRIAAIAEKASKEVAYHLERSRDLVIRLGDGTAESHARMQEALVDIWPYTGEMFVSEAHDLVLAAAGVAPEPESLKAEWHALAAETLRAATLEKPEDRYMHKGGKRGLHTEHLGYVLAEMQFLQRAYPGASW

SEQ ID NO: 134749 - DNA, 759 bp, Azoarcus evansii
  CDS (1)..(759): transl_table=11
atgaccactacccccgcccacattgaatacgtcacccgcctcggcgacaacgcgctgatcctcggccagcgcatgtccgaatggtgcggccacgcgccggtgctcgaagaggacatggcgctcgcgaacatgtcgctcgacctgatcggccaggcgcgcatgctgctcacgcacgccggcaagctcgaaggcaagggccgcgacgaggaccagcttgccttcctgcgcaccgagatgcactaccgcaacctcacgctgtgcgagctgcccaacgtcgacttcggccgcacgatggtgcgcaatttcctcttcgcgagcctccaggtgctgctgtgggagcgcctgctcgcgtcgagcgacaccgaactcgccgcgatcgccgcgaagagcctcaaggaagcgcgctaccacgcgcagcacgccggcgactgggtcgtgcgtctgggcgacggcaccgccgaatcgcacgaacgcgcgcaggctgcgctcgactacctgtggccctacaccgccgagttcttcgctgcgaatccgaccgacgaggcgattgccgccgccggcatcggcccggcctggagcgagctcgaagcggcgtgggaagccgtggtcgtgccggtgttgaacgaggcgacgctgaccgtgccggcgcgcacgcccttcaagtcctacggcaagttcggccgccacagcgagcacctcgggcacctgctgtcggagatgcagtacctgcagcgcacctatcccggcgcgcagtggtaa

SEQ ID NO: 134750 - protein, 252 aa, Azoarcus evansii
MTTTPAHIEYVTRLGDNALILGQRMSEWCGHAPVLEEDMALANMSLDLIGQARMLLTHAGKLEGKGRDEDQLAFLRTEMHYRNLTLCELPNVDFGRTMVRNFLFASLQVLLWERLLASSDTELAAIAAKSLKEARYHAQHAGDWVVRLGDGTAESHERAQAALDYLWPYTAEFFAANPTDEAIAAAGIGPAWSELEAAWEAVVVPVLNEATLTVPARTPFKSYGKFGRHSEHLGHLLSEMQYLQRTYPGAQW

SEQ ID NO: 134751 - DNA, 24 bp, Artificial sequence
  primer
atgaatcagttaacggcttacacc

SEQ ID NO: 134752 - DNA, 21 bp, Artificial sequence
  primer
ttaccattgctgaccgggcaa

SEQ ID NO: 134753 - protein, 267 aa, Artificial sequence
  consensus sequence
  Variant (2)..(3): Xaa in position 2 to 3 is any amino acid
  Variant (5)..(8): Xaa in position 5 to 8 is any amino acid
  Variant (10)..(11): Xaa in position 10 to 11 is any amino acid
  Variant (14)..(17): Xaa in position 14 to 17 is any amino acid
  Variant (19)..(20): Xaa in position 19 to 20 is any amino acid
  Variant (23)..(24): Xaa in position 23 to 24 is any amino acid
  Variant (27)..(27): Xaa in position 27 is any amino acid
  Variant (29)..(30): Xaa in position 29 to 30 is any amino acid
  Variant (34)..(34): Xaa in position 34 is any amino acid
  Variant (39)..(43): Xaa in position 39 to 43 is any amino acid
  Variant (44)..(47): Xaa in position 44 to 47 is any or no amino acid
  Variant (49)..(51): Xaa in position 49 to 51 is any amino acid
  Variant (52)..(68): Xaa in position 52 to 68 is any or no amino acid
  Variant (70)..(71): Xaa in position 70 to 71 is any amino acid
  Variant (73)..(74): Xaa in position 73 to 74 is any amino acid
  Variant (76)..(81): Xaa in position 76 to 81 is any amino acid
  Variant (83)..(84): Xaa in position 83 to 84 is any amino acid
  Variant (86)..(86): Xaa in position 86 is any amino acid
  Variant (88)..(88): Xaa in position 88 is any amino acid
  Variant (90)..(91): Xaa in position 90 to 91 is any amino acid
  Variant (92)..(102): Xaa in position 92 to 102 is any or no amino acid
  Variant (104)..(106): Xaa in position 104 to 106 is any amino acid
  Variant (108)..(109): Xaa in position 108 to 109 is any amino acid
  Variant (111)..(124): Xaa in position 111 to 124 is any amino acid
  Variant (126)..(127): Xaa in position 126 to 127 is any amino acid
  Variant (129)..(129): Xaa in position 129 is any amino acid
  Variant (131)..(132): Xaa in position 131 to 132 is any amino acid
  Variant (133)..(133): Xaa in position 133 is any or no amino acid
  Variant (135)..(135): Xaa in position 135 is any amino acid
  Variant (138)..(138): Xaa in position 138 is any amino acid
  Variant (140)..(141): Xaa in position 140 to 141 is any amino acid
  Variant (144)..(145): Xaa in position 144 to 145 is any amino acid
  Variant (148)..(156): Xaa in position 148 to 156 is any amino acid
  Variant (163)..(164): Xaa in position 163 to 164 is any amino acid
  Variant (166)..(167): Xaa in position 166 to 167 is any amino acid
  Variant (169)..(171): Xaa in position 169 to 171 is any amino acid
  Variant (173)..(176): Xaa in position 173 to 176 is any amino acid
  Variant (178)..(181): Xaa in position 178 to 181 is any amino acid
  Variant (183)..(185): Xaa in position 183 to 185 is any amino acid
  Variant (186)..(196): Xaa in position 186 to 196 is any or no amino acid
  Variant (198)..(215): Xaa in position 198 to 215 is any amino acid
  Variant (216)..(219): Xaa in position 216 to 219 is any or no amino acid
  Variant (223)..(224): Xaa in position 223 to 224 is any amino acid
  Variant (226)..(233): Xaa in position 226 to 233 is any amino acid
  Variant (234)..(237): Xaa in position 234 to 237 is any or no amino acid
  Variant (239)..(240): Xaa in position 239 to 240 is any amino acid
  Variant (242)..(242): Xaa in position 242 is any amino acid
  Variant (243)..(243): Xaa in position 243 is any or no amino acid
  Variant (245)..(245): Xaa in position 245 is any amino acid
  Variant (247)..(247): Xaa in position 247 is any amino acid
  Variant (250)..(251): Xaa in position 250 to 251 is any amino acid
  Variant (253)..(253): Xaa in position 253 is any amino acid
  Variant (257)..(259): Xaa in position 257 to 259 is any amino acid
  Variant (261)..(262): Xaa in position 261 to 262 is any amino acid
  Variant (264)..(266): Xaa in position 264 to 266 is any amino acid
DXXLXXXXRXXEWXXXXPXXEEXXALXNXXLDLXGQARXXXXXXXXXAXXXXXXXXXXXXXXXXXXXXDXXAXXRXXXXXXNXXLXEXPXXXXXXXXXXXXXDXXXTXXRXXXXXXXXXXXXXXLXXSXDXXXAXIAXKXXKEXXYHXXXXXXXXXRLGDGTXXSXXRXXXAXXXXWXXXXEXXXXXXXXXXXXXXGXXXXXXXXXXXXXXXXXXXXXXATLXXPXXXXXXXXXXXXGXXGXXHXEXLGXXLXEMQXXXRXXPXXXW

SEQ ID NO: 134754 - protein, 56 aa, Artificial sequence
  protein pattern
  Variant (2)..(2): Xaa in position 2 is any amino acid
  Variant (3)..(3): Xaa in position 3 is Asp, Glu or Asn
  Variant (4)..(5): Xaa in position 4 to 5 is any amino acid
  Variant (6)..(6): Xaa in position 6 is Ile, Leu or Val
  Variant (7)..(7): Xaa in position 7 is Ala or Ser
  Variant (8)..(8): Xaa in position 8 is Ala, Asp, Glu, Gly or Ser
  Variant (10)..(10): Xaa in position 10 is any or no amino acid
  Variant (12)..(12): Xaa in position 12 is any or no amino acid
  Variant (14)..(14): Xaa in position 14 is Ala, Gly or Ser
  Variant (15)..(15): Xaa in position 15 is any amino acid
  Variant (18)..(19): Xaa in position 18 to 19 is any amino acid
  Variant (22)..(22): Xaa in position 22 is Ala, Leu or Val
  Variant (23)..(24): Xaa in position 23 to 24 is any amino acid
  Variant (25)..(25): Xaa in position 25 is Ala, Cys or Ser
  Variant (26)..(26): Xaa in position 26 is any amino acid
  Variant (27)..(27): Xaa in position 27 is Asp, Glu, Gly or Gln
  Variant (28)..(28): Xaa in position 28 is any amino acid
  Variant (29)..(29): Xaa in position 29 is Ile, Leu, Met or Val
  Variant (30)..(31): Xaa in position 30 to 31 is any amino acid
  Variant (32)..(32): Xaa in position 32 is Leu or Met
  Variant (34)..(34): Xaa in position 34 is Asp, Gly or Asn
  Variant (36)..(36): Xaa in position 36 is Ser or Thr
  Variant (37)..(37): Xaa in position 37 is Ala, Asp or Glu
  Variant (38)..(38): Xaa in position 38 is any amino acid
  Variant (40)..(41): Xaa in position 40 to 41 is any amino acid
  Variant (42)..(42): Xaa in position 42 is Lys or Arg
  Variant (43)..(45): Xaa in position 43 to 45 is any amino acid
  Variant (46)..(46): Xaa in position 46 is Ala, Gly or Ser
  Variant (47)..(47): Xaa in position 47 is Phe, Ile, Leu or Val
  Variant (48)..(52): Xaa in position 48 to 52 is any amino acid
  Variant (53)..(53): Xaa in position 53 is Phe or Tyr
  Variant (54)..(55): Xaa in position 54 to 55 is any amino acid
SXXXXXXXIXAXKXXKEXXYHXXXXXXXXXXXGXGXXXSXXXXXXXXXXXXXXXXE

SEQ ID NO: 134755 - protein, 29 aa, Artificial sequence
  protein pattern
  Variant (2)..(2): Xaa in position 2 is Lys or Arg
  Variant (3)..(3): Xaa in position 3 is any amino acid
  Variant (5)..(5): Xaa in position 5 is any amino acid
  Variant (7)..(7): Xaa in position 7 is Gly, Ser or Thr
  Variant (8)..(8): Xaa in position 8 is Asp or Glu
  Variant (9)..(9): Xaa in position 9 is any amino acid
  Variant (10)..(10): Xaa in position 10 is Phe, Leu or Met
  Variant (11)..(11): Xaa in position 11 is Ala or Gly
  Variant (12)..(12): Xaa in position 12 is any amino acid
  Variant (13)..(13): Xaa in position 13 is Ile, Leu, Met or Val
  Variant (15)..(15): Xaa in position 15 is Ala, Ser or Thr
  Variant (17)..(17): Xaa in position 17 is Leu or Met
  Variant (19)..(19): Xaa in position 19 is any amino acid
  Variant (20)..(20): Xaa in position 20 is Ile, Leu, Met or Val
  Variant (21)..(21): Xaa in position 21 is any amino acid
  Variant (23)..(24): Xaa in position 23 to 24 is any amino acid
  Variant (26)..(26): Xaa in position 26 is Asp, Glu, Gly or Asn
  Variant (27)..(28): Xaa in position 27 to 28 is any amino acid
GXXGXHXXXXXXXLXEXQXXXRXXPXXXW

SEQ ID NO: 134756 - DNA, 204 bp, Escherichia coli
  CDS (1)..(204): transl_table=11
atggctgacaaggtgtatctgaaatacacaccatcagattactcatttaacttagggaaaaatgcgagcgggatcgtgtttaaccagacggcacctcccgaagaaggtgccgaagaaaaaacgattaactcatcacgcggtcgtcaacatactgacgtttatccggcgctggcgggaaatactgatacagccatgtttcactaa

SEQ ID NO: 134757 - protein, 67 aa, Escherichia coli
MADKVYLKYTPSDYSFNLGKNASGIVFNQTAPPEEGAEEKTINSSRGRQHTDVYPALAGNTDTAMFH

SEQ ID NO: 134758 - DNA, 204 bp, Shigella flexneri 2a str. 301
  CDS (1)..(204): transl_table=11
gtggctgacacggtgtatctgaaatacacaccatcagattactcatttaacttagggaaaaatgcgagcgggatcgtgtttaaccagacggcacctcccgaagaaggtgccgaagaaaaaacgattaactcatcacgcggtcgtcaacatactgacgtttatccggcgctggcgggaaatactgatacagccatgtttcactga

SEQ ID NO: 134759 - protein, 67 aa, Shigella flexneri 2a str. 301
MADTVYLKYTPSDYSFNLGKNASGIVFNQTAPPEEGAEEKTINSSRGRQHTDVYPALAGNTDTAMFH

SEQ ID NO: 134760 - DNA, 25 bp, Artificial sequence
  primer
atggctgacaaggtgtatctgaaat

SEQ ID NO: 134761 - DNA, 27 bp, Artificial sequence
  primer
ttagtgaaacatggctgtatcagtatt

SEQ ID NO: 134762 - DNA, 639 bp, Escherichia coli
  CDS (1)..(639): transl_table=11
atgccgataaccatccacggttacctgaacgataacaatgaaaagaacgggccgggagcgagtatggaatactttgatatgcgtaaaatgtcggtgaatctgtggcgaaatgctgccggtgaaacgcgcgaaatttgcacgttcccaccggcaaaacgtgatttttactggcgtgccagcattgcatccatcgcggcgaatggggagttttctttgtttcccggcatggaaaggatagtgacgttgctggaaggcggcgagatgctccttgaaagcgcagaccgctttaaccataccttaaaaccgttccagccttttgcctttgcagcggaccaggtggtaaaagcgaaactgacggcagggcagatgtcgatggatttcaacatcatgacacgcctggatgtctgtaaggcgaaagtcagaattgccgaacgtacgtttactacctttggctcacgcggcggggtggtgtttgtgattaacggggcgtggcaactgggcgataaattgctcactaccgaccagggcgcgtgctggttcgatggcaggcacaccctgcggcttttacaaccgcaaggtaaactgttgttcagtgaaatcaactggctcgctggtcattcgccggatcaagttcagtaa

SEQ ID NO: 134763 - protein, 212 aa, Escherichia coli
MPITIHGYLNDNNEKNGPGASMEYFDMRKMSVNLWRNAAGETREICTFPPAKRDFYWRASIASIAANGEFSLFPGMERIVTLLEGGEMLLESADRFNHTLKPFQPFAFAADQVVKAKLTAGQMSMDFNIMTRLDVCKAKVRIAERTFTTFGSRGGVVFVINGAWQLGDKLLTTDQGACWFDGRHTLRLLQPQGKLLFSEINWLAGHSPDQVQ

SEQ ID NO: 134764 - DNA, 576 bp, Shigella flexneri 2a str. 301
  CDS (1)..(576): transl_table=11
atggaatactttgatatgcgtaaaatgtcggtgaatctgtggcgaaacgctgccggtgaaacgcgcgaaatttgcactttcccaccggcaaaacgtgatttttactggcgtgccagcattgcatccatcgcggcgaatggggagttttctttgtttcccggcatggaaaggatagtgacgttgctggaaggcggcgagatgctccttgaaagcgcagaccgctttaaccataccttaaaaccgttacagccttttgcctttacggcggaccaggtggtaaaagcgaaactgacggcagggcagatgtcgatggatttcaatattatgacgcgcctggatgtctgtaaggcgaaagtcagaattgccgaacgtacgtttactacctttggctcacgcggcggggtggtgtttgtgattaacggggcgtggcaactgggcgacaaactgctcactaccgaccagggcgtgtgctggttcgatggcaggcacaccctgcggcttttacaaccgcaaggtaaactgttgttcagtgaaatcaactggctcgctggtcattcgccggatcaagttcagtaa

SEQ ID NO: 134765 - protein, 191 aa, Shigella flexneri 2a str. 301
MEYFDMRKMSVNLWRNAAGETREICTFPPAKRDFYWRASIASIAANGEFSLFPGMERIVTLLEGGEMLLESADRFNHTLKPLQPFAFTADQVVKAKLTAGQMSMDFNIMTRLDVCKAKVRIAERTFTTFGSRGGVVFVINGAWQLGDKLLTTDQGVCWFDGRHTLRLLQPQGKLLFSEINWLAGHSPDQVQ

SEQ ID NO: 134766 - DNA, 606 bp, Bordetella parapertussis 12822
  CDS (1)..(606): transl_table=11
atgttccagcgtttcgaattggcgcagttgcccgtcagcccatggcgcaacggcggcggcgccacgcgcgaagtggcgcgccatccccagggcgccgccgcggacggcttcgaatggcgcgtcagcgtcgccgatatcggcgcggacgggccgttctcggcctatccgggcatcgatcgcagcatcaccctgctcgagggcgctggcgtgcgcatgcgctcggccgacggcacgctcgaccacttgctcgacgtggcgctgcgcccgttcgcctttgccggcgaacatgccatcgacgcgaccttgctgggcggaccatcgcgcgacttcaatgtcatgacgcggcgcggccgctggcgcgccgaggcgcgcgtgctgcacggccaggccgtgctggcgccggcgccagccggcgtgttgtttgccgccggcggcgattggcgcgtgcaatgcgacgctggccaggcgctgctgcgcgccggggccggcgtggtgtggcgcgccgcggccggcgccatccacgccacgccgctgggcggcgagggcggactgatcgcggtgcgcctgctggaggcgggcgcgacggcggttgcgccggatgcgtga

SEQ ID NO: 134767 - protein, 201 aa, Bordetella parapertussis 12822
MFQRFELAQLPVSPWRNGGGATREVARHPQGAAADGFEWRVSVADIGADGPFSAYPGIDRSITLLEGAGVRMRSADGTLDHLLDVALRPFAFAGEHAIDATLLGGPSRDFNVMTRRGRWRAEARVLHGQAVLAPAPAGVLFAAGGDWRVQCDAGQALLRAGAGVVWRAAAGAIHATPLGGEGGLIAVRLLEAGATAVAPDA

SEQ ID NO: 134768 - DNA, 573 bp, Yersinia pseudotuberculosis IP 32953
  CDS (1)..(573): transl_table=11
atgagttttaccgtttttgattttgccggtctgcccgtcagccgctggcgaaatggtggcggcgaaacccgtgaaattgcgtgttggcctgtcggcggtgatgactttgcatggcgtgccagtatcgcaacgattgagcaggatggtccattctcattttaccctgatattgaccgttccatcaccttacttaccggtgatggcatcgtcttatctagcccagggttaggggtacataaactctcaaatcctttacagacgtttgctttccctggagatgttcccgttaatggccggttattgggggggagcagccaggatttcaatattatgacgcgtcgtggctgctggcaggccacggtaagttccgtaagttcaggtcagcaattacccgcctcctacggaggattgatttatatcgtcaaaggcgagtggcttatctgccatacagaaacacatcagttgaaggctcaacagggttgctggtggctaccaacgataaaagcagggcaattacaaccgcttgccgccgatagccacttgctgtgggtaacgttagtgcctggccgctag

SEQ ID NO: 134769 - protein, 190 aa, Yersinia pseudotuberculosis IP 32953
MSFTVFDFAGLPVSRWRNGGGETREIACWPVGGDDFAWRASIATIEQDGPFSFYPDIDRSITLLTGDGIVLSSPGLGVHKLSNPLQTFAFPGDVPVNGRLLGGSSQDFNIMTRRGCWQATVSSVSSGQQLPASYGGLIYIVKGEWLICHTETHQLKAQQGCWWLPTIKAGQLQPLAADSHLLWVTLVPGR

SEQ ID NO: 134770 - DNA, 576 bp, Ralstonia metallidurans CH34
  CDS (1)..(576): transl_table=11
atgaagtttggactcgacaggatcgtgccgacgccgtggaagaacggtggcggcaccacgcgcgaaatcgccgtatggccgccgggcgcgggcatggatacgttcgactggcgcatcagcgtggccgatatcgccatggacgggccgttctcggcgtttccgggtatcgaccgacagatcgtgctgatcgacggggctggcgtgcatctgcaggctcacgacgattcgttttgccacaagctcaggcacctcggcgagccgttcgcattttccggcgatagcgccgtccacgcgacgctggttgacggcccgacgcgcgacttcaatgtcatgacgcgtcgcggcgtttgccgcgcggaggttcgactgatgcgtcaggcgttcaccgccgaccccaccgacgccacggtgctgatcctggtgctgcgcggcgcatgggattgtggcgacggccagcacatgacggctggcgacggcatcgtgatggtgcccggagcgccggccgtcacgatgattcacgatgagatgtccgcgctgtgtctgcgcgtggccttgcataaggaaccggtccgatga

SEQ ID NO: 134771 - protein, 191 aa, Ralstonia metallidurans CH34
MKFGLDRIVPTPWKNGGGTTREIAVWPPGAGMDTFDWRISVADIAMDGPFSAFPGIDRQIVLIDGAGVHLQAHDDSFCHKLRHLGEPFAFSGDSAVHATLVDGPTRDFNVMTRRGVCRAEVRLMRQAFTADPTDATVLILVLRGAWDCGDGQHMTAGDGIVMVPGAPAVTMIHDEMSALCLRVALHKEPVR

SEQ ID NO: 134772 - DNA, 609 bp, Azoarcus sp. BH72
  CDS (1)..(609): transl_table=11
atgactgccgccgcagcgcgccccttcgtgctcgccgccatcgcgccgcaaccgtggcgcaacggcggcggcgccacccgcgagatcctgtgcgcgccctcggcggacggcgagggctgggactggcgggtgagcgtggccgagatcgagcagcccggcgccttctcggtgttcgccggggtggaccgcacggcgctgctgctcgacggcgccgggctggccctgcacggcagcgcgccgcaaccgccgctggtgttcgccgcagccggctgcgtgcaccgctttgccggcgaaaccgcgctcgccgcccgcctcggcggcggaccggcgcggctcttcaacgtgatgacccgccgcagccgggccagcgccgtgctcggcacacacacgggcgacggcgcgctggatctgggtgacgcggccgccacggtgctgttcgtcactcgcggccgcttcgccctgaccctcgacgccgcggccggctaccgcctgcaagccggccacggcctgtgcctcgacggcgactccgcgcagcccgtgcggcacgcctgcctgcaggcgctgcagccggatgccagcctgatccaggtctccttccaccggcactga

SEQ ID NO: 134773 - protein, 202 aa, Azoarcus sp. BH72
MTAAAARPFVLAAIAPQPWRNGGGATREILCAPSADGEGWDWRVSVAEIEQPGAFSVFAGVDRTALLLDGAGLALHGSAPQPPLVFAAAGCVHRFAGETALAARLGGGPARLFNVMTRRSRASAVLGTHTGDGALDLGDAAATVLFVTRGRFALTLDAAAGYRLQAGHGLCLDGDSAQPVRHACLQALQPDASLIQVSFHRH

SEQ ID NO: 134774 - DNA, 576 bp, Escherichia coli
  CDS (1)..(576): transl_table=11
atggaatactttgatatgcgtaaaatgtcggtgaatctgtggcgaaatgctgccggtgaaacgcgcgaaatttgcacgttcccaccggcaaaacgtgatttttactggcgtgccagcattgcatccatcgcggcgaatggggagttttctttgtttcccggcatggaaaggatagtgacgttgctggaaggcggcgagatgctccttgaaagcgcagaccgctttaaccataccttaaaaccgttccagccttttgcctttgcagcggaccaggtggtaaaagcgaaactgacggcagggcagatgtcgatggatttcaacatcatgacacgcctggatgtctgtaaggcgaaagtcagaattgccgaacgtacgtttactacctttggctcacgcggcggggtggtgtttgtgattaacggggcgtggcaactgggcgataaattgctcactaccgaccagggcgcgtgctggttcgatggcaggcacaccctgcggcttttacaaccgcaaggtaaactgttgttcagtgaaatcaactggctcgctggtcattcgccggatcaagttcagtaa

SEQ ID NO: 134775 - protein, 191 aa, Escherichia coli
MEYFDMRKMSVNLWRNAAGETREICTFPPAKRDFYWRASIASIAANGEFSLFPGMERIVTLLEGGEMLLESADRFNHTLKPFQPFAFAADQVVKAKLTAGQMSMDFNIMTRLDVCKAKVRIAERTFTTFGSRGGVVFVINGAWQLGDKLLTTDQGACWFDGRHTLRLLQPQGKLLFSEINWLAGHSPDQVQ

SEQ ID NO: 134776 - DNA, 24 bp, Artificial sequence
  primer
atgccgataaccatccacggttac

SEQ ID NO: 134777 - DNA, 24 bp, Artificial sequence
  primer
ttactgaacttgatccggcgaatg

SEQ ID NO: 134778 - protein, 162 aa, Artificial sequence
  consensus sequence
  Variant (2)..(10): Xaa in position 2 to 10 is any amino acid
  Variant (14)..(15): Xaa in position 14 to 15 is any amino acid
  Variant (17)..(17): Xaa in position 17 is any amino acid
  Variant (22)..(24): Xaa in position 22 to 24 is any amino acid
  Variant (26)..(30): Xaa in position 26 to 30 is any amino acid
  Variant (31)..(32): Xaa in position 31 to 32 is any or no amino acid
  Variant (34)..(34): Xaa in position 34 is any amino acid
  Variant (37)..(37): Xaa in position 37 is any amino acid
  Variant (39)..(39): Xaa in position 39 is any amino acid
  Variant (41)..(41): Xaa in position 41 is any amino acid
  Variant (43)..(45): Xaa in position 43 to 45 is any amino acid
  Variant (47)..(47): Xaa in position 47 is any amino acid
  Variant (50)..(51): Xaa in position 50 to 51 is any amino acid
  Variant (54)..(55): Xaa in position 54 to 55 is any amino acid
  Variant (57)..(59): Xaa in position 57 to 59 is any amino acid
  Variant (62)..(62): Xaa in position 62 is any amino acid
  Variant (64)..(67): Xaa in position 64 to 67 is any amino acid
  Variant (69)..(83): Xaa in position 69 to 83 is any amino acid
  Variant (84)..(85): Xaa in position 84 to 85 is any or no amino acid
  Variant (89)..(95): Xaa in position 89 to 95 is any amino acid
  Variant (97)..(97): Xaa in position 97 is any amino acid
  Variant (99)..(100): Xaa in position 99 to 100 is any amino acid
  Variant (102)..(104): Xaa in position 102 to 104 is any amino acid
  Variant (105)..(105): Xaa in position 105 is any or no amino acid
  Variant (109)..(109): Xaa in position 109 is any amino acid
  Variant (113)..(117): Xaa in position 113 to 117 is any amino acid
  Variant (119)..(141): Xaa in position 119 to 141 is any amino acid
  Variant (142)..(143): Xaa in position 142 to 143 is any or no amino acid
  Variant (145)..(145): Xaa in position 145 is any amino acid
  Variant (147)..(157): Xaa in position 147 to 157 is any amino acid
  Variant (158)..(161): Xaa in position 158 to 161 is any or no amino acid
FXXXXXXXXXWRNXXGXTREIXXXPXXXXXXXFXWRXSXAXIXXXGXFSXXPGXXRXXXLLXGXXXXLXXXXXXXXXXXXXXXXXFAFXXXXXXXAXLXXGXXXXDFNXMTRXXXXXAXXXXXXXXXXXXXXXXXXXXXXXXXGXWXXXXXXXXXXXXXXXG

SEQ ID NO: 134779 - protein, 37 aa, Artificial sequence
  protein pattern
  Variant (2)..(2): Xaa in position 2 is any amino acid
  Variant (5)..(5): Xaa in position 5 is Ala, Ile or Val
  Variant (7)..(7): Xaa in position 7 is Ile or Val
  Variant (9)..(9): Xaa in position 9 is Asp, Ser or Thr
  Variant (11)..(11): Xaa in position 11 is Ala, Glu or Gly
  Variant (12)..(12): Xaa in position 12 is any amino acid
  Variant (13)..(13): Xaa in position 13 is Asp or Asn
  Variant (15)..(15): Xaa in position 15 is Glu or Pro
  Variant (18)..(18): Xaa in position 18 is any amino acid
  Variant (19)..(19): Xaa in position 19 is Phe or Tyr
  Variant (21)..(21): Xaa in position 21 is Asp or Gly
  Variant (22)..(22): Xaa in position 22 is Ile or Met
  Variant (23)..(23): Xaa in position 23 is Asp or Glu
  Variant (25)..(25): Xaa in position 25 is any or no amino acid
  Variant (27)..(27): Xaa in position 27 is any amino acid
  Variant (28)..(28): Xaa in position 28 is any or no amino acid
  Variant (30)..(30): Xaa in position 30 is Ile or Leu
  Variant (31)..(31): Xaa in position 31 is Asp, Glu or Thr
  Variant (33)..(33): Xaa in position 33 is any or no amino acid
  Variant (35)..(36): Xaa in position 35 to 36 is any amino acid
  Variant (37)..(37): Xaa in position 37 is Leu or Met
FXWRXSXAXIXXXGXFSXXPXXXRXIXXLXXGXGXXX

SEQ ID NO: 134780 - protein, 21 aa, Artificial sequence
  protein pattern
  Variant (2)..(2): Xaa in position 2 is any amino acid
  Variant (3)..(3): Xaa in position 3 is Phe, Leu or Met
  Variant (4)..(5): Xaa in position 4 to 5 is any amino acid
  Variant (6)..(6): Xaa in position 6 is Ile, Leu or Met
  Variant (7)..(7): Xaa in position 7 is Ala, Pro or Ser
  Variant (8)..(8): Xaa in position 8 is Pro or Val
  Variant (9)..(9): Xaa in position 9 is Asn, Gln or Ser
  Variant (10)..(10): Xaa in position 10 is any amino acid
  Variant (14)..(15): Xaa in position 14 to 15 is Ala or Gly
  Variant (17)..(17): Xaa in position 17 is Ala or Glu
  Variant (21)..(21): Xaa in position 21 is Ile or Val
FXXXXXXXXXWRNXXGXTREX

SEQ ID NO: 134781 - protein, 21 aa, Artificial sequence
  protein pattern
  Variant (2)..(4): Xaa in position 2 to 4 is any amino acid
  Variant (5)..(5): Xaa in position 5 is any or no amino acid
  Variant (9)..(9): Xaa in position 9 is Ile or Val
  Variant (13)..(13): Xaa in position 13 is any amino acid
  Variant (14)..(14): Xaa in position 14 is Asp or Gly
  Variant (15)..(17): Xaa in position 15 to 17 is any amino acid
  Variant (19)..(19): Xaa in position 19 is any amino acid
  Variant (20)..(20): Xaa in position 20 is Ala or Val
  Variant (21)..(21): Xaa in position 21 is Arg or Ser
GXXXXDFNXMTRXXXXXAXXX

SEQ ID NO: 134782 - protein, 12 aa, Artificial sequence
  protein pattern
  Variant (3)..(3): Xaa in position 3 is Ala, Pro, Ser or Thr
  Variant (4)..(4): Xaa in position 4 is Ala or Gly
  Variant (5)..(5): Xaa in position 5 is Asp or Glu
  Variant (6)..(6): Xaa in position 6 is any amino acid
  Variant (7)..(7): Xaa in position 7 is Ala, Pro or Val
  Variant (8)..(8): Xaa in position 8 is Ile or Val
  Variant (9)..(9): Xaa in position 9 is any amino acid
  Variant (10)..(10): Xaa in position 10 is Ala or Gly
  Variant (11)..(11): Xaa in position 11 is any amino acid
AFXXXXXXXXXL

SEQ ID NO: 134783 - DNA, 453 bp, Escherichia coli
  CDS (1)..(453): transl_table=11
atgaaggataaagtgtataagcgtcccgtttcgatcttagtggtcatctacgcacaagatacgaaacgggtgctgatgttgcagcggcgtgacgatcccgatttctggcagtcggtaaccggcagcgtggaagagggtgaaaccgcgccgcaagctgccatgcgcgaagtaaaggaagaggtcaccattgatgttgtcgctgaacaactgaccttaattgactgtcagcgcacggtagagtttgaaattttttcacatttacgtcatcgctatgcgccgggcgtgacgcgtaatacggaatcatggttctgtcttgcgcttccgcacgagcggcagatcgttttcactgaacatctggcttacaagtggcttgatgcgcctgctgcggcggcgctcactaagtcctggagcaaccggcaggcgattgaacagtttgtaattaacgctgcctaa

SEQ ID NO: 134784 - protein, 150 aa, Escherichia coli
MKDKVYKRPVSILVVIYAQDTKRVLMLQRRDDPDFWQSVTGSVEEGETAPQAAMREVKEEVTIDVVAEQLTLIDCQRTVEFEIFSHLRHRYAPGVTRNTESWFCLALPHERQIVFTEHLAYKWLDAPAAAALTKSWSNRQAIEQFVINAA

SEQ ID NO: 134785 - DNA, 438 bp, Proteus mirabilis
  CDS (1)..(438): transl_table=11
atgatgaaatataagcacccagtatgtgttttagttgttatctatgccaaacagactaagcgggtgcttatgctgaagcgtcgagatgatcctgatttctggcaatctgtgacagggagccttgaagagggcgaaacaccttatcaggccgcattacgagaagtgcaggaagaagtaggaattgatatcataaaagaaaatcttgagctggtggattgccatcgttcaattatttttgagatattcgcacactttcgccatcgttatgcgcctaatgtgacacattgtcaggaacattggtttatgttagcacttccctctgaacgggaaattgaactgactgagcatacgcaataccaatggttagatgcgccactggcggcaaaattaactaagtcagccagcaatcagcaagcgattgaagaatttgttatttaa

SEQ ID NO: 134786 - protein, 145 aa, Proteus mirabilis
MMKYKHPVCVLVVIYAKQTKRVLMLKRRDDPDFWQSVTGSLEEGETPYQAALREVQEEVGIDIIKENLELVDCHRSIIFEIFAHFRHRYAPNVTHCQEHWFMLALPSEREIELTEHTQYQWLDAPLAAKLTKSASNQQAIEEFVI

SEQ ID NO: 134787 - DNA, 519 bp, Pasteurella multocida subsp. multocida str. Pm70
  CDS (1)..(519): transl_table=11
atgtataagaatccgcatagtgtcttagtggtcatcttctgttatagcacacaacgtgttctcatgttacaacgacaagatgatctgacattttggcaatccgttaccggttctttagccttaaatgagtcaccaagagaaactgcgataagggaagtgaaagaagaagtcggaattgatattcagtcagagagcttagcgctttttgattgtgaagaaaggatagcgtttgaaatttttccccatttccgttataaatacgcaccaaatgtcactcattgtcttgaacactggtttttgctagggcttgcagaggaaagaataccccatttaacagagcatgttgcttttcaatggctacctgcagatcaggcagcgatcttgactaagtcatggaataatcgcgcattaatcgaaaagtatttagtgaaacaaccattggatagtggcatcttacagagaataacgaacgagtataattatttaataaagaaggaaattgagaatggcaggtcatag

SEQ ID NO: 134788 - protein, 172 aa, Pasteurella multocida subsp. multocida str. Pm70
MYKNPHSVLVVIFCYSTQRVLMLQRQDDLTFWQSVTGSLALNESPRETAIREVKEEVGIDIQSESLALFDCEERIAFEIFPHFRYKYAPNVTHCLEHWFLLGLAEERIPHLTEHVAFQWLPADQAAILTKSWNNRALIEKYLVKQPLDSGILQRITNEYNYLIKKEIENGRS

SEQ ID NO: 134789 - DNA, 459 bp, Neisseria meningitidis Z2491
  CDS (1)..(459): transl_table=11
atgccgatggcaaaaccgctcaaataccccgtttccgcactggtcgtcctttatagcggggacggcggcatcctgctcatcgaacgcacgcatccgaaaggattttggcagtcggtaaccggcagcctcgaaccgggcgaaaccgtcgcccaaacggcaaggcgcgaagtttgggaagaaaccggcatcctgctggcggacgggcagcttcaagactggcacgacagcacggtttacgaaatctaccaccactggcggcaccgctatccaaaaggcgtgtttgaaaaccgcgaacacctcttctctgccgaaatcccgcgtgatacgcccatcgtcctgcaacccgaagaacacgtctcctacggttggttcgatatggaagaagcggcggaaaaagtgttttcctcgtccaacaggtgcgcgattctggaactgggcaggtttttgggcaaacggtaa

SEQ ID NO: 134790 - protein, 152 aa, Neisseria meningitidis Z2491
MPMAKPLKYPVSALVVLYSGDGGILLIERTHPKGFWQSVTGSLEPGETVAQTARREVWEETGILLADGQLQDWHDSTVYEIYHHWRHRYPKGVFENREHLFSAEIPRDTPIVLQPEEHVSYGWFDMEEAAEKVFSSSNRCAILELGRFLGKR

SEQ ID NO: 134791 - DNA, 477 bp, Thermoplasma acidophilum DSM 1728
  CDS (1)..(477): transl_table=11
atggtgagcactagaacgggggttaagatacaggcagtcatatacaggtgcaatgaagggccggagtttctcatactgcacagaaatccagagcatggaggtttctggcagaacataaccggcaacgtggagccggaagaggatctgcatgaggcacttatgcgggagattggagaggagataggaataaagcaagaatgcattgatcgcgtatctgacgagatcatggcgttcagattctgggctcatggaatggattttatcgaacacgtgtacgctgtgaagattgacggatcttgttccgtggatatatcgagaaatgtagatcatgaacatgacgagtacaggtggatgaacttagaggaagcattaagcatggtcagatggtacacgaatgcagatgcaataaggatagcattcttactggcatcaacagcatgcatgtcagcgatcacaccttcggacaaaaagaattaa

SEQ ID NO: 134792 - protein, 158 aa, Thermoplasma acidophilum DSM 1728
MVSTRTGVKIQAVIYRCNEGPEFLILHRNPEHGGFWQNITGNVEPEEDLHEALMREIGEEIGIKQECIDRVSDEIMAFRFWAHGMDFIEHVYAVKIDGSCSVDISRNVDHEHDEYRWMNLEEALSMVRWYTNADAIRIAFLLASTACMSAITPSDKKN

SEQ ID NO: 134793 - DNA, 465 bp, Haemophilus influenzae Rd KW20
  CDS (1)..(465): transl_table=11
ttgaccgcatttttaatgatgcaatacaaaaataatcaatctgttctcgttgtaatttacactaaagatacaaacagagttttaatgctccaacgccaagatgatcctgatttttggcagtctgttactggcactattgaaagtgatgagacaccaaaaaaaacagcaattcgtgagctatgggaagaagtgcggttagacatttcggaaaattccaccgcactttttgattgcaatgagagcatagaatttgaaatttttccacatttccgctataaatacgcaccgaatattactcactgcaaagaacattggtttttgtgtgaggtggaaaaagaatttattccagtattgagtgagcatttagatttttgctgggtgtcggcgaaaaaagcagtagaaatgacgaaatcccagaataatgcggaagctattaaaaaatatctttttaatctccgtaggtaa

SEQ ID NO: 134794 - protein, 154 aa, Haemophilus influenzae Rd KW20
MTAFLMMQYKNNQSVLVVIYTKDTNRVLMLQRQDDPDFWQSVTGTIESDETPKKTAIRELWEEVRLDISENSTALFDCNESIEFEIFPHFRYKYAPNITHCKEHWFLCEVEKEFIPVLSEHLDFCWVSAKKAVEMTKSQNNAEAIKKYLFNLRR

SEQ ID NO: 134795 - DNA, 489 bp, Ralstonia solanacearum GMI1000
  CDS (1)..(489): transl_table=11
ttgcttctcctggtcatgccgcacaagattcccgtttccgtcctcgtcgtcatccacacgcctgatctccaggtgctggtgatggagcgggcggaccacccgggtttctggcaatccgtcaccggcagctgtgacaccccggacgagctcctggccgagaccgcgcgccgcgaagtgctggaggaaaccggcatcgacacgatgcagcaccggctcatcgactggggccatcacatcgaatacgagatctacccgcgttggcgccaccgctacgcgccgggcgtcacgcgcaacaccgaacactggttcggcctgctggtcggcggcgaggtgccggtgcggctgtcgccgcgcgagcatctgcaggccgagtggctgccgtaccgcgaggccgccgcgcgctgcttctcgcgcagcaacggcgaggcgatcctgcagctgcccgcgcgcctggccgacgcggccgcgctggcaaaggaccgggcctga

SEQ ID NO: 134796 - protein, 162 aa, Ralstonia solanacearum GMI1000
MLLLVMPHKIPVSVLVVIHTPDLQVLVMERADHPGFWQSVTGSCDTPDELLAETARREVLEETGIDTMQHRLIDWGHHIEYEIYPRWRHRYAPGVTRNTEHWFGLLVGGEVPVRLSPREHLQAEWLPYREAAARCFSRSNGEAILQLPARLADAAALAKDRA

SEQ ID NO: 134797 - DNA, 444 bp, Yersinia pestis KIM
  CDS (1)..(444): transl_table=11
atgaattataaacgccccgagtcggttctggtcgtcatctatgccaaatccagcgggcgagtgttgatgttgcaacggcgcgatgatcctgatttttggcagtcggtgaccggcagtctggaagagggggaggctccgttgcaaaccgcacagcgcgaagtaaaggaagaagtcggcattgacattctgggtgaaaatctggtgttgctcgactgtcagcgctgtgtggagtttgaactctttgcgcatttgcgccgtcgctatgctccgggaattacgcgtaacaaagaacattggttctgtttggcgttgccggaggagcgggatatcgtgattactgagcatctcgcctaccagtggttggatgcggcagaggctgccgtattgaccaagtcctggagtaatcaacaagcgattgaagagtatgttctttattccgtctag

SEQ ID NO: 134798 - protein, 147 aa, Yersinia pestis KIM
MNYKRPESVLVVIYAKSSGRVLMLQRRDDPDFWQSVTGSLEEGEAPLQTAQREVKEEVGIDILGENLVLLDCQRCVEFELFAHLRRRYAPGITRNKEHWFCLALPEERDIVITEHLAYQWLDAAEAAVLTKSWSNQQAIEEYVLYSV

SEQ ID NO: 134799 - DNA, 483 bp, Shigella flexneri 2a str. 301
  CDS (1)..(483): transl_table=11
atgagcgaaggcagtcaacgaagaggcagcgtgaaggataaagtgtataagcgtcccgtttcgatcttagtggtcatctatgcacaagatacgaaacgggtgctgatgttgcagcggcgtgacgatcccgatttctggcagtcggtaaccggcagcgtggaagagggtgaaaccgcgccgcaagctgccatgcgcgaagtaaaggaagaggttaccattgatgttgtcgctgaacaactgaccttaattgactgtcagcgcacggtagagtttgaaattttttcacatttacgtcatcgctatgcgccgggcgtgacgcgtaatacggaatcatggttctgtcttgcgcttccgcacgagcggcagatcgttttcactgaacatctggcttacaagtggcttgatgcgcctgctgcggcggcgctcactaagtcctggagcaaccggcaggcgattgaacagtttgtaattaacgctgcctga

SEQ ID NO: 134800 - protein, 160 aa, Shigella flexneri 2a str. 301
MSEGSQRRGSVKDKVYKRPVSILVVIYAQDTKRVLMLQRRDDPDFWQSVTGSVEEGETAPQAAMREVKEEVTIDVVAEQLTLIDCQRTVEFEIFSHLRHRYAPGVTRNTESWFCLALPHERQIVFTEHLAYKWLDAPAAAALTKSWSNRQAIEQFVINAA

SEQ ID NO: 134801 - DNA, 444 bp, Escherichia coli CFT073
  CDS (1)..(444): transl_table=11
atggcttataagcgtcccgtttcgatcttagtggtcatctacgcacaagatacgaaacgggtgctgatgttgcagcggcgtgacgatcccgatttctggcagtcggtaaccggcagcgtggaagagggtgaaaccgcgccgcaagctgccatgcgcgaagtaaaggaagaggtcaccattgatgttgtcgctgaacaactgaccttaattgactgtcagcgcacggtagagtttgaaattttttcacatttacgtcatcgctatgcgccgggcgtgacgcgtaatacggaatcatggttctgtcttgcgcttccgcacgagcgccagatcgttttcactgaacatctggcttacaagtggcttgatgcgtctgctgcggcggcgctcactaagtcctggagcaaccggcaggcgattgaacagtttgtaattaacgctgcctga

SEQ ID NO: 134802 - protein, 147 aa, Escherichia coli CFT073
MAYKRPVSILVVIYAQDTKRVLMLQRRDDPDFWQSVTGSVEEGETAPQAAMREVKEEVTIDVVAEQLTLIDCQRTVEFEIFSHLRHRYAPGVTRNTESWFCLALPHERQIVFTEHLAYKWLDASAAAALTKSWSNRQAIEQFVINAA

SEQ ID NO: 134803 - DNA, 453 bp, Salmonella enterica subsp. enterica serovar Typhi Ty2
  CDS (1)..(453): transl_table=11
gtgaaggataaagtgtacaagcgccccgtttcggtcctggtggttattttcgcgcaggatacgaaacgggtgctaatgttgcagcgacgcgacgacccggatttttggcagtcagtgactggcagcatagaagaaggggagaccgcgttgcagaccgccgtgcgtgaagtcaaagaggaggtcacgattgatgttgcggcagagcaactgaccttagtcgactgccaacgtacggtggagtttgaaattttttcacatttacgtcatcgctatgcgccgggcgtcatgcacaatacagaattctggttctgccttgcgttaccgcatgagcggcaggtgatattcactgaacatctaacgtaccagtggcttgatgcgcctgacgcggcggcgcttaccaagtcctggagtaaccggcaagcgattgaagagtttgtcattaacgtcgcctga

SEQ ID NO: 134804 - protein, 150 aa, Salmonella enterica subsp. enterica serovar Typhi Ty2
MKDKVYKRPVSVLVVIFAQDTKRVLMLQRRDDPDFWQSVTGSIEEGETALQTAVREVKEEVTIDVAAEQLTLVDCQRTVEFEIFSHLRHRYAPGVMHNTEFWFCLALPHERQVIFTEHLTYQWLDAPDAAALTKSWSNRQAIEEFVINVA

SEQ ID NO: 134805 - DNA, 459 bp, Nitrosomonas europaea ATCC 19718
  CDS (1)..(459): transl_table=11
ttgcaacgctataaattgcccgtatccgttctggtggtgatctacacggccgatctccaggtgctgctgctggaacgtgccgaccaccccggttactggcagtctgttacaggcagtcaggatcccggggaaacactgctgcagacggcagtccgtgaggttagagaagaaaccggtctgaataccgacgattacgtgctatctgactggcaaatacaaaaccgctacgaaatctttgaggaatggaactggcgctacccgccgggcactactcacaacaccgaacatgtgtttggtttggaattacccaaaacgataccggccgtagtctcatcccgtgagcatctcgggtatgtctggctgccatggcgggaagcagcagaaaaagtattttcctccagcaatgcatgcgctattcgtatgctcgcaagtaaacgaaaatcagaaaattcccgataa

SEQ ID NO: 134806 - protein, 152 aa, Nitrosomonas europaea ATCC 19718
MQRYKLPVSVLVVIYTADLQVLLLERADHPGYWQSVTGSQDPGETLLQTAVREVREETGLNTDDYVLSDWQIQNRYEIFEEWNWRYPPGTTHNTEHVFGLELPKTIPAVVSSREHLGYVWLPWREAAEKVFSSSNACAIRMLASKRKSENSR

SEQ ID NO: 134807 - DNA, 456 bp, Haemophilus ducreyi 35000HP
  CDS (1)..(456): transl_table=11
atgctcactaccccatacaaaaacccaaattctgtattaattgttatttatgcacaaaatactaagcgagttttaatgctacaacgcaaagatgatccgagtttttggcaatcagtaacaggttcattagaacagcaagaatctgccttagaagcagcaaaacgggaagttttggaagaagttggcattgatattacccagcaaaaactaacgatttatgattgtcaaaaatcagtaaaatttgagatttttccacatttccgctataaatatgcgccgaatgtgacacattgttgtgaacattggtttttattagcattacccaatgaacaaacaccaacattaaccgaacatttaacgtttaaatggctttctgctgatgaagcaattcatctaacgaaatcccccaataatgcggcagcgattgcaaaatatttgcttaatcaggccgattaa

SEQ ID NO: 134808 - protein, 151 aa, Haemophilus ducreyi 35000HP
MLTTPYKNPNSVLIVIYAQNTKRVLMLQRKDDPSFWQSVTGSLEQQESALEAAKREVLEEVGIDITQQKLTIYDCQKSVKFEIFPHFRYKYAPNVTHCCEHWFLLALPNEQTPTLTEHLTFKWLSADEAIHLTKSPNNAAAIAKYLLNQAD

SEQ ID NO: 134809 - DNA, 450 bp, Chromobacterium violaceum ATCC 12472
  CDS (1)..(450): transl_table=11
atgggcagcaagcagccggtgtcggtgctggtggtgatacacagccgggatggccgggcgctgctgatggagcgggcggacaagcccggctactggcagtcggtgaccggcagccgcgaaggcggcgaagacctgatggacaccgcccgccgcgaggtggcggaggagactggcctggacgcgtcccgcttcgcgctcagcgactggcacatcgtcaaccgctacgaaatctacgagcactggcgccaccgttacccggaaggcgtcacccacaacgacgagcacgtgttcggcctgctgctgcccgagccctgcgaggtggcgctggcgccgcgcgagcatctgggctaccgctggctgccgtggcatgaggccgccgcgctggcgttctcgccgtccaacgccgaggcgctgcgcatgctgccggaaaagctgggtttgagcggctga

SEQ ID NO: 134810 - protein, 149 aa, Chromobacterium violaceum ATCC 12472
MGSKQPVSVLVVIHSRDGRALLMERADKPGYWQSVTGSREGGEDLMDTARREVAEETGLDASRFALSDWHIVNRYEIYEHWRHRYPEGVTHNDEHVFGLLLPEPCEVALAPREHLGYRWLPWHEAAALAFSPSNAEALRMLPEKLGLSG

SEQ ID NO: 134811 - DNA, 438 bp, Photorhabdus luminescens subsp. laumondii TTO1
  CDS (1)..(438): transl_table=11
atggcttataagcgccccgagtctgtgctggtggttatttatgcgatttccagccgacgggtgctaatgttacagcggcgggacgatcctgatttttggcagtctgtcactggcagccttgatggagatgaaacgccgtgggagacagcattgcgtgaagtgcaagaagaagtcggtattgatattataggtgaaaatcttgaattgatagattgccggcgttctctttattatgagatttttacccatttgcgccatcgctatgctccaggagtcacccgcaataaagagtactggttctgtctggcattgccggaagagcgagaatgcctgttgactgaacatcaggcttatcagtggctggatgcggataaagcagtaaagctcactaagtcgtggagcaatcggcaggcgattgaagagtttgttattgaataa

SEQ ID NO: 134812 - protein, 145 aa, Photorhabdus luminescens subsp. laumondii TTO1
MAYKRPESVLVVIYAISSRRVLMLQRRDDPDFWQSVTGSLDGDETPWETALREVQEEVGIDIIGENLELIDCRRSLYYEIFTHLRHRYAPGVTRNKEYWFCLALPEERECLLTEHQAYQWLDADKAVKLTKSWSNRQAIEEFVIE

SEQ ID NO: 134813 - DNA, 519 bp, Herminiimonas arsenicoxydans
  CDS (1)..(519): transl_table=11
atgagcaggccttacaaaattcccgaatccgtcctggttgtcatccacacgagcaatcttgaagtattgctgattgaacgtgccgacaagccgggttactggcagtctgtgaccggttccaaggacagcgtagacgaactcttgctggaaacggcggtaagggaagtggccgaggaaaccggtattgctgtgcgaaacttgcctttcgagcaagacacactgtccttgcccggctatgtttcgctggaaaatctcagggactggcaactttccaacgtctacgacatctatcctgtgtggcagcatcgctatgcgccgaatgtgaaacaaaataccgagcatgtgtttggcttgctggtgccgcgtgatattcccgtggtgctggcgccgcgcgagcatctgaatttcatgtggttgccatacagggaagccgctgacaaatgtttttcagcctcgaatgcagaggctattctgctgctgccaaaccatgttgaaaccagccatgtcggccataagtag

SEQ ID NO: 134814 - protein, 172 aa, Herminiimonas arsenicoxydans
MSRPYKIPESVLVVIHTSNLEVLLIERADKPGYWQSVTGSKDSVDELLLETAVREVAEETGIAVRNLPFEQDTLSLPGYVSLENLRDWQLSNVYDIYPVWQHRYAPNVKQNTEHVFGLLVPRDIPVVLAPREHLNFMWLPYREAADKCFSASNAEAILLLPNHVETSHVGHK

SEQ ID NO: 134815 - DNA, 495 bp, Burkholderia vietnamiensis G4
  CDS (1)..(495): transl_table=11
atgacgaagccgccgaaaatccccgaatccgttctcgtcgtgatctacacgcccgaactcgacgtgctggtgatcaagcgcgccgatcagcccgacttctggcaatcggtgaccggctcgaaggacacgcccgacgagccgctcgcgctcaccgccgcgcgggaagtcgtcgaggaaaccggcatcgcggtcggctcgcacgacgtgccggccgccgcgctgaccgactggcgccatcggatcgaatacgcgatctatccgcaatacctgcatcgctatgcgccgggcgtcacgcgcaacgtcgagcactggttcgggctgtgcgtgccgcggcgtgtcgacgtgacgctgtcgccgcgcgagcacgtcgactacgcgtggctgccgtaccgtgaagcggccgcgcgctgcttttcgccgtcgaacgccgaggcgatcctgcaactgccggtgcgcgtcgcgctcgccggcgcgacgcacggctcgtccgcatga

SEQ ID NO: 134816 - protein, 164 aa, Burkholderia vietnamiensis G4
MTKPPKIPESVLVVIYTPELDVLVIKRADQPDFWQSVTGSKDTPDEPLALTAAREVVEETGIAVGSHDVPAAALTDWRHRIEYAIYPQYLHRYAPGVTRNVEHWFGLCVPRRVDVTLSPREHVDYAWLPYREAAARCFSPSNAEAILQLPVRVALAGATHGSSA

SEQ ID NO: 134817 - DNA, 438 bp, Bacillus thuringiensis serovar konkukian str. 97-27
  CDS (1)..(438): transl_table=11
atgagagcaccatatcaagtattaatatttccttatataaaaactgacgattctattcaatatgcgattttcaaccgaagtgattatggttattggcaaggaatagctggtggtggggaagatggtgaaattcctattgaatcagcaaaacgggaagcatttgaagaagctggtatttcaagagaatgtccatatatacaattagattctgtgtcttcactaccagtagaggatgtagttggaggattcctttggggagatgaggtttatgtaataaaagaattttcttttggagttaaagtacctaacaaaaatatttcactatctaaagaacacttacattataaatggttatgctttgaggaggcagtaaagtttttgaaatgggatagcaacaaaacagcattgtgggaattaaacaaaagactattaaaatag

SEQ ID NO: 134818 - protein, 145 aa, Bacillus thuringiensis serovar konkukian str. 97-27
MRAPYQVLIFPYIKTDDSIQYAIFNRSDYGYWQGIAGGGEDGEIPIESAKREAFEEAGISRECPYIQLDSVSSLPVEDVVGGFLWGDEVYVIKEFSFGVKVPNKNISLSKEHLHYKWLCFEEAVKFLKWDSNKTALWELNKRLLK

SEQ ID NO: 134819 - DNA, 444 bp, Erwinia carotovora subsp. atroseptica SCRI1043
  CDS (1)..(444): transl_table=11
atggtatacaagcgacctgtttcggtgctggtggtgatttatgcccgtgacaccgggcgggtgctgatgctgcaacggcgtgacgatcctgaattctggcaatccgtgacggggagtatagaagaaggagaaagtgcgccgtatgctgcacagcgtgaagtcaaagaagaagttaacattgatatatccgctgaagcgttatcactctttgactgccagcgctgtattgagtttgagctatttgctcatttgagacgtcgctatgcgccgggggtcacgcacaataccgaacattggtattgtctggcgttacctgctgagcgcgaggtgcaattatccgagcatcttgcttaccagtggctggatgtgccccatgcggcacagttgaccaagtcctggagcaaccggcaggcgattgaagaatttgttatttatccggcctga

SEQ ID NO: 134820 - protein, 147 aa, Erwinia carotovora subsp. atroseptica SCRI1043
MVYKRPVSVLVVIYARDTGRVLMLQRRDDPEFWQSVTGSIEEGESAPYAAQREVKEEVNIDISAEALSLFDCQRCIEFELFAHLRRRYAPGVTHNTEHWYCLALPAEREVQLSEHLAYQWLDVPHAAQLTKSWSNRQAIEEFVIYPA

SEQ ID NO: 134821 - DNA, 438 bp, Bacillus cereus E33L
  CDS (1)..(438): transl_table=11
atgagagcaccatatcaagtattaatattcccttatataaaaactgacgattctattcaatatgcgatttttaaccgaagtgattatggttattggcaaggaatagctggtggtggagaagatggtgagattcctattgaatcagcaaaacgggaagcgtttgaagaagctggtattacaagagattgtccatatatacaattagattctgtgtcttcactaccagtagaggatgtagttggaggattcctttggggagatgaggtttatgtaataaaagagttttcttttggagttaaagtacctaacaaaaatatctcattatctaaagaacacttacattataaatggttatgctttgaggaggcagtaaagtttttgaaatgggatagcaacaaaacagcattgtgggaattaaacaaaagactattaaaatag

SEQ ID NO: 134822 - protein, 145 aa, Bacillus cereus E33L
MRAPYQVLIFPYIKTDDSIQYAIFNRSDYGYWQGIAGGGEDGEIPIESAKREAFEEAGITRDCPYIQLDSVSSLPVEDVVGGFLWGDEVYVIKEFSFGVKVPNKNISLSKEHLHYKWLCFEEAVKFLKWDSNKTALWELNKRLLK

SEQ ID NO: 134823 - DNA, 447 bp, Mannheimia succiniciproducens MBEL55E
  CDS (1)..(447): transl_table=11
atgaactacaaaaatcccaatagcgttctcgttgtcatttatgcaaaaaattcaggcagggttcttatgctgcaacgccaagacgatcctgaattctggcaatcggtgacgggatccttggcggaaaaagaaatgccgtttttgaccgcacttcgcgaagttaaggaagaaaccgggattgatatcaaacgggaaaatttaacattagttgattgtcatcaatcggtggaatttgaaattttcccgcattttcggtataaatacgcaccgaatgtgacgcattgcaaagagcactggtttttgctcgaattgcctgatgagcgtgttcctgtattaacggaacatttagcttatcaatggctagaacctgcaaaagcggcagaactgactaaatcacccaataatgcacaggtgattaggaaatatttaattaataaaagtgcgtga

SEQ ID NO: 134824 - protein, 148 aa, Mannheimia succiniciproducens MBEL55E
MNYKNPNSVLVVIYAKNSGRVLMLQRQDDPEFWQSVTGSLAEKEMPFLTALREVKEETGIDIKRENLTLVDCHQSVEFEIFPHFRYKYAPNVTHCKEHWFLLELPDERVPVLTEHLAYQWLEPAKAAELTKSPNNAQVIRKYLINKSA

SEQ ID NO: 134825 - DNA, 471 bp, Azoarcus sp. EbN1
  CDS (1)..(471): transl_table=11
atggcggaactgccgtacaagcggccgatctcggtcctcgttgtcatccacactacgacgctccaggtgctgctgctcgaacgggtggttcccgccggcttctggcaatcggtgaccggcagcctcgaagcggacgaatcgccgctgcaggccgcgatacgggaagtgaacgaggaaaccggcctcgcagtgtccgcgggccagctgcgtgactggcaccacacgaaccgcttcgaaatcatcgaggactggcgcgcgcgatacgcgccggacgtcacgcacaacaccgaacacgtgttcagtctctgcgttcccgcaccgcgaccggtcaggctggcgcccgccgaacaccggctgcagctgtggctgccgctcgaagaagccgccgggaaagcatcgtcgtggaccaaccgcgacgcgatcctgatgctgccgcacatcgccgggcggcaaccggatattccggtttag

SEQ ID NO: 134826 - protein, 156 aa, Azoarcus sp. EbN1
MAELPYKRPISVLVVIHTTTLQVLLLERVVPAGFWQSVTGSLEADESPLQAAIREVNEETGLAVSAGQLRDWHHTNRFEIIEDWRARYAPDVTHNTEHVFSLCVPAPRPVRLAPAEHRLQLWLPLEEAAGKASSWTNRDAILMLPHIAGRQPDIPV

SEQ ID NO: 134827 - DNA, 474 bp, Haemophilus influenzae 86-028NP
  CDS (1)..(474): transl_table=11
gtgcggtcagatttgaccgcatttttaatgatgcaatacaaaaataatcaatctgttcttgttgtaatttacgctaaaaatacaaaccgagttttaatgctccaacgccaagatgatcctgatttttggcagtctgttactggcaccattgaaagtggtgagacaccaaaaaaaacagcaattcgtgagctatgggaagaagtgcggttagaaatttcggaaaattccaccgcgctttttgattgcaatgagagcatagaatttgaaatttttccacatttccgctataaatacgcaccgaatattactcactgcaaagaacatttgtttttgtgtgaggcggaaaaagaatttattccagtattgagtgagcatttggcatatcaatgggtttcccctgaacaagcaatccaaatgacaaaatcttccaataatgcggaagcaattagaaaatatattcttaaagataaatag

SEQ ID NO: 134828 - protein, 157 aa, Haemophilus influenzae 86-028NP
MRSDLTAFLMMQYKNNQSVLVVIYAKNTNRVLMLQRQDDPDFWQSVTGTIESGETPKKTAIRELWEEVRLEISENSTALFDCNESIEFEIFPHFRYKYAPNITHCKEHLFLCEAEKEFIPVLSEHLAYQWVSPEQAIQMTKSSNNAEAIRKYILKDK

SEQ ID NO: 134829 - DNA, 453 bp, Dechloromonas aromatica RCB
  CDS (1)..(453): transl_table=11
atgaccgggaccaagcagccggtctcggttctggttgtaatccacacgccggcactcgacatactcgtcctcgaaagagctgcccatcccgggttctggcaatcagtgaccggtagccgggaagaaaacgagcaactgattgacactgcccgtcgcgaagtccttgaggaaacggggatcgaggcaaccagagagtctttcgtcgactggtcgatgaccaacacctacgagatattcagcgagtggcggcaccgctacgcacctggcatcactcataacaccgaacacgtctttagcctgcaggtgccgcaacgaatcgacattaccaccgccccggatgagcaccgaagctggcgatggcttcccaggcagcaagccgccgacctgtgcttctcatggagcaatcgggacgccatcctgatgctgcagcagcgactcgattcgaggacttga

SEQ ID NO: 134830 - protein, 150 aa, Dechloromonas aromatica RCB
MTGTKQPVSVLVVIHTPALDILVLERAAHPGFWQSVTGSREENEQLIDTARREVLEETGIEATRESFVDWSMTNTYEIFSEWRHRYAPGITHNTEHVFSLQVPQRIDITTAPDEHRSWRWLPRQQAADLCFSWSNRDAILMLQQRLDSRT

SEQ ID NO: 134831 - DNA, 492 bp, Ralstonia eutropha JMP134
  CDS (1)..(492): transl_table=11
atgtccatcggactcggttccatgccttacaaaatccctgaatccgtgctggtcgtgatctacacgccagatctccaagtgctgttgctcgaacgcgccgaccggccgggcttctggcagtccgtgaccggcagcctcgataccgtcgacgagccgctggcgctcaccgccgcgcgtgaggtgttcgaggaaaccggcatcattgccggcgagcaccagcttgccgactggcagcacaccatcgagtacgaaatctatccgcaatggcgccaccgctatgaggctggcgtcacgcgcaataccgaacactggttcgggttgtgcgtatcggaaccgctgcctgtgacgctggcgccgcgcgagcacctgcagtcgaaatggctgccatgggaagtcgcggcgcagcagtgcttctcgagcagcaacgccgaggcggtgcgccagctcgcgtggcgcgtcgcgggccggccggccgtttgtggagccgaatga

SEQ ID NO: 134832 - protein, 163 aa, Ralstonia eutropha JMP134
MSIGLGSMPYKIPESVLVVIYTPDLQVLLLERADRPGFWQSVTGSLDTVDEPLALTAAREVFEETGIIAGEHQLADWQHTIEYEIYPQWRHRYEAGVTRNTEHWFGLCVSEPLPVTLAPREHLQSKWLPWEVAAQQCFSSSNAEAVRQLAWRVAGRPAVCGAE

SEQ ID NO: 134833 - DNA, 441 bp, Thiobacillus denitrificans ATCC 25259
  CDS (1)..(441): transl_table=11
gtgacgccgcacaagattcccgtttcggtactcgtcgtcatctacacggtcgacggcgaggtcttgctgctcgaacgcgcggacgcgcccggtttctggcaatcggtgacgggttcgcaggatgaaggcgaaacgctggaacagaccgcgatccgggaagtgcgcgaagaaaccgggctcgatgccgcacagttcgagttgagtccgtgggacatcgaaacccgcttcgagatctacgaacgctggcgccaccgttacgcgccgggcgtgacgcacaacaccgagcacgtgttcgggctgcggctgccgtcgcgcctgccggtggtactggcgccgcaggagcacctgcgctatctgtggttgccgtggccgcgcgctgcggaacgctgcttttcgcctagcaacgcagccgcgattcggctcgtccccaggcgcctataa

SEQ ID NO: 134834 - protein, 146 aa, Thiobacillus denitrificans ATCC 25259
MTPHKIPVSVLVVIYTVDGEVLLLERADAPGFWQSVTGSQDEGETLEQTAIREVREETGLDAAQFELSPWDIETRFEIYERWRHRYAPGVTHNTEHVFGLRLPSRLPVVLAPQEHLRYLWLPWPRAAERCFSPSNAAAIRLVPRRL

SEQ ID NO: 134835 - DNA, 477 bp, Burkholderia thailandensis E264
  CDS (1)..(477): transl_table=11
atgacgaagccgccgaaaatccccgaatccgttctcgtcgtgatccatacgcccgcgctcgacgtgctcgtcatcaagcgcgccgatcagcccgacttctggcagtccgtgaccggttcgaaagacgcgctcgacgagccgatcgcgcaggtcgccgcgcgcgaagtcgcggaggaaacgggcatcgtcgtcggcagcccgggcattccgcctgccgcgctcgtcgactggcatcacgcgatcgagtacgcgatctatccgcagtacctgcaccgctacgcgcccggcgtcacccgcaacaccgagcactggttcagcctggaagtgccggcgcgcgtcgacgtgacgctgtcgccgcgcgagcacaccgcctatcagtggctgccttaccgcgaagcggccgcgcgctgctactcgccgtcgaacgccgaggcgatcctgcaactgcccgagcgcctcgcgtcgcgcgccgcatga

SEQ ID NO: 134836 - protein, 158 aa, Burkholderia thailandensis E264
MTKPPKIPESVLVVIHTPALDVLVIKRADQPDFWQSVTGSKDALDEPIAQVAAREVAEETGIVVGSPGIPPAALVDWHHAIEYAIYPQYLHRYAPGVTRNTEHWFSLEVPARVDVTLSPREHTAYQWLPYREAAARCYSPSNAEAILQLPERLASRAA

SEQ ID NO: 134837 - DNA, 480 bp, Methylobacillus flagellatus KT
  CDS (1)..(480): transl_table=11
gtgaatagccaaccaccggtatacaagacgccagtttcagtcttggtgctggtgcataccagggatttgcaggtgctcatcatggagcgagcggacaaggctggattctggcaatcggtgactggtagcctggaaaggctgccgaatggtgaactggagcagccagtggatgcggcaatccgcgagttgaaggaagaaaccggccttgatgcggcagattacaagctggtggactggcattgcgcgcatgtgtacgaaatctacccgcactggcgctttcgctatgcgcccggggtgacgcaaaataccgagcatatattcgggttggaattacctgcccctgtcgctgtccaactcgctccgcgtgagcatgtggcttacgagtgggtggactggcgcgaggcggcgaaacgtgtattctcatggacaaatgtcgaggccctgcgcaagttgggtgaacgcaacaacttaacattgtga

SEQ ID NO: 134838 - protein, 159 aa, Methylobacillus flagellatus KT
MNSQPPVYKTPVSVLVLVHTRDLQVLIMERADKAGFWQSVTGSLERLPNGELEQPVDAAIRELKEETGLDAADYKLVDWHCAHVYEIYPHWRFRYAPGVTQNTEHIFGLELPAPVAVQLAPREHVAYEWVDWREAAKRVFSWTNVEALRKLGERNNLTL

SEQ ID NO: 134839 - DNA, 522 bp, Ralstonia metallidurans CH34
  CDS (1)..(522): transl_table=11
atgctttggtttgtccctgccgcccttcccatgcgctacaagattcccgaatcggtactggtcgtgatccacacaccagacctgcaagtcctcctgatcgagcgcgccgaccggcccggctattggcagtcggtgaccggcagcctcgatgccgaggacgagccgctacccatgaccgccgcgcgcgaggtggccgaggaaaccggacttatcgccagccgctattcgctgaccgactggcaacacaccatcgactacgagatctatccgcaatggcgccaccgctatgcgccgggcatcactcgcaataccgagcactggttcgggttgtgcgtacccgcgccgatgccggtgacgctggcgccgcgtgagcacctgcgcttcgaatggctgccctggcaggcggccgcggcgcgttgcttctccagcagcaatgccgaagcagtgcgccagcttgcctggcgcgtggcaggcggtcagggcgccgggctcgacgtcacgaacggagccgccgcaccatga

SEQ ID NO: 134840 - protein, 173 aa, Ralstonia metallidurans CH34
MLWFVPAALPMRYKIPESVLVVIHTPDLQVLLIERADRPGYWQSVTGSLDAEDEPLPMTAAREVAEETGLIASRYSLTDWQHTIDYEIYPQWRHRYAPGITRNTEHWFGLCVPAPMPVTLAPREHLRFEWLPWQAAAARCFSSSNAEAVRQLAWRVAGGQGAGLDVTNGAAAP

SEQ ID NO: 134841 - DNA, 453 bp, Haemophilus somnus 129PT
  CDS (1)..(453): transl_table=11
atgaactataaaaatcccaacagtattttggtcgttatttatgccaagaaaaccaaccgtgttttaatgttgcaacgtcaagacgattcggagttttggcaatccgtaaccggtacgatggaaataggtgaaacacctgttcaaacggcaatccgagaagtgagggaagaaaccggcatagatattcttgcggaaaacttaccgctctttaattgccataaacagatagagtttgaaatttttccgcattttaggtataaatatgcgcctgatataactcactgcattgagcattggtttttgttgccgttagctgatgaaagagtaataaatttaagtgaacattcagcttatcaatggtgttcggtacaggacgcaattaaattgactaaatcgcccaacaatgcagaggcgattaatgaatataaaagtacaatcataaaaggaatataa

SEQ ID NO: 134842 - protein, 150 aa, Haemophilus somnus 129PT
MNYKNPNSILVVIYAKKTNRVLMLQRQDDSEFWQSVTGTMEIGETPVQTAIREVREETGIDILAENLPLFNCHKQIEFEIFPHFRYKYAPDITHCIEHWFLLPLADERVINLSEHSAYQWCSVQDAIKLTKSPNNAEAINEYKSTIIKGI

SEQ ID NO: 134843 - DNA, 429 bp, Nocardioides sp. JS614
  CDS (1)..(429): transl_table=11
atgcaccggttcgccagcgtcctgctcgtggacggtcgcgggtggctgctgctccaggagcgcgacgagcgcccggtgatcgacccggaccggtggggcctggtgggcgggcacgtcgacccgggggaggactccgaggctgcggcgtaccgcgagctcgaggaggagaccgggatccgcctggcgcccggcgagctgaccctctggcgggacaccgaggtcttccacgaggcctacggcaccgtcgacgaggtgcaggtgtgggtcgggcggaccacgctgaccgacgccgacatcgtggtgggggagggccgacggatcgtcttcgtcgagcccggtcgggccagggcgctcgacctgaccgcgtcggcgcgccgggtcgtccccgagttcctggcgtccgcgacgtacgacgacatcctcgggtga

SEQ ID NO: 134844 - protein, 142 aa, Nocardioides sp. JS614
MHRFASVLLVDGRGWLLLQERDERPVIDPDRWGLVGGHVDPGEDSEAAAYRELEEETGIRLAPGELTLWRDTEVFHEAYGTVDEVQVWVGRTTLTDADIVVGEGRRIVFVEPGRARALDLTASARRVVPEFLASATYDDILG

SEQ ID NO: 134845 - DNA, 471 bp, Acidovorax sp. JS42
  CDS (1)..(471): transl_table=11
gtgcacagggacggcgccatgtacaaaattcccgaatccgtgctggtggtggtgcacacgcctgcgctggacgtgctgctgctgcgccgtgccgactcggccgaagatttctggcaatcggtcaccggcagcaaggattttgcgggcgaggactgggccgtcaccgccgcgcgcgaggcggcggaggaaaccggcatccaggcggccgctgcgggctgcgcgctgcgcgactggggcatggagaacatctacagcatctacccgcaatggcggcgccgctacgcgccgggtgtctgcctgaataccgagcgtgtcttcggcctgtgcgtgccggcgcagacgccagtggccttgaatccgcgcgaacacacggcatatgcttggatgggctggcgcgaagccgcggaccgctgctactcgccttccaatgccgaggccatactctggctgccacgattcgttggacgatga

SEQ ID NO: 134846 - protein, 156 aa, Acidovorax sp. JS42
MHRDGAMYKIPESVLVVVHTPALDVLLLRRADSAEDFWQSVTGSKDFAGEDWAVTAAREAAEETGIQAAAAGCALRDWGMENIYSIYPQWRRRYAPGVCLNTERVFGLCVPAQTPVALNPREHTAYAWMGWREAADRCYSPSNAEAILWLPRFVGR

SEQ ID NO: 134847 - DNA, 528 bp, Magnetospirillum magnetotacticum MS-1
  CDS (1)..(528): transl_table=11
atgccgcgagaataccccatccaccccctgcccggcgtcctggccctggtggaacgccagggccgcctgctgatggtcaagcgggccaaggagcccgatcgcggcaaatggggctttcccggcggattggtggaggtgggcgaaaccctggccgccgccgcgctgcgcgaactggcggaggaaaccggactggcggccgaggcccagggcgtcgtcgatgtgttcgaagtcatcagccccgaccatgagggccgcatccgctatcactacgtcttgaacgtggtgcgctgtctggcgcccgagggcgaagccgtggccgccgacgatgccgaggccgtcggctggttcacctggccgagatccaaggcggcgaattgccggtcagcgtcaacgcgccgcgtctggcgaagatggtgttggaatagcgattccccacctcgtcatcccggaagcgcgcaagcgctatccgggatccagggacacgactcctgggtcccggctcaaggccgggacgacgatgcaggataa

SEQ ID NO: 134848 - protein, 175 aa, Magnetospirillum magnetotacticum MS-1
MPREYPIHPLPGVLALVERQGRLLMVKRAKEPDRGKWGFPGGLVEVGETLAAAALRELAEETGLAAEAQGVVDVFEVISPDHEGRIRYHYVLNVVRCLAPEGEAVAADDAEAVGWFTWPRSKAANCRSASTRRVWRRWCWNSDSPPRHPGSAQALSGIQGHDSWVPAQGRDDDAG

SEQ ID NO: 134849 - DNA, 405 bp, Actinobacillus pleuropneumoniae serovar 1 str. 4074
  CDS (1)..(405): transl_table=11
atgctacaacgccaagacgatcccgaattttggcaatcggtaacaggttcgcttgagccgaatgaacggccgtttgaaacggcaattcgtgaagtgaaagaagaaaccggcatcgatattttggcggaaaaatttacgctaacggattgcaacgaatcggtagaatttgagatttttccgcattttcggtataaatacgcgcctgacgttactcattgctcggaacattggtttttacttgccttaacgcaagaaagacaaccgatattaagtgaacatttagcgtttaaatgggtgagcgtcgaagaagccgtccggctaacaaaatcaccgaataatgcggcggcgattgcaaaatatttaactcccctctttagaaaagaggggaactttttcaaaacataa

SEQ ID NO: 134850 - protein, 134 aa, Actinobacillus pleuropneumoniae serovar 1 str. 4074
MLQRQDDPEFWQSVTGSLEPNERPFETAIREVKEETGIDILAEKFTLTDCNESVEFEIFPHFRYKYAPDVTHCSEHWFLLALTQERQPILSEHLAFKWVSVEEAVRLTKSPNNAAAIAKYLTPLFRKEGNFFKT

SEQ ID NO: 134851 - DNA, 447 bp, Haemophilus influenzae R2866
  CDS (1)..(447): transl_table=11
atgatgcaatacaaaaataatcaatctgttctcgttgtaatttacactaaagatacaaacagagttttaatgctccaacgccaagatgatcctgatttttggcagtctgttactggcaccattgaaagtggtgagacaccaaaaaaaacagcaattcgtgagctatgggaagaagtgcggttagaaatttcgaaaaattccaccgcactttttgattgcaatgagagcatagaatttgaaatttttccacatttccgctataaatacgcaccgaatattactcactgcaaagaatattggtttttgtgtgagatggaaaaagaatttattccagtattgagtgagcatttggcatatcaatgggtttcccctgaacaagcaatccaaatgacaaaatcttccaataacgcggaagcaattagaaaatatattcttaaagataaatag

SEQ ID NO: 134852 - protein, 148 aa, Haemophilus influenzae R2866
MMQYKNNQSVLVVIYTKDTNRVLMLQRQDDPDFWQSVTGTIESGETPKKTAIRELWEEVRLEISKNSTALFDCNESIEFEIFPHFRYKYAPNITHCKEYWFLCEMEKEFIPVLSEHLAYQWVSPEQAIQMTKSSNNAEAIRKYILKDK

SEQ ID NO: 134853 - DNA, 441 bp, Bacillus cereus G9241
  CDS (1)..(441): transl_table=11
atgagagcaccatatcaagtattgatatttccttatataaaaactgacgattctattcaatacgcgattatcaaccgaagtgattatggttattggcaagggatagccggtggtggtgaagacggtgagattcctattgaaacagcaaaacgtgaagcgtttgaagaggctggtattacaagagaatgttcatatatacaattaaattctgtgtcttcactaccagtagagggtgtagttggagaattcctttggggtgaagaggtttatgtaataaaagaattttcttttggagttaacgtccctacaaaaaacatctcattatctaaagaacacttacattataaatggttatgctttgaagaagcagtaacgcttttgaaatgggacagtaacaaaacagcattgtgggaattaaacaaaagactattaaaacaataa

SEQ ID NO: 134854 - protein, 146 aa, Bacillus cereus G9241
MRAPYQVLIFPYIKTDDSIQYAIINRSDYGYWQGIAGGGEDGEIPIETAKREAFEEAGITRECSYIQLNSVSSLPVEGVVGEFLWGEEVYVIKEFSFGVNVPTKNISLSKEHLHYKWLCFEEAVTLLKWDSNKTALWELNKRLLKQ

SEQ ID NO: 134855 - DNA, 432 bp, Pseudoalteromonas tunicata D2
  CDS (1)..(432): transl_table=11
atgccattacgacaacccttttcagtccttgtggttatttacaaccatagtcgtgaatttttattgatccaacgagcggatgatgccaatttttggcaatcggtcactggcggcatcgacccaggtgaaactccaatcaataccgcctatcgtgagcttaaagaagaaacaggcattgatgcactaaaactgggtattaccctgagtgatcatcacaaaaccaatcaatacgaaatccgcgactgttggcgccatcgttatgaagcccacgcgttaataaataccgaacatgtgtttagtatctgtgtcccaaatgatattcgtatcacccttaacccaaacgagcacacagatttaatctggctagcacagcaagaagccgcagataaggcatggtcacccagtaacagtgcagaaattttggctttataa

SEQ ID NO: 134856 - protein, 143 aa, Pseudoalteromonas tunicata D2
MPLRQPFSVLVVIYNHSREFLLIQRADDANFWQSVTGGIDPGETPINTAYRELKEETGIDALKLGITLSDHHKTNQYEIRDCWRHRYEAHALINTEHVFSICVPNDIRITLNPNEHTDLIWLAQQEAADKAWSPSNSAEILAL

SEQ ID NO: 134857 - DNA, 510 bp, Escherichia coli B
  CDS (1)..(510): transl_table=11
atgagcatagataactatgtgaatgggatgagcgaaggcagtcaacgaagaggcagcgtgaaggataaagtgtataagcgtcccgtttcgatcttagtggtcatctacgcacaagatacgaaacgggtgctgatgttgcagcggcgtgatgaccccgatttctggcagtcggtaaccggcagcgtggaagagggtgaaaccgcgccgcaagctgccatgcgcgaagtaaaggaagaggtcaccattgatgttgtcgctgaacaactgaccttaattgactgtcagcgcacggtagagtttgaaattttttcacatttacgtcatcgctatgcgccgggcgtgacgcgtaatacggaatcatggttctgtcttgcgctcccgcacgaacgccaggtagtcttcactgaacatctggcttacaagtggcttgatgcgcctgctgccgcggcgctcactaagtcctggagcaaccggcaggcgattgaacagtttgtaattaacgctgcctga

SEQ ID NO: 134858 - protein, 169 aa, Escherichia coli B
MSIDNYVNGMSEGSQRRGSVKDKVYKRPVSILVVIYAQDTKRVLMLQRRDDPDFWQSVTGSVEEGETAPQAAMREVKEEVTIDVVAEQLTLIDCQRTVEFEIFSHLRHRYAPGVTRNTESWFCLALPHERQVVFTEHLAYKWLDAPAAAALTKSWSNRQAIEQFVINAA

SEQ ID NO: 134859 - DNA, 26 bp, Artificial sequence
  primer
atgaaggataaagtgtataagcgtcc

SEQ ID NO: 134860 - DNA, 27 bp, Artificial sequence
  primer
ttaggcagcgttaattacaaactgttc

SEQ ID NO: 134861 - protein, 163 aa, Artificial sequence
  consensus sequence
  Variant (2)..(4): Xaa in position 2 to 4 is any amino acid
  Variant (6)..(6): Xaa in position 6 is any amino acid
  Variant (8)..(15): Xaa in position 8 to 15 is any amino acid
  Variant (16)..(17): Xaa in position 16 to 17 is any or no amino acid
  Variant (19)..(21): Xaa in position 19 to 21 is any amino acid
  Variant (23)..(28): Xaa in position 23 to 28 is any amino acid
  Variant (29)..(32): Xaa in position 29 to 32 is any or no amino acid
  Variant (39)..(43): Xaa in position 39 to 43 is any amino acid
  Variant (44)..(48): Xaa in position 44 to 48 is any or no amino acid
  Variant (50)..(54): Xaa in position 50 to 54 is any amino acid
  Variant (56)..(56): Xaa in position 56 is any amino acid
  Variant (59)..(60): Xaa in position 59 to 60 is any amino acid
  Variant (63)..(67): Xaa in position 63 to 67 is any amino acid
  Variant (68)..(89): Xaa in position 68 to 89 is any or no amino acid
  Variant (91)..(104): Xaa in position 91 to 104 is any amino acid
  Variant (105)..(107): Xaa in position 105 to 107 is any or no amino acid
  Variant (109)..(116): Xaa in position 109 to 116 is any amino acid
  Variant (118)..(119): Xaa in position 118 to 119 is any amino acid
  Variant (121)..(133): Xaa in position 121 to 133 is any amino acid
  Variant (134)..(138): Xaa in position 134 to 138 is any or no amino acid
  Variant (141)..(144): Xaa in position 141 to 144 is any amino acid
  Variant (146)..(150): Xaa in position 146 to 150 is any amino acid
  Variant (152)..(156): Xaa in position 152 to 156 is any amino acid
  Variant (158)..(159): Xaa in position 158 to 159 is any amino acid
  Variant (161)..(162): Xaa in position 161 to 162 is any amino acid
PXXXLXVXXXXXXXXXXLXXXRXXXXXXXXXXWQSVTGXXXXXXXXXXEXXXXXAXREXXEEXXXXXXXXXXXXXXXXXXXXXXXXXXXDXXXXXXXXXXXXXXXXXYXXXXXXXXEXXFXXXXXXXXXXXXXXXXXXEHXXXXWXXXXXAXXXXXSXXNXXA

SEQ ID NO: 134862 - protein, 14 aa, Artificial sequence
  protein pattern
  Variant (2)..(5): Xaa in position 2 to 5 is any amino acid
  Variant (6)..(6): Xaa in position 6 is Asp, Glu, Gly, Asn, Ser or Thr
  Variant (7)..(7): Xaa in position 7 is Phe or Tyr
  Variant (14)..(14): Xaa in position 14 is Gly, Ser or Thr
RXXXXXXWQSVTGX

SEQ ID NO: 134863 - protein, 13 aa, Artificial sequence
  protein pattern
  Variant (2)..(2): Xaa in position 2 is any amino acid
  Variant (5)..(5): Xaa in position 5 is Leu or Val
  Variant (6)..(6): Xaa in position 6 is any amino acid
  Variant (9)..(9): Xaa in position 9 is Thr or Val
  Variant (10)..(10): Xaa in position 10 is any amino acid
  Variant (11)..(11): Xaa in position 11 is Ile or Leu
  Variant (12)..(12): Xaa in position 12 is any amino acid
  Variant (13)..(13): Xaa in position 13 is Ala, Ile, Leu or Val
AXREXXEEXXXXX

SEQ ID NO: 134864 - DNA, 1659 bp, Escherichia coli
  CDS (1)..(1659): transl_table=11
atgaatgcgactgcagcccagacaaaatctcttgagtggcttaatcgcctgcgtgcgaatccgaaaattccattgattgttgccggttccgcggcagtggcggtcatggtcgcactgatcctgtgggcgaaagcccccgactaccgcacattattcagcaatctttccgatcaggatggtggcgcaattgtcagccaactgacgcaaatgaatattccttaccgcttcagcgaagccagcggcgctattgaagttccggcagataaagttcacgaactgcgtctgcgcctggcacaacaaggtttgccaaaaggcggcgcggtcggtttcgaactgcttgatcaggaaaagtttggtatcagccagttcagcgaacaggtgaattatcagcgggcgctggaaggcgagctttctcgtaccatcgaaactatcggcccggtaaaaggggcgcgcgtacatctggcaatgccgaaaccgtctttattcgtccgtgaacaaaaatccccttctgcatcggtgacggtaaatctgttacccggccgcgcactcgatgaagggcaaattagcgccattgtgcatctggtttccagcgccgttgctggtctgccgccgggaaacgtcacgctggtggatcagggcggacatctgttaacccagtccaataccagcgggcgcgatcttaatgacgctcagttgaaatatgccagcgatgtcgaaggccgtattcagcggcgtattgaagcgatcctgtcgcctattgttggtaacggtaatattcacgcccaggttacggcgcagctggacttcgccagtaaagaacaaacggaagaacagtatcgccctaacggtgatgaatctcatgcggcgcttcgttcacgccagcttaatgagagcgagcaaagcggttccggttatccgggcggcgtaccgggggcgttgtcgaatcaaccggcacctgcgaataacgcgccaatcagcacgcctccggcaaatcaaaataaccgccagcagcaggcgagcaccaccagcaatagtgggccgcgtagcacacagcggaatgaaaccagtaactacgaagtcgatcgcaccattcgtcataccaaaatgaacgtgggcgatgtgcaacgtctgtcagtcgcggtcgtggtgaattacaaaaccttgccagatggcaaaccgttgcctctcagcaacgaacagatgaagcaaattgaagatctgacccgcgaggcgatgggcttttctgaaaaacgcggtgactcgctcaatgtcgttaactcgccgttcaatagcagtgacgaaagcggcggagaactgccattctggcaacagcaagcgtttatcgatcagttacttgctgccggtcgctggttgctggtactgctggtggcgtggctgctgtggcggaaagcggtacgtccgcagctaacacgtcgcgctgaggcgatgaaagctgtacagcaacaggcgcaggcccgcgaggaagtggaagatgcggtggaagtccgcctgagcaaagacgaacaactacaacaacggcgcgctaaccaacgtctgggggcagaagtcatgagccagcgtatccgtgaaatgtctgataacgatccgcgcgtggtggcgctggtcattcgccagtggataaataacgatcatgagtaa

SEQ ID NO: 134865 - protein, 552 aa, Escherichia coli
MNATAAQTKSLEWLNRLRANPKIPLIVAGSAAVAVMVALILWAKAPDYRTLFSNLSDQDGGAIVSQLTQMNIPYRFSEASGAIEVPADKVHELRLRLAQQGLPKGGAVGFELLDQEKFGISQFSEQVNYQRALEGELSRTIETIGPVKGARVHLAMPKPSLFVREQKSPSASVTVNLLPGRALDEGQISAIVHLVSSAVAGLPPGNVTLVDQGGHLLTQSNTSGRDLNDAQLKYASDVEGRIQRRIEAILSPIVGNGNIHAQVTAQLDFASKEQTEEQYRPNGDESHAALRSRQLNESEQSGSGYPGGVPGALSNQPAPANNAPISTPPANQNNRQQQASTTSNSGPRSTQRNETSNYEVDRTIRHTKMNVGDVQRLSVAVVVNYKTLPDGKPLPLSNEQMKQIEDLTREAMGFSEKRGDSLNVVNSPFNSSDESGGELPFWQQQAFIDQLLAAGRWLLVLLVAWLLWRKAVRPQLTRRAEAMKAVQQQAQAREEVEDAVEVRLSKDEQLQQRRANQRLGAEVMSQRIREMSDNDPRVVALVIRQWINNDHE

SEQ ID NO: 134866 - DNA, 1683 bp, Salmonella enterica subsp. enterica serovar Typhi str. CT18
  CDS (1)..(1683): transl_table=11
atgagtgcgactgcatcgactgcaacccaacctaaacctctcgagtggcttaatcgcctacgcgcgaatccccgaattccgttaattgtggcgggttccaccgccgtggcgatcgtcgttgcgatggtgctgtgggccaaaacgcccgattaccgcacgctatttagcaacctttccgatcaggacggcggcgcgatcgtcgcgcagttgacccagatgaatatcccctatcgctttgccaatggcagcggcgcgattgaagtgcccgccgacaaagtgcatgaactgcgtctgcgtctggcgcagcaggggctgcctaaaggcggcgcggtaggctttgaactgcttgatcaggaaaaattcggtatcagtcagttcagcgagcaggtgaattatcagcgcgcgctggaaggtgaactggcccggacgatcgagacgctgggtccggtaaaaagcgcccgcgttcacctggcgatgccaaagccgtcgctatttgtgcgggaacaaaaatccccttccgcctccgtcaccgtcacactggaaccgggccgggcgctggatgaaggacaaattagcgccgtggtacatctggtttccagcgctgtcgccggtttgccgccaggaaacgtcactctggtcgatcaatccggtcatctgctcacgcaatccaataccagcggtcgcgaccttaatgacgcgcaattaaaatttgctaatgatgtggaaagccgcatccaacgccgtatcgaagccattctgtcgcctatcgtcgggaacggtaatgttcacgctcaggtaaccgcccagttggattttgccaataaagaacagacggaagagcactacagcccgaacggcgatgcgtcgaaggccactctgcgttcacgtcagttgaatattagcgaacaggtaggcgcgggctatcccggcggcgtgcctggcgcgctgtcgaaccaaccagcgccgcctaacgaggcgccgatcgccacaccgccgaccaatcaacaaaacgcgcagaatacgccacaaaccagcaccagtaccaacagtaacaacgctggcccgcgcaatacgcagcgtaatgaaaccagtaactacgaagtggaccgcaccattcgtcacaccaaaatgaatgtgggcgatattgagcgtctctctgtagctgtcgtggtgaattacaaaacgctggcggatggcaaaccgctgccattgaccgccgatcagatgaaacagatcgaggatttaacccgtgaagcgatgggtttttctgataaacgcggcgatacgctaaacgtggtgaattcaccgtttagcgcagtggataacaccggcggcgaactgcccttctggcaacagcagtcctttatcgatcagttgctcgcggcaggtcgctggttactggtgctggtggtggcctggattctgtggcgcaaagcggtacatccacagttgacgcgccgcgttgaagaagcgaaagcggcgcaggaacaggcgcaggttcgccaggaaaccgaagaagccgtggaagtacgccttagcaaagacgagcagctccagcaacgccgggctaaccagcgtctgggcgctgaggtgatgagccagcgtattcgcgaaatgtcagacaacgatccgcgcgtggtggcgctggtcattcgccagtggatgagtaacgatcatgagtaa

SEQ ID NO: 134867 - protein, 560 aa, Salmonella enterica subsp. enterica serovar Typhi str. CT18
MSATASTATQPKPLEWLNRLRANPRIPLIVAGSTAVAIVVAMVLWAKTPDYRTLFSNLSDQDGGAIVAQLTQMNIPYRFANGSGAIEVPADKVHELRLRLAQQGLPKGGAVGFELLDQEKFGISQFSEQVNYQRALEGELARTIETLGPVKSARVHLAMPKPSLFVREQKSPSASVTVTLEPGRALDEGQISAVVHLVSSAVAGLPPGNVTLVDQSGHLLTQSNTSGRDLNDAQLKFANDVESRIQRRIEAILSPIVGNGNVHAQVTAQLDFANKEQTEEHYSPNGDASKATLRSRQLNISEQVGAGYPGGVPGALSNQPAPPNEAPIATPPTNQQNAQNTPQTSTSTNSNNAGPRNTQRNETSNYEVDRTIRHTKMNVGDIERLSVAVVVNYKTLADGKPLPLTADQMKQIEDLTREAMGFSDKRGDTLNVVNSPFSAVDNTGGELPFWQQQSFIDQLLAAGRWLLVLVVAWILWRKAVHPQLTRRVEEAKAAQEQAQVRQETEEAVEVRLSKDEQLQQRRANQRLGAEVMSQRIREMSDNDPRVVALVIRQWMSNDHE

SEQ ID NO: 134868 - DNA, 1659 bp, Escherichia coli CFT073
  CDS (1)..(1659): transl_table=11
atgaatgcgactgcagcccagacaaaatctcttgagtggcttaatcgcctgcgtgcgaatccgaaaattccattgattgttgccggttccgcagcagtggcggtcatggtcgcactgatcctgtgggcgaaagcccccgactaccgcacattattcagcaatctttccgatcaggatggtggcgcaattgtcagccaactgacgcaaatgaatattccttaccgcttcagcgaagccagcggcgctattgaagttccggcagataaagttcacgaactgcgcctgcgcctagcgcaacaaggtttgccaaaaggcggcgcggtcggtttcgaactgctcgatcaggaaaagtttggtatcagccagttcagcgaacaggtgaattatcagcgggcgctggaaggcgagctttctcgtaccatcgaaactatcggcccggtaaaaggggcgcgcgtacatctggcaatgccgaaaccgtctttattcgtccgtgaacaaaaatccccttctgcatcggtgacggtaaatctgttacccggccgcgcactcgatgaagggcaaattagcgccattgtacatctggtttccagcgcggtggctggtctgccgccgggaaacgtcacgctggtggatcagggcggacatctgttaacccagtccaacaccagcgggcgcgatcttaatgacgctcagttgaaatatgccagcgatgtcgaaggccgtattcagcggcgtattgaagcgatcctgtcgcctattgttggtaacggtaatattcacgcccaggtcacggcgcaactggacttcgccagtaaagaacaaacggaagaacagtatcgccctaacggtgatgaatctcacgcggcgcttcgttcacgccagcttaatgagagcgagcaaagcggttccggttatccgggcggcgtaccgggggcgttgtcgaatcaaccggcacctgcgaataacgcgccaatcagcacgcctccggcaaatcaaaataaccgccagcagcaggcgagcaccaccagcaatagtgggccgcgtagcacacagcggaatgaaaccagtaactacgaagtcgatcgcaccattcgtcataccaaaatgaacgtgggcgatgtgcaacgtctgtcagtcgcggtagtggtgaattacaaaaccttgccagacggtaaaccattgcctctcagcaacgaacagatgaagcaaattgaagctctgacccgcgaggcgatgggcttttctgaaaaacgcggtgattcgctcaatgttgttaactcgccgttcaatagcagtgacgaaagcggcggagcactgccgttctggcaacagcaagcgtttatcgatcagttgctggctgccggtcgctggttgctggtactgctggtggcgtggttgctgtggcggaaagcggtacgcccgcagctaacacgtcgcgccgaggcggtgaagactgtgcagcaacaggcacaggcccgcgaggaagtggaagatgcggtggaagtccgtctgagcaaagacgaacaactccaacaacggcgcgctaaccaacgactgggggcagaagtcatgagccagcgtatccgtgaaatgtctgataacgatccgcgcgtggtggcgctggtcattcgccagtggataaataacgatcatgagtaa

SEQ ID NO: 134869 - protein, 552 aa, Escherichia coli CFT073
MNATAAQTKSLEWLNRLRANPKIPLIVAGSAAVAVMVALILWAKAPDYRTLFSNLSDQDGGAIVSQLTQMNIPYRFSEASGAIEVPADKVHELRLRLAQQGLPKGGAVGFELLDQEKFGISQFSEQVNYQRALEGELSRTIETIGPVKGARVHLAMPKPSLFVREQKSPSASVTVNLLPGRALDEGQISAIVHLVSSAVAGLPPGNVTLVDQGGHLLTQSNTSGRDLNDAQLKYASDVEGRIQRRIEAILSPIVGNGNIHAQVTAQLDFASKEQTEEQYRPNGDESHAALRSRQLNESEQSGSGYPGGVPGALSNQPAPANNAPISTPPANQNNRQQQASTTSNSGPRSTQRNETSNYEVDRTIRHTKMNVGDVQRLSVAVVVNYKTLPDGKPLPLSNEQMKQIEALTREAMGFSEKRGDSLNVVNSPFNSSDESGGALPFWQQQAFIDQLLAAGRWLLVLLVAWLLWRKAVRPQLTRRAEAVKTVQQQAQAREEVEDAVEVRLSKDEQLQQRRANQRLGAEVMSQRIREMSDNDPRVVALVIRQWINNDHE

SEQ ID NO: 134870 - DNA, 1683 bp, Salmonella enterica subsp. enterica serovar Typhi Ty2
  CDS (1)..(1683): transl_table=11
atgagtgcgactgcatcgactgcaacccaacctaaacctctcgagtggcttaatcgcctacgcgcgaatccccgaattccgttaattgtggcgggttccgccgccgtggcgatcgtcgttgcgatggtgctgtgggccaaaacgcccgattaccgcacgctatttagcaacctttccgatcaggacggcggcgcgatcgtcgcgcagttgacccagatgaatatcccctatcgctttgccaatggcagcggcgcgattgaagtgcccgccgacaaagtgcatgaactgcgtctgcgtctggcgcagcaggggctgcctaaaggcggcgcggtaggctttgaactgcttgatcaggaaaaattcggtatcagtcagttcagcgagcaggtgaattatcagcgcgcgctggaaggtgaactggcccggacgatcgagacgctgggtccggtaaaaagcgcccgcgttcacctggcgatgccaaagccgtcgctatttgtgcgggaacaaaaatccccttccgcctccgtcaccgtcacactggaaccgggccgggcgctggatgaaggacaaattagcgccgtggtacatctggtttccagcgctgtcgccggtttgccgccaggaaacgtcactctggtcgatcaatccggtcatctgctcacgcaatccaataccagcggtcgcgaccttaatgacgcgcaattaaaatttgctaatgatgtggaaagccgcatccaacgccgtatcgaagccattctgtcgcctatcgtcgggaacggtaatgttcacgctcaggtaaccgcccagttggattttgccaataaagaacagacggaagagcactacagcccgaacggcgatgcgtcgaaggccactctgcgttcacgtcagttgaatattagcgaacaggtaggcgcgggctatcccggcggcgtgcctggcgcgctgtcgaaccaaccagcgccgcctaacgaggcgccgatcgccacaccgccgaccaatcaacaaaacgcgcagaatacgccacaaaccagcaccagtaccaacagtaacaacgctggcccgcgcaatacgcagcgtaatgaaaccagtaactacgaagtggaccgcaccattcgtcacaccaaaatgaatgtgggcgatattgagcgtctctctgtagctgtcgtggtgaattacaaaacgctggcggatggcaaaccgctgccattgaccgccgatcagatgaaacagatcgaggatttaacccgtgaagcgatgggtttttctgataaacgcggcgatacgctaaacgtggtgaattcaccgtttagcgcagtggataacaccggcggcgaactgcccttctggcaacagcagtcctttatcgatcagttgctcgcggcaggtcgctggttactggtgctggtggtggcctggattctgtggcgcaaagcggtacatccacagttgacgcgccgcgttgaagaagcgaaagcggcgcaggaacaggcgcaggttcgccaggaaaccgaagaagccgtggaagtacgccttagcaaagacgagcagctccagcaacgccgggctaaccagcgtctgggcgctgaggtgatgagccagcgtattcgcgaaatgtcagacaacgatccgcgcgtggtggcgctggtcattcgccagtggatgagtaacgatcatgagtaa

SEQ ID NO: 134871 - protein, 560 aa, Salmonella enterica subsp. enterica serovar Typhi Ty2
MSATASTATQPKPLEWLNRLRANPRIPLIVAGSAAVAIVVAMVLWAKTPDYRTLFSNLSDQDGGAIVAQLTQMNIPYRFANGSGAIEVPADKVHELRLRLAQQGLPKGGAVGFELLDQEKFGISQFSEQVNYQRALEGELARTIETLGPVKSARVHLAMPKPSLFVREQKSPSASVTVTLEPGRALDEGQISAVVHLVSSAVAGLPPGNVTLVDQSGHLLTQSNTSGRDLNDAQLKFANDVESRIQRRIEAILSPIVGNGNVHAQVTAQLDFANKEQTEEHYSPNGDASKATLRSRQLNISEQVGAGYPGGVPGALSNQPAPPNEAPIATPPTNQQNAQNTPQTSTSTNSNNAGPRNTQRNETSNYEVDRTIRHTKMNVGDIERLSVAVVVNYKTLADGKPLPLTADQMKQIEDLTREAMGFSDKRGDTLNVVNSPFSAVDNTGGELPFWQQQSFIDQLLAAGRWLLVLVVAWILWRKAVHPQLTRRVEEAKAAQEQAQVRQETEEAVEVRLSKDEQLQQRRANQRLGAEVMSQRIREMSDNDPRVVALVIRQWMSNDHE

SEQ ID NO: 134872 - DNA, 1710 bp, Wigglesworthia glossinidia endosymbiont of Glossina brevipalpis
  CDS (1)..(1710): transl_table=11
ttgttaatgaacgttttatctgcagggataaggtctaaacctgccgaatacttaataagtgttttaaaaaaaatattttataacccaaaatatttacttttatcttttggagttatagggatagctttatctatagtactaataacttggttgcaatcttctaattatcaagtactttatactaacattagtgatcaagacagtggagacataatttcagaactatctactttaaacattccttataaattttctaaaaacaatggatctataatggttccagaagataaaatatatgaaactaggtttttgctagctcaaaaaaatttaccaaaaggaggatcaattggatttgagatattggataattctagttttggaattagtcaatttaacgaaaatattaattatcaaagagctttagaaggagaaatagcacgtactatagaaacaataaattctattaaatctgctcgtgttcatattgcaattccaaaaagctcagtatttataagagataataagccatccagtgcttctataacattaggtttacatgcaggaagaactttagataaaaatgagattcaagcaattagatggttagtatcgggaacagttccaaatctacctgtaagtaatatagttttagttgataattatggaaaactattagcttatccagataataacaacgacgataaaaatattacacaattacaatatattaaagatattgagcttgagtatcgtagaagaatcgaagaaattcttattccaatagtaggatttaataatgtaaaagctgaagttactgctcaaatagatttcactaaaacagaacaaacatcagaaaaacacaaacctaatactaatccgaatgaaatgtctataagaagtcaacaaataacagaaaataataatttttcacaagtagcagaaggagttcctggagcgctgagcaatcaaccatctcaagtttcatctgcaaatattgatgaagaaaatgaagaaatagataaagacgctgaaagcgaaaaagaaattgataaaaaaaataattcaagttcaaaagtcgagaaaccaaataatgttcaaaaagaaaaaattataaattatgaaatagatcgtactttaactcatagcaaattttctacaggtattttaaaaagattatctgttgcagttgttataaataaaaaagaagaccaaaagggcaatcaaattaattttgaagaaaaagaaatgcaagaaataacttctttaattaaagaagtaatgggatattcagaagaaagaaatgatacacttgatgttgttaatgcaaattttgtaaataaaaaagatgaaattttcaatatacctttttgggaaaatattagaatacaaaatatctttataagcttaataaaatatattttgtcttttgcattaatgtggctatttattaataaatttattaaaatatggaaaacaagcgaacaaaatcaattaaaaaataaaattgataaaaaatcttttcaagaaaaaaacaattcaattgtaaatgaaaaaaataatgaaataaataaaaaaattaatgaagaagaaaatatttctatatatacagaaaacagtattaaaaaattacaagaaattgctgacaaacaaccaaaattagttgcaaaaattataagtcagtggataaaaaaagaacaaaatatattatga

SEQ ID NO: 134873 - protein, 569 aa, Wigglesworthia glossinidia endosymbiont of Glossina brevipalpis
MLMNVLSAGIRSKPAEYLISVLKKIFYNPKYLLLSFGVIGIALSIVLITWLQSSNYQVLYTNISDQDSGDIISELSTLNIPYKFSKNNGSIMVPEDKIYETRFLLAQKNLPKGGSIGFEILDNSSFGISQFNENINYQRALEGEIARTIETINSIKSARVHIAIPKSSVFIRDNKPSSASITLGLHAGRTLDKNEIQAIRWLVSGTVPNLPVSNIVLVDNYGKLLAYPDNNNDDKNITQLQYIKDIELEYRRRIEEILIPIVGFNNVKAEVTAQIDFTKTEQTSEKHKPNTNPNEMSIRSQQITENNNFSQVAEGVPGALSNQPSQVSSANIDEENEEIDKDAESEKEIDKKNNSSSKVEKPNNVQKEKIINYEIDRTLTHSKFSTGILKRLSVAVVINKKEDQKGNQINFEEKEMQEITSLIKEVMGYSEERNDTLDVVNANFVNKKDEIFNIPFWENIRIQNIFISLIKYILSFALMWLFINKFIKIWKTSEQNQLKNKIDKKSFQEKNNSIVNEKNNEINKKINEEENISIYTENSIKKLQEIADKQPKLVAKIISQWIKKEQNIL

SEQ ID NO: 134874 - DNA, 1677 bp, Bordetella pertussis Tohama I
  CDS (1)..(1677): transl_table=11
atgaaccagcaggcaaccctgagcgcgtcgctgatggcgaggtttcccgtgctggagaaactgcgcgccctgcccaaacctgtcctgcttggggcggcggcggcgctgatcgccgtggtggcggcggtggcgatgtggagccgcgagcccgattacaaggtgctgttctccaatctggacgaccgcgatggcggcgccatcgtctcggcgctggaccagatgaacgtgccctaccgcttcagcgacaacggcagcgcgctgctggtgcccgccgagcgggtctacgacacgcgcatgcagctggccagccagggcctgccgcgcggcggttcggtgggtttcgagctgctggacaacacccgtttcggcgccagccagttcgccgagcagatcaactaccagcgcggcctggaaggcgagctggcgcgctcgatcgaggccatgcatacggtgcagcacgcccgcgtgcacctggccatgccgcgccagtcgctgttcgtgcgcgaccgccaggccccgaccgcctcggtgctgctcaacctgtacccgggccgcagcctgagcgatgcccaggtgtcggcggtggcctggctggtggcttccagcgtgcccgagctgaccgccgagaatgtctccatcgtcgaccaaaacggccggctcctgtcggcgccgctgggcgaaggccgcggcatggacgccgaccagttgcgcttcgtgcgtgaaatggagcagcgcacggtcgagcgcatcctgaccatcctcaacccgctggtcggccccggcaacgtgcatgcccaggccagcgccgagatcgacttcgcccgccgcgaagagacttccgaggtctatcggcccaaccaggagcccggccaggccgccgtgcgcagccagcagaccagtgattcgcgccagaccgggccgaacgcggcgcagggcgtgcccggcgcgctgagcaaccagccgccggccaacgcgcaggcgcccatcgtcaatccgcccgccgtcgccggcaccccgcagcagcaacagcagcagcgcgcccagcaacaggccgccggcgccaccaccacccagacgcagcaaggcgccgcggcgccgagcaacgaccgccacgacgccaccatcaattacgaagtcgaccgcaccatcagccacgtcaagcagccggtgggcatgctcaagcggctgtcggtggcggtggtggtgaactacctgcccaacaaggaaggcgagtccgaggcgctgccgcccgaggagctgaacaagctgaccaacctggtgcgcgaggccatgggctattcggaggcgcgcggcgactcgctgaacctggtcaacagccagttcaacgatacgcctgtcgccgtgccgctgtggcgcgacccggaactgatcgccatgatcaagacggcgctgggctggctgttcggcctgatcctggccttctggctgtaccgcaagatccgcccggtggtcaccgactacttctacccgcaggtcgaccccgaagtggccgccgcgcaacgccaggaagccgagcgcgaagcgcaggccgccgcgcgcacccgcgaagtcaaccgctacgaagacaacctgcagctcgcccgcgacatggcgggcaaggatccgcgcgctgtcgccatggtcctgcgttcgtggatgagcaaagatgaaaaatga

SEQ ID NO: 134875 - protein, 558 aa, Bordetella pertussis Tohama I
MNQQATLSASLMARFPVLEKLRALPKPVLLGAAAALIAVVAAVAMWSREPDYKVLFSNLDDRDGGAIVSALDQMNVPYRFSDNGSALLVPAERVYDTRMQLASQGLPRGGSVGFELLDNTRFGASQFAEQINYQRGLEGELARSIEAMHTVQHARVHLAMPRQSLFVRDRQAPTASVLLNLYPGRSLSDAQVSAVAWLVASSVPELTAENVSIVDQNGRLLSAPLGEGRGMDADQLRFVREMEQRTVERILTILNPLVGPGNVHAQASAEIDFARREETSEVYRPNQEPGQAAVRSQQTSDSRQTGPNAAQGVPGALSNQPPANAQAPIVNPPAVAGTPQQQQQQRAQQQAAGATTTQTQQGAAAPSNDRHDATINYEVDRTISHVKQPVGMLKRLSVAVVVNYLPNKEGESEALPPEELNKLTNLVREAMGYSEARGDSLNLVNSQFNDTPVAVPLWRDPELIAMIKTALGWLFGLILAFWLYRKIRPVVTDYFYPQVDPEVAAAQRQEAEREAQAAARTREVNRYEDNLQLARDMAGKDPRAVAMVLRSWMSKDEK

SEQ ID NO: 134876 - DNA, 1740 bp, Chromobacterium violaceum ATCC 12472
  CDS (1)..(1740): transl_table=11
atggctgatctggcagaagaaaacgctactccagtttggcgcgctcgactgaacgaggcgggagaccgcttcaaggcgctgcccaacaaccgaaaaatcctgtttcttacggcgctggcggcgattttcgccgtcgtcgtcggcgcggtgcttctcaaccgcacgccttcctacaagatcctgttctccaatctggccgaccgcgacggcggccaggtcacggccgcgctgcagcagatgaacgttccctaccagctgggcgagggcggcgtgatctcggtgccggcggacaaggtgtacgacgtccgcttgaagctggcggcccagggcctgcccaaggccagcggcgtgggcttcgaactgatggacaaccagaagttcggcatcagccagttcgccgagcaagtcaattaccagcgctccatcgagggcgagctcgcccgcaccatcgaggccatctcctcggtgcagagcgcccgcgtccacatcgccacgcccaagcagagcgtgttcgtccgcgagcagcagtcgcccaccgcctcggtgatgctgcagctgtacccgggacgcatgctggacggcggccaggtggccggcatcctgcacctggtgtccagttcggtgcccaatctgccgttgaagaacgtcaccatcgtcgaccaggacggcaacctgttgtccaagcaggccggcccggacgagaattccggcctggatcagcgccagctgggcttcgtgcgccagatcgaggagggctacgtcaagcgcatcgaggacatactggagcccatcttcggccgcggcaacgcccgcgcccaggtgacggccaacgtcgacttctccgaaaccgagcagacgtcggaaacctaccggcccaactccagccccaatccctcggccacccgcagccagcagatcagcgagaagctggtcaacggctcggccaaccccaccggcgtgccgggcgcgctgtccaaccagccgccgtcggcggcgtccgcgccgatcacgctgccgccgggcgccgccccgggcacggccaatctgtccgggggaagcgtcagcgccagcggcacgctgcagcgcgacatcaccaccaattacgaggtggacaagaccatacagcacaccaaggtgccgaccggcgtggtcaagcggctgtcggccgccgtggtggtcaactatcgccgcatgcctgacaagagcggcgagatgaagccgacgccgctgacgccgcaagaggtgcagcaaatcaacaacctggtcaaggaggcgatgggctacaactccggccgcggcgatacgctcaacgtggtcaacgccgccttcgccgacaatgcccagccggtcaccatgcaggagcgggtgatcgattacgtcagcggcaacggcaccagcctggtcaagtacggcttgctggggatcgcggtgctctatctgctgttcggcgtggtgcggcccatcatgcgagatctggttcggccgccggcgcctgcccccggcgccgagggcgaggctgcggccgccggcgcggccgggccgggagggcgcctgctgggcgtggccggggaagagggcgaacccggcgtcgccgccgcgatggcgggcggcggagaagacccgcgcgaagcgcagaagcgccagtacagcagcaacctggaagccgtgcgcgagctggtgaagtctgatccgcgcatggcggcccagatcatcaaggaatggataagcgccgatgagtga

SEQ ID NO: 134877 - protein, 579 aa, Chromobacterium violaceum ATCC 12472
MADLAEENATPVWRARLNEAGDRFKALPNNRKILFLTALAAIFAVVVGAVLLNRTPSYKILFSNLADRDGGQVTAALQQMNVPYQLGEGGVISVPADKVYDVRLKLAAQGLPKASGVGFELMDNQKFGISQFAEQVNYQRSIEGELARTIEAISSVQSARVHIATPKQSVFVREQQSPTASVMLQLYPGRMLDGGQVAGILHLVSSSVPNLPLKNVTIVDQDGNLLSKQAGPDENSGLDQRQLGFVRQIEEGYVKRIEDILEPIFGRGNARAQVTANVDFSETEQTSETYRPNSSPNPSATRSQQISEKLVNGSANPTGVPGALSNQPPSAASAPITLPPGAAPGTANLSGGSVSASGTLQRDITTNYEVDKTIQHTKVPTGVVKRLSAAVVVNYRRMPDKSGEMKPTPLTPQEVQQINNLVKEAMGYNSGRGDTLNVVNAAFADNAQPVTMQERVIDYVSGNGTSLVKYGLLGIAVLYLLFGVVRPIMRDLVRPPAPAPGAEGEAAAAGAAGPGGRLLGVAGEEGEPGVAAAMAGGGEDPREAQKRQYSSNLEAVRELVKSDPRMAAQIIKEWISADE

SEQ ID NO: 134878 - DNA, 1704 bp, Photorhabdus luminescens subsp. laumondii TTO1
  CDS (1)..(1704): transl_table=11
atgagtgccgcaacaaccgacgttgaaaatcaaactaaaggtttcagtgctatcattaaccagataaaagctgatcctaaagtgccattattagttgccggcagcgcagccgttgcgattgtcattgcccttttcctgtggttacgcagccccgattatcgggtgctttacagtaatctgagcgataaagatggtggcgatattgtcacccaattaacccaattaaatatcccttaccgttttgccgaaaatggcgctgcgatcatgatccctgccgagcaggtgcatgagacacggctaagattggcacaacaagggttgcccaaaggtggggctgcgggattcgaactactcgataaagaaaagtttggcatcagccaatttagtgagcaggttaactaccaaagagcattggaaggtgaactgtcacgcaccattgaatctttagggccagtgcaaaatgctcgtgttcatctggcacttcccaaaccctcgctgtttgtccgtgaacagaaatcgccctcagcttccgttacggttggattactgcaaggtcgtaccttggatgaaggccagataaacgccatcgtccatatggtttccagcagtgtcgctggcttaccaccgggcaatgtcaccatcgttgatcagaccggacgtctattgacacaagccgatgcgaccggacgcgatctcaataccagtcaactgaaatacattcaggaagtggaaaatcgcttccagcatcgtatcgaaacgattctaaccccggttgtcggtcgtggtaacgttcacgcacaggtgacagcgcaggtggatttttcacgccgtgaagagacggcagaagaatataaacctaaccaacccccgaatcaggctgcggttcgctcaaaacagttgagtgaaagtgagcagagtggcggccctcaggttggcggtattcccggtgcgctttccaatcaaccgagctcaccaccgagtgcgccgattgataaaccaaacaccaaagagaacaataaaaacgacaagagcgataagaaagcatcatccgccggtaacagtaatgagcgcacggttaacagtaatcgcaataaccgccgtgatgaaaccacaaactatgaagtggaccggactattcgccatgtgcaacaacaagccggtggtgttgaacgcttatccgtcgccgttgtcgtcaattatgtcacggtagaaggcaaaaatggcccggaaactcaggccctaacccctgagcaattgacaaaaatagaagcgctgaccagagaagcgatgggcttttctaaagagcgtggcgacagcttgaatgtggttaatacaccatttactgaaagcaaagaaaatatcgaggttattcctgtctggcagaacccggttctgttagaaaaagccttcgattttggccgctacctgctattgattctggtggcatggctgctgtggcgcaaaatggtggtgcctcaacttgccaaaaaacgcgccgcagaaaaagccgccctcgacgcacagaaagttcagaaaagacaagtgactgaatcgagtgcggaaatggatgaaaaaacgcgccagaaactgacacgtcaacgagtcagtgctgaaattcaaagccaacgcattcgtgagctggcagaaaaagatcctcgcgtagtggcgctggtgatccgtcaatggatgagtaacgaacaatga

SEQ ID NO: 134879 - protein, 567 aa, Photorhabdus luminescens subsp. laumondii TTO1
MSAATTDVENQTKGFSAIINQIKADPKVPLLVAGSAAVAIVIALFLWLRSPDYRVLYSNLSDKDGGDIVTQLTQLNIPYRFAENGAAIMIPAEQVHETRLRLAQQGLPKGGAAGFELLDKEKFGISQFSEQVNYQRALEGELSRTIESLGPVQNARVHLALPKPSLFVREQKSPSASVTVGLLQGRTLDEGQINAIVHMVSSSVAGLPPGNVTIVDQTGRLLTQADATGRDLNTSQLKYIQEVENRFQHRIETILTPVVGRGNVHAQVTAQVDFSRREETAEEYKPNQPPNQAAVRSKQLSESEQSGGPQVGGIPGALSNQPSSPPSAPIDKPNTKENNKNDKSDKKASSAGNSNERTVNSNRNNRRDETTNYEVDRTIRHVQQQAGGVERLSVAVVVNYVTVEGKNGPETQALTPEQLTKIEALTREAMGFSKERGDSLNVVNTPFTESKENIEVIPVWQNPVLLEKAFDFGRYLLLILVAWLLWRKMVVPQLAKKRAAEKAALDAQKVQKRQVTESSAEMDEKTRQKLTRQRVSAEIQSQRIRELAEKDPRVVALVIRQWMSNEQ

SEQ ID NO: 134880 - DNA, 1725 bp, Erwinia carotovora subsp. atroseptica SCRI1043
  CDS (1)..(1725): transl_table=11
atgaacgcctcattaaccggctccgctaccggtaaaaatagctttggcgaaatactcaaccggttacgcgccaatccgaaaattccgctattgatcgcagcagctgcgactatagcaatcgtcgtcgcgttgacgttatgggctaaaggccctgattatcgggtactttatagcaatataaacgaccgagacggtggcgcaattgtcagcgaattaacaaagctgaatatcccttaccgctttgcggaaagcggtggcgcgatcatgattcccgccgcaaacgtctatgagactcgactccgactggcccaattggggctgccaaaaggtggcgctgttggatttgaattgctcgaccaggaaaagtttggcatcagccaattcagtgaacagattaattaccagcgtgcgctggaaggcgagctatccagaacgatagagacattaggccccgttcagaatgcgcgggttcatcttgccataccgaagccttcactgttcgttcgtgagcagaaatccccctcttcttctgtcactctgacattacaaccgggtcgtgcattagatgaaggtcaaatcaactccatcgtttacatggtttccagcagcgttgctggcctgccgccggataatgttactgtcgtcgatcagaccggacgtttgttaactcaagcaggtggcagtggtcgcgacctgaatgctgctcagcttaagtacagcaacgaagttgaggcgatgtaccaacgtcgtatagagtcaatcatcgcgccgatggttggcatgggcaacgtgcatgctcaggtcaccgcacaaattgacttctcagcccgcgaacaaactgacgaacagtatcaacccaaccaaccaccggataaagcggccgttcgctctcaacaaaccagccagagtgagcagaaaggaggcccgaacgtaggtggcgttcctggtgcattgaccaatcagcctgcaccggcaccgacagcacctatcgcgacgccgccaaataatgccaacgcgaatgcgaataatcaggcaggccagcagaaccaaaataatgcggcgggcgcccaagccaatgccgcaaataccaataccaccattcagacatcaaatgtccgcaatgatgcaacaaccaactatgaagtcgacaagaccattttacacaccaaacacagcacgggtggtgtgaagcgcttgtctgcagctatcatcgtcaactatcagcctcctggtgaggatggcaaacccgttgcgctgacggaagatcagatcaaacagattgaaacagtagcacgcgaagcaatgggcttctctgccgaacgtggtgatacattaaatgtcgttaacacgccatttatggacagcaccgatggttctggtgagcttccattctggcaaaaacaagcatttttcgatctcctgatggaagctggccgttggctgctggttctgatcgttgcctggattctgtggcgtaaattggttcgtccgcaattgcagaaaaaagcacagcaacaagaagcggcactggcagcggctaccctgtctcagggtacagataacgatgttatggtcaacttgagtagctcggaagttgagcaacagcggaaatcgcaacaacgtgtcaatgcagaaatgcaaagtaaccgtatacgtgaaatggcagagaacgatccacgcgtcgtcgccctggtcattcgccaatggatgagtactgaactatga

SEQ ID NO: 134881 - protein, 574 aa, Erwinia carotovora subsp. atroseptica SCRI1043
MNASLTGSATGKNSFGEILNRLRANPKIPLLIAAAATIAIVVALTLWAKGPDYRVLYSNINDRDGGAIVSELTKLNIPYRFAESGGAIMIPAANVYETRLRLAQLGLPKGGAVGFELLDQEKFGISQFSEQINYQRALEGELSRTIETLGPVQNARVHLAIPKPSLFVREQKSPSSSVTLTLQPGRALDEGQINSIVYMVSSSVAGLPPDNVTVVDQTGRLLTQAGGSGRDLNAAQLKYSNEVEAMYQRRIESIIAPMVGMGNVHAQVTAQIDFSAREQTDEQYQPNQPPDKAAVRSQQTSQSEQKGGPNVGGVPGALTNQPAPAPTAPIATPPNNANANANNQAGQQNQNNAAGAQANAANTNTTIQTSNVRNDATTNYEVDKTILHTKHSTGGVKRLSAAIIVNYQPPGEDGKPVALTEDQIKQIETVAREAMGFSAERGDTLNVVNTPFMDSTDGSGELPFWQKQAFFDLLMEAGRWLLVLIVAWILWRKLVRPQLQKKAQQQEAALAAATLSQGTDNDVMVNLSSSEVEQQRKSQQRVNAEMQSNRIREMAENDPRVVALVIRQWMSTEL

SEQ ID NO: 134882 - DNA, 1713 bp, Yersinia pseudotuberculosis IP 32953
  CDS (1)..(1713): transl_table=11
atgaatgcctcgataactggcggtgaaaatcgtgagaacacttttacgatgacactggcacgcctacgcgcgaaccccaaaatccccctgctgattgctgcggctgctgctatcgctatcattgtcgccttgatgctctgggctaaaagcccggattatcgcgtcctttacagcaatctcagtgatcgtgacggcggtgatatcgtcacccaactgacacaactgaacatcccttatcgtttcgctgataatggtggcgcattgctgatccccgctgagaaagtgcatgaaacccgcttgcggttggcacaacagggtttaccgaaaggtggcgctgtgggttttgaattgctggatcaggaaaaattcggcatcagtcaattcagtgagcagataaattaccagcgggcattggaaggtgaattatcccggaccatcggcacactcgggccagtattgaatgtacgagtgcatttggcgatgcccaaaccctcgttatttgtccgtgaacaaaaatccccgaccgcctcggtcaccctcgccttacaaccaggtcgcgcattagatgatggccagatcaatgccatcgtttatatggtttccagtagcgtggcaggcttgccgccgggtaacgtcaccgtggttgaccaaacgggccgtctgttgacgcaatcagacagtgcaggccgcgatttaaatgcttcgcaattgaaattcaccagcgaagtcgaaaaccgttatcagcgccgtattgaaaatattctggcaccgatggtcggcaacggtaatgttcatgctcaggtgactgcgcaggttgattttgccagccgtgaacaaacggatgaagagtacaaaccgaatcaggccgccaaccaaggtgctgtccgctctcaacaggtgagtaccagcgaacaactgggcggaaccaacgtaggcggtgtgccgggggcgttatcgaaccaaccgccagtggcaccgatagccccgattgaaatcccacaaccggcaggggccgccgccaataatgccgctccggctaatgcggcgacaacggctaacgcaaatacgacagcaaccgccgcgaaagccagttccagcaatagtcgccatgaccaaacgacaaacttcgaagttgaccgcaccatccgccatacccagcagcaagcaggtatggtgcagcgtttatccgtcgcggtggtggtgaactacaccagcgataaagccggtaaaccgattgcactgagtaaagatcagttggcgcaggtggagtcactgacccgtgaggcgatgggtttctctaccgtccgtggtgacacactgaacgtagtcaatacccccttcacagccagtgacgatacccgtggcagcagcctaccgttttggcaacagcaatccttctttgatcagttgctgaatgccggccgctacctgctgatcctactggttgcctggattttgtggcgcaaactacttcgcccaatgctcgccaaaaaacaggttgcagataaagcggccgcctcggtcaataacatcgttcaaaccgcacaagcggctgagacagtaaaacaaagtaaagaagagctggccctgcgtaagaagaatcagcagcgggtgagtgctgaagttcaggcccagcgtatacgcgaactggcggataaagacccacgtgttgtggcgttggtgatccgtcaatggatgagtaatgaccaatga

SEQ ID NO: 134883 - protein, 570 aa, Yersinia pseudotuberculosis IP 32953
MNASITGGENRENTFTMTLARLRANPKIPLLIAAAAAIAIIVALMLWAKSPDYRVLYSNLSDRDGGDIVTQLTQLNIPYRFADNGGALLIPAEKVHETRLRLAQQGLPKGGAVGFELLDQEKFGISQFSEQINYQRALEGELSRTIGTLGPVLNVRVHLAMPKPSLFVREQKSPTASVTLALQPGRALDDGQINAIVYMVSSSVAGLPPGNVTVVDQTGRLLTQSDSAGRDLNASQLKFTSEVENRYQRRIENILAPMVGNGNVHAQVTAQVDFASREQTDEEYKPNQAANQGAVRSQQVSTSEQLGGTNVGGVPGALSNQPPVAPIAPIEIPQPAGAAANNAAPANAATTANANTTATAAKASSSNSRHDQTTNFEVDRTIRHTQQQAGMVQRLSVAVVVNYTSDKAGKPIALSKDQLAQVESLTREAMGFSTVRGDTLNVVNTPFTASDDTRGSSLPFWQQQSFFDQLLNAGRYLLILLVAWILWRKLLRPMLAKKQVADKAAASVNNIVQTAQAAETVKQSKEELALRKKNQQRVSAEVQAQRIRELADKDPRVVALVIRQWMSNDQ

SEQ ID NO: 134884 - DNA, 1788 bp, Pseudomonas fluorescens Pf-5
  CDS (1)..(1788): transl_table=11
atggcagaagcagtcgccgataacgtaccggccaaggccgccccgatcgacggtaaaccgccgctgttcggtttgtccttcctggaaaacctgtcccagatgaccatgctgcgtcaggtcggcctgttggtgggcctggccgccagcgtggcgattggttttgccgtggtgctgtggtcccagcaacccgattaccggccgctgtacggcagcctggcgggtatggacgccaagcaggtcatggataccctggcctctgccgacattccttacaccgtagagcccaattccggcgccttgctggtcaaggccgatgacctgtcccgagcccgcctgaagctggccgcggctggcgtagcgccgggtgacggcaacgtcggcttcgagatcctcgataaagagcagggcctgggtaccagtcagttcatggaagcgacccgttaccgtcgcggcctggagggcgagctggctcgcaccatctccagcctgaacaacgtcaagggcgcccgggtgcacctggcgattcccaaaagctcggtgttcgtgcgtgatgaacgcaagcccagcgcctcggtcctggtagaactctactccggccgttccctggagcccggccaggtcatggccatcgtcaacctggtggcgaccagtgttcccgagctgaacaagtcccaggtcaccgtggtcgatcagaagggcaacctgttgtccgaccaggcggaaaactccgcactgaccatggctggcaagcagttcgactacagccgtcgcctggaaggcatgctgacccagcgggtgcacaacatcctgcaaccggtgctgggcaacgatcgctacaaggctgaagtctcggcggacgtcgacttcagtgccgtggaatccacctccgaacagttcaaccccgaccagccggccctgcgcagcgagcagtcggtgaatgagcagcgctccagcagcaacggcccgcaaggcgtgccgggtgctctgagcaaccagccgccggcgccggcctctgcgccacaaaccaccggtggcgccactgccgccgccggcatggtgcaaccgggccagccactgctggacgccaacggccaacagatcatggacccggccaccggccagccgatgctggcgccgtacccgtcggacaagcgtcaacaatccaccaagaacttcgagctcgatcgctccatcagccataccaagcagcagcagggtcgcctgaatcgtctgtcggtagcggtagtggtggacgaccaggtcaaggtcaacccggccaatggcgaaaccagccgagcgccgtggagcgccgacgaattggcgcgtttcacccgtctggtgcaggacgccgtgggcttcgatgccagccgtggcgacagcgtcagcgtgatcaacgtgccgttctccgccgaacgcggggaagtgatcgccgatattccgttctactcgcagccctggttctgggacatcgtcaagcaagtgctcggcgtgctgttcatcctggtgctggtgttcggcgtgttgcgtccggtgctcaacaacatcactggcggcggcaagaacaaagaactggcaggcctgggcagtgacgtcgaattgggcggcatgggcggcctggacggtgagttgggcaacgaccgcgtgagcctcggcggcccgcagagcattctgctgccgagcccgagcgagggttatgacgctcagttgaacgcaatcaagagtctggtggctgaagacccgggtcgagtggctcaggtcgtgaaagagtggattaacgcagatgagtga

SEQ ID NO: 134885 - protein, 595 aa, Pseudomonas fluorescens Pf-5
MAEAVADNVPAKAAPIDGKPPLFGLSFLENLSQMTMLRQVGLLVGLAASVAIGFAVVLWSQQPDYRPLYGSLAGMDAKQVMDTLASADIPYTVEPNSGALLVKADDLSRARLKLAAAGVAPGDGNVGFEILDKEQGLGTSQFMEATRYRRGLEGELARTISSLNNVKGARVHLAIPKSSVFVRDERKPSASVLVELYSGRSLEPGQVMAIVNLVATSVPELNKSQVTVVDQKGNLLSDQAENSALTMAGKQFDYSRRLEGMLTQRVHNILQPVLGNDRYKAEVSADVDFSAVESTSEQFNPDQPALRSEQSVNEQRSSSNGPQGVPGALSNQPPAPASAPQTTGGATAAAGMVQPGQPLLDANGQQIMDPATGQPMLAPYPSDKRQQSTKNFELDRSISHTKQQQGRLNRLSVAVVVDDQVKVNPANGETSRAPWSADELARFTRLVQDAVGFDASRGDSVSVINVPFSAERGEVIADIPFYSQPWFWDIVKQVLGVLFILVLVFGVLRPVLNNITGGGKNKELAGLGSDVELGGMGGLDGELGNDRVSLGGPQSILLPSPSEGYDAQLNAIKSLVAEDPGRVAQVVKEWINADE

SEQ ID NO: 134886 - DNA, 1755 bp, Dechloromonas aromatica RCB
  CDS (1)..(1755): transl_table=11
atggcagcaacgactgagacgacagcagggactgcaccggaacaaaacccggtggaccgtctgcgcgaggcattcaaccggctcggcagtcagcagaagatcgtcttcatggtcgccattgccgcccttatcgcaattattgtgggggcaatcctgtggagccgacagcctgactggaaggtgcttttctcgaatctgacggaaaaagacgggggttccattgcggccattctcgagcagcaaaacatccctcaccgctacagtaacagcggcgccttgcttgtgccatccgaccgcgtccatgaagtgcgcctgaagcttgcttcacaaggcctgccacgcggtggcatggtcggtttcgaattgatggaaaaccagaaattcggggttagccagtttgccgaacaggtgaactaccaacgcggtctagagggcgaactggccagaaccatccagtcgatcggctcagtgcaatccgcccgcgttcatctggccattcccaaaccatcggtattcgtccgcgaggagcaaaaaccgacggcatccgtgatgctcaacctctatccgggccgtacgctcgatggtggtcagattgccggcattacgcatctggtgtcatccagcgtcccccaactgccggcatcgaatgtgacggtgctcgaccagagtggcgccttgctgtcacaactgaagagcaagctgaccgaagcgggcctggacccgacgcagatcaaatatgttcacgacgtagaaaacagcattatcaagcgcattgatgaaatcctcagcccgctactgggcgccgacaatttcaaggtgcaggttgctgctgatatcgacttttcgcaaaccgagcagaccgccgaaagctaccgtccaaacaacacgccggaaagcaccagcatccgcagtcagcaaaacaacgaaactgccaacgtcaatcaggccgccggcggcgtaccgggcgcgctaaccaaccagccaccggtgccagccacagcgccactgacccagccggcgaccgggacgactccgggacagccggcaaagccaggagagccccagggcaaaatcgacgctgcgggggtcaccgcaccgctcaacgctgcaggtcaaccgatcagcaccagcaaaaatgccacgatcaactatgaactggacaagaccatccgccataccaggcaggggatgggtaacatccggcgcttgtcggctgccgtggtcgtcaatcatcgcaaggacgtcgacaagacaggcaaaccgctgaccaaggcaattcccgacgcggagatgaagcaaatcaatgaactggttcgcgaagcgatggggttcaccaaggaacgaggggatacgctgtcggtggccaacgcccccttcaccgccatcgacaagagcgaaaacgagttgccgatctggaaagacccggagaacgtctcttatatcaaggatattctcaagtatctgctgatcgcggccatcattgccttcctctacatcaagcttatccagccctcgttgaaaacgatgttcccggcacgccatgaaggcgagaaacatgctggagatggaaccggcccaggcggcatattcggaggaataaccggcagcgcggaagaggctggcgaagatggttcaacccaggtgactatcgacaactacgccatcaagattcagaaggctcgcgaattcgccgagaaagactcaaaggcggtagccaacatcatcaaggattggatgggcgtcaatggcaactag

SEQ ID NO: 134887 - protein, 584 aa, Dechloromonas aromatica RCB
MAATTETTAGTAPEQNPVDRLREAFNRLGSQQKIVFMVAIAALIAIIVGAILWSRQPDWKVLFSNLTEKDGGSIAAILEQQNIPHRYSNSGALLVPSDRVHEVRLKLASQGLPRGGMVGFELMENQKFGVSQFAEQVNYQRGLEGELARTIQSIGSVQSARVHLAIPKPSVFVREEQKPTASVMLNLYPGRTLDGGQIAGITHLVSSSVPQLPASNVTVLDQSGALLSQLKSKLTEAGLDPTQIKYVHDVENSIIKRIDEILSPLLGADNFKVQVAADIDFSQTEQTAESYRPNNTPESTSIRSQQNNETANVNQAAGGVPGALTNQPPVPATAPLTQPATGTTPGQPAKPGEPQGKIDAAGVTAPLNAAGQPISTSKNATINYELDKTIRHTRQGMGNIRRLSAAVVVNHRKDVDKTGKPLTKAIPDAEMKQINELVREAMGFTKERGDTLSVANAPFTAIDKSENELPIWKDPENVSYIKDILKYLLIAAIIAFLYIKLIQPSLKTMFPARHEGEKHAGDGTGPGGIFGGITGSAEEAGEDGSTQVTIDNYAIKIQKAREFAEKDSKAVANIIKDWMGVNGN

SEQ ID NO: 134888 - DNA, 1647 bp, Thiobacillus denitrificans ATCC 25259
  CDS (1)..(1647): transl_table=11
atggcggtagcaggtgaaatggtggttccgggcaacgtcatggaatttacccgcacggccggcgggcgaaaaatcctgttgatgctcggcgtcgccgcgtcggtcgcggtgatggctgcggtctggatgtggggccagcagcccgagtatcgcgtgctgttctccaacttcagcgaccgcgacggcggcgcgatcgtcgccgagctggaaaaaatgaacgtcccctacaaatacgccgaaggcggcggcgcggtgctggtgccggccgaccgcgtgcacgacgcgcgtctgaagctcgcctcgcaaggcctgcccaagggcggcaacgtcgggttcgagctgatggagaaccaacggctcggcgcctcgcaattcgtcgaacaggtcaatttccagcgcgcgatggaaggcgaactcgcacgatcgatcgaatcggtctcggccgtgcaggccgcgcgcgtgcacctcgccctgcccaaggactcgattttcgtttccgagcagaaacagccgaccgcctccgtactgctcaatcttcaccccggccgcgccctcgatccgcagcaggtcagcgcgatcgttcacctggttgcgagcagcgtgcccgaactcgcgaccaagaacgtcaccgtcgtcgaccagaacggcaatctgctgtccgacgccggcaaggccccgcgcgtcaacggcatggatccgagccagatcaaatacgtgcaagagctgcagcaggacgtcgtccagcgcatcgaatcgatcatcacgccgatcgtcggccccggcaacgtgcgcgccgaagcgaccgcggacgtcgatttttcgcgcagcgagcaggccgtcgaatcgtacaagccgaaccagacccccgacgcgatggcgatccgcagccagcagacgagcgaatcgctcaatggctcggcgaaccccgccggcgtacccggcgcgctgatcaatcagccgcctgcgcccgcgaccgcaccgatcacagtgcccggccaggcgacgccggcacccgcggcggcggcggcgcagcctgcgacgagcacgcgcaaggacgcgacggtcaattacgaagtcgacaagacgatccagtacgtccagcaggcgggcggcggcctcaagcggctgtcggtcggggtcgtcgtcaactacaagaagaccgtcgacaaggccggcaaggtcgccatgaagcccttgagcgaagccgagaaaacccagatcacgaatctggtcaaggaagcgatgggctacaaccaggcgcgcggcgacaccgtcaacgtcgtcaacagcccctttgccagcgcccaggaggaagacctcccccaaccgccgttctggaagcagccggagtacgccgaatacttcgacatcgcacgcaacgtgggcaagtacctgctgatgggcatcgcgctgctcctgctctacctgaaagtggccaagcccctgctgaagaagatgtccgagcagcaggcgttggccgcgcccaaccaccccctgcacctggagcaactcgcgaccgacgagcgcgccgcccttcccggccagcgcaactaccaggagaacctgtcgcgcgcgcagaggctcgccaacgaggacccgcgcgtcgtcgccaacatcgtgaagacctgggtcgccaacaatgactga

SEQ ID NO: 134889 - protein, 548 aa, Thiobacillus denitrificans ATCC 25259
MAVAGEMVVPGNVMEFTRTAGGRKILLMLGVAASVAVMAAVWMWGQQPEYRVLFSNFSDRDGGAIVAELEKMNVPYKYAEGGGAVLVPADRVHDARLKLASQGLPKGGNVGFELMENQRLGASQFVEQVNFQRAMEGELARSIESVSAVQAARVHLALPKDSIFVSEQKQPTASVLLNLHPGRALDPQQVSAIVHLVASSVPELATKNVTVVDQNGNLLSDAGKAPRVNGMDPSQIKYVQELQQDVVQRIESIITPIVGPGNVRAEATADVDFSRSEQAVESYKPNQTPDAMAIRSQQTSESLNGSANPAGVPGALINQPPAPATAPITVPGQATPAPAAAAAQPATSTRKDATVNYEVDKTIQYVQQAGGGLKRLSVGVVVNYKKTVDKAGKVAMKPLSEAEKTQITNLVKEAMGYNQARGDTVNVVNSPFASAQEEDLPQPPFWKQPEYAEYFDIARNVGKYLLMGIALLLLYLKVAKPLLKKMSEQQALAAPNHPLHLEQLATDERAALPGQRNYQENLSRAQRLANEDPRVVANIVKTWVANND

SEQ ID NO: 134890 - DNA, 1764 bp, Burkholderia sp. 383
  CDS (1)..(1764): transl_table=11
atggattcgcaggccaactcgctgatcaacccagacgcccgcgcgggcctcgccagcccggcgcccggcgccgccgcggccgccgcgttgccgggcgcgggtggcgcaggcgcggacttcgggcttggcggcttcgcggaacgcatccccggcatctcgcggatgaagggcaacccgaagctgccgttcctgatcgccgtcgcattcgcggtcgccgtcatcaccgcgctcgtgctgtggagccgtgcgcccgactaccgcgtgctgtacagcaacctgtcggatcgcgacggcggcgcaatcattgccgcgctccagcaggcaaacgttccctacaagttcgccgatgccggcggcgcgatcctcgtgccgtcgaaccaggtgcatgaaacgcgcctgaagctcgccgcgatggggctgccgaaaggcggctcggtcggcttcgagctgatggacaaccagaaattcggcatcagccagttcgccgagcagatcaactaccagcgcgcgctcgaaggcgagctgcagcgcaccatcgaatcgatcaacgccgtgcgcggcgcgcgcgtgcatctcgcgatcccgaaaccgtcggtgttcgtgcgcgacaaggaagcgccgagcgcgtcggtgttcgtcgacctctacccgggccgcgtgctcgacgagggccaggttcaggcaatcacgcggatggtgtcgtccggcgtgcccgacatgcccgcgaagaacgtgacgatcgtcgaccaggacggcaacctgctgacccagaccgcgtcggcatccggcctcgacgcgagccagctcaagtatgtacagcaggtcgagcacaacacgcagaagcgcatcgacgcgatcctcgcgccgatcttcggcacgggcaacgcgcgctcgcaggtcagcgcggacctcgatttctcgaagatcgagcagacgtcggaaagctacggcccgaacggcaatccgcagcaatccgcgatccgcagccagcagaccagcagcgcgaccgaactcgcgcagggcggcgcgtcgggcgtgccgggcgcgctgtcgaacacgccgccgcaaccggcttccgcgccgatcgtcgccggcaacggccagaacgcgccgcagacaaccccggtgagcgaccgcaaggaccagacgaccaactacgaagtcgacaagacgatccgccatctcgagcagccgatgggcagcgtgaagcggctgtcggtcgcggtcgtcgtcaactaccagccggtcgccgacgcgaagggccacgtgacgatgcagccgctgccgcccgcgaagctcgcgcaggtcgaacagctcgtgaaggatgcgatgggctacgacgagaagcgcggcgactcggtgaacgtcgtgaacagcgcgttctcgaccgtgagcgacccgtacgccgacctgccgtggtggcgccagccggacatgatcgcgatggcgaaggaagcggcgaagtggctcggcatcgctgcggccgccgcggcgctctacttcatgttcgtgcgcccggcgatgcgccgtgcgttcccgccgcccgagccggtcgcaccggcgctcgcggcaccggaagattccgtcgcgctcgacggcctgccgggaccggagaagtccgaggagcccgacgcgctgctgctcgggttcgaaagcgaaaagaaccgttacgaacgcaacctcgactacgcgcgcacgatcgcccgccaggatccgaagatcgtcgccaccgtcgtgaagaactgggtgtccgatgaacgctga

SEQ ID NO: 134891 - protein, 587 aa, Burkholderia sp. 383
MDSQANSLINPDARAGLASPAPGAAAAAALPGAGGAGADFGLGGFAERIPGISRMKGNPKLPFLIAVAFAVAVITALVLWSRAPDYRVLYSNLSDRDGGAIIAALQQANVPYKFADAGGAILVPSNQVHETRLKLAAMGLPKGGSVGFELMDNQKFGISQFAEQINYQRALEGELQRTIESINAVRGARVHLAIPKPSVFVRDKEAPSASVFVDLYPGRVLDEGQVQAITRMVSSGVPDMPAKNVTIVDQDGNLLTQTASASGLDASQLKYVQQVEHNTQKRIDAILAPIFGTGNARSQVSADLDFSKIEQTSESYGPNGNPQQSAIRSQQTSSATELAQGGASGVPGALSNTPPQPASAPIVAGNGQNAPQTTPVSDRKDQTTNYEVDKTIRHLEQPMGSVKRLSVAVVVNYQPVADAKGHVTMQPLPPAKLAQVEQLVKDAMGYDEKRGDSVNVVNSAFSTVSDPYADLPWWRQPDMIAMAKEAAKWLGIAAAAAALYFMFVRPAMRRAFPPPEPVAPALAAPEDSVALDGLPGPEKSEEPDALLLGFESEKNRYERNLDYARTIARQDPKIVATVVKNWVSDER

SEQ ID NO: 134892 - DNA, 1671 bp, Saccharophagus degradans 2-40
  CDS (1)..(1671): transl_table=11
atggcccaagcgcccgcgcatacaagcactaacgatctaatagatgggtttaacaacctaaacattattcgccaagccggtttaatggtagggcttgcggcaagtgtggctattggttttgcggttgtactttggagtcaaggggaagattacaaaccgctatatggtagtttggatcgattagattcttctgaagtaggcgcgattttagattttaacgagattccctacaaaatagatggctcgaccggtgcgctgctagtggcggtggatgaagtgcatagagcgcgcttggtgttagcagaaaatggcattcaaggtgataactcaacgggttacgagttactcgaccaagagcaaccgttaggtacaagtcaatttatggaagcaacgcgctacaagcgcggcatagaaggtgaattggctcgaactattgccagcataaattcggtacgcggtgcacgtgtacacctagcaattccaaagcgctctgtatttgtaggggatggtcgcaagcctagcgcgtcggtatttttagatttatacccaggcaggcccatcaaaccaaaacaaattcaaggtattgctaatttggtagctagcagtattccagagttgcaagtagagaatgttaccgttgtagatcaaaagggcaacctacttactacaggtattgcagaagacaaagacttacttattgccgggcaacatttggaatatacgcaaaaagtagaagacggcatgataatgcgcgtacgtcgtttgctgtcgccaatattaggcgatcagaactttaaaaccgaagttgcagccgatattgattttactgaaatagaacaagccgaagaagtatttaaccccgacttacccgctgtgcgcagcgagcaaaccgtcgaagaacagcgtattggcagtggcgcgcctggcggcattcctggtgcccttaccaatcaaccacccgcagatgggcaggcgccagagcaagctgggcagggcggcgaaggtgcaggtggtcaacccagtaatactcgctcgcaggccgtgcgtaattacgagctagatagaacggttagctataccaagcgtgagaaaggtcgcttgcgcaggttaacggttgctgtagtaatagacgataaaaaaacaattaaccccgaaactggcgccgtagagcgcacccagtggacacagcaagaactagaacgcttcgctatacttgtaagagatgcagtgggttactctgctgtgcggggtgacagtgtcaatatactcaacgaagcgtttttacccgagccggccatcgaggtattggacgacctaccgttttggcagaacgaaagtattttaaagctaattaaacccatagccggcgcattaattattgtagcgttgttggtggggttagtacgcccagtgcttaaaagcttggctgtggcgggagtaaaaacaagagagcaagacgaagcgaaagaaatggccgcattgcaagctgcaggtatggatggttttgactcgctttcggatgaaacggttaccctcaccggtggggatgcacttgcactacccagcccagaagaagggtacgaacagcagcttaatgctgtgaaggggctagtggcagaagatgctggtcgtgtggcacaagtaattaaacgatggataaatgaagaatga

SEQ ID NO: 134893 - protein, 556 aa, Saccharophagus degradans 2-40
MAQAPAHTSTNDLIDGFNNLNIIRQAGLMVGLAASVAIGFAVVLWSQGEDYKPLYGSLDRLDSSEVGAILDFNEIPYKIDGSTGALLVAVDEVHRARLVLAENGIQGDNSTGYELLDQEQPLGTSQFMEATRYKRGIEGELARTIASINSVRGARVHLAIPKRSVFVGDGRKPSASVFLDLYPGRPIKPKQIQGIANLVASSIPELQVENVTVVDQKGNLLTTGIAEDKDLLIAGQHLEYTQKVEDGMIMRVRRLLSPILGDQNFKTEVAADIDFTEIEQAEEVFNPDLPAVRSEQTVEEQRIGSGAPGGIPGALTNQPPADGQAPEQAGQGGEGAGGQPSNTRSQAVRNYELDRTVSYTKREKGRLRRLTVAVVIDDKKTINPETGAVERTQWTQQELERFAILVRDAVGYSAVRGDSVNILNEAFLPEPAIEVLDDLPFWQNESILKLIKPIAGALIIVALLVGLVRPVLKSLAVAGVKTREQDEAKEMAALQAAGMDGFDSLSDETVTLTGGDALALPSPEEGYEQQLNAVKGLVAEDAGRVAQVIKRWINEE

SEQ ID NO: 134894 - DNA, 1761 bp, Methylobacillus flagellatus KT
  CDS (1)..(1761): transl_table=11
atggcagcagccaatgaagcggccctggccgccgataccacgaccgaagcaccagcccccggctcattcaacttcaagtccctcttggagaacaagctgctgctggccttgggcgctgctgctgtcattgcattgatggtggtgttctggctctggagccagaagccggaataccgcgtattgttctccagctattccgacaaggatggtggtgccattgtggctgcattggaacagatgaatgtaccgtacaggattgccgatggtggtagcgccattctggttccggccaatcatgtccatgacgtcagactaaggctggcatcgcaaggcctgcccaagggcggaaatatcggtttcgagttgttggagaaccagaaattcggcgtttcccagtttgtggagcaagtgaatttccagcgcggcctggagggtgagctggaacgcactatccagtcaattggcgcggtgcaggcggctcgcatccacctggccatgccgaagcctaccgtgttcacgcgtgaccagcaaaagccaacggcatccgtgatgctcaacctgcatcctggtcgcgccctggatcagcgccaggtgagcgctatcgtgcacctggtggccagtagtgttcccgagctgccgacctccaatgtgacggtagttgaccagaatggcaacctgctctccgacaatggcaaggatgcgggcaatcattatcaactagatcccacgcagctgaagtatgtcgatgaattgcagcaaaacatcgcgcgccgggttgagtccatcattgcaccgctggttggcgccaagaacgtacatgcggaagccagtgccgaagtggatttttccatggtggagcaggctgccgaaatctacaaacccaaccaggcgccagacagcgccgctattcgcagcagccagaccaatgaatcgcagacattgccagggcagggagtgggcggggtgcccggtgccttgaccaaccagccgccggcaccagcgactgcccccatcgtggcgcctggtactgagcccaccaccacgaccaatgccaacgtggtgacgaccacgacgacaacgccgcctggtacgacagtgacgacgccagtcatgaactcggagcgcaataccaccaccaattatgaagtggacaagaccatccgctaccagcagcagcccatgggcggtatcaagcggctgaccgtggccgtggtggtgaatcataagcaggaagtggatgcgcaaggtaaagtgatcacgcgcccgctgaccgacgacgagaaaacccagatcagcgaccttgccaagcaggctatgggattcaatgaagagcgcggcgattcgctgagcgtggtcaacggctctttcatgccggagatcgcggaagcattccctgaggtgccgctatggaaagacccggacaatatcgagatggccaaggagtggctgaagaatggcctggttctgctggtactgtatatgctataccgccgcttcctgcgcccattgctgcgcaagctctcgccggaagaagaaaagaagggcgaactcgccgagctggatgaagaagatcaggatgccatcgtcagcctctccgagggggaaggtggcatgacaggggaggaggccggggaagaggaaggcggagctccggcagagcgtacctatcagaagaatctggaatccgcgcgcaagctagccaaggaaaaccccaaggtagtggccagcattgtgacaaattgggtgaacagcaatgagtga

SEQ ID NO: 134895 - protein, 586 aa, Methylobacillus flagellatus KT
MAAANEAALAADTTTEAPAPGSFNFKSLLENKLLLALGAAAVIALMVVFWLWSQKPEYRVLFSSYSDKDGGAIVAALEQMNVPYRIADGGSAILVPANHVHDVRLRLASQGLPKGGNIGFELLENQKFGVSQFVEQVNFQRGLEGELERTIQSIGAVQAARIHLAMPKPTVFTRDQQKPTASVMLNLHPGRALDQRQVSAIVHLVASSVPELPTSNVTVVDQNGNLLSDNGKDAGNHYQLDPTQLKYVDELQQNIARRVESIIAPLVGAKNVHAEASAEVDFSMVEQAAEIYKPNQAPDSAAIRSSQTNESQTLPGQGVGGVPGALTNQPPAPATAPIVAPGTEPTTTTNANVVTTTTTTPPGTTVTTPVMNSERNTTTNYEVDKTIRYQQQPMGGIKRLTVAVVVNHKQEVDAQGKVITRPLTDDEKTQISDLAKQAMGFNEERGDSLSVVNGSFMPEIAEAFPEVPLWKDPDNIEMAKEWLKNGLVLLVLYMLYRRFLRPLLRKLSPEEEKKGELAELDEEDQDAIVSLSEGEGGMTGEEAGEEEGGAPAERTYQKNLESARKLAKENPKVVASIVTNWVNSNE

SEQ ID NO: 134896 - DNA, 1692 bp, Ralstonia metallidurans CH34
  CDS (1)..(1692): transl_table=11
atgaacgcgaccgcaaccctgccgaacggcacggccctgctcgaaaaggtcaaggccaacccgcgcctgcccatgatgctgggcggcgccgcgctggtcgccgctatcgccgtgggtgtgatgtggtcccgcgcgccggactacaaggtgctctattccaatctgtcggagcgtgacggcggtgccgtgatccagtcgctccagcagatgaacgtgccctacaagttcgccgaaggtggtggtgcggtcatggtgccggccgacaaggtggccgagacgcgcctgcgcctggccagccagggcctgccgaaaagcggcacgaccggcatggaactgatggacaaccagaagttcggcatcagccagttcgccgaacaggtcaactatcaacgcgggctggaaggcgaactggcccgttcgatcgaatcgatcggcgcggtgcagtcggcccgcgtgcacctggcgattcccaagcccacgctgttcgtacgtgagcgccagaagcccaccgcctccgtggtgctgcaactctacccggggcgcgccgtcgatgaaggccaggtggccgcgatcacgcacctggtgtcttccagcgtgccagaactgacgccgaagtcgatctcgatcgtcgaccagcagggcaacctgctgtccggcaccaacgatcgttcgctcgatgccagccagctcaagtacgtccaacaggtcgagcagggctacgtcaagcgcgtggagtcgatcctcgcgccgatcctcggcaaggacaacatccacgcccaggtcacggccgatgtcgatttctcgtcggtcgaacataccgacgaaagctacaagccgaaccaggacccgaccaaggccgcgatccgcagccagcagaccagcgaatcgaactcgcagggtggcacgcctgtaggtggcgtgcccggcgcgctgtcgaaccagccgccagccgccgccgccgcgccggtcaccacgccgcaaccgccgcgccagcccggccagccgaatccgcccgcacaggccaaccagcccgcgcagacgacccagacgacccagacggccgagaagaccggcccgagcaacagccgccgcgactccaccaccaactacgaactcgaccgcgtggtgcgccacgtgcagcaggcagcaggcggtgtgaaacgtctgtcggtggccgtggtggtgaactaccgcaccaaggtcgatgccaagggcaagccggtgacggaagcgctgtcggccaaggaactggcccagatcgaaaacctgaccaaggaagcgatgggcttctccgccgaccgcggcgactcgctgaacgtggtcaacagcccgttcacgagcgacatcaagacggagccggaagtgccggtgtggaagcagccgcagatgatcgacctggccaagaccggcgtcggctacctgctgctggccctgctggccgtgttcctgtggttcaaggtcgcgcgtccggtgctgcgcaagtacaccgcgccgccgttgcccgcgcctaccgagacggcagccgccaccgaagccgttctgctgccgccggaagaagaaaccaatccggaagtgctgcgcctggccgcgaaatatgaaagcgatctcgccctggtgcgcgacgccgcgcaacgcgacccgcgcctggtcgccagcgtaatcaagacttggatggcaaatgacgaaggctaa

SEQ ID NO: 134897 - protein, 563 aa, Ralstonia metallidurans CH34
MNATATLPNGTALLEKVKANPRLPMMLGGAALVAAIAVGVMWSRAPDYKVLYSNLSERDGGAVIQSLQQMNVPYKFAEGGGAVMVPADKVAETRLRLASQGLPKSGTTGMELMDNQKFGISQFAEQVNYQRGLEGELARSIESIGAVQSARVHLAIPKPTLFVRERQKPTASVVLQLYPGRAVDEGQVAAITHLVSSSVPELTPKSISIVDQQGNLLSGTNDRSLDASQLKYVQQVEQGYVKRVESILAPILGKDNIHAQVTADVDFSSVEHTDESYKPNQDPTKAAIRSQQTSESNSQGGTPVGGVPGALSNQPPAAAAAPVTTPQPPRQPGQPNPPAQANQPAQTTQTTQTAEKTGPSNSRRDSTTNYELDRVVRHVQQAAGGVKRLSVAVVVNYRTKVDAKGKPVTEALSAKELAQIENLTKEAMGFSADRGDSLNVVNSPFTSDIKTEPEVPVWKQPQMIDLAKTGVGYLLLALLAVFLWFKVARPVLRKYTAPPLPAPTETAAATEAVLLPPEEETNPEVLRLAAKYESDLALVRDAAQRDPRLVASVIKTWMANDEG

SEQ ID NO: 134898 - DNA, 1743 bp, Alkalilimnicola ehrlichei MLHE-1
  CDS (1)..(1743): transl_table=11
atggctgaggcaagccaggcattgacggagagtgagggcggcggccgcgccatcgccgagcgcggtagtgcggggcgcaccggtgcgggcaccgccggtcgcattccgggcatggaccaattggagggcctcttcggcggccggcagaacgtgatgcgcctggggctggcggtggtgctactgttcaccgtggccgccggggtgttgctgtacctctgggcgcaggagcccagctaccgcaccctgttcagcgagctggacgatcaggacgccgccgccgtcatcgagcagttggaggagcagggcatcccctaccgcctggatgagcgtacgggagccgtgcgggtgccctcggatcaggtccacccggcccggctgcagttggccgccgaggggctgccccggggcaccggctttggtttcgagatgctgcaggaggactccgccttcggcaccagtgagttcatggaaggggcccggttcgaccgcgccctggagaccgaactggcccgttccatcggcaccctgcgccaggtggacgccgcccgcgtccacctggccctgccccgcgagtcggtcttcgtccgcgaccgccggcagccgagggcctcggtggtggtcaacctggctcagggccggcggctgaacgatgagcaggtggacgccatcgtccacatggtggccagcagcgtgccggatttggcccacgagaacgtgagcgtggtggatgagcgcggccgcctgctcacccgcgacgagggccgcgggctggccagcaccgccggtcagttccagtacaagacccaggtggaagagacctacgtccgtcgtatcgaggacctgctggcgcccctcgttggccgcaaccgggtccgggcccaggtcaacgccagcctggacttctccgagcagcagcgcaccgaggagctctacgacccggacagccgggtgatccgcagcgaggccctgcagggccgccgcacccagcagggggccgacgcggccatgggcgtgcccggcgcgctcaccaaccagcccccgggggccgggcagttggacggcgaggaggcgccggagaacccgccgccggtggacatcagctcctccgagacccgcaactacgagatcagccgcaccctgcgccaggtccgcgaccccatcggcagcatccagcgggtgtcggtggcggtggtggtggacgagcgcatcaccaccgacgaggagggcaacacagtgcgcgaaccgttgtcggacgaggagatggaccgtatcaacgccctggtgcaggaagccgtgggcttcgatgccgcgcgcggtgacagcgtcaatgtggtcaacgccgccttcttggaagaggagccggtggaggcgatgccgccggtgccgctgctggagcgcgagtgggtccgcgagctgatccgctttgccattgccgcattggccttcatcgccctgctgctgttcgtggtgcggccgatgatcaagggcatgcagcgtcagcgcgaccaggcgctgcgcgcgcctgcctcggaggagcaggcacgcctggcccagcagggcggtggcgggggcgcggcgcagctcgccgggccggacgccaacgaacaggcactgctggcgggcgttcagcacaagccctacgaggccaaactggaggccgccaagaagctggtgaatgacgagccggagctggcggcgaacgtgatcaagtcctggctggcggaagacgatggcaaacgatag

SEQ ID NO: 134899 - protein, 580 aa, Alkalilimnicola ehrlichei MLHE-1
MAEASQALTESEGGGRAIAERGSAGRTGAGTAGRIPGMDQLEGLFGGRQNVMRLGLAVVLLFTVAAGVLLYLWAQEPSYRTLFSELDDQDAAAVIEQLEEQGIPYRLDERTGAVRVPSDQVHPARLQLAAEGLPRGTGFGFEMLQEDSAFGTSEFMEGARFDRALETELARSIGTLRQVDAARVHLALPRESVFVRDRRQPRASVVVNLAQGRRLNDEQVDAIVHMVASSVPDLAHENVSVVDERGRLLTRDEGRGLASTAGQFQYKTQVEETYVRRIEDLLAPLVGRNRVRAQVNASLDFSEQQRTEELYDPDSRVIRSEALQGRRTQQGADAAMGVPGALTNQPPGAGQLDGEEAPENPPPVDISSSETRNYEISRTLRQVRDPIGSIQRVSVAVVVDERITTDEEGNTVREPLSDEEMDRINALVQEAVGFDAARGDSVNVVNAAFLEEEPVEAMPPVPLLEREWVRELIRFAIAALAFIALLLFVVRPMIKGMQRQRDQALRAPASEEQARLAQQGGGGGAAQLAGPDANEQALLAGVQHKPYEAKLEAAKKLVNDEPELAANVIKSWLAEDDGKR

SEQ ID NO: 134900 - DNA, 1689 bp, Azoarcus sp. BH72
  CDS (1)..(1689): transl_table=11
atggccaccgcagacaacatcgccgccgccgtaccgaacgccgcgcttgccgcgcgtctgcagcaggtggtgcagaacatcaacgcgctgtcgatgcggcagaagatcgcgggcgcggccgcgctcgcgctcgccgtcgcgctgatcgtgggcgcgctgatgtggaaccgccagcccgactacggcgtgctgttctccaatctggacgaacgcgacggcggccaggtgatcgcggccctgcagcagcagaacgtgccctaccgcatgtcgcccaacggcctgtccatcctggtgccgcaggaacaggtgcacgaactgcggctgcggctggctgccgcgggcctgccgcgcgggggcctggtcggcttcgagctgatggacacccagaagctgggcgtgtcgcagttcaacgagcaggtgaactaccaacgcgcgctcgaaggcgagctgtcgcgcaccatccagtcgatcgccgcggtggcggcggcgcgggtgcatctggcgatgcccaagcagaccgctttcctgcgcgacgaccagaagcccaccgcttcggtgatggtgacgctgcggcccggccgcgtgctcgacgccaaccaggtcgccggcatcgtgcatctggtgtcgtccagcgtgccgcgcatggtggaatccggcgtcaacatcatcgaccagaacggcgagctgctgaccaccaagaacgacccgctgcgccagaccgggctggacgccacccagctcgaatacgtgaaggaggtcgaagcgggcttcatccgccgcatcgagaacatcctgcagcccatggtgggcaagaacaatttccgcgcccaggtggcggcggacgtggacttcaaccaggtcgagcagaccgcggaaaccttcaagcccaatccctcgccggaccaggccatccgcagccagcagaccaccgaggagaccaaccgccagccgggtccgcaaggcgtgccgggcgcgctcagcaaccagccgccggtgccggccaccgcgccgatcaccacgccgccggtgggccccaaccaggccggcgcggcgcagaccggcaccaccagccgcagcgcggtgctcaactacgaggtcgaccgcaccatccagcacgtcaaacagtcgctcggccagttgaagcggctgtcggtggcggtggtggtgaaccatcgcaccgaaaccctgcccaacggacagacccagacggtgccgctgaccgacgaggaagtcgcccgcatcaacaacctggtgcgcgaggcggtgggctacaaccccgcgcgcggcgacaccatcaacgtcgcctccagcccgttcgccggcatcggccccgaacccgcggtgccgctgtggaaagacccggagatgatcgaactgggcaaggagggcttcaagtacctgctggtggcgctggcggtgctgttcgcctactttgcgatcatccggccgctgatgcgcacggtgatgccgccgccgcccgaacccgaggtggccgaagcgggcgaacccggcgaaccgggcttcgaaggagaagaagacgtggaagtcacgctgtcgggcgcggcccaggccaacacctacgaagccaagctggcgcgggcgcgcgagctggcgaaggaagacccgaagatggtcgccaacctcatccgtgaatggatgggcctcaacgaagagggccgcaagtcatga

SEQ ID NO: 134901 - protein, 562 aa, Azoarcus sp. BH72
MATADNIAAAVPNAALAARLQQVVQNINALSMRQKIAGAAALALAVALIVGALMWNRQPDYGVLFSNLDERDGGQVIAALQQQNVPYRMSPNGLSILVPQEQVHELRLRLAAAGLPRGGLVGFELMDTQKLGVSQFNEQVNYQRALEGELSRTIQSIAAVAAARVHLAMPKQTAFLRDDQKPTASVMVTLRPGRVLDANQVAGIVHLVSSSVPRMVESGVNIIDQNGELLTTKNDPLRQTGLDATQLEYVKEVEAGFIRRIENILQPMVGKNNFRAQVAADVDFNQVEQTAETFKPNPSPDQAIRSQQTTEETNRQPGPQGVPGALSNQPPVPATAPITTPPVGPNQAGAAQTGTTSRSAVLNYEVDRTIQHVKQSLGQLKRLSVAVVVNHRTETLPNGQTQTVPLTDEEVARINNLVREAVGYNPARGDTINVASSPFAGIGPEPAVPLWKDPEMIELGKEGFKYLLVALAVLFAYFAIIRPLMRTVMPPPPEPEVAEAGEPGEPGFEGEEDVEVTLSGAAQANTYEAKLARARELAKEDPKMVANLIREWMGLNEEGRKS

SEQ ID NO: 134902 - DNA, 1665 bp, Oceanospirillum sp. MED92
  CDS (1)..(1665): transl_table=11
gtggctgataacgctgatgctctgactggtaatccaatgcttggcttcaataagctaagtattgtgagacagattggcctaatggtaggtcttgcggcaagtgtcgcgattggctttgcagtagtattgtggtcacaaaagcccgagcagcgagttctgtttagtaacctgactttttccgatgcgaaccagattattgaacaactgcgcctttataatgttccttacacgttcgatgctgatggtcgggcgattttggtgcctgatgagcatgttcatcaagcgcgtttaaagctggctgctgaagggtttacttcagataagaccgtaggttttgaaattcttgatcgtgagcaaagcctgggtactagtcagtttatggaaacgacaaagtatcgtcgtggtttggagggggagcttgccagaacgatctccagtatgacctctgttaggaatgcgcgtgtccacctggctattccaaaagataccgtatttattcgtgatacccgtaagccaacggcatcggtttttcttgagctgttttctggtcgaaagcttgagcgagatcaggtggcttccatcgccaaccttgtcgcttccagtattcctgccttagatgtcaaagatgtcacggttgtagatcagcgcgggcgtttgctgaatatgcgtgataaagatgtggatgttgtcctcgccgcgaagcagctggaatacacgcgaagtattgaagatactttgttaaatcgtgttaacagtatccttcagcctgttgttggtatggggcgcttccgtgctgaggtttccgctgatgtagattttacttccgtagagcaaacagacgaactttataatcccgaccttccggcgcttcgtagtgaacaaacgatggatgagtcgcgtgtcggtaatggcgcaccagtaggcattccaggtgcactttcaaaccagccgcctgggcaaagcagtgtgccagaacaggcttcgggcgaaggtgtaatagcaggtaacggtcagcctggttctagccgtaagcaggcaacacgtaattttgagcttgatcgtactatcagctacaccaaacatcagcaaggccgagtgcgccgtttaacagtagcggtagtagtggatgatctggcgagcgtaaatgctgaaacaggtgaaacctcgcgtacgccttgggatcagaatgagctggagcgactgagaattctggttcaggatgcggtaggtttctctacgctgcgtggcgatagcgttaatgtggtaaatacaccgttcgcggctgaagagcctattgttaccgaagagattccgctctggaagcaggagtgggttatggatgtcatgaagcaggtgatggccgcgatatttgtattggttctcgtcttcggtatccttcgtccaattttgcgtaacctggctgcggcgggcacagcgggtaatgttgctggccttggtgctgcaggtgaggtctctgctgaacttgagggtttggaaggtggagatttctcagcggattctgtgacattcggtagtgatgacggtctgttacctacgcctaatgaaagttttgattatcagctaaacgcgattcgtagtatggttgcggaagatcctgcgcgggtggcgcaggctgtgaagcaatgggtaggtgacgatgagtga

SEQ ID NO: 134903 - protein, 554 aa, Oceanospirillum sp. MED92
MADNADALTGNPMLGFNKLSIVRQIGLMVGLAASVAIGFAVVLWSQKPEQRVLFSNLTFSDANQIIEQLRLYNVPYTFDADGRAILVPDEHVHQARLKLAAEGFTSDKTVGFEILDREQSLGTSQFMETTKYRRGLEGELARTISSMTSVRNARVHLAIPKDTVFIRDTRKPTASVFLELFSGRKLERDQVASIANLVASSIPALDVKDVTVVDQRGRLLNMRDKDVDVVLAAKQLEYTRSIEDTLLNRVNSILQPVVGMGRFRAEVSADVDFTSVEQTDELYNPDLPALRSEQTMDESRVGNGAPVGIPGALSNQPPGQSSVPEQASGEGVIAGNGQPGSSRKQATRNFELDRTISYTKHQQGRVRRLTVAVVVDDLASVNAETGETSRTPWDQNELERLRILVQDAVGFSTLRGDSVNVVNTPFAAEEPIVTEEIPLWKQEWVMDVMKQVMAAIFVLVLVFGILRPILRNLAAAGTAGNVAGLGAAGEVSAELEGLEGGDFSADSVTFGSDDGLLPTPNESFDYQLNAIRSMVAEDPARVAQAVKQWVGDDE

SEQ ID NO: 134904 - DNA, 1779 bp, Pseudomonas putida GB-1
  CDS (1)..(1779): transl_table=11
atggctgaagcagtcgtcgaaaacgcccccgccaaggctggctcgccagcggccaagccgccgttgtttggcatggcgtttctggaaaacatctcgcagatgcccatgctgcgccagattggcctcatggttggtctggcggccagcgtggccattggctttgccgtggtgctgtggtcgcaacagcccgattaccgtccgttgtacggcagcctgtcgggcatggacaccaagcaggtcatggataccctggccgctgcagacatcccctacaacgtggagcccaactcgggtgctctgctggtcaaggccgacgacctctcccgtgcgcgcctgaaactggcagccgccggcgtagcgccaagcgacggtaatgtcggtttcgaactgctcgacaaggagcagggcctgggcaccagccagttcatggaggccactcgctaccgccgcagcctcgaaggcgaactggcgcgcactgtttccagcctgaacaacgtcaaggccgcgcgcgtgcacctggctatcccgaaaagctcggtgttcgtgcgtgatgagcgcaagcccagcgcttcggtactggtcgagttgtacccggggcgcgccttggaagccgggcaggtgatggccatcgtcaacctggtagccaccagtgtgccggaactggacaaatcccaggtcaccgtcgtcgaccagaagggcaacctgctgtccgagcagatccaggattcatcactgacccaagccggcaagcagttcgactacagccgccgggtagagagcatgctcacccagcgtgtgcacaacatcctgcagccggtgctgggcaacgaccgttacaaggccgaagtgtccgccgacctcgacttcagcgcggtcgagtccacctccgaacagttcaatcccgaccagccggcactgcgcagcgagcagtcggtcgatgaacaacgtgccagcagccaaggcccgcaaggcgtgccaggcgcgctgagcaaccagccgccgggcgccgcgtcggcaccgcaaaccaccggtggcgctgccacgccagcttcggccattcagccgggccagccgctggtcgatgccaacggccagcagatcatggacccagccaccggccagccgatgctcgcgccgtacccgtcagataaacgtcagcaaagcaccaagaacttcgaactggaccgttccatcagccatacccgccagcagcaaggccgcatgacccgtctgtcggtggcggtggtggtggacgatcaggtcaagctcgaccctgccacgggtgacgccacccgtgcgccgtgggctgccgaggacctggcgcgctttacccgcctggtgcaggacgccgtcggcttcgatgccagccgtggcgacagcgtgacggtgatcaacgtgccgttcgccgccgaccgtggcgaggaaatcgccgacatcgccttctaccagcagccgtggttctgggacatcgtcaagcaggtgctgggtgtggtgttcatcctggtgctggtgttcggtgtgctgcggccggtgctcaacaatattacagggggcggcaagcaggctgcctcggatagcgacatggagctgggcggcatgatgggtctggatggcgagttggccaacgaccgcgtcagcctgggtggcccgacaagcattctgctgcctagcccgagcgagggttacgaggcacagctcaacgcaatcaaaggcctggtggccgaagacccgggccgtgtcgcccaggtcgtgaaagactggatcaacgccgatgagtga

SEQ ID NO: 134905 - protein, 592 aa, Pseudomonas putida GB-1
MAEAVVENAPAKAGSPAAKPPLFGMAFLENISQMPMLRQIGLMVGLAASVAIGFAVVLWSQQPDYRPLYGSLSGMDTKQVMDTLAAADIPYNVEPNSGALLVKADDLSRARLKLAAAGVAPSDGNVGFELLDKEQGLGTSQFMEATRYRRSLEGELARTVSSLNNVKAARVHLAIPKSSVFVRDERKPSASVLVELYPGRALEAGQVMAIVNLVATSVPELDKSQVTVVDQKGNLLSEQIQDSSLTQAGKQFDYSRRVESMLTQRVHNILQPVLGNDRYKAEVSADLDFSAVESTSEQFNPDQPALRSEQSVDEQRASSQGPQGVPGALSNQPPGAASAPQTTGGAATPASAIQPGQPLVDANGQQIMDPATGQPMLAPYPSDKRQQSTKNFELDRSISHTRQQQGRMTRLSVAVVVDDQVKLDPATGDATRAPWAAEDLARFTRLVQDAVGFDASRGDSVTVINVPFAADRGEEIADIAFYQQPWFWDIVKQVLGVVFILVLVFGVLRPVLNNITGGGKQAASDSDMELGGMMGLDGELANDRVSLGGPTSILLPSPSEGYEAQLNAIKGLVAEDPGRVAQVVKDWINADE

SEQ ID NO: 134906 - DNA, 1638 bp, Xanthomonas maltophilia
  CDS (1)..(1638): transl_table=11
atggcactgacgctctccaaggacagcctgaacgccgaaaaggccgggcaatggttcgaccgcctgcagagcctgcagatcacccgtcggctgggcctgatggcgatgatcgcggtggcggtggtgtccgtgttcttctggtcgcagaagccgggcatggtcccgctgtacaccggcctggaccagaaggcgaccgctgaagcgaccgacctgctgcgcgccgcgcagattccgttcgcactcgacccggccaccggtggcatcaccgtgcctgaaaagaacctgcacgatgcccgcctgaagctggccggctcgggcctgaccgatagcggcaagctcggcttcgagctcatggaacgcgacccgggcttcggcgtcagccagttcgtggaaagcgcgcgttaccagcatgcgctggaaaccgagctgtcgcgcaccatcaacacgctgcgcccggtgcgcgattcgcgcgtgcacctggccattcccaagcccagcgccttcacccgccagcgtgacgtagccagtgcctcggtcaccctggaactgcgcggtggccagcagctggaacgcagccaggtggatgccatcgtgcacatggttgcggccagcatcccggatctcgcgccggagcgggtgaccgtggtcgaccagagtgggcgcatgctcagcatcacagacccgaacagcgaagcggcggtcaacgctgcccagttcgagcaggtgcgccgccaggaaacctcgttcaaccagcgcatccgcgagctgctggaaccgatgaccggccctggccgcgtcaacccggaagtgagcgtggacatggatttctcggtgaccgaggaggcccgcgagctctacaacggtgagccgcagaagctgcgcagcgagcagatgagcgagaacaccaccagcacccctggcccgcagggtgtgccgggtgccaccagcaacagcccgccgggccagcaggctgcaccggccaccgcgcagacgccgaccgaaagcagcaagaacgccacccgcaactacgagctggaccgcaccctgcagcacacccgccagccggcaggccgcatcaagcgcgtctcggtggcggtgctggtggacaacgtgccgcgcgccggcgccaacggcaagatgagcccgcagccgctgtcggccgccgaactgacccgcgtcgaagcgctggtcaagcaggccgtcggcttcaacgccgagcgtggcgataccgtgtcggtgatgaatgccccgttcgtgcgggataccacgccggtcgaagggccggcctggtgggaactgccgtgggtgcacgatgccggccgcatgctgctcggcgcggtggtggtgctggcgctgctgttcggtgtgctgcgcccggcactgcgtgcgatcaccggccagaacaggaagaacgatgaaccggcactggaaccgcataccgcggatgtgcagctggtcgatgacgatggcatgccgctgccggcgctgggcgccgaccgggccagcctggccggaccagacgcactggccctgccggtggattcttatgaggaacgactgcggatggcgcgtgaagccgtgaagaccgactccaagcgcgtggcccaggtggtcaagggctgggtggccaatgactga

SEQ ID NO: 134907 - protein, 545 aa, Xanthomonas maltophilia
MALTLSKDSLNAEKAGQWFDRLQSLQITRRLGLMAMIAVAVVSVFFWSQKPGMVPLYTGLDQKATAEATDLLRAAQIPFALDPATGGITVPEKNLHDARLKLAGSGLTDSGKLGFELMERDPGFGVSQFVESARYQHALETELSRTINTLRPVRDSRVHLAIPKPSAFTRQRDVASASVTLELRGGQQLERSQVDAIVHMVAASIPDLAPERVTVVDQSGRMLSITDPNSEAAVNAAQFEQVRRQETSFNQRIRELLEPMTGPGRVNPEVSVDMDFSVTEEARELYNGEPQKLRSEQMSENTTSTPGPQGVPGATSNSPPGQQAAPATAQTPTESSKNATRNYELDRTLQHTRQPAGRIKRVSVAVLVDNVPRAGANGKMSPQPLSAAELTRVEALVKQAVGFNAERGDTVSVMNAPFVRDTTPVEGPAWWELPWVHDAGRMLLGAVVVLALLFGVLRPALRAITGQNRKNDEPALEPHTADVQLVDDDGMPLPALGADRASLAGPDALALPVDSYEERLRMAREAVKTDSKRVAQVVKGWVAND

SEQ ID NO: 134908 - DNA, 1764 bp, Burkholderia cepacia
  CDS (1)..(1764): transl_table=11
atggattcgcaggccaactcgctgatcaacccagacgcccgcgcgggcctcagcccggcgcccggcgccgccgcggccgccgcgttgccgggcgcgggtggcgcaggcgcggacttcgggctgggcggcttcgcggaacgcattcccggcatctcgcggatgaagggcaacccgaagctgccgttcgtgatcgccgtcgcgttcgcgatcgccgcgatcaccgcgctcgtgctgtggagccgcgcgcccgactaccgcgtgctgtacagcaacctgtcggaccgcgacggcggcgcgatcatcgccgcgctccagcaggcaaacgttccctacaagttcgccgatgccggcggcgcgatcctcgtgccgtcgaaccaggtgcacgagacgcgcctgaagctcgccgcgatggggctgccgaagggcggctcggtcggcttcgagctgatggacaaccagaaattcggcatcagccagttcgccgagcagatcaactaccagcgcgcgctcgaaggcgagctgcagcgcaccatcgaatcgatcaacgccgtgcgcggcgcgcgcgtgcatctcgcgatcccgaagccgtcggtgttcgtgcgcgacaaggaagcgccgagcgcgtcggtgttcgtcgacctctacccgggccgcgtgctcgacgagggccaggtgcaggcgatcacgcggatggtgtcgtccggcgtgcccgacatgccggccaagaacgtgacgatcgtcgaccaggacggaaacctgctgacccagaccgcgtccgcttccggcctcgacgcgagccagctcaagtacgtgcagcaggtcgagcacaacacgcagaagcgcatcgacgcgatcctcgcgccgatcttcggcgccggcaacgcgcgctcgcaggtcagcgccgatctcgatttctcgaagatcgagcagacgtcggaaagctacggcccgaacggcacgccgcagcaagccgcgatccgcagccagcagaccagcagcgcgaccgagctcgcgcaggcggcgcgtcgggcgtgccgggcgcgctgtcgaacacgccgccgcagccggcctccgcgccgatcgtcgccgggcaacggccagaacgcgccgcagaccacgccggtcagcgaccgcaaggaccagacgaccaactacgagctcgacaagacgatccgccataccgaacagccgatgggcagcgtgaagcggctgtcggtcgcggtcgtcgtcaactaccagccggtcgccgacgcgaagggccacgtgacgatgcagccgctgccgcccgcgaagctcgcgcaggtcgagcagctcgtgaaggacgcgatgggctacgacgagaagcgcggcgactcggtgaacgtcgtgaacagcgcgttctcgaccgtgagcgacccgtacgccgacctgccgtggtggcgccagcccgacatgatcgcgatggcgaaggaagccgcgaagtggctcggcatcgcggcggctgcggcggcgctgtacttcatgttcgtgcgcccggcgatgcgccgcgcgttcccgccgcccgagccggccgcgccggcgctcgcggcgccggaagacgcggtcgcgctcgacggcctgcccgcgccggacaaggcggcggaggaaccggacccgctgctgctcggcttcgaaaacgagaagaaccgctacgaacgcaacctcgactatgcgcgcacgatcgcccgccaggatccgaagatcgtcgccaccgtcgtgaagaactgggtgtccgatgaacgctga

SEQ ID NO: 134909 - protein, 587 aa, Burkholderia cepacia
MDSQANSLINPDARAGLSPAPGAAAAAALPGAGGAGADFGLGGFAERIPGISRMKGNPKLPFVIAVAFAIAAITALVLWSRAPDYRVLYSNLSDRDGGAIIAALQQANVPYKFADAGGAILVPSNQVHETRLKLAAMGLPKGGSVGFELMDNQKFGISQFAEQINYQRALEGELQRTIESINAVRGARVHLAIPKPSVFVRDKEAPSASVFVDLYPGRVLDEGQVQAITRMVSSGVPDMPAKNVTIVDQDGNLLTQTASASGLDASQLKYVQQVEHNTQKRIDAILAPIFGAGNARSQVSADLDFSKIEQTSESYGPNGTPQQAAIRSQQTSSATELAQAARRACRARCRTRRRSRPPRRSSPGNGQNAPQTTPVSDRKDQTTNYELDKTIRHTEQPMGSVKRLSVAVVVNYQPVADAKGHVTMQPLPPAKLAQVEQLVKDAMGYDEKRGDSVNVVNSAFSTVSDPYADLPWWRQPDMIAMAKEAAKWLGIAAAAAALYFMFVRPAMRRAFPPPEPAAPALAAPEDAVALDGLPAPDKAAEEPDPLLLGFENEKNRYERNLDYARTIARQDPKIVATVVKNWVSDER

SEQ ID NO: 134910 - DNA, 2755 bp, Salmonella typhimurium
  CDS (61)..(1743): transl_table=11
ggagtgagtcttgttccactttgcaaaaaacgccgtccacgatcagtcacgaggtgcgagatgagtgcgactgcatcgactgcaacccaacctaaacctctcgagtggcttaatcgcctacgcgcgaatccccgaattccgttaattgtggcgggttccgctgccgtggcgatcgtcgttgcgatggtgctgtgggccaaaacgcccgattaccgcacgctatttagcaacctttccgatcaggacggcggcgcgatcgtcgcgcagttgacccagatgaatatcccctatcgctttgccaatggcagcggcgcgattgaagtgcccgccgacaaagtgcatgaactgcgtctgcgtctggcgcagcaggggctgcctaaaggcggcgcggtaggctttgaactgcttgatcaggaaaaattcggtatcagccagttcagcgagcaggtgaattatcagcgcgcgctggaaggtgaactggcccggacgatcgagacgctggggccggtaaaaagcgcccgcgttcacctggcgatgccaaagccgtcgctatttgtgcgggaacaaaaatccccttccgcctccgtcaccgtcacactggaaccgggacgggcgctggatgaaggacaaattagcgccgtggtacatctggtttccagcgctgtcgccggtttgccgccaggaaacgtcactctggtcgatcaatccggtcatctgctcacgcaatccaataccagcggtcgcgaccttaatgacgcgcaattaaaatttgctaatgatgtggaaagccgtatccaacgccgtatcgaagccattctgtcgcctatcgtcgggaacggtaatgttcacgctcaggtaaccgcccagttggattttgccaataaagagcagacggaagagcactacagcccgaacggcgatgcgtcgaaggccactctgcgttcacgtcagttgaatattagcgaacaggtaggcgcgggctatcccggcggcgtgcctggcgcgctgtcgaaccaaccagcgccgcctaacgaggcgccgatcgccacgccgccgaccaatcaacaaaacgcgcagaatacgccacaaaccagcaccagtaccaacagtaacagtgctggcccgcgtagtacacagcgtaatgaaaccagtaactacgaagtggaccgcaccattcgtcacaccaaaatgaatgtgggcgatattgagcgtctctccgtggccgtcgtggtgaattacaaaacgctggcggatggcaaaccgctgccattgaccgccgatcagatgaaacagatcgaggatttaacccgtgaagcgatgggtttttctgataaacgcggcgatacgctaaatgtggtgaattcaccgtttagcgcagtggataacaccggcggcgaactgcccttctggcaacagcagtcctttatcgatcagttgctcgcggcaggtcgctggttgctggtgctggtggtggcctggattctgtggcgcaaagcggtacgtccgcagttgacgcgccgcgttgaagaagcgaaagcggcgcaggaacaggcgcaggttcgccaggaaaccgaagaagccgtggaagtacgccttagcaaagacgagcagctccagcaacgccgggctaaccagcgtctgggcgctgaggtgatgagccagcgtattcgcgaaatgtcagacaacgatccgcgcgtggtggcgctggtcattcgccagtggatgagtaacgatcatgagtaatcttagcggtaccgataaaagcgtcattttgttgatgaccattggcgaagaccgggcggcagaggtgtttaaacacctctccacccgcgaagtacaggcgttaagtacggcgatggctaacgtgcgtcagatctccaacaaacaactgacggacgtactatcagagtttgagcaagaagcggagcagttcgccgcgctgaatatcaacgccaacgaatacctgcgctccgtactggttaaagcgctgggcgaagaacgcgcctccagcctgctggaagatattctggaaacgcgcgataccaccagcggtatcgaaacgctcaactttatggaaccgcagagtgccgccgacctgattcgcgacgaacacccgcagattatcgccaccattctggtccacctcaaacgcagtcaggccgccgatattctggcgctgtttgacgagcgtctgcgtcatgatgtgatgctgcgtatcgcgacatttggcggcgtacagccggcggcgctggcggagttgaccgaagtgctgaatggcctgctcgatggtcagaacctgaaacgcagcaaaatgggtggcgtaagaaccgcggcggaaattatcaacctgatgaaaacgcagcaggaagaagcggttattaccgctgtgcgcgaattcgacggcgaactggcgcagaaaatcatcgacgagatgttcctgttcgaaaatctggtggatgtggacgatcgcagtatccagcgtctgctgcaggaagtggattccgaatcgctgctgatcgctctgaaaggcgccgaaccgccattacgcgagaagttcctgcgcaatatgtcccagcgcgccgccgatatcctgcgcgacgaccttgccaaccgtggcccggttcgtctgtctcaggtggaaaacgagcagaaagcgattctgcttattgtgcgtcgtctggcggaaaccggcgaaatggtgattggcagcggcgaggatacctatgtctaatgaattgccgtggcaagtctggac

SEQ ID NO: 134911 - protein, 560 aa, Salmonella typhimurium
MSATASTATQPKPLEWLNRLRANPRIPLIVAGSAAVAIVVAMVLWAKTPDYRTLFSNLSDQDGGAIVAQLTQMNIPYRFANGSGAIEVPADKVHELRLRLAQQGLPKGGAVGFELLDQEKFGISQFSEQVNYQRALEGELARTIETLGPVKSARVHLAMPKPSLFVREQKSPSASVTVTLEPGRALDEGQISAVVHLVSSAVAGLPPGNVTLVDQSGHLLTQSNTSGRDLNDAQLKFANDVESRIQRRIEAILSPIVGNGNVHAQVTAQLDFANKEQTEEHYSPNGDASKATLRSRQLNISEQVGAGYPGGVPGALSNQPAPPNEAPIATPPTNQQNAQNTPQTSTSTNSNSAGPRSTQRNETSNYEVDRTIRHTKMNVGDIERLSVAVVVNYKTLADGKPLPLTADQMKQIEDLTREAMGFSDKRGDTLNVVNSPFSAVDNTGGELPFWQQQSFIDQLLAAGRWLLVLVVAWILWRKAVRPQLTRRVEEAKAAQEQAQVRQETEEAVEVRLSKDEQLQQRRANQRLGAEVMSQRIREMSDNDPRVVALVIRQWMSNDHE

SEQ ID NO: 134912 - DNA, 22 bp, Artificial sequence
  primer
atgaatgcgactgcagcccaga

SEQ ID NO: 134913 - DNA, 25 bp, Artificial sequence
  primer
ttactcatgatcgttatttatccac

SEQ ID NO: 134914 - protein, 562 aa, Artificial sequence
  consensus sequence
  Variant (2)..(5): Xaa in position 2 to 5 is any amino acid
  Variant (6)..(8): Xaa in position 6 to 8 is any or no amino acid
  Variant (10)..(12): Xaa in position 10 to 12 is any amino acid
  Variant (14)..(14): Xaa in position 14 is any amino acid
  Variant (16)..(17): Xaa in position 16 to 17 is any amino acid
  Variant (19)..(21): Xaa in position 19 to 21 is any amino acid
  Variant (23)..(25): Xaa in position 23 to 25 is any amino acid
  Variant (27)..(33): Xaa in position 27 to 33 is any amino acid
  Variant (35)..(39): Xaa in position 35 to 39 is any amino acid
  Variant (42)..(47): Xaa in position 42 to 47 is any amino acid
  Variant (48)..(48): Xaa in position 48 is any or no amino acid
  Variant (50)..(51): Xaa in position 50 to 51 is any amino acid
  Variant (54)..(56): Xaa in position 54 to 56 is any amino acid
  Variant (58)..(60): Xaa in position 58 to 60 is any amino acid
  Variant (63)..(63): Xaa in position 63 is any amino acid
  Variant (66)..(67): Xaa in position 66 to 67 is any amino acid
  Variant (70)..(72): Xaa in position 70 to 72 is any amino acid
  Variant (73)..(73): Xaa in position 73 is any or no amino acid
  Variant (75)..(76): Xaa in position 75 to 76 is any amino acid
  Variant (81)..(86): Xaa in position 81 to 86 is any amino acid
  Variant (87)..(87): Xaa in position 87 is any or no amino acid
  Variant (89)..(89): Xaa in position 89 is any amino acid
  Variant (93)..(93): Xaa in position 93 is any amino acid
  Variant (95)..(97): Xaa in position 95 to 97 is any amino acid
  Variant (99)..(99): Xaa in position 99 is any amino acid
  Variant (101)..(101): Xaa in position 101 is any amino acid
  Variant (107)..(107): Xaa in position 107 is any amino acid
  Variant (111)..(115): Xaa in position 111 to 115 is any amino acid
  Variant (117)..(118): Xaa in position 117 to 118 is any amino acid
  Variant (125)..(125): Xaa in position 125 is any amino acid
  Variant (128)..(128): Xaa in position 128 is any amino acid
  Variant (130)..(130): Xaa in position 130 is any amino acid
  Variant (132)..(132): Xaa in position 132 is any amino acid
  Variant (134)..(137): Xaa in position 134 to 137 is any amino acid
  Variant (139)..(139): Xaa in position 139 is any amino acid
  Variant (143)..(145): Xaa in position 143 to 145 is any amino acid
  Variant (147)..(148): Xaa in position 147 to 148 is any amino acid
  Variant (151)..(151): Xaa in position 151 is any amino acid
  Variant (153)..(155): Xaa in position 153 to 155 is any amino acid
  Variant (157)..(159): Xaa in position 157 to 159 is any amino acid
  Variant (161)..(163): Xaa in position 161 to 163 is any amino acid
  Variant (165)..(165): Xaa in position 165 is any amino acid
  Variant (167)..(167): Xaa in position 167 is any amino acid
  Variant (169)..(170): Xaa in position 169 to 170 is any amino acid
  Variant (172)..(175): Xaa in position 172 to 175 is any amino acid
  Variant (177)..(178): Xaa in position 177 to 178 is any amino acid
  Variant (182)..(182): Xaa in position 182 is any amino acid
  Variant (184)..(184): Xaa in position 184 is any amino acid
  Variant (187)..(197): Xaa in position 187 to 197 is any amino acid
  Variant (198)..(202): Xaa in position 198 to 202 is any or no amino acid
  Variant (204)..(210): Xaa in position 204 to 210 is any amino acid
  Variant (212)..(216): Xaa in position 212 to 216 is any amino acid
  Variant (218)..(220): Xaa in position 218 to 220 is any amino acid
  Variant (223)..(223): Xaa in position 223 is any amino acid
  Variant (225)..(226): Xaa in position 225 to 226 is any amino acid
  Variant (228)..(234): Xaa in position 228 to 234 is any amino acid
  Variant (236)..(236): Xaa in position 236 is any amino acid
  Variant (238)..(239): Xaa in position 238 to 239 is any amino acid
  Variant (242)..(244): Xaa in position 242 to 244 is any amino acid
  Variant (246)..(246): Xaa in position 246 is any amino acid
  Variant (248)..(248): Xaa in position 248 is any amino acid
  Variant (250)..(258): Xaa in position 250 to 258 is any amino acid
  Variant (259)..(262): Xaa in position 259 to 262 is any or no amino acid
  Variant (265)..(265): Xaa in position 265 is any amino acid
  Variant (267)..(278): Xaa in position 267 to 278 is any amino acid
  Variant (279)..(280): Xaa in position 279 to 280 is any or no amino acid
  Variant (287)..(287): Xaa in position 287 is any amino acid
  Variant (291)..(295): Xaa in position 291 to 295 is any amino acid
  Variant (298)..(310): Xaa in position 298 to 310 is any amino acid
  Variant (311)..(345): Xaa in position 311 to 345 is any or no amino acid
  Variant (347)..(347): Xaa in position 347 is any amino acid
  Variant (351)..(351): Xaa in position 351 is any amino acid
  Variant (353)..(353): Xaa in position 353 is any amino acid
  Variant (355)..(362): Xaa in position 355 to 362 is any amino acid
  Variant (364)..(366): Xaa in position 364 to 366 is any amino acid
  Variant (375)..(379): Xaa in position 375 to 379 is any amino acid
  Variant (380)..(384): Xaa in position 380 to 384 is any or no amino acid
  Variant (386)..(399): Xaa in position 386 to 399 is any amino acid
  Variant (400)..(402): Xaa in position 400 to 402 is any or no amino acid
  Variant (404)..(406): Xaa in position 404 to 406 is any amino acid
  Variant (408)..(408): Xaa in position 408 is any amino acid
  Variant (410)..(413): Xaa in position 410 to 413 is any amino acid
  Variant (417)..(419): Xaa in position 417 to 419 is any amino acid
  Variant (421)..(421): Xaa in position 421 is any amino acid
  Variant (423)..(424): Xaa in position 423 to 424 is any amino acid
  Variant (426)..(432): Xaa in position 426 to 432 is any amino acid
  Variant (433)..(437): Xaa in position 433 to 437 is any or no amino acid
  Variant (439)..(439): Xaa in position 439 is any amino acid
  Variant (441)..(460): Xaa in position 441 to 460 is any amino acid
  Variant (461)..(467): Xaa in position 461 to 467 is any or no amino acid
  Variant (469)..(474): Xaa in position 469 to 474 is any amino acid
  Variant (476)..(525): Xaa in position 476 to 525 is any amino acid
  Variant (526)..(550): Xaa in position 526 to 550 is any or no amino acid
  Variant (553)..(554): Xaa in position 553 to 554 is any amino acid
  Variant (557)..(561): Xaa in position 557 to 561 is any amino acid
AXXXXXXXWXXXPXYXXLXXXLXXXDXXXXXXXLXXXXXPYXXXXXXXAXXVPXXXVXXXRLXLAXXGLXXXXGXXGFELXXXXXXXGXSQFXEXXXYXRXLEGELXRTIXXXXXVXXARVHLAXPKXSXFXRXXXXPXASVXXXLXXGRXLXXXQXXXIXXXVXSXVXXLXXXXVXXVDQXGXLLXXXXXXXXXXXXXXXXQXXXXXXXEXXXXXRXXXILXPXXGXXXXXXXVXAXXDFXXXEXTXEXXXXXXXXXXXXXRSXQXXXXXXXXXXXXXXGVPGALXNQPXXXXXAPXXXXXXXXXXXXXXXXXXXXXXXXXXXXXXXXXXXXXXXXXXXXXXXXTXNYEXDXTXXXXXXXXGXXXRLSVAVVVXXXXXXXXXXGXXXXXXXXXXXXXXXXXLXXXAXGXXXXRGDXXXVXNXXFXXXXXXXXXXXXPXWXXXXXXXXXXXXXXXXXXXXXXXXXXXLXXXXXXPXXXXXXXXXXXXXXXXXXXXXXXXXXXXXXXXXXXXXXXXXXXXXXXXXXXXXXXXXXXXXXXXXXXXXXXXXXXDPXXVAXXXXXW

SEQ ID NO: 134915 - protein, 57 aa, Artificial sequence
  protein pattern
  Variant (4)..(4): Xaa in position 4 is any amino acid
  Variant (6)..(6): Xaa in position 6 is Ala, Asn, Gln or Thr
  Variant (7)..(8): Xaa in position 7 to 8 is any amino acid
  Variant (10)..(10): Xaa in position 10 is any amino acid
  Variant (12)..(12): Xaa in position 12 is Ala, Gly or Ser
  Variant (13)..(13): Xaa in position 13 is Ile or Leu
  Variant (17)..(17): Xaa in position 17 is Ile or Leu
  Variant (18)..(18): Xaa in position 18 is Ala, Gln or Ser
  Variant (20)..(20): Xaa in position 20 is Ser or Thr
  Variant (21)..(21): Xaa in position 21 is Ile or Val
  Variant (22)..(22): Xaa in position 22 is Ala, Glu, Gly, Gln or Ser
  Variant (23)..(23): Xaa in position 23 is Ala, Ser or Thr
  Variant (24)..(24): Xaa in position 24 is Ile, Leu or Met
  Variant (25)..(25): Xaa in position 25 is any amino acid
  Variant (26)..(26): Xaa in position 26 is Ala, Asn, Pro, Ser or Thr
  Variant (27)..(27): Xaa in position 27 is Ile or Val
  Variant (28)..(29): Xaa in position 28 to 29 is any amino acid
  Variant (30)..(30): Xaa in position 30 is Ala or Val
  Variant (34)..(34): Xaa in position 34 is Ile or Leu
  Variant (36)..(36): Xaa in position 36 is any amino acid
  Variant (38)..(38): Xaa in position 38 is Lys or Arg
  Variant (39)..(39): Xaa in position 39 is any amino acid
  Variant (40)..(40): Xaa in position 40 is Ser or Thr
  Variant (41)..(41): Xaa in position 41 is Ala, Leu or Val
  Variant (43)..(43): Xaa in position 43 is Ile, Leu or Val
  Variant (44)..(44): Xaa in position 44 is any amino acid
  Variant (45)..(45): Xaa in position 45 is Asp or Glu
  Variant (46)..(48): Xaa in position 46 to 48 is any amino acid
  Variant (49)..(49): Xaa in position 49 is Pro or Ser
  Variant (50)..(50): Xaa in position 50 is Ser or Thr
  Variant (51)..(51): Xaa in position 51 is Ala or Ser
  Variant (53)..(53): Xaa in position 53 is Ile or Val
  Variant (54)..(54): Xaa in position 54 is any amino acid
  Variant (55)..(55): Xaa in position 55 is Leu or Val
  Variant (56)..(56): Xaa in position 56 is Ala, Asp, Glu, Gly, Asn, Gln or Thr
SQFXEXXXYXRXXEGEXXRXXXXXXXXXXXRVHXAXPXXXXFXXXXXXXXXSXXXXL

SEQ ID NO: 134916 - protein, 35 aa, Artificial sequence
  protein pattern
  Variant (2)..(2): Xaa in position 2 is any amino acid
  Variant (3)..(7): Xaa in position 3 to 7 is any or no amino acid
  Variant (9)..(9): Xaa in position 9 is Phe or Tyr
  Variant (11)..(11): Xaa in position 11 is Leu or Val
  Variant (13)..(13): Xaa in position 13 is Lys or Arg
  Variant (14)..(14): Xaa in position 14 is Ser, Thr or Val
  Variant (15)..(15): Xaa in position 15 is Ile or Val
  Variant (16)..(16): Xaa in position 16 is any amino acid
  Variant (17)..(17): Xaa in position 17 is His or Tyr
  Variant (18)..(22): Xaa in position 18 to 22 is any amino acid
  Variant (24)..(24): Xaa in position 24 is any amino acid
  Variant (25)..(25): Xaa in position 25 is Ile, Leu, Met or Val
  Variant (26)..(26): Xaa in position 26 is any amino acid
  Variant (29)..(29): Xaa in position 29 is Ser or Thr
  Variant (30)..(30): Xaa in position 30 is Ala or Val
  Variant (32)..(34): Xaa in position 32 to 34 is Ile or Val
  Variant (35)..(35): Xaa in position 35 is Asp or Asn
TXXXXXXNXEXDXXXXXXXXXXGXXXRLXXAXXXX

SEQ ID NO: 134917 - protein, 38 aa, Artificial sequence
  protein pattern
  Variant (2)..(2): Xaa in position 2 is Ile or Val
  Variant (3)..(3): Xaa in position 3 is Asp, Glu, His or Arg
  Variant (4)..(4): Xaa in position 4 is any amino acid
  Variant (5)..(6): Xaa in position 5 to 6 is Ile or Leu
  Variant (7)..(7): Xaa in position 7 is any amino acid
  Variant (9)..(9): Xaa in position 9 is Ile, Leu, Met or Val
  Variant (10)..(10): Xaa in position 10 is Phe, Leu or Val
  Variant (12)..(13): Xaa in position 12 to 13 is any amino acid
  Variant (14)..(14): Xaa in position 14 is Asn or Arg
  Variant (15)..(15): Xaa in position 15 is any amino acid
  Variant (16)..(16): Xaa in position 16 is His, Lys or Arg
  Variant (17)..(17): Xaa in position 17 is Ala, Ser, Thr or Val
  Variant (18)..(18): Xaa in position 18 is Glu or Gln
  Variant (19)..(19): Xaa in position 19 is Ala or Val
  Variant (20)..(20): Xaa in position 20 is Ala, Ser or Thr
  Variant (22)..(22): Xaa in position 22 is Asp, Glu, Asn or Gln
  Variant (23)..(23): Xaa in position 23 is Ile, Leu or Val
  Variant (26)..(26): Xaa in position 26 is Ala, Asn, Ser or Thr
  Variant (27)..(28): Xaa in position 27 to 28 is any amino acid
  Variant (30)..(30): Xaa in position 30 is any amino acid
  Variant (31)..(31): Xaa in position 31 is Ala or Thr
  Variant (32)..(32): Xaa in position 32 is any amino acid
  Variant (34)..(34): Xaa in position 34 is any amino acid
  Variant (35)..(35): Xaa in position 35 is Phe, His or Tyr
  Variant (36)..(36): Xaa in position 36 is any amino acid
  Variant (38)..(38): Xaa in position 38 is Asp or Asn
RXXXXXXPXXGXXXXXXXXXAXXDFXXXEXXXEXXXPX

SEQ ID NO: 134918 - protein, 38 aa, Artificial sequence
  protein pattern
  Variant (2)..(2): Xaa in position 2 is any amino acid
  Variant (3)..(3): Xaa in position 3 is Ile or Leu
  Variant (4)..(6): Xaa in position 4 to 6 is any amino acid
  Variant (8)..(8): Xaa in position 8 is Ile or Val
  Variant (9)..(9): Xaa in position 9 is any amino acid
  Variant (10)..(10): Xaa in position 10 is Ala, Gly or Ser
  Variant (11)..(11): Xaa in position 11 is Ile or Val
  Variant (12)..(13): Xaa in position 12 to 13 is any amino acid
  Variant (14)..(14): Xaa in position 14 is Leu or Met
  Variant (16)..(16): Xaa in position 16 is Ala or Ser
  Variant (17)..(17): Xaa in position 17 is Ser or Thr
  Variant (18)..(18): Xaa in position 18 is Ala, Gly or Ser
  Variant (19)..(19): Xaa in position 19 is Ile or Val
  Variant (20)..(20): Xaa in position 20 is Ala or Pro
  Variant (21)..(21): Xaa in position 21 is any amino acid
  Variant (22)..(22): Xaa in position 22 is Leu or Met
  Variant (23)..(25): Xaa in position 23 to 25 is any amino acid
  Variant (26)..(26): Xaa in position 26 is Asp, Gly, Asn or Gln
  Variant (28)..(28): Xaa in position 28 is Asn, Ser or Thr
  Variant (29)..(30): Xaa in position 29 to 30 is Ile, Leu or Val
  Variant (33)..(33): Xaa in position 33 is any amino acid
  Variant (35)..(35): Xaa in position 35 is any amino acid
  Variant (38)..(38): Xaa in position 38 is Asn, Ser or Thr
RXXXXXQXXXXXXXVXXXXXXXXXXXVXXXDQXGXLLX

SEQ ID NO: 134919 - protein, 36 aa, Artificial sequence
  protein pattern
  Variant (2)..(2): Xaa in position 2 is Asp, Glu or Ser
  Variant (3)..(3): Xaa in position 3 is Trp or Tyr
  Variant (4)..(5): Xaa in position 4 to 5 is any amino acid
  Variant (7)..(7): Xaa in position 7 is any amino acid
  Variant (8)..(8): Xaa in position 8 is any or no amino acid
  Variant (10)..(12): Xaa in position 10 to 12 is any amino acid
  Variant (13)..(14): Xaa in position 13 to 14 is any or no amino acid
  Variant (16)..(16): Xaa in position 16 is Ala, Gly, Gln or Thr
  Variant (17)..(17): Xaa in position 17 is any amino acid
  Variant (18)..(18): Xaa in position 18 is Ala, Asp, Gly, Gln or Ser
  Variant (19)..(19): Xaa in position 19 is Ile or Val
  Variant (20)..(20): Xaa in position 20 is any amino acid
  Variant (21)..(21): Xaa in position 21 is Ala, Asp, Glu, Gln, Ser or Thr
  Variant (22)..(22): Xaa in position 22 is any amino acid
  Variant (24)..(24): Xaa in position 24 is Ala, Asp, Glu, Gln or Thr
  Variant (25)..(26): Xaa in position 25 to 26 is any amino acid
  Variant (27)..(27): Xaa in position 27 is Asp, Gly or Asn
  Variant (28)..(28): Xaa in position 28 is Ile or Val
  Variant (30)..(30): Xaa in position 30 is His or Tyr
  Variant (31)..(32): Xaa in position 31 to 32 is any amino acid
  Variant (33)..(33): Xaa in position 33 is Ala, Asp, Glu, Gly or Ser
  Variant (34)..(34): Xaa in position 34 is Asp, Glu, Asn or Pro
  Variant (35)..(35): Xaa in position 35 is any amino acid
  Variant (36)..(36): Xaa in position 36 is Gly, Ser or Thr
PXXXXLXXSXXXXXDXXXXXXXLXXXXXPXXXXXXX

SEQ ID NO: 134920 - protein, 22 aa, Artificial sequence
  protein pattern
  Variant (2)..(2): Xaa in position 2 is Thr or Val
  Variant (3)..(3): Xaa in position 3 is any amino acid
  Variant (4)..(4): Xaa in position 4 is Asp or Glu
  Variant (6)..(6): Xaa in position 6 is Met or Val
  Variant (8)..(8): Xaa in position 8 is Phe or Tyr
  Variant (9)..(9): Xaa in position 9 is Asp, Asn, Ser or Thr
  Variant (10)..(11): Xaa in position 10 to 11 is any amino acid
  Variant (15)..(16): Xaa in position 15 to 16 is any amino acid
  Variant (17)..(19): Xaa in position 17 to 19 is any or no amino acid
  Variant (21)..(21): Xaa in position 21 is any amino acid
  Variant (22)..(22): Xaa in position 22 is Ala, Pro or Val
LXXXAXGXXXXRGDXXXXXNXX

SEQ ID NO: 134921 - protein, 16 aa, Artificial sequence
  protein pattern
  Variant (2)..(2): Xaa in position 2 is Ala, Pro or Ser
  Variant (3)..(4): Xaa in position 3 to 4 is any amino acid
  Variant (7)..(7): Xaa in position 7 is any amino acid
  Variant (8)..(8): Xaa in position 8 is Ala, Ile, Leu or Val
  Variant (9)..(9): Xaa in position 9 is Ile, Leu or Val
  Variant (10)..(10): Xaa in position 10 is Lys or Arg
  Variant (11)..(11): Xaa in position 11 is any amino acid
  Variant (13)..(13): Xaa in position 13 is Ile, Met or Val
  Variant (14)..(14): Xaa in position 14 is Ala, Gly, Asn or Ser
  Variant (15)..(15): Xaa in position 15 is any amino acid
  Variant (16)..(16): Xaa in position 16 is Asp, Glu or Asn
DXXXVAXXXXXWXXXX

SEQ ID NO: 134922 - protein, 15 aa, Artificial sequence
  protein pattern
  Variant (2)..(2): Xaa in position 2 is Ile or Leu
  Variant (3)..(3): Xaa in position 3 is Pro, Gln or Thr
  Variant (4)..(4): Xaa in position 4 is any amino acid
  Variant (5)..(5): Xaa in position 5 is Ala, Asp, Gly or Ser
  Variant (6)..(6): Xaa in position 6 is Gly, Asn, Ser or Thr
  Variant (7)..(8): Xaa in position 7 to 8 is any amino acid
  Variant (10)..(10): Xaa in position 10 is any amino acid
  Variant (12)..(12): Xaa in position 12 is any or no amino acid
  Variant (14)..(14): Xaa in position 14 is any amino acid
  Variant (15)..(15): Xaa in position 15 is Asp, Glu or Gln
GXXXXXXXGXEXLXX

SEQ ID NO: 134923 - protein, 18 aa, Artificial sequence
  protein pattern
  Variant (2)..(2): Xaa in position 2 is Ile or Val
  Variant (7)..(7): Xaa in position 7 is any amino acid
  Variant (11)..(12): Xaa in position 11 to 12 is any or no amino acid
  Variant (14)..(17): Xaa in position 14 to 17 is any amino acid
  Variant (18)..(18): Xaa in position 18 is Ala, Ile, Leu, Pro or Val
GXPGALXNQPXXPXXXXX

SEQ ID NO: 134924 - DNA, 912 bp, Escherichia coli
  CDS (1)..(912): transl_table=11
atgagtacattagaacaaacaataggcaatacgcctctggtgaagttgcagcgaatggggccggataacggcagtgaagtgtggttaaaactggaaggcaataacccggcaggttcggtgaaagatcgtgcggcactttcgatgatcgtcgaggcggaaaagcgcggggaaattaaaccgggtgatgtcttaatcgaagccaccagtggtaacaccggcattgcgctggcaatgattgccgcgctgaaaggctatcgcatgaaattgctgatgcccgacaacatgagccaggaacgccgtgcggcgatgcgtgcttatggtgcggaactgattcttgtcaccaaagagcagggcatggaaggtgcgcgcgatctggcgctggagatggcgaatcgtggcgaaggaaagctgctcgatcagttcaataatcccgataacccttatgcgcattacaccaccactgggccggaaatctggcagcaaaccggcgggcgcatcactcattttgtctccagcatggggacgaccggcactatcaccggcgtctcacgctttatgcgcgaacaatccaaaccggtgaccattgtcggcctgcaaccggaagagggcagcagcattcccggcattcgccgctggcctacggaatatctgccggggattttcaacgcttctctggtggatgaggtgctggatattcatcagcgcgatgcggaaaacaccatgcgcgaactggcggtgcgggaaggaatattctgtggcgtcagctccggcggcgcggttgccggagcactgcgggtggcaaaagctaaccctgacgcggtggtggtggcgatcatctgcgatcgtggcgatcgctacctttctaccggggtgtttggggaagagcattttagccagggggcggggatttaa

SEQ ID NO: 134925 - protein, 303 aa, Escherichia coli; identical to SEQ ID NO: 40207

SEQ ID NO: 134926 - DNA, 1803 bp, Zea mays
  CDS (192)..(1169)
atcatctccagcggcttcttccaaagctccaactacgacgagaaccgccactcctcgaaatctccaaggattttctgcggcgaacccgtacgtttcctatcgctgttctcgcttgttcgcgggggaatcaaaccaaatcatccccttccccccatccgccccttggatttgcagcttcgtgacgtgacccaatgggagaggcctcgccgtcgatcgccaaggacgtcaccgagttgatcgggaacacgccgctggtgtacctcaacaaggtgaccgatgggtgcgtcggccgcgtcgccgccaagctcgagtccatggagccctgctccagcgtcaaggataggattggctacagcatgatcacggacgcagaggagaaagggctgattactccaggcgtgagtgttctgattgaaccaactagcggcaacacaggcattggactggcctttatggctgctgccaagggctacaaacttacactcacaatgcctgcctccatgagcatggagaggaggatcatattgaaggcttttggtgctgaacttgtccttactgacccactcctgggaatgaaaggagctgtcaagaaagcggaagagatacaagcaaagacacccaactcgtacatccttcaacaatttgaaaatccagctaacccaaagattcactatgagactactgggcctgaaatctggaaagctacagcaggaaaaattgctggccttgtatctggtatcgggacaggaggtaccatcaccggtactgggcgatacctcagagagcaaaatcctaatgtcaagctctatggtgtggagccagtggagagtgctgttttgaatggtggaaaacctggaccacacaagattcaaggaattggagctggttttatccctggagtcttggatgttgatctccttgatgagactctacaggtttcaagtgatgaagctattgagactgccaaggctcttgctctgaaagaagggttgttggttggaatctcttctggtgcagctgcagctgcggcagttaggcttgctaagaggccagaaaacgccggaaagctatttgttgtcgtgttcccgagcttcggcgagcgctacctctcatcggtgctgttccagtccatcaagaaggaagcggaaagcatggtggtcgagccctagagcacacagttctgggcttctggcaaactatttcctgagacgttcatcatttccatcacagaaaaataaagctcgggtgccttctgttgatttcgacgtacatttccctgccgatggtgtccagcccactgttgtcgctggagaacacgtcgtttttagacttgtgatgttttactactgttttgacactcgttgtatttctgtatatcgcgtcagactgtgaaataaaagcagtacagtgtgtttcttgcaaaaaaaaaaaaaaaaaaaaaaaaaaaaaaaaaaaaaaaaaaaaaaaaaaaaaaaaaaaaaaaaaaaaaaaaaaaaaaaaaaaaaaaaaaaaaaaaaaaaaaaaaaaaaaaaaaaaaaaagggggggcgcctttttaagagggaaccaaattttaacttcccgggtgttgcaaactttataattttttttttggtggccccctaaatttaatttaatgggcccggggttttaaaaccggtgggaccgggagaaacccttgggttccccaaattaaatggttttgaaaaaaatccctttttccccagttgggttataacgaaaaggcccccacccataccccctttccaaaaattgccccaccttaattggaaaagggaacccc

SEQ ID NO: 134927 - protein, 325 aa, Zea mays; identical to SEQ ID NO: 40239

SEQ ID NO: 134928 - DNA, 1595 bp, Brassica napus
  CDS (40)..(1329)
gaattcccgggtcgacgtcgtattctgaaaagcacgatcatggcggtgctcatggcttcaaggtttaacagtgaagctaggatcgcgtctcgatgcctttcaacactcttgagaaatcaaagagtcctgatagcctcaccatcatcatcatccatggcatccgcatcttcttcctctgctctcctccttaacccgttgacttcctccactctccgtcacttcagatcctcttcggagatctcttctctctccttctctgcttccggcttccctctagcgatgaagagccagcagagtcggagctatggagatgtctcgaaacgagatccgtgcgaggccgttaagcgtgagaatggagctgatgagctcaacatcgctgagaatgtgtctcagctcattgggaaaactcctatggtgtacttgaacagtatggcgaagggttgtgtagcgaacattgctgctaagctcgagatcatggagccttgttgcagtgtcaaggataggattgggtacagtatggttactgatgctgagcaaaaaggattcatatcacctggaaagagtgttcttgtggaacctacaagtggaaacacgggtattggacttgcgtttatcgctgcttcaagaggctaccgactcatcttgacaatgccatcatccatgagtatggagagaagagttcttctaaaggcgtttggagctgagcttgtgctgactgatcctgctaaaggcatgaccggtgcagttcagaaggctgaggaaatcttgaaatcaactcctgatgcttacatgctccaacagtttgacaaccctgccaatccaaagatccattatgagactactggtcctgagatatgggaagatacaaagggaaaggtggatatatttgttgctgggattggaactggtgggactatcactggtgttggtcggttcattaaagagaaaaaccccaaagtgcaggttattggtgttgaaccaactgaaagcgacatactttctggtggcaaaccgggacctcacaagattcaagggattggagctggatttatacctaagaatttggatcgggcaattatggatgaagtcatagcgatttcaagtgaggaagctatagaaactgcaaagcaactagctctcaaagaaggcttgatggttggaatatcatctggagctgctgctgctgctgcaatcatggtagcaaagagacctgagaatgcagggaaactcattgctgttgttttcccgagctttggagagcgatatttatcaacccctctgttccagtctatccgggaagaggttgagaaaatgcagcctgagatatgaacaaaagcaaatatctttcttctactgttaggtttgcctcttgagagtgctaagccattcttgcttatcaataagccaaatagtgcaacttgtattgttcaacatttctatcaaaaatccccaatggataattaattagatacaattaaacaagatgaattatccatctatatttttttgttaaccaataaattgtagccgttggtgtgtaatatgtacgattatttaaatttataatgatcaaattaatgaaaaaaaaaaaaaaa

SEQ ID NO: 134929 - protein, 429 aa, Brassica napus; identical to SEQ ID NO: 40229

SEQ ID NO: 134930 - DNA, 1292 bp, Glycine max
  CDS (144)..(1121)
gaattcccgggtcgacttcgctgtcgacgatttcgtagctcatagaaattctcgtcctcttcctacataagtcttctcttatcataaacgcgtgttgctcggataaggttgtgctgcggtgattcactcgtactttgcttaatatggcggttgagaagttgagcattgcaaaagatgtgactgaattaattggcaaaactccattggtatatctcaaccgcatcgtggatggctgtgttgccaaagttgctgcgaagctagaaatgatggaaccttgctccagtgtcaaagacaggatagggtatagcatgattgtagatgctgaggagaaaggactcatcacaccgggtgaaagtgtcctcattgagcctactagtggaaacactggcataggtttggcattcatggcagctgctaagggttataaacttattataaccatgccttcttcgatgagtctcgaaagaagaaccattcttcgagcttttggagctgagttagtcctcactgatcccgccaaaggtatgaaaggagctgttcagaaggcagaagagattcgggataagactccaaattcttatattcttcaacaatttgaaaatcctgccaacccaaagatccattatgaaaccactggaccggagatctggaagggctctagtgggaaggttgatgctcttgtctctgggattgggactggaggtacaataacaggtgctggaaaatatctgaaagatcagaaccctgatataaagctatatggcattgaaccagtagaaagtccaatactgtctggaggaaaacctggccctcataagatccaaggaattggtgctggcttcatccctggtgttctggatgtcgatttacttgatgaagttgttcaaatttcaagtgaagaagccattgaaactgctaaacttcttgctttgaaagaaggtttgctggtgggaatatcatctggtgcagctgcagctgctgcaattaagatagcaaagaggccagaaaatgctggaaaactcattattgcggtcttcccaagctttggagagcgttatttatcatctgtgctctttgaatccgtgaagcgagaagcagagagcatggtcttcgagccttgaatatgaagttatacgagccatttgctgcttttcaagttgcattctctccttgggttgtgtatctattttttctcttatggatctgaaaaataaaaaatggtttatgtttggttgttaattgactacgatttaataaaaaatataagatgtttgccgaaaaaaaaaaaaaaa

SEQ ID NO: 134931 - protein, 325 aa, Glycine max
MAVEKLSIAKDVTELIGKTPLVYLNRIVDGCVAKVAAKLEMMEPCSSVKDRIGYSMIVDAEEKGLITPGESVLIEPTSGNTGIGLAFMAAAKGYKLIITMPSSMSLERRTILRAFGAELVLTDPAKGMKGAVQKAEEIRDKTPNSYILQQFENPANPKIHYETTGPEIWKGSSGKVDALVSGIGTGGTITGAGKYLKDQNPDIKLYGIEPVESPILSGGKPGPHKIQGIGAGFIPGVLDVDLLDEVVQISSEEAIETAKLLALKEGLLVGISSGAAAAAAIKIAKRPENAGKLIIAVFPSFGERYLSSVLFESVKREAESMVFEP

SEQ ID NO: 134932 - DNA, 1257 bp, Linum usitatissimum
  CDS (102)..(1079)
gcattgcccacagaaatttctagtcggcttccagcttttgctcttaccattccctctgcacccaaatacccattaattgtgctgcactctttttcatcagaatggcagaggagaacattgggattgctaaggatgtcactgagttgattggtaaaacaccattggtatatctcaccaatgtcgtggatggctgcgtcgctcgggttgctgctaaactagagatgatggagccttgctcaagcgtcaaggataggattggatatagtatgatagctgatgccgaggagaagggtcttatcaagcctggagagagtgtccttattgagccaacaagtgggaacactgggatagggctggcattcatggcagcagccaagggctacagacttataattaccatgcctgcttcgatgagtttggagagaagaatggttctccgtgcttttggagccgagcttgttcttacagatccagcaagaggtatgaaaggggctgttcagaaagcagaagatatcttggcaaagacacctaatgcttacattcttcagcaatttgaaaaccctgccaacccaaaggttcattatgaaaccactgggccggaaatatggaaaggttcagctggcaaagtagatgcctttgtgtcgggtataggaactggaggaacagtaactggtgctgggaagtatcttaaggagcagaacccagatgtaaagctttatggcgttgaaccagttgaaagtgcagtgttgtctggaggaaaacctggcccgcataaaatccagggaattggtgctggcttcatccctggagtcttggatgttggtttgcttgatgaggtcgttcaaatatcgagcgaagaagctatcgagacagcaaaaaccctcgccttgagggaaggactgatggtaggaatatcatctggtgcagccgcagctgctgctattaagatagcaaagaggcctgagaatgctggaaagctcatagttgtggtgttcccaagtttcggtgagcgatacctctcatcgatactcttcgaggatgtgaagcgagaagctgagaacatggttttcgagccttgaagcagtatcatgtgtgtactgagtgaataatacagagagggtccatatttctgatggtttcttagtagtctaccggaatgggaaaagctgtgatgtttggacatgaagtttgtgagccgttacatagaattttatggaatgagtgacctttttcagcagaattaaaaaaaaaaaaaaa

SEQ ID NO: 134933 - protein, 325 aa, Linum usitatissimum; identical to SEQ ID NO: 40231

SEQ ID NO: 134934 - DNA, 1453 bp, Zea mays
  CDS (120)..(1097)
gaattcccgggtcgacttcgctgtcgacgatttcgtcaaagctccaactccgacgagaaccgccacacctcgaaatctcgaaggattttctgcggcgaaccccttcgtgacgtgacccaatgggagaggcctcgccgtcgatcgccaaggacgtcaccgagttgatcgggaacacgccgctggtgtacctcaacaaggtgaccgaggggtgcgtcggccgcgtcgccgccaagctcgagtccatggagccctgctccagcgtcaaggataggattggctacagcatgatcacggacgcagaggagaaagggctgattactccaggcgtgagtgttctgattgaaccaactagcggcaacacaggcattggactggcctttatggctgctgccaagggctacaaacttacactcacaatgcctgcctccatgagcatggagaggaggatcatattgaaggcttttggtgctgaacttgtccttactgacccactcctgggaatgaaaggagctgtcaagaaagcggaagagatacaagcaaagacacccaactcttacatccttcaacaatttgaaaatccagctaacccaaagattcactatgagactactgggcctgaaatctggaaagctacagcaggaaaaattgatggccttgtatctggtatcgggacaggaggtaccatcaccggtactgggcgatacctcagagagcaaaatcctaatgtcaagctctatggtgtggagccagtggagagtgctgttttgaatggtggaaaacctggaccacacaagattcaaggaattggagctggttttatccctggagtcttggatgttgatctccttgatgaaactctacaagtttcaagtgatgaagctatcgagactgccaaggctcttgctctgaaagaagggttgttggttggaatctcttctggtgcagctgcagctgcggcagttaggcttgctaagaggccagaaaacgccggaaagctatttgttgtcgtgttcccgagcttcggcgagcgctacctctcctcggtgctgttccagtccatcaagaaggaagcggagagcatggtggtcgagccctagagcacacagttctgggcttctggcaaactatttcctgagacgttcatcatttccatcacagaaaaataaagctcgggtgccttctgttgatttcgacgtacatttccctgccgattgtgtccagtccagcccactgttgtcgctggagaacacgtcgtttttagacttgtgatgttttactactgttttgacactcgttgtatttctgtatatcgcgtcagactgtgaaataaaagcagtacagtgtgtttcttgaaaaaaaaaaaaaaaaaaaaaaaaaaaaaaaaaaaaaaaaaaaaaaaaaaaaaaaaaaaaaaaaaaaaaaaaaagaaaaaaaaaaaaaaaaaagcggccgc

SEQ ID NO: 134935 - protein, 325 aa, Zea mays
MGEASPSIAKDVTELIGNTPLVYLNKVTEGCVGRVAAKLESMEPCSSVKDRIGYSMITDAEEKGLITPGVSVLIEPTSGNTGIGLAFMAAAKGYKLTLTMPASMSMERRIILKAFGAELVLTDPLLGMKGAVKKAEEIQAKTPNSYILQQFENPANPKIHYETTGPEIWKATAGKIDGLVSGIGTGGTITGTGRYLREQNPNVKLYGVEPVESAVLNGGKPGPHKIQGIGAGFIPGVLDVDLLDETLQVSSDEAIETAKALALKEGLLVGISSGAAAAAAVRLAKRPENAGKLFVVVFPSFGERYLSSVLFQSIKKEAESMVVEP

SEQ ID NO: 134936 - DNA, 1190 bp, Helianthus annuus; identical to SEQ ID NO: 39304
  CDS (33)..(1010)

SEQ ID NO: 134937 - protein, 325 aa, Helianthus annuus; identical to SEQ ID NO: 39305

SEQ ID NO: 134938 - DNA, 1329 bp, Arabidopsis thaliana (mouse-ear cress); identical to SEQ ID NO: 39308
  CDS (1)..(1329)

SEQ ID NO: 134939 - protein, 442 aa, Arabidopsis thaliana (mouse-ear cress); identical to SEQ ID NO: 39309

SEQ ID NO: 134940 - DNA, 1290 bp, Oryza sativa
  CDS (74)..(1039)
gtcgacccacgcgtccgcaaggaggagcaaggattgttgttgtttcgctgtcagatcgattcctgacgggataatgggtgagaccatcgccaaggatgtcaccgagttgattgggaacacgccgttggtgtacctcaaccgggtgacggatgggtgcgtcgggcgcgtcgcggccaagctcgagtccatggagccatgctccagcgtcaaggataggattggatacagtatgatcactgatgcagaggagaaggggctgatcactccaggcaagagtgtgctgattgagccaactagtggcaacacaggcattggactggccttcatggctgctgcaaagggttacaggcttgtactcacgatgccggcctccatgagcatggagaggagaatcatattgaaggcttttggtgctgaattgatacttactgacccactcttgggaatgaaaggagctgtccaaaaggcagaagaactggcagcgaagacaaacaactcatttatcctccaacaattcgagaaccctgctaacccaaagatccattacgagaccactggacctgaaatctggaaaggaacaggaggtaaagttgatggtttagtttctggtattgggacaggtggcactattactggaactggacgatacctcagagagcaaaatcctgatatcaagatctatggtgtggagccagtcgagagcgctgtcttatctggtggaaagcctgggccacacaagattcaaggaattggagctggttttgttcctggggtcctggatgttgacctcatcaatgaaactgtacaagtttcaagtgatgaagctatcgagatggcaaaggctcttgcattgaaagaagggttgctggttggaatatcttcaggtgcagctgcagcagcagctgttaggctcgctcagaggccggaaaatgaaggaaaactttttgttgttgtcttcccaagctttggtgagcggtacctttcgtcggtgctcttccagtccatcaagaaggaagctgaaaacatggtggttgaatgaaatgcacaatatccgggaatccacaggaataaaagtttggtatctctgcttgtgtgattaaacatacattgtcctgccattttcaagttgttctgcttgtgtagcaatggggaacacagtgtgttagccttgtagtgttaaacagtttacattttatcttccctgtatatcagaaccctttacatgggcatttgtcagccagtgtgaatgaaataaagcatcatatgatttgtctcaaaaaaaaaaaaaaa

SEQ ID NO: 134941 - protein, 321 aa, Oryza sativa
MGETIAKDVTELIGNTPLVYLNRVTDGCVGRVAAKLESMEPCSSVKDRIGYSMITDAEEKGLITPGKSVLIEPTSGNTGIGLAFMAAAKGYRLVLTMPASMSMERRIILKAFGAELILTDPLLGMKGAVQKAEELAAKTNNSFILQQFENPANPKIHYETTGPEIWKGTGGKVDGLVSGIGTGGTITGTGRYLREQNPDIKIYGVEPVESAVLSGGKPGPHKIQGIGAGFVPGVLDVDLINETVQVSSDEAIEMAKALALKEGLLVGISSGAAAAAAVRLAQRPENEGKLFVVVFPSFGERYLSSVLFQSIKKEAENMVVE

SEQ ID NO: 134942 - DNA, 969 bp, Bradyrhizobium sp. ORS278; identical to SEQ ID NO: 39668
  CDS (1)..(969): transl_table=11

SEQ ID NO: 134943 - protein, 322 aa, Bradyrhizobium sp. ORS278; identical to SEQ ID NO: 39669

SEQ ID NO: 134944 - DNA, 963 bp, Dehalococcoides sp. BAV1; identical to SEQ ID NO: 39670
  CDS (1)..(963): transl_table=11

SEQ ID NO: 134945 - protein, 320 aa, Dehalococcoides sp. BAV1; identical to SEQ ID NO: 39671

SEQ ID NO: 134946 - DNA, 987 bp, Synechococcus sp. WH 7803; identical to SEQ ID NO: 39672
  CDS (1)..(987): transl_table=11

SEQ ID NO: 134947 - protein, 328 aa, Synechococcus sp. WH 7803; identical to SEQ ID NO: 39673

SEQ ID NO: 134948 - DNA, 969 bp, Synechococcus sp. WH 7803; identical to SEQ ID NO: 39674
  CDS (1)..(969): transl_table=11

SEQ ID NO: 134949 - protein, 322 aa, Synechococcus sp. WH 7803; identical to SEQ ID NO: 39675

SEQ ID NO: 134950 - DNA, 1515 bp, Apis mellifera; identical to SEQ ID NO: 39318
  CDS (1)..(1515)

SEQ ID NO: 134951 - protein, 504 aa, Apis mellifera; identical to SEQ ID NO: 39319

SEQ ID NO: 134952 - DNA, 1179 bp, Oryza sativa (japonica cultivar-group); identical to SEQ ID NO: 39320
  CDS (1)..(1179)

SEQ ID NO: 134953 - protein, 392 aa, Oryza sativa (japonica cultivar-group); identical to SEQ ID NO: 39321

SEQ ID NO: 134954 - DNA, 1185 bp, Oryza sativa (japonica cultivar-group)
  CDS (1)..(1185)
atggcgtcgtggtcgtcgcccgtcgccgccgccgccttgcaggtccatttcgggtcctcctgcttcttctccgcccgatcgccacgacagaccctcctcctaccacctctcgcccgcaaccctacactgaccatccagccccggccccatcccttccggaacatcaactcctcctcctcctccagctggatgtgccacgccgtcgccgccgaggtcgagggcctcaacatcgccgacgacgtcacccagctcatcggcaagactccaatggtatatctcaacaacatcgtcaagggatgtgttgccaatgtcgctgctaagctcgagattatggagccctgttgcagtgtcaaggacaggataggatacagtatgatttctgatgcggaagagaaaggcttgataactcctggaaagagtgttttggtggaaccaacaagtggaaatacaggcattggtcttgccttcattgctgcttccagaggatataaattaatattgaccatgcctgcatcaatgagcatggagagaagagttctactcaaagcttttggcgctgaacttgtccttactgatgccgcaaaagggatgaagggggctgtagataaggctacagagattttaaataagacacctgatgcctatatgctgcagcagtttgacaaccctgccaacccaaaggtacattatgagactactgggccagaaatctgggaggattctaaagggaaggtggatgtattcattggtggaattggaacaggtggaacaatatctggtgctggccgtttcctgaaagagaaaaatcctggaattaaggttattggtattgagccttctgagagtaacatactctctggtggaaaacctggcccacataagattcaaggcattggggcaggatttgttccaaggaacttggatagtgaagttctcgatgaagtgattgagatatctagtgatgaggctgttgagacagcaaagcaattggctcttcaggaaggattactggttggaatttcatctggggcagcagcagcagctgccattaaagttgcaaaaagaccagaaaatgctggaaagttggtagtggttgtgtttccaagctttggtgagaggtacctttcatctatcctttttcagtcgataagagaagaatgtgagaagttgcaacctgaaccatga

SEQ ID NO: 134955 - protein, 394 aa, Oryza sativa (japonica cultivar-group)
MASWSSPVAAAALQVHFGSSCFFSARSPRQTLLLPPLARNPTLTIQPRPHPFRNINSSSSSSWMCHAVAAEVEGLNIADDVTQLIGKTPMVYLNNIVKGCVANVAAKLEIMEPCCSVKDRIGYSMISDAEEKGLITPGKSVLVEPTSGNTGIGLAFIAASRGYKLILTMPASMSMERRVLLKAFGAELVLTDAAKGMKGAVDKATEILNKTPDAYMLQQFDNPANPKVHYETTGPEIWEDSKGKVDVFIGGIGTGGTISGAGRFLKEKNPGIKVIGIEPSESNILSGGKPGPHKIQGIGAGFVPRNLDSEVLDEVIEISSDEAVETAKQLALQEGLLVGISSGAAAAAAIKVAKRPENAGKLVVVVFPSFGERYLSSILFQSIREECEKLQPEP

SEQ ID NO: 134956 - DNA, 1353 bp, Oryza sativa (japonica cultivar-group)
  CDS (1)..(1353)
atggcggctgcgacggcggcggcgggagcagccgccgccgtatccctgctcgcgtgctacctcctcctacacagggacggcgccaagctgccgtgggtcgggcccacgacgaggtcctcccgctcgagcggccggcggacgcggcggaagggcctcgtggaggccatcggaaacacgcccctcatccgcatcaacagcctctccgacgccacagggtgcgagatcctggggaaggccgagttcttgaatcccggaggcagcgtgaaggaccgtgtggcagttaagatcatcgaagaggctctggaatctggtgatcttctctgtggtggtacagtaacagaggggagtgctggaagcacagctattagcttggccattgttgctcctgcttatggctgcaaatgtcatgttgttattcctgatgatgctgccattgagaagtctcaaataatcgaggcgctcggggctacagttgaacgagtgcgccctgtttcaattacacatagggaccattttgtcaatattgctagaagaagggctttagaagcaaacaaatcagcagcggcccagagagagtcaaggtacaaagaaactaatggttcagcgcatgtcaatactagaataatgcacagcaagataacagcaagcaaaggggagtcaaacaaggcactaactaactgttcagccaattctgaaatacaatataacgggaagtgtgatcatgactctgattcaaagggaggtttctttgctgaccaatttgagaatatggcaaactaccgagcccattatgaatggactggtcctgagatatggcaacaaagtaaagggacactgcatgcctttgttgctgcagctggcactggtggcacaattgctggagtctcacggtatcttaaggaaaagaacacaaacatcaaatgcttcttaatggacccacctggatctggtctgttcaataaggttactagaggggtgatgtacacaaaagaggaagctgagggcaaaaggctgaagaatccttttgacactattactgaaggaattggaatcaacagggttacaaaaaattttatgatggcggaactggatggagcttaccggggaacagatagggaagctgttgagatgtcaaggttcttgttgaaaaatgatgggctgttcgttgggagttcttcagccatgaattgtgttggtgctgtaagagttgctcaagatttaggtccaggacatacaattgtgacaattctctgtgacagtgggatgaggcatctaagtaagttcttcaatgaccaatatttggctaaccatggcctgacaccaacagctaccggtctggaatttcttgattga

SEQ ID NO: 134957 - protein, 450 aa, Oryza sativa (japonica cultivar-group)
MAAATAAAGAAAAVSLLACYLLLHRDGAKLPWVGPTTRSSRSSGRRTRRKGLVEAIGNTPLIRINSLSDATGCEILGKAEFLNPGGSVKDRVAVKIIEEALESGDLLCGGTVTEGSAGSTAISLAIVAPAYGCKCHVVIPDDAAIEKSQIIEALGATVERVRPVSITHRDHFVNIARRRALEANKSAAAQRESRYKETNGSAHVNTRIMHSKITASKGESNKALTNCSANSEIQYNGKCDHDSDSKGGFFADQFENMANYRAHYEWTGPEIWQQSKGTLHAFVAAAGTGGTIAGVSRYLKEKNTNIKCFLMDPPGSGLFNKVTRGVMYTKEEAEGKRLKNPFDTITEGIGINRVTKNFMMAELDGAYRGTDREAVEMSRFLLKNDGLFVGSSSAMNCVGAVRVAQDLGPGHTIVTILCDSGMRHLSKFFNDQYLANHGLTPTATGLEFLD

SEQ ID NO: 134958 - DNA, 1134 bp, Oryza sativa (japonica cultivar-group)
  CDS (1)..(1134)
atggagagggctctgatgagcctcatgaggcggcgctccctcctccagagcggcggacgagcaccgccggcgatggccgccgccgccggtggctcaccattcttctccaccctgcagcaagcagccgccgcagacccggtccagtcgcctggcatcttgccagggctcaagatcagggactctgcgtcacagctgattgggaggacacccatggtttacctgaacaaggtcactgaaggatgtggggcccggattgctgctaagctcgagttcttgcagccgtccttcagcgtcaaggacagaccagcaatttcaatgttggaagatgctgaaaagaaggggttgatcaccccaggtaagaccacactgatcgagccgacatcagggaacatgggtattggcctggcattcatggctgctcttaaagggtatgaactcatactcacaatgccttcatacaccagccttgagaggagggtgaccatgagggccttcggcgcaaaactcgtccttaccgacccaacaaaaggtatgggaggcacggtgaggaaggccgccgagctgtatgagaaccatcctagcgcgttcatgctgcagcagtttgagaatcctgcaaatgtcaaggtacactatgagacaactggtccagaaatctgggaggatacacttgggcaggttgatatttttgtcatgggaatcgggagcggcggcaccgtcactggtgttggcaagtatcttaaggagaagaaccccaatgcaaagatctatggagttgaacctgctgaagcaaatgttttgaatggtggcaaaccaggtcctcacctcatcactggaaatggagtgggatttaagccggaaattttgaatatggatataatggaaaaggttattgaggtgaaaggtgaggatgctgttaagatggctcgagaattggcactgaaggagggtcttctggttggaatatcatcaggagctaacacagttgctgctcttgaactagcaaagaagccagaaaacaaagggaagctcattgtgactgttcttccgagtttaggggagagatacctgtcatctgcattgtttgaggaattgagagcggaggctgaggccatgcagccagtgccagtggactaa

SEQ ID NO: 134959 - protein, 377 aa, Oryza sativa (japonica cultivar-group)
MERALMSLMRRRSLLQSGGRAPPAMAAAAGGSPFFSTLQQAAAADPVQSPGILPGLKIRDSASQLIGRTPMVYLNKVTEGCGARIAAKLEFLQPSFSVKDRPAISMLEDAEKKGLITPGKTTLIEPTSGNMGIGLAFMAALKGYELILTMPSYTSLERRVTMRAFGAKLVLTDPTKGMGGTVRKAAELYENHPSAFMLQQFENPANVKVHYETTGPEIWEDTLGQVDIFVMGIGSGGTVTGVGKYLKEKNPNAKIYGVEPAEANVLNGGKPGPHLITGNGVGFKPEILNMDIMEKVIEVKGEDAVKMARELALKEGLLVGISSGANTVAALELAKKPENKGKLIVTVLPSLGERYLSSALFEELRAEAEAMQPVPVD

SEQ ID NO: 134960 - DNA, 1020 bp, Oryza sativa (japonica cultivar-group); identical to SEQ ID NO: 39322
  CDS (1)..(1020)

SEQ ID NO: 134961 - protein, 339 aa, Oryza sativa (japonica cultivar-group); identical to SEQ ID NO: 39323

SEQ ID NO: 134962 - DNA, 1044 bp, Oryza sativa (japonica cultivar-group); identical to SEQ ID NO: 39324
  CDS (1)..(1044)

SEQ ID NO: 134963 - protein, 347 aa, Oryza sativa (japonica cultivar-group); identical to SEQ ID NO: 39325

SEQ ID NO: 134964 - DNA, 1074 bp, Oryza sativa (japonica cultivar-group); identical to SEQ ID NO: 39326
  CDS (1)..(1074)

SEQ ID NO: 134965 - protein, 357 aa, Oryza sativa (japonica cultivar-group); identical to SEQ ID NO: 39327

SEQ ID NO: 134966 - DNA, 1029 bp, Oryza sativa (japonica cultivar-group); identical to SEQ ID NO: 39328
  CDS (1)..(1029)

SEQ ID NO: 134967 - protein, 342 aa, Oryza sativa (japonica cultivar-group); identical to SEQ ID NO: 39329

SEQ ID NO: 134968 - DNA, 981 bp, Mesorhizobium loti MAFF303099; identical to SEQ ID NO: 39334
  CDS (1)..(981): transl_table=11

SEQ ID NO: 134969 - protein, 326 aa, Mesorhizobium loti MAFF303099; identical to SEQ ID NO: 39335

SEQ ID NO: 134970 - DNA, 1170 bp, Aeropyrum pernix K1
  CDS (1)..(1170): transl_table=11
gtgcggaagggtcttggatccggtgtttacgggagtatcctggaccttgtaggcggcaccccccttctcaggctgggcagggtggagcgtttcttccggctagagggtgtggagctctacggcaagctcgagatgttcaaccctgggggtagcgtgaaggacaggatagggctttacatgctgatggacgctaggagcagggggcttgttgaggagggcgcggttataatcgagcctacagccggcaacacgggggtaggcctggcgctcgccgcaatacactacggcttcaggcttgtcgctgttatgccgtcgaagatgagcgtggagaaggagctaatactcagggcttacggcgcctacgtcatcagaacccccacagcagtccccccggagagccccctctcctactatagggtggcggaggcggtgaggaacctgctatggatgataggcggcaggcccggtgggggggaggtgaggaaggttgtggagaaggtgcagacgcttgtgagggaggagagggttgaggacctcaggtctatactggaggccagcgtcgagcccaccccctacgcctacataccaaaccagtacagcaacccggcgaacccacgggcccacgaggagacgacggggagggagatatggatgcagactggcggcagggttgacgtggtctacgccggcatggggaccagggggactataaccggggtggcccgctatctgaagagggccaagccctctgtgaggattgtgggcgtggaccctgaggggagcatatacagcctcgtcaagaagggcatgagcccccacgaggcagcgaagcacgccagaccctacaaggtggaggggataggggaggacttcataccctcaaccatagacctgagcctcgtggacgaggtggttgtggtcacggaccagcaggccttctccatggccaggatgctggcccggctcgagggtgtgctggcggggggctcctcgggcgccgccctctacgcggccgtgaagcacataaagaccaggagggtcaggggtgttgccgtggttatactccccgacacgggcaggaactacatcaacaagctctacaacgacaggtggatgggggagaacggtttctccactagggacgaggaggtcctgggggagctgctgtga

SEQ ID NO: 134971 - protein, 389 aa, Aeropyrum pernix K1
MRKGLGSGVYGSILDLVGGTPLLRLGRVERFFRLEGVELYGKLEMFNPGGSVKDRIGLYMLMDARSRGLVEEGAVIIEPTAGNTGVGLALAAIHYGFRLVAVMPSKMSVEKELILRAYGAYVIRTPTAVPPESPLSYYRVAEAVRNLLWMIGGRPGGGEVRKVVEKVQTLVREERVEDLRSILEASVEPTPYAYIPNQYSNPANPRAHEETTGREIWMQTGGRVDVVYAGMGTRGTITGVARYLKRAKPSVRIVGVDPEGSIYSLVKKGMSPHEAAKHARPYKVEGIGEDFIPSTIDLSLVDEVVVVTDQQAFSMARMLARLEGVLAGGSSGAALYAAVKHIKTRRVRGVAVVILPDTGRNYINKLYNDRWMGENGFSTRDEEVLGELL

SEQ ID NO: 134972 - DNA, 1266 bp, Arabidopsis thaliana
  CDS (1)..(1266)
atggcgcctgttaatatgactggcgctgttgttgcagcagcggcgttgttgatgcttacttcttacagcttctttttccgtctctccgagaagaagaagaggaaggagaagttgactatgagaaacgggcttgttgatgccattggcaatactcctctgattcgtatcaatagtctctctgaggctactggatgtgagattcttgggaaatgcgagtttttgaatccaggaggtagtgttaaagatagagttgctgtcaagatcattcaagaggctttggaatctggtaagctattccctggaggaattgtaactgagggtagtgcaggaagtactgccattagccttgctacagttgctccggcttatgggtgtaaatgtcatgttgttatacctgatgatgctgctattgaaaagtctcaaataattgaagcccttggagcttctgttgagagagtgaggccagtgtcaataactcacaaggatcactatgtcaacattgcgaggcgacgggctgacgaagcaaacgagttagcatcaaagagaagactagggagcgaaacaaatggcatacaccaggagaaaactaatggttgcacggttgaggaagtgaaagagccttccttattctcagattcagttaccggtggcttctttgcagatcaatttgaaaacttggcaaattatagggctcattatgaaggtactggccctgaaatctggcaccagactcagggtaatattgacgcctttgttgctgctgcgggtacaggcgggactttagctggtgtttcaaggtttcttcaggataagaatgaaagagttaaatgttttctgattgatcctcctggatctggtctgtacaataaagtaacacggggagtgatgtacacaagagaagaagctgaagggcgtcggctaaagaacccatttgatacaataacagaagggatcggaatcaacaggcttactaaaaacttcctgatggcaaaacttgacggtggttttcgtgggactgataaagaagcggttgagatgtcgaggtttcttctgaagaatgatgggctctttgttggaagctcctcggctatgaactgtgttggggcagtaagggtggctcagacccttggtcctggtcacacaattgtcaccattctttgtgatagcggaatgagacatctaagcaagtttcacgaccctaagtacttgaatttatacgggttaagtccaaccgctatcggattagagttcctcggcataaagtga

SEQ ID NO: 134973 - protein, 421 aa, Arabidopsis thaliana
MAPVNMTGAVVAAAALLMLTSYSFFFRLSEKKKRKEKLTMRNGLVDAIGNTPLIRINSLSEATGCEILGKCEFLNPGGSVKDRVAVKIIQEALESGKLFPGGIVTEGSAGSTAISLATVAPAYGCKCHVVIPDDAAIEKSQIIEALGASVERVRPVSITHKDHYVNIARRRADEANELASKRRLGSETNGIHQEKTNGCTVEEVKEPSLFSDSVTGGFFADQFENLANYRAHYEGTGPEIWHQTQGNIDAFVAAAGTGGTLAGVSRFLQDKNERVKCFLIDPPGSGLYNKVTRGVMYTREEAEGRRLKNPFDTITEGIGINRLTKNFLMAKLDGGFRGTDKEAVEMSRFLLKNDGLFVGSSSAMNCVGAVRVAQTLGPGHTIVTILCDSGMRHLSKFHDPKYLNLYGLSPTAIGLEFLGIK

SEQ ID NO: 134974 - DNA, 876 bp, Thermotoga maritima MSB8; identical to SEQ ID NO: 39342
  CDS (1)..(876): transl_table=11

SEQ ID NO: 134975 - protein, 291 aa, Thermotoga maritima MSB8; identical to SEQ ID NO: 39343

SEQ ID NO: 134976 - DNA, 969 bp, Vibrio cholerae O1 biovar eltor str. N16961; identical to SEQ ID NO: 39344
  CDS (1)..(969): transl_table=11

SEQ ID NO: 134977 - protein, 322 aa, Vibrio cholerae O1 biovar eltor str. N16961; identical to SEQ ID NO: 39345

SEQ ID NO: 134978 - DNA, 924 bp, Bacillus halodurans C-125; identical to SEQ ID NO: 39346
  CDS (1)..(924): transl_table=11

SEQ ID NO: 134979 - protein, 307 aa, Bacillus halodurans C-125; identical to SEQ ID NO: 39347

SEQ ID NO: 134980 - DNA, 939 bp, Bacillus halodurans C-125; identical to SEQ ID NO: 39348
  CDS (1)..(939): transl_table=11

SEQ ID NO: 134981 - protein, 312 aa, Bacillus halodurans C-125; identical to SEQ ID NO: 39349

SEQ ID NO: 134982 - DNA, 948 bp, Pasteurella multocida subsp. multocida str. Pm70; identical to SEQ ID NO: 39350
  CDS (1)..(948): transl_table=11

SEQ ID NO: 134983 - protein, 315 aa, Pasteurella multocida subsp. multocida str. Pm70; identical to SEQ ID NO: 39351

SEQ ID NO: 134984 - DNA, 933 bp, Neisseria meningitidis MC58; identical to SEQ ID NO: 39360
  CDS (1)..(933): transl_table=11

SEQ ID NO: 134985 - protein, 310 aa, Neisseria meningitidis MC58; identical to SEQ ID NO: 39361

SEQ ID NO: 134986 - DNA, 984 bp, Halobacterium sp. NRC-1; identical to SEQ ID NO: 39362
  CDS (1)..(984): transl_table=11

SEQ ID NO: 134987 - protein, 327 aa, Halobacterium sp. NRC-1; identical to SEQ ID NO: 39363

SEQ ID NO: 134988 - DNA, 912 bp, Escherichia coli O157:H7 EDL933
  CDS (1)..(912): transl_table=11
gtgagtacattagaacaaacaataggcaatacgcctctggtgaagttgcagcgaatggggccgaataacggcagtgaagtgtggttaaaactggaaggcaataacccggcaggttcggtaaaagatcgtgcggcgctttcgatgatcgtcgaggcggaaaagcgcggggaaattaaaccgggtgatgtgttaatcgaagccaccagtggtaacaccggcattgcgctggcaatgattgccgcgcttaaaggctatcgcatgaaattgctgatgcccgacaacatgagccaggaacgccgtgcggcgatgcgtgcttatggtgcggaactgattctggtcaccaaagagcagggcatggaaggtgcgcgcgatctggcgctggagatggcggatcgtggtgaaggaaagctgctcgatcagttcaataatcccgataacccttacgcccattacaccactaccgggccggaaatctggcagcagactggcgggcgcattacctattttgtctccagcatgggaacaaccggcactatcaccggcgtttcacgctttatgcgcgaacaatccaaaccggtgaccattgttggcctgcagccggaagagggcagtagcattcccggcattcgccgctggcctgcggaatatctgccggggattttcaacgcttctctggtagatgaggtgctggatattcatcagcgcgatgcggaaaacaccatgcgcgaactggctgtgcgggaaggaatattctgtggcgtcagctccggcggcgcggttgccggagcactgcgggtggcaaaagctaaccctggtgcggtggtggtagcgatcatctgcgatcgtggcgatcgctacctttccaccggggtgtttggggaagagcattttagtcagggggcggggatttaa

SEQ ID NO: 134989 - protein, 303 aa, Escherichia coli O157:H7 EDL933
MSTLEQTIGNTPLVKLQRMGPNNGSEVWLKLEGNNPAGSVKDRAALSMIVEAEKRGEIKPGDVLIEATSGNTGIALAMIAALKGYRMKLLMPDNMSQERRAAMRAYGAELILVTKEQGMEGARDLALEMADRGEGKLLDQFNNPDNPYAHYTTTGPEIWQQTGGRITYFVSSMGTTGTITGVSRFMREQSKPVTIVGLQPEEGSSIPGIRRWPAEYLPGIFNASLVDEVLDIHQRDAENTMRELAVREGIFCGVSSGGAVAGALRVAKANPGAVVVAIICDRGDRYLSTGVFGEEHFSQGAGI

SEQ ID NO: 134990 - DNA, 954 bp, Deinococcus radiodurans R1; identical to SEQ ID NO: 39364
  CDS (1)..(954): transl_table=11

SEQ ID NO: 134991 - protein, 317 aa, Deinococcus radiodurans R1; identical to SEQ ID NO: 39365

SEQ ID NO: 134992 - DNA, 999 bp, Xylella fastidiosa 9a5c; identical to SEQ ID NO: 39366
  CDS (1)..(999): transl_table=11

SEQ ID NO: 134993 - protein, 332 aa, Xylella fastidiosa 9a5c; identical to SEQ ID NO: 39367

SEQ ID NO: 134994 - DNA, 894 bp, Sulfolobus solfataricus P2
  CDS (1)..(894): transl_table=11
gtgtcaaatcctcttcacgtattctcaaatgagcaagagttactagaaggtatgtggcctactccactactaaaacttaggataggaaatgacacatgggctaaactagaattttataatccttttagcagaagtgtaaaagataggacagcgtggttcttatttaggcaagcattactaaagaatgcaactcatatagttgaagccacctctggcaatactggaatagcattagcgtcgctatcttcaattttcggtatgcgattcacaatgtttcttcccgtagttgctccaaaggtgtataaggtttttgtaaagttattaggaggtaatgttatagaggctggtaattcgaccaatgatgtaatacccttagtaaagaagtttgcagagatgactaatgcgctcaatttggatcagttcaataatccaatcaacgtaatagctcactatgagactaccgcaagagaaattgatgaacagttaagttctattgggaagaagccttcacgtattatagctaccatgggaactgggggtcatatagcggggattgctaagtattttaaagagaaatatggaaatgatgtagaaataataggagttcaaccctcagaaaattccagaattcctggaataaagagacaaaatggctctaattctttactaagggacgtgaagatagatagagtagttgacgtaagtttggaagaagcaatcgatgggactattagtgtagcaaggacttccgggattttaataggtataagtgcaggtgctactgtggcagcctataagaagataagtgatgtttcctccactacagtgcttatatttccagatgatgcttttaagtatgttgatattttagagcaaactttaaaagagatatag

SEQ ID NO: 134995 - protein, 297 aa, Sulfolobus solfataricus P2
MSNPLHVFSNEQELLEGMWPTPLLKLRIGNDTWAKLEFYNPFSRSVKDRTAWFLFRQALLKNATHIVEATSGNTGIALASLSSIFGMRFTMFLPVVAPKVYKVFVKLLGGNVIEAGNSTNDVIPLVKKFAEMTNALNLDQFNNPINVIAHYETTAREIDEQLSSIGKKPSRIIATMGTGGHIAGIAKYFKEKYGNDVEIIGVQPSENSRIPGIKRQNGSNSLLRDVKIDRVVDVSLEEAIDGTISVARTSGILIGISAGATVAAYKKISDVSSTTVLIFPDDAFKYVDILEQTLKEI

SEQ ID NO: 134996 - DNA, 930 bp, Clostridium acetobutylicum ATCC 824; identical to SEQ ID NO: 39372
  CDS (1)..(930): transl_table=11

SEQ ID NO: 134997 - protein, 309 aa, Clostridium acetobutylicum ATCC 824; identical to SEQ ID NO: 39373

SEQ ID NO: 134998 - DNA, 969 bp, Agrobacterium tumefaciens str. C58; identical to SEQ ID NO: 39374
  CDS (1)..(969): transl_table=11

SEQ ID NO: 134999 - protein, 322 aa, Agrobacterium tumefaciens str. C58; identical to SEQ ID NO: 39375

SEQ ID NO: 135000 - DNA, 1038 bp, Agrobacterium tumefaciens str. C58; identical to SEQ ID NO: 39376
  CDS (1)..(1038): transl_table=11

SEQ ID NO: 135001 - protein, 345 aa, Agrobacterium tumefaciens str. C58; identical to SEQ ID NO: 39377

SEQ ID NO: 135002 - DNA, 981 bp, Staphylococcus aureus subsp. aureus N315; identical to SEQ ID NO: 39380
  CDS (1)..(981): transl_table=11

SEQ ID NO: 135003 - protein, 326 aa, Staphylococcus aureus subsp. aureus N315; identical to SEQ ID NO: 39381

SEQ ID NO: 135004 - DNA, 903 bp, Sulfolobus tokodaii str. 7
  CDS (1)..(903): transl_table=11
gtgtcatcaaaagaggtacatgttttcgaaaatgccatagatttaatgcaagggatgtggcctactccattattaaagttaaatataggtaatgatgtatgggctaaattagagttctataaccctttcagtcatagtattaaggatagaactgctctattcttatttaaagaagcaatcaagcaaaacgctaaatcaatagttgaggcaacttctggcaatactggaatagctctttctgcactctcttctatatttaaaataaattttacagtgtttataccatctactgctccttcatcattcaaagtcttaatgaaaattttaggcgcaaacgtcatttcagcaggaaattctacaactgagctcttacctttagtgaagaaactaagtgaatttaatgggtatactcatctggatcagtttcataatgagattaatgttttagctcattatgaaactacagctaaagaaattgatgagcaaactaaagtttctggtattaaagttaaaaggataatagctactatgggaactgctggacatattgtaggtatagctaagtattttaaagagaaatatggtgatgacgtagaaattataggtgttgaacctgcgcaaggagagcgtatacctggaataaaaagagttacagatgataaggataataagtttcttaaaattgctaagattgataggataatagagattaagtttaaggaggctgtagagggagtaatagatgttgctagaaatgatggtattttaataggtttaagctctggtgccactgtttctgcatacaaaaaagtgataagagaaagtaaggatgaaggtgctactattttaatattcccagatgacgcatttaagtacgttaatgagttagaggagtatgtataa

SEQ ID NO: 135005 - protein, 300 aa, Sulfolobus tokodaii str. 7
MSSKEVHVFENAIDLMQGMWPTPLLKLNIGNDVWAKLEFYNPFSHSIKDRTALFLFKEAIKQNAKSIVEATSGNTGIALSALSSIFKINFTVFIPSTAPSSFKVLMKILGANVISAGNSTTELLPLVKKLSEFNGYTHLDQFHNEINVLAHYETTAKEIDEQTKVSGIKVKRIIATMGTAGHIVGIAKYFKEKYGDDVEIIGVEPAQGERIPGIKRVTDDKDNKFLKIAKIDRIIEIKFKEAVEGVIDVARNDGILIGLSSGATVSAYKKVIRESKDEGATILIFPDDAFKYVNELEEYV

SEQ ID NO: 135006 - DNA, 969 bp, Sinorhizobium meliloti 1021; identical to SEQ ID NO: 39382
  CDS (1)..(969): transl_table=11

SEQ ID NO: 135007 - protein, 322 aa, Sinorhizobium meliloti 1021; identical to SEQ ID NO: 39383

SEQ ID NO: 135008 - DNA, 987 bp, Caulobacter crescentus CB15; identical to SEQ ID NO: 39392
  CDS (1)..(987): transl_table=11

SEQ ID NO: 135009 - protein, 328 aa, Caulobacter crescentus CB15; identical to SEQ ID NO: 39393

SEQ ID NO: 135010 - DNA, 996 bp, Synechocystis sp. PCC 6803; identical to SEQ ID NO: 39396
  CDS (1)..(996): transl_table=11

SEQ ID NO: 135011 - protein, 331 aa, Synechocystis sp. PCC 6803; identical to SEQ ID NO: 39397

SEQ ID NO: 135012 - DNA, 1056 bp, Salmonella typhimurium LT2
  CDS (1)..(1056): transl_table=11
atgatgagtagcaattgggttaaaaatgccattaatgaaattaacgctgaccaccagcgctcggcggatacgcatcttattcgtttgcccctgtcggcatttccaggtatccagctttacctgaaagacgaaagcacgcatcccaccggtagcctcaagcatcgtctggcgcgctcgctgttcctttatgggttgtgcaatggctggattaaagaaggcactccgattattgaagcgtcatcaggctcaacggcgatttccgaagcctggttcgcgcgtttactgggactgccgttcatcgccgtcatgcccgcctgtaccgcaaaacgtaaaatcgaacagattcaattttacggcggccactgtcattttgtggagagcgcctgcgaaatttatgccgcctccgagcggctggcgcatgaactgaacggtcactatatggaccagtttacctacgcagaacgagctaccgactggcggggcaacaataatattgccgacagtattttccgccagatgcgcaacgaactccatccggtaccgcgatttatcgtcatgagcgccggaacgggcggaacctctgcgacgattgggcgctatattcgctgccagggctatgatactcagctcatggtggtggatccggaaaattccgtctttttaccttactggcaggatcgcgacgcttcattacgcagcccggtaggcagtaaaattgaaggaattggtcgtccgcgagtagagccttcttttattccggatgtcgtggatgagatgctgcgcgtgccggacgccgccagcgttgccaccgcacactggctggaaacgcagctaggccgtaaagtcggcgcctctaccggcacgaatatgtggggagctctgcagcttgcggcccggatgcgcgaggctggagaaaccggcgctatcgtgacgttattgtgcgatagcggcgatcgctatctggatacctattaccatccggcctgggttagcgaccatatcggcgatttgacgccgtggtcagcggccatcgcaaaattacttaccggcgactag

SEQ ID NO: 135013 - protein, 351 aa, Salmonella typhimurium LT2
MMSSNWVKNAINEINADHQRSADTHLIRLPLSAFPGIQLYLKDESTHPTGSLKHRLARSLFLYGLCNGWIKEGTPIIEASSGSTAISEAWFARLLGLPFIAVMPACTAKRKIEQIQFYGGHCHFVESACEIYAASERLAHELNGHYMDQFTYAERATDWRGNNNIADSIFRQMRNELHPVPRFIVMSAGTGGTSATIGRYIRCQGYDTQLMVVDPENSVFLPYWQDRDASLRSPVGSKIEGIGRPRVEPSFIPDVVDEMLRVPDAASVATAHWLETQLGRKVGASTGTNMWGALQLAARMREAGETGAIVTLLCDSGDRYLDTYYHPAWVSDHIGDLTPWSAAIAKLLTGD

SEQ ID NO: 135014 - DNA, 927 bp, Listeria monocytogenes EGD-e; identical to SEQ ID NO: 39398
  CDS (1)..(927): transl_table=11

SEQ ID NO: 135015 - protein, 308 aa, Listeria monocytogenes EGD-e; identical to SEQ ID NO: 39399

SEQ ID NO: 135016 - DNA, 927 bp, Listeria innocua Clip11262; identical to SEQ ID NO: 39400
  CDS (1)..(927): transl_table=11

SEQ ID NO: 135017 - protein, 308 aa, Listeria innocua Clip11262; identical to SEQ ID NO: 39401

SEQ ID NO: 135018 - DNA, 960 bp, Nostoc sp. PCC 7120; identical to SEQ ID NO: 39402
  CDS (1)..(960): transl_table=11

SEQ ID NO: 135019 - protein, 319 aa, Nostoc sp. PCC 7120; identical to SEQ ID NO: 39403

SEQ ID NO: 135020 - DNA, 963 bp, Nostoc sp. PCC 7120; identical to SEQ ID NO: 39406
  CDS (1)..(963): transl_table=11

SEQ ID NO: 135021 - protein, 320 aa, Nostoc sp. PCC 7120; identical to SEQ ID NO: 39407

SEQ ID NO: 135022 - DNA, 903 bp, Ralstonia solanacearum GMI1000; identical to SEQ ID NO: 39408
  CDS (1)..(903): transl_table=11

SEQ ID NO: 135023 - protein, 300 aa, Ralstonia solanacearum GMI1000; identical to SEQ ID NO: 39409

SEQ ID NO: 135024 - DNA, 1011 bp, Brucella melitensis 16M; identical to SEQ ID NO: 39412
  CDS (1)..(1011): transl_table=11

SEQ ID NO: 135025 - protein, 336 aa, Brucella melitensis 16M; identical to SEQ ID NO: 39413

SEQ ID NO: 135026 - DNA, 975 bp, Arabidopsis thaliana; identical to SEQ ID NO: 39420
  CDS (1)..(975)

SEQ ID NO: 135027 - protein, 324 aa, Arabidopsis thaliana; identical to SEQ ID NO: 39421

SEQ ID NO: 135028 - DNA, 954 bp, Corynebacterium glutamicum ATCC 13032; identical to SEQ ID NO: 39422
  CDS (1)..(954): transl_table=11

SEQ ID NO: 135029 - protein, 317 aa, Corynebacterium glutamicum ATCC 13032; identical to SEQ ID NO: 39423

SEQ ID NO: 135030 - DNA, 957 bp, Corynebacterium glutamicum ATCC 13032; identical to SEQ ID NO: 39424
  CDS (1)..(957): transl_table=11

SEQ ID NO: 135031 - protein, 318 aa, Corynebacterium glutamicum ATCC 13032; identical to SEQ ID NO: 39425

SEQ ID NO: 135032 - DNA, 951 bp, Fusobacterium nucleatum subsp. nucleatum ATCC 25586; identical to SEQ ID NO: 39426
  CDS (1)..(951): transl_table=11

SEQ ID NO: 135033 - protein, 316 aa, Fusobacterium nucleatum subsp. nucleatum ATCC 25586; identical to SEQ ID NO: 39427

SEQ ID NO: 135034 - DNA, 942 bp, Streptococcus pyogenes MGAS8232; identical to SEQ ID NO: 39428
  CDS (1)..(942): transl_table=11

SEQ ID NO: 135035 - protein, 313 aa, Streptococcus pyogenes MGAS8232; identical to SEQ ID NO: 39429

SEQ ID NO: 135036 - DNA, 1569 bp, Drosophila melanogaster; identical to SEQ ID NO: 39430
  CDS (1)..(1569)

SEQ ID NO: 135037 - protein, 522 aa, Drosophila melanogaster; identical to SEQ ID NO: 39431

SEQ ID NO: 135038 - DNA, 927 bp, Methanosarcina acetivorans C2A; identical to SEQ ID NO: 39432
  CDS (1)..(927): transl_table=11

SEQ ID NO: 135039 - protein, 308 aa, Methanosarcina acetivorans C2A; identical to SEQ ID NO: 39433

SEQ ID NO: 135040 - DNA, 921 bp, Thermoanaerobacter tengcongensis MB4; identical to SEQ ID NO: 39434
  CDS (1)..(921): transl_table=11

SEQ ID NO: 135041 - protein, 306 aa, Thermoanaerobacter tengcongensis MB4; identical to SEQ ID NO: 39435

SEQ ID NO: 135042 - DNA, 939 bp, Thermoanaerobacter tengcongensis MB4; identical to SEQ ID NO: 39436
  CDS (1)..(939): transl_table=11

SEQ ID NO: 135043 - protein, 312 aa, Thermoanaerobacter tengcongensis MB4; identical to SEQ ID NO: 39437

SEQ ID NO: 135044 - DNA, 951 bp, Streptomyces coelicolor A3(2); identical to SEQ ID NO: 39438
  CDS (1)..(951): transl_table=11

SEQ ID NO: 135045 - protein, 316 aa, Streptomyces coelicolor A3(2); identical to SEQ ID NO: 39439

SEQ ID NO: 135046 - DNA, 1386 bp, Streptomyces coelicolor A3(2); identical to SEQ ID NO: 39440
  CDS (1)..(1386): transl_table=11

SEQ ID NO: 135047 - protein, 461 aa, Streptomyces coelicolor A3(2); identical to SEQ ID NO: 39441

SEQ ID NO: 135048 - DNA, 1371 bp, Xanthomonas campestris pv. campestris str. ATCC 33913; identical to SEQ ID NO: 39442
  CDS (1)..(1371): transl_table=11

SEQ ID NO: 135049 - protein, 456 aa, Xanthomonas campestris pv. campestris str. ATCC 33913; identical to SEQ ID NO: 39443

SEQ ID NO: 135050 - DNA, 960 bp, Xanthomonas campestris pv. campestris str. ATCC 33913; identical to SEQ ID NO: 39444
  CDS (1)..(960): transl_table=11

SEQ ID NO: 135051 - protein, 319 aa, Xanthomonas campestris pv. campestris str. ATCC 33913; identical to SEQ ID NO: 39445

SEQ ID NO: 135052 - DNA, 960 bp, Xanthomonas axonopodis pv. citri str. 306; identical to SEQ ID NO: 39446
  CDS (1)..(960): transl_table=11

SEQ ID NO: 135053 - protein, 319 aa, Xanthomonas axonopodis pv. citri str. 306; identical to SEQ ID NO: 39447

SEQ ID NO: 135054 - DNA, 1371 bp, Xanthomonas axonopodis pv. citri str. 306; identical to SEQ ID NO: 39448
  CDS (1)..(1371): transl_table=11

SEQ ID NO: 135055 - protein, 456 aa, Xanthomonas axonopodis pv. citri str. 306; identical to SEQ ID NO: 39449

SEQ ID NO: 135056 - DNA, 933 bp, Chlorobium tepidum TLS; identical to SEQ ID NO: 39452
  CDS (1)..(933): transl_table=11

SEQ ID NO: 135057 - protein, 310 aa, Chlorobium tepidum TLS; identical to SEQ ID NO: 39453

SEQ ID NO: 135058 - DNA, 879 bp, Yersinia pestis KIM; identical to SEQ ID NO: 39454
  CDS (1)..(879): transl_table=11

SEQ ID NO: 135059 - protein, 292 aa, Yersinia pestis KIM; identical to SEQ ID NO: 39455

SEQ ID NO: 135060 - DNA, 969 bp, Yersinia pestis KIM; identical to SEQ ID NO: 39456
  CDS (1)..(969): transl_table=11

SEQ ID NO: 135061 - protein, 322 aa, Yersinia pestis KIM; identical to SEQ ID NO: 39457

SEQ ID NO: 135062 - DNA, 966 bp, Thermosynechococcus elongatus BP-1; identical to SEQ ID NO: 39458
  CDS (1)..(966): transl_table=11

SEQ ID NO: 135063 - protein, 321 aa, Thermosynechococcus elongatus BP-1; identical to SEQ ID NO: 39459

SEQ ID NO: 135064 - DNA, 927 bp, Oceanobacillus iheyensis HTE831; identical to SEQ ID NO: 39460
  CDS (1)..(927): transl_table=11

SEQ ID NO: 135065 - protein, 308 aa, Oceanobacillus iheyensis HTE831; identical to SEQ ID NO: 39461

SEQ ID NO: 135066 - DNA, 924 bp, Oceanobacillus iheyensis HTE831; identical to SEQ ID NO: 39464
  CDS (1)..(924): transl_table=11

SEQ ID NO: 135067 - protein, 307 aa, Oceanobacillus iheyensis HTE831; identical to SEQ ID NO: 39465

SEQ ID NO: 135068 - DNA, 1227 bp, Bifidobacterium longum NCC2705; identical to SEQ ID NO: 39466
  CDS (1)..(1227): transl_table=11

SEQ ID NO: 135069 - protein, 408 aa, Bifidobacterium longum NCC2705; identical to SEQ ID NO: 39467

SEQ ID NO: 135070 - DNA, 1029 bp, Brucella suis 1330
  CDS (1)..(1029): transl_table=11
atgttcaattcggtactcgacacaatcggcaacacgccgttgatccgcctcagcaaggcttccgagctcacaggatgcgatatttacgggaaagcagagtttctcaatccgggccagtcggtcaaggaccgtgcggcgctctacattatccgcgatgcggaaaaacgcgggcttttgcggcccggaggcgtgattgtggaaggaaccgcgggcaataccggcattggcctcacgatggtcgccaaggcattgggctaccgcacggcgatcgtgattcctgaaacgcagagccaggaaaaaaaggacgccttgcgcctgctcggtgcagagctgatcgaggttcccgccgccccctatcgcaacccgaacaattatgtgcgcctttcagggcgtcttgccgagcaactggccaaaaccgagccgaatggcgcaatatgggccaatcagttcgacaatacggtcaaccggcaagcccatatcgagaccacggcgcaggaaatctggcgcgatacaaacgaccagatcgatggttttgtggccgctgtgggatctggcggtacgcttgccggaacggcgattggcctgaaggaacggaaccacaatatcaaaattgctctggcggacccgcatggcgcggcgcttcacgccttctatacgaccggcgaattgaaggcagaaggcgattcgatcaccgaaggcatcgggcaggggcgcatcaccgccaatcttgaaggcttcacccctgatttttcctaccagattcccgatgcggaggcgctcgatatcctgtttgccctcgtggaagaggaggggctttgcctcggcggctcgtccggcatcaacattgccggtgcaatccggcttgcaaaagatctcgggccgggccacacaattgtgaccgtgctttgtgactacggtaatcgttaccagtcaaagctgttcaatcccgccttcctccgcggcaagagcctgcccgtgccgcgctggctggagaagaaaaccgaaatagacataccgttcgaggggtaa

SEQ ID NO: 135071 - protein, 342 aa, Brucella suis 1330
MFNSVLDTIGNTPLIRLSKASELTGCDIYGKAEFLNPGQSVKDRAALYIIRDAEKRGLLRPGGVIVEGTAGNTGIGLTMVAKALGYRTAIVIPETQSQEKKDALRLLGAELIEVPAAPYRNPNNYVRLSGRLAEQLAKTEPNGAIWANQFDNTVNRQAHIETTAQEIWRDTNDQIDGFVAAVGSGGTLAGTAIGLKERNHNIKIALADPHGAALHAFYTTGELKAEGDSITEGIGQGRITANLEGFTPDFSYQIPDAEALDILFALVEEEGLCLGGSSGINIAGAIRLAKDLGPGHTIVTVLCDYGNRYQSKLFNPAFLRGKSLPVPRWLEKKTEIDIPFEG

SEQ ID NO: 135072 - DNA, 912 bp, Shigella flexneri 2a str. 301; identical to SEQ ID NO: 39470
  CDS (1)..(912): transl_table=11

SEQ ID NO: 135073 - protein, 303 aa, Shigella flexneri 2a str. 301; identical to SEQ ID NO: 39471

SEQ ID NO: 135074 - DNA, 969 bp, Shewanella oneidensis MR-1; identical to SEQ ID NO: 39472
  CDS (1)..(969): transl_table=11

SEQ ID NO: 135075 - protein, 322 aa, Shewanella oneidensis MR-1; identical to SEQ ID NO: 39473

SEQ ID NO: 135076 - DNA, 867 bp, Shewanella oneidensis MR-1; identical to SEQ ID NO: 39474
  CDS (1)..(867): transl_table=11

SEQ ID NO: 135077 - protein, 288 aa, Shewanella oneidensis MR-1; identical to SEQ ID NO: 39475

SEQ ID NO: 135078 - DNA, 927 bp, Streptococcus mutans UA159; identical to SEQ ID NO: 39476
  CDS (1)..(927): transl_table=11

SEQ ID NO: 135079 - protein, 308 aa, Streptococcus mutans UA159; identical to SEQ ID NO: 39477

SEQ ID NO: 135080 - DNA, 936 bp, Corynebacterium efficiens YS-314; identical to SEQ ID NO: 39480
  CDS (1)..(936): transl_table=11

SEQ ID NO: 135081 - protein, 311 aa, Corynebacterium efficiens YS-314; identical to SEQ ID NO: 39481

SEQ ID NO: 135082 - DNA, 900 bp, Pseudomonas putida KT2440
  CDS (1)..(900): transl_table=11
atgaccttgcagtacccaaccatcgccgattgcgtcggcaatacgccactggttcgcctgcagcgcatcgctggcgaaaccagcaataccctcctgctcaagctcgaaggtaacaatcctgccggctcggtgaaagaccgcccggccctgtcgatgatcgctcgcgccgaattgcggggccagatcaagccaggcgataccctgatcgaagccacctccggcaacacgggcatcgccctggcgatggcggcggcgatcaagggctacaagatgatcctgatcatgcccgacaactccaccgccgagcgcaaggccgccatgacggcctatggcgccgagctgatcctggtgaccaaggaggaggggatggaaggcgcccgtgacctggccgagaagctgcaggccgaaggccgtggcctggtgctcgaccagttcgccaacggcgacaacccgatcgcccactacaacagcaccggcccggagatctggcagcagacccagggcaccattacccatttcgtcagctccatggggaccaccggtaccatcatgggctgctcgcagtacctcaaggaacagaaccccgcggtgcagatcatcggcctgcaaccgatggaaggctcggctattccgggcattcgccgctggcccgaggaatatttgccgaaaatcttcgacgccacccgcgtcgaccgcgtggtcgacatgtcgcagcaggaagccgaagacaccacccgtcgccttgcgcgtgaagagggcattttctgcggcgtgtcttctggtggtgcggtcgcggccatgttgcgtctgtcccgcgaagtggaaaatgcggtcatggttgcgatcatttgcgaccgcggcgaccgttatctgtccactggcctgtttgatccacgctaa

SEQ ID NO: 135083 - protein, 299 aa, Pseudomonas putida KT2440
MTLQYPTIADCVGNTPLVRLQRIAGETSNTLLLKLEGNNPAGSVKDRPALSMIARAELRGQIKPGDTLIEATSGNTGIALAMAAAIKGYKMILIMPDNSTAERKAAMTAYGAELILVTKEEGMEGARDLAEKLQAEGRGLVLDQFANGDNPIAHYNSTGPEIWQQTQGTITHFVSSMGTTGTIMGCSQYLKEQNPAVQIIGLQPMEGSAIPGIRRWPEEYLPKIFDATRVDRVVDMSQQEAEDTTRRLAREEGIFCGVSSGGAVAAMLRLSREVENAVMVAIICDRGDRYLSTGLFDPR

SEQ ID NO: 135084 - DNA, 975 bp, Pseudomonas putida KT2440; identical to SEQ ID NO: 39482
  CDS (1)..(975): transl_table=11

SEQ ID NO: 135085 - protein, 324 aa, Pseudomonas putida KT2440; identical to SEQ ID NO: 39483

SEQ ID NO: 135086 - DNA, 984 bp, Escherichia coli CFT073; identical to SEQ ID NO: 39484
  CDS (1)..(984): transl_table=11
  misc_feature (887)..(887): n is a, g, c or t

SEQ ID NO: 135087 - protein, 327 aa, Escherichia coli CFT073; identical to SEQ ID NO: 39485
  misc_feature (296)..(296): The Xaa at location 296 stands for Ala, Glu, Gly, or Val.

SEQ ID NO: 135088 - DNA, 903 bp, Vibrio vulnificus CMCP6
  CDS (1)..(903): transl_table=11
gtgagtaacggtaaagtgctcgcgaaaatcgaagcacgcaaccctagcttcagtgttaagtgccgtatcggtgcaaacatgatttgggaagcagaaaaagaaggcaaactgaaaccaggtgttgaattggtagagccaaccagtggtaatactggtattgcgctggcatttgttgcagctgctcgtggttacaagctgacactgacgatgcttgagtccatgagtctagagcgccgtaaactattgaaagcactcggtgcaaatctagagcttactgaagcggcgaaaggcatgaaaggcgcaatcgctaaagcagaagaaattgttgctagcaaccctgaaaaatacctacttcttcaacaattcaataacccagcaaacccagaaatccacgaaaagaccactggtccagaaatctgggaagccacagatggcgctatcgatgtctttgttgctggtgtaggtactggtggtaccattactggtaccagccgttacatcaaaggtgagaaagggaaacaaattctttccgttgctgttgagccaacagaatctcctgtaatttctcaagcgctggcaggtgaagaaatcaagccagcaccacacaaaatccaaggtatcggcgcaggtttcattcctggtaacctcgatttgtcactgattgaccgtgttgagaaagtgacatcggaagaagcgattgaaatggctcgtcgcctaatggaagaagaaggtatcttggcgggtatttcatcaggtgctgccgtggtggcggcaaaccgccttgctgaactccctgaattcgaaggaaaaaccattgttaccgtactacctagctctggtgaacgttacctaagtacggccctatttgctggcatctttactgagaaagagaaccagcagtaa

SEQ ID NO: 135089 - protein, 300 aa, Vibrio vulnificus CMCP6
MSNGKVLAKIEARNPSFSVKCRIGANMIWEAEKEGKLKPGVELVEPTSGNTGIALAFVAAARGYKLTLTMLESMSLERRKLLKALGANLELTEAAKGMKGAIAKAEEIVASNPEKYLLLQQFNNPANPEIHEKTTGPEIWEATDGAIDVFVAGVGTGGTITGTSRYIKGEKGKQILSVAVEPTESPVISQALAGEEIKPAPHKIQGIGAGFIPGNLDLSLIDRVEKVTSEEAIEMARRLMEEEGILAGISSGAAVVAANRLAELPEFEGKTIVTVLPSSGERYLSTALFAGIFTEKENQQ

SEQ ID NO: 135090 - DNA, 1035 bp, Bradyrhizobium japonicum USDA 110; identical to SEQ ID NO: 39486
  CDS (1)..(1035): transl_table=11

SEQ ID NO: 135091 - protein, 344 aa, Bradyrhizobium japonicum USDA 110; identical to SEQ ID NO: 39487

SEQ ID NO: 135092 - DNA, 978 bp, Bradyrhizobium japonicum USDA 110; identical to SEQ ID NO: 39488
  CDS (1)..(978): transl_table=11

SEQ ID NO: 135093 - protein, 325 aa, Bradyrhizobium japonicum USDA 110; identical to SEQ ID NO: 39489

SEQ ID NO: 135094 - DNA, 960 bp, Xylella fastidiosa Temecula1; identical to SEQ ID NO: 39490
  CDS (1)..(960): transl_table=11

SEQ ID NO: 135095 - protein, 319 aa, Xylella fastidiosa Temecula1; identical to SEQ ID NO: 39491

SEQ ID NO: 135096 - DNA, 918 bp, Clostridium tetani E88; identical to SEQ ID NO: 39492
  CDS (1)..(918): transl_table=11

SEQ ID NO: 135097 - protein, 305 aa, Clostridium tetani E88; identical to SEQ ID NO: 39493

SEQ ID NO: 135098 - DNA, 903 bp, Pseudomonas syringae pv. tomato str. DC3000; identical to SEQ ID NO: 39496
  CDS (1)..(903): transl_table=11

SEQ ID NO: 135099 - protein, 300 aa, Pseudomonas syringae pv. tomato str. DC3000; identical to SEQ ID NO: 39497

SEQ ID NO: 135100 - DNA, 975 bp, Pseudomonas syringae pv. tomato str. DC3000; identical to SEQ ID NO: 39500
  CDS (1)..(975): transl_table=11

SEQ ID NO: 135101 - protein, 324 aa, Pseudomonas syringae pv. tomato str. DC3000; identical to SEQ ID NO: 39501

SEQ ID NO: 135102 - DNA, 969 bp, Vibrio parahaemolyticus RIMD 2210633; identical to SEQ ID NO: 39502
  CDS (1)..(969): transl_table=11

SEQ ID NO: 135103 - protein, 322 aa, Vibrio parahaemolyticus RIMD 2210633; identical to SEQ ID NO: 39503

SEQ ID NO: 135104 - DNA, 942 bp, Streptococcus pyogenes SSI-1; identical to SEQ ID NO: 39504
  CDS (1)..(942): transl_table=11

SEQ ID NO: 135105 - protein, 313 aa, Streptococcus pyogenes SSI-1; identical to SEQ ID NO: 39505

SEQ ID NO: 135106 - DNA, 912 bp, Salmonella enterica subsp. enterica serovar Typhi Ty2
  CDS (1)..(912): transl_table=11
gtgaatacattagaacaaaccatcggcaatacgccgctggtcaaattacaacggctggggccggataacggcagtgaaatctgggtcaagctggaaggcaataatccggcaggatcggtgaaagatcgcgcggcgctatcgatgattgtcgaggcggaaaagcgcggggaaattaaaccgggcgatgccctgattgaagcgaccagcggcaacactggcattgcgctggcgatgatcgccgcgctgaaaggttatcgcatgaagctgttgatgccggacaacatgagccaggagcgtcgggcggcaatgcgggcctatggcgcggaactgattctggtcactaaagagcagggaatggaaggggcgcgcgatttagcgctcgctatgtctgagcgcggagaaggtaaactgctcgatcagtttaataatcctgataatccctacgcccactacacgaccaccggcccggaaatctggcggcaaacgtcaggtcgcatcacccattttgtctccagcatgggcacgaccggcaccattaccggcgtgtcgcgttttctgcgcgagcaggaaaaaacggtcaccatcgttggcctgcaaccggaagagggcagcagtattccgggcattcgccgctggcctacggaatatatgccgggcatatttaacgcctcgctggtggatgaggtgctggatattcatcagaatgatgccgaaaacaccatgcgtgaactggcggttcgtgaagggattttctgcggcgtcagctccggcggcgcggtagcgggcgcgttacgcgtcgcacgagccacgcccggcgcgatagtggtggcgatcatctgcgatcgcggcgaccgttacttgtctaccggcgtgtttggtgaagagcatttcagccagggggcagggatttaa

SEQ ID NO: 135107 - protein, 303 aa, Salmonella enterica subsp. enterica serovar Typhi Ty2
MNTLEQTIGNTPLVKLQRLGPDNGSEIWVKLEGNNPAGSVKDRAALSMIVEAEKRGEIKPGDALIEATSGNTGIALAMIAALKGYRMKLLMPDNMSQERRAAMRAYGAELILVTKEQGMEGARDLALAMSERGEGKLLDQFNNPDNPYAHYTTTGPEIWRQTSGRITHFVSSMGTTGTITGVSRFLREQEKTVTIVGLQPEEGSSIPGIRRWPTEYMPGIFNASLVDEVLDIHQNDAENTMRELAVREGIFCGVSSGGAVAGALRVARATPGAIVVAIICDRGDRYLSTGVFGEEHFSQGAGI

SEQ ID NO: 135108 - DNA, 954 bp, Bacteroides thetaiotaomicron VPI-5482; identical to SEQ ID NO: 39506
  CDS (1)..(954): transl_table=11

SEQ ID NO: 135109 - protein, 317 aa, Bacteroides thetaiotaomicron VPI-5482; identical to SEQ ID NO: 39507

SEQ ID NO: 135110 - DNA, 948 bp, Bacteroides thetaiotaomicron VPI-5482; identical to SEQ ID NO: 39508
  CDS (1)..(948): transl_table=11

SEQ ID NO: 135111 - protein, 315 aa, Bacteroides thetaiotaomicron VPI-5482; identical to SEQ ID NO: 39509

SEQ ID NO: 135112 - DNA, 933 bp, Enterococcus faecalis V583; identical to SEQ ID NO: 39512
  CDS (1)..(933): transl_table=11

SEQ ID NO: 135113 - protein, 310 aa, Enterococcus faecalis V583; identical to SEQ ID NO: 39513

SEQ ID NO: 135114 - DNA, 951 bp, Streptomyces avermitilis MA-4680
  CDS (1)..(951): transl_table=11
atgcgctacgactccccgctcgccgcggtgggcaacacccctctggtgcgcctgccgcggctctcgccgtccgaggacgtgcggatctgggccaagctggaggaccgcaacccgacgggctcggtcaaggaccgccccgcgctccacatgatcgaacaggccgagaaggacgggcggctgacaccgggctgcacgatcctggagccgacgagcggcaacacgggcatctcgctcgccatggcggccaagctcaagggctaccgcatcgtgtgcgtgatgccggagaacacctcgcaggagcgccgtgacctgctgggcatgtggggcgccgagatcgtctccagcccggcggccggcggctccaacacggcggtccgtgtcgccaaggaactggcggccgagcacccggactgggtgatgctctaccagtacggcaacccggacaacgcgggcgcgcactacgcgaccaccgggcccgagatcctcgccgacctgccctccgtcacccacttcgtcgccggcctcggcaccaccggcacgctgatgggcgtgggccgttacctgcgcgagcagaagccggacatcaagatcgtcgccgccgagccgcgctacgacgacctggtgtacggcctgcggaacctggacgagggcttcgtccccgagctgtacgacgcgtcggtgctgaccacccgcttctccgtcggctccgcggacgcggtgacccgcacccgggagctgctccagcaggagggcatcttcgcgggcgtctccacgggcgcggcgctgcacgcggcgatcggcgtgggcaacaaggcggtcaaggcgggggagacggcggacatcgtcttcgtggtcgcggacggcggctggaagtacctgtcgacgggcgtctacaccgcggccacgacagaagaggcgatcgcgacgcttcagggacaactctgggcgtga

SEQ ID NO: 135115 - protein, 316 aa, Streptomyces avermitilis MA-4680
MRYDSPLAAVGNTPLVRLPRLSPSEDVRIWAKLEDRNPTGSVKDRPALHMIEQAEKDGRLTPGCTILEPTSGNTGISLAMAAKLKGYRIVCVMPENTSQERRDLLGMWGAEIVSSPAAGGSNTAVRVAKELAAEHPDWVMLYQYGNPDNAGAHYATTGPEILADLPSVTHFVAGLGTTGTLMGVGRYLREQKPDIKIVAAEPRYDDLVYGLRNLDEGFVPELYDASVLTTRFSVGSADAVTRTRELLQQEGIFAGVSTGAALHAAIGVGNKAVKAGETADIVFVVADGGWKYLSTGVYTAATTEEAIATLQGQLWA

SEQ ID NO: 135116 - DNA, 972 bp, Shigella flexneri 2a str. 2457T; identical to SEQ ID NO: 39522
  CDS (1)..(972): transl_table=11

SEQ ID NO: 135117 - protein, 323 aa, Shigella flexneri 2a str. 2457T; identical to SEQ ID NO: 39523

SEQ ID NO: 135118 - DNA, 888 bp, Nitrosomonas europaea ATCC 19718; identical to SEQ ID NO: 39524
  CDS (1)..(888): transl_table=11

SEQ ID NO: 135119 - protein, 295 aa, Nitrosomonas europaea ATCC 19718; identical to SEQ ID NO: 39525

SEQ ID NO: 135120 - DNA, 918 bp, Bacillus anthracis str. Ames
  CDS (1)..(918): transl_table=11
atgaaattatgtgaaaatataacagaattaataggagatacacctgtcgtcagattatctaaatttattccagaagacgcagcagatgtgtatgtaaaactagaaatgtttaatccatcgcgcagtgtgaaagaccgtgctgcctataatttactgcacgttgcagaagagaatggtcttatcaaaccaggagatacaattattgaaccgacaagtggaaatacagggataggcttagcaatgaatgcagctgcgaaagggtataaggcgattttaattatgccagacaatatgtcaaaagagcgtataaatttattgaaagcatatggagcggaagtagttttaacaccggcagaacaaagaatgccgggagcaattgcgaaggcgttagaactgcaaaaggaaattccgaatagttttattccgcagcaatttgaaaatccagcaaacccgaatattcatcgttatacaactgcacttgaaatttatgaacaaatggatggagagcttgatgcatttgtagcaacggctggaactggtggaactattacagggactggggaaacattaaaagagaaactaccaaacttatatattgcagtagtagaaccgaaaggatctcccgttttatcaggcggtgtgccaggtcctcataaactagtaggaacaagtccggggtttatcccgaaaaatttaaatacagaagtgtataacgaaattattcaaattgcagatgaagaggctttaacgacaatgagaaacttagctagacaagaaggtttattagtagggccgtcttccggggcttctgtttatgccgcaattatgattgcaaaacgtttaggtactggtaaaaaagttttatgtgttgcacctgatacaggggaacgttatttgagtatgggattatttgaatga

SEQ ID NO: 135121 - protein, 305 aa, Bacillus anthracis str. Ames
MKLCENITELIGDTPVVRLSKFIPEDAADVYVKLEMFNPSRSVKDRAAYNLLHVAEENGLIKPGDTIIEPTSGNTGIGLAMNAAAKGYKAILIMPDNMSKERINLLKAYGAEVVLTPAEQRMPGAIAKALELQKEIPNSFIPQQFENPANPNIHRYTTALEIYEQMDGELDAFVATAGTGGTITGTGETLKEKLPNLYIAVVEPKGSPVLSGGVPGPHKLVGTSPGFIPKNLNTEVYNEIIQIADEEALTTMRNLARQEGLLVGPSSGASVYAAIMIAKRLGTGKKVLCVAPDTGERYLSMGLFE

SEQ ID NO: 135122 - DNA, 1302 bp, Arabidopsis thaliana; identical to SEQ ID NO: 39526
  CDS (1)..(1302)

SEQ ID NO: 135123 - protein, 433 aa, Arabidopsis thaliana; identical to SEQ ID NO: 39527

SEQ ID NO: 135124 - DNA, 1299 bp, Arabidopsis thaliana; identical to SEQ ID NO: 39528
  CDS (1)..(1299)

SEQ ID NO: 135125 - protein, 432 aa, Arabidopsis thaliana; identical to SEQ ID NO: 39529

SEQ ID NO: 135126 - DNA, 972 bp, Arabidopsis thaliana; identical to SEQ ID NO: 39530
  CDS (1)..(972)

SEQ ID NO: 135127 - protein, 323 aa, Arabidopsis thaliana; identical to SEQ ID NO: 39531

SEQ ID NO: 135128 - DNA, 903 bp, Helicobacter hepaticus ATCC 51449; identical to SEQ ID NO: 39532
  CDS (1)..(903): transl_table=11

SEQ ID NO: 135129 - protein, 300 aa, Helicobacter hepaticus ATCC 51449; identical to SEQ ID NO: 39533

SEQ ID NO: 135130 - DNA, 960 bp, Rhodopirellula baltica SH 1; identical to SEQ ID NO: 39536
  CDS (1)..(960): transl_table=11

SEQ ID NO: 135131 - protein, 319 aa, Rhodopirellula baltica SH 1; identical to SEQ ID NO: 39537

SEQ ID NO: 135132 - DNA, 951 bp, Haemophilus ducreyi 35000HP; identical to SEQ ID NO: 39540
  CDS (1)..(951): transl_table=11

SEQ ID NO: 135133 - protein, 316 aa, Haemophilus ducreyi 35000HP; identical to SEQ ID NO: 39541

SEQ ID NO: 135134 - DNA, 969 bp, Prochlorococcus marinus subsp. marinus str. CCMP1375; identical to SEQ ID NO: 39542
  CDS (1)..(969): transl_table=11

SEQ ID NO: 135135 - protein, 322 aa, Prochlorococcus marinus subsp. marinus str. CCMP1375; identical to SEQ ID NO: 39543

SEQ ID NO: 135136 - DNA, 987 bp, Prochlorococcus marinus subsp. marinus str. CCMP1375; identical to SEQ ID NO: 39544
  CDS (1)..(987): transl_table=11

SEQ ID NO: 135137 - protein, 328 aa, Prochlorococcus marinus subsp. marinus str. CCMP1375; identical to SEQ ID NO: 39545

SEQ ID NO: 135138 - DNA, 945 bp, Candidatus Blochmannia floridanus; identical to SEQ ID NO: 39546
  CDS (1)..(945): transl_table=11

SEQ ID NO: 135139 - protein, 314 aa, Candidatus Blochmannia floridanus; identical to SEQ ID NO: 39547

SEQ ID NO: 135140 - DNA, 912 bp, Bordetella pertussis Tohama I
  CDS (1)..(912): transl_table=11
atgagcactcctacctaccccactatcgagcaaaccgtcggcaatacgccgctcgtgcgcctgcagcgcattcccggcgcggccgggcaggcgcgcggcaacgtgatcctggccaagctggagggcaacaaccctgccggctcggtcaaggaccgtcctgccctgtccatgatcctgcgcgccgaagagcgcggcgaaatccatccgggcgataccctgatcgaggccaccagcggcaataccggcatcgcgctggccatgacggcggccatgcgcgggtaccggatggtcctcatcatgcccgacaacctgtcgctcgagcggcgggccgccatgaccgcctatggcgccgaactgatcctcacgcccgccgccaagggcggcatggaatacgcccgcgacctggccacggcgatgcaggccgaaggcaagggcaaggtgctggaccaattcggcaaccccgacaacccgcgcgcccatatcgagggcaccggtccggaaatctggaaccagacggatggccgtgtcacgcatttcgtcagcgcgatgggcaccaccggcaccatcatgggcgtgtccacctacctgaagtcgcgcaacgcggcggtgcaggtggtcggcgcgcagccggccgaaggctcgcagatcccgggcatccgcaaatggcccgaggcctacatgccgaagatcttcgaccgtgcgctggtcgatgcctatgagtccatcgcgcaggccgagggggagaccatggcgcgccggctggccgccgaagagggcatattcgccggcatttcgtcggcgggcgccctggtggcggcgttgcgcgtggccgagcgggtcgagaacgccaccatcgtcttcatcgtctgcgaccgcggcgaccgctacctgtcgaccggcgtcttcaactga

SEQ ID NO: 135141 - protein, 303 aa, Bordetella pertussis Tohama I
MSTPTYPTIEQTVGNTPLVRLQRIPGAAGQARGNVILAKLEGNNPAGSVKDRPALSMILRAEERGEIHPGDTLIEATSGNTGIALAMTAAMRGYRMVLIMPDNLSLERRAAMTAYGAELILTPAAKGGMEYARDLATAMQAEGKGKVLDQFGNPDNPRAHIEGTGPEIWNQTDGRVTHFVSAMGTTGTIMGVSTYLKSRNAAVQVVGAQPAEGSQIPGIRKWPEAYMPKIFDRALVDAYESIAQAEGETMARRLAAEEGIFAGISSAGALVAALRVAERVENATIVFIVCDRGDRYLSTGVFN

SEQ ID NO: 135142 - DNA, 912 bp, Bordetella bronchiseptica RB50; identical to SEQ ID NO: 39548
  CDS (1)..(912): transl_table=11

SEQ ID NO: 135143 - protein, 303 aa, Bordetella bronchiseptica RB50; identical to SEQ ID NO: 39549

SEQ ID NO: 135144 - DNA, 987 bp, Prochlorococcus marinus subsp. pastoris str. CCMP1986; identical to SEQ ID NO: 39314
  CDS (1)..(987): transl_table=11

SEQ ID NO: 135145 - protein, 328 aa, Prochlorococcus marinus subsp. pastoris str. CCMP1986; identical to SEQ ID NO: 39315

SEQ ID NO: 135146 - DNA, 987 bp, Prochlorococcus marinus str. MIT 9313
  CDS (1)..(987): transl_table=11
atgtcccgcatttacgaagacaacagccaggcaatcggcaacactccactggtcaaactgcacgccgtcagcaaaaacgccaaggcaactgttctcgcaaagattgaaggccgcaatcccgcctacagcgtgaaatgccgcattggcgccaacatgatctgggatgccgaaaagcgcggtttactgagcaaagagcgcacgatcattgagcccacctctggtaacaccggcattgcactggcctacacagcagcagcccgcggctacaaactgatcctcaccatgcccgaatcaatgtcgctagaacggcggcgggtgatggcagtgcttggtgcagaactcattctcacagaagcagccaagggaatgccaggcgccattgccaaggcaaaagagatcgccgaaagcgatccccagaaatacttcatgcccggtcagtttgagaatccggccaatcccgacatccacagcaaaacaaccggtccagaaatctggaacgactgtgatggcgccattgatgtgctcgtgtctggcgtaggcaccggcggcacgatcacaggtgtctcccgttacatcaagcaggagaaaggcaaagccatcatttctgtagccgtcgaaccaacccatagcccggttatcagccaaaccctcaacggggaagaggtcaaacctggtcctcacaaaatccagggcattggagccggcttcattcccaaaaacctcgatctttctttagtggatcgtgtggagcaggtcagcaatgatgaatccatcgccatggccctgcgcttggcaaatgaagaaggtctactggtgggcatctccagtggtgcggcagttgcagcggctattcgtctggcagaacaacccgaatttgcgggcaaaaccatcgtggtcgtgctgccagacatggccgagcgttatctctcttcagtgatgtttgagagtgtgcccacaggcatcattcaggcccctgtagctgcctaa

SEQ ID NO: 135147 - protein, 328 aa, Prochlorococcus marinus str. MIT 9313
MSRIYEDNSQAIGNTPLVKLHAVSKNAKATVLAKIEGRNPAYSVKCRIGANMIWDAEKRGLLSKERTIIEPTSGNTGIALAYTAAARGYKLILTMPESMSLERRRVMAVLGAELILTEAAKGMPGAIAKAKEIAESDPQKYFMPGQFENPANPDIHSKTTGPEIWNDCDGAIDVLVSGVGTGGTITGVSRYIKQEKGKAIISVAVEPTHSPVISQTLNGEEVKPGPHKIQGIGAGFIPKNLDLSLVDRVEQVSNDESIAMALRLANEEGLLVGISSGAAVAAAIRLAEQPEFAGKTIVVVLPDMAERYLSSVMFESVPTGIIQAPVAA

SEQ ID NO: 135148 - DNA, 969 bp, Prochlorococcus marinus str. MIT 9313
  CDS (1)..(969): transl_table=11
atgcccattgctgcggacatcacggccctggttggccgaaccccaatagtgcggctgaatcgcttgccacagttgagtggttgccatgcggaggtgctggccaagttggaaagcttcaaccccactgcctcggttaaagaccgcatcgcgggggccatgattcaagcagcggaggaagctggaaccattgctccggggcgcaccgtgttggtggaacccaccagtggcaacactgggatcgccttggccatggtggctgccgcccgaggctatcgcctcattctcaccatgccggacacgatgagtacagagcgtcgcgccatgcttagggcctatggcgctgaactgcaactcaccccaggcagcgatggaatgactggttccattgagttggcaaaggagttggtggcaaccatccctgaggcttatctgctgcagcagtttgataatcctgcgaatccgcaggtgcatgagcgtacaaccgcagaggagatctggaatgattgcgaggggcggttggatggtctgatcactggagtaggaacggggggcacactcacaggttgtgcgcgtttgctcaagcaacgcaatccaagcctgcgagtgtttgcggtagagccagcgttaagccctgttttggcaggcgggagccctgctccccatcgcattcaggggattggtgctggcttcattcctagcgttcttgatctctctttgatcgatgagatcctgccggtctctgatgacgacgcgatggagatgggtcggcgcttggcgagggaggagggcttgctaagtggggtaagcagtggcgctgctgttgcggctgcactgcaagtgggtagtagggctgagatggtgggcaagcgtcttgttgttgtcttggcaagttttggtgagcgttatctatcaacgccgatgtttagcgctgcttcggcggtgccggcgcagcgtgatggatacctttga

SEQ ID NO: 135149 - protein, 322 aa, Prochlorococcus marinus str. MIT 9313
MPIAADITALVGRTPIVRLNRLPQLSGCHAEVLAKLESFNPTASVKDRIAGAMIQAAEEAGTIAPGRTVLVEPTSGNTGIALAMVAAARGYRLILTMPDTMSTERRAMLRAYGAELQLTPGSDGMTGSIELAKELVATIPEAYLLQQFDNPANPQVHERTTAEEIWNDCEGRLDGLITGVGTGGTLTGCARLLKQRNPSLRVFAVEPALSPVLAGGSPAPHRIQGIGAGFIPSVLDLSLIDEILPVSDDDAMEMGRRLAREEGLLSGVSSGAAVAAALQVGSRAEMVGKRLVVVLASFGERYLSTPMFSAASAVPAQRDGYL

SEQ ID NO: 135150 - DNA, 987 bp, Synechococcus sp. WH 8102; identical to SEQ ID NO: 39312
  CDS (1)..(987): transl_table=11

SEQ ID NO: 135151 - protein, 328 aa, Synechococcus sp. WH 8102; identical to SEQ ID NO: 39313

SEQ ID NO: 135152 - DNA, 969 bp, Synechococcus sp. WH 8102; identical to SEQ ID NO: 39552
  CDS (1)..(969): transl_table=11

SEQ ID NO: 135153 - protein, 322 aa, Synechococcus sp. WH 8102; identical to SEQ ID NO: 39553

SEQ ID NO: 135154 - DNA, 891 bp, Chromobacterium violaceum ATCC 12472; identical to SEQ ID NO: 39554
  CDS (1)..(891): transl_table=11

SEQ ID NO: 135155 - protein, 296 aa, Chromobacterium violaceum ATCC 12472; identical to SEQ ID NO: 39555

SEQ ID NO: 135156 - DNA, 1371 bp, Chromobacterium violaceum ATCC 12472; identical to SEQ ID NO: 39556
  CDS (1)..(1371): transl_table=11

SEQ ID NO: 135157 - protein, 456 aa, Chromobacterium violaceum ATCC 12472; identical to SEQ ID NO: 39557

SEQ ID NO: 135158 - DNA, 933 bp, Chromobacterium violaceum ATCC 12472; identical to SEQ ID NO: 39558
  CDS (1)..(933): transl_table=11

SEQ ID NO: 135159 - protein, 310 aa, Chromobacterium violaceum ATCC 12472; identical to SEQ ID NO: 39559

SEQ ID NO: 135160 - DNA, 999 bp, Wolinella succinogenes DSM 1740; identical to SEQ ID NO: 39560
  CDS (1)..(999): transl_table=11

SEQ ID NO: 135161 - protein, 332 aa, Wolinella succinogenes DSM 1740; identical to SEQ ID NO: 39561

SEQ ID NO: 135162 - DNA, 963 bp, Gloeobacter violaceus PCC 7421; identical to SEQ ID NO: 39562
  CDS (1)..(963): transl_table=11

SEQ ID NO: 135163 - protein, 320 aa, Gloeobacter violaceus PCC 7421; identical to SEQ ID NO: 39563

SEQ ID NO: 135164 - DNA, 963 bp, Gloeobacter violaceus PCC 7421; identical to SEQ ID NO: 39564
  CDS (1)..(963): transl_table=11

SEQ ID NO: 135165 - protein, 320 aa, Gloeobacter violaceus PCC 7421; identical to SEQ ID NO: 39565

SEQ ID NO: 135166 - DNA, 882 bp, Photorhabdus luminescens subsp. laumondii TTO1; identical to SEQ ID NO: 39568
  CDS (1)..(882): transl_table=11

SEQ ID NO: 135167 - protein, 293 aa, Photorhabdus luminescens subsp. laumondii TTO1; identical to SEQ ID NO: 39569

SEQ ID NO: 135168 - DNA, 954 bp, Photorhabdus luminescens subsp. laumondii TTO1; identical to SEQ ID NO: 39570
  CDS (1)..(954): transl_table=11

SEQ ID NO: 135169 - protein, 317 aa, Photorhabdus luminescens subsp. laumondii TTO1; identical to SEQ ID NO: 39571

SEQ ID NO: 135170 - DNA, 969 bp, Vibrio vulnificus YJ016; identical to SEQ ID NO: 39572
  CDS (1)..(969): transl_table=11

SEQ ID NO: 135171 - protein, 322 aa, Vibrio vulnificus YJ016; identical to SEQ ID NO: 39573

SEQ ID NO: 135172 - DNA, 936 bp, Corynebacterium diphtheriae NCTC 13129; identical to SEQ ID NO: 39574
  CDS (1)..(936): transl_table=11

SEQ ID NO: 135173 - protein, 311 aa, Corynebacterium diphtheriae NCTC 13129; identical to SEQ ID NO: 39575

SEQ ID NO: 135174 - DNA, 999 bp, Rhodopseudomonas palustris CGA009; identical to SEQ ID NO: 39576
  CDS (1)..(999): transl_table=11

SEQ ID NO: 135175 - protein, 332 aa, Rhodopseudomonas palustris CGA009; identical to SEQ ID NO: 39577

SEQ ID NO: 135176 - DNA, 924 bp, Geobacter sulfurreducens PCA; identical to SEQ ID NO: 39582
  CDS (1)..(924): transl_table=11

SEQ ID NO: 135177 - protein, 307 aa, Geobacter sulfurreducens PCA; identical to SEQ ID NO: 39583

SEQ ID NO: 135178 - DNA, 927 bp, Geobacter sulfurreducens PCA; identical to SEQ ID NO: 39584
  CDS (1)..(927): transl_table=11

SEQ ID NO: 135179 - protein, 308 aa, Geobacter sulfurreducens PCA; identical to SEQ ID NO: 39585

SEQ ID NO: 135180 - DNA, 990 bp, Bdellovibrio bacteriovorus HD100; identical to SEQ ID NO: 39586
  CDS (1)..(990): transl_table=11

SEQ ID NO: 135181 - protein, 329 aa, Bdellovibrio bacteriovorus HD100; identical to SEQ ID NO: 39587

SEQ ID NO: 135182 - DNA, 972 bp, Arabidopsis thaliana; identical to SEQ ID NO: 39590
  CDS (1)..(972)

SEQ ID NO: 135183 - protein, 323 aa, Arabidopsis thaliana; identical to SEQ ID NO: 39591

SEQ ID NO: 135184 - DNA, 924 bp, Bacillus cereus ATCC 10987; identical to SEQ ID NO: 39592
  CDS (1)..(924): transl_table=11

SEQ ID NO: 135185 - protein, 307 aa, Bacillus cereus ATCC 10987; identical to SEQ ID NO: 39593

SEQ ID NO: 135186 - DNA, 918 bp, Bacillus cereus ATCC 10987
  CDS (1)..(918): transl_table=11
atgaaattatgtgaaaacgtaacagaattaataggagatacacctgtcgtcagattatctaaatttattccagaagacgcagcagatgtgtatgtaaaactagaaatgtttaatccatcacgcagtgtgaaagaccgtgctgcctataatttactgcatgttgcagaagagaatggtcatatcaaaccaggagatacaattattgagccaacaagtggtaatacagggataggtttagcgatgaacgcggctgcaaaagggtataaaacgattttaattatgccggataatatgtctaaagaaagaattaacttattgaaagcatacggagcagaagtagttttaacaccagcagaacaaagaatgccaggagcaattgcgaaggcgttagaattgcaaaagcaaattccaaatagttttattccgcagcaatttgaaaatccagcaaacccgaatattcaccgttatacgactgcacttgaaatttatgaacaaatggatggagagcttgatgcttttgtagcaactgctggaacgggtggaactattacagggactggagaaacgttaaaagagaaactaccaaacttatatatcgcagtagtagaaccgaaaggatctcccgtactatcgggaggtgttccaggtcctcataaactagtaggaacaagtccgggatttatcccgaaaaacttaaatacagaagtgtataacgaaattattcaaattgcagacgaagaggctttaacgacaatgagaaacttagctagacaagagggattgttagttgggccgtcttcaggcgcttctgtttacgcagcgattatgatcgcaaaacgcttaggcgctggtaaaaaagttttatgtattgcacctgatacaggggagcggtatttgagtatgggattatttgaatga

SEQ ID NO: 135187 - protein, 305 aa, Bacillus cereus ATCC 10987
MKLCENVTELIGDTPVVRLSKFIPEDAADVYVKLEMFNPSRSVKDRAAYNLLHVAEENGHIKPGDTIIEPTSGNTGIGLAMNAAAKGYKTILIMPDNMSKERINLLKAYGAEVVLTPAEQRMPGAIAKALELQKQIPNSFIPQQFENPANPNIHRYTTALEIYEQMDGELDAFVATAGTGGTITGTGETLKEKLPNLYIAVVEPKGSPVLSGGVPGPHKLVGTSPGFIPKNLNTEVYNEIIQIADEEALTTMRNLARQEGLLVGPSSGASVYAAIMIAKRLGAGKKVLCIAPDTGERYLSMGLFE

SEQ ID NO: 135188 - DNA, 1431 bp, Magnaporthe grisea 70-15; identical to SEQ ID NO: 39594
  CDS (1)..(1431)

SEQ ID NO: 135189 - protein, 476 aa, Magnaporthe grisea 70-15; identical to SEQ ID NO: 39595

SEQ ID NO: 135190 - DNA, 1500 bp, Nasonia vitripennis; identical to SEQ ID NO: 39596
  CDS (1)..(1500)

SEQ ID NO: 135191 - protein, 499 aa, Nasonia vitripennis; identical to SEQ ID NO: 39597

SEQ ID NO: 135192 - DNA, 1587 bp, Magnaporthe grisea 70-15
  CDS (1)..(1587)
atggccgcgcggggcgcgcagagtgtcaccgagtcggccaccgatctcatcggaaacacgcccttggtgcggctcaacaagattccacagtcgctggggatcaaggctcaggtctttggcaagttggagcttatgaacacgggtggcagcgtcaaggacagaatagccttgcgcatgattgaggaggccgagaaggaaggcagaattaagcccggagacacactgattgagcccacgagtggcaacaccggtatcggcttggccctcgtcggcgccgtcaagggctacaagaccatcatcacgcttcccgagaagatgtcggccgaaaaggtctctgtcctcaaggctctcggtgccaccatcatccgaacacccacacaagccgcctgggacgctcccgaatcgcacatcggcgtggcaaaacgcctgctcaaggagatccccaactcgcacatccttgaccagtactcgaaccccaacaacccgctcgctcacgagcacggcaccgcagaggagatctgggctcagaccggcggaaagatcaccgccgtggttgcaggcgctggcacgggtggtaccatctctggactcgccaggggactgaggaaacactcaaagacggtcaaggtcatcgccgcggatcccatcggcagtattcttgccttgcctgaaagcttgaatgacaatggcgtgaacgagccgtacaaggtcgagggtatcggctacgacttcattcctgacgttctggaccgcgagttggtagacaagtggtacaagactgaagatcgcgagtcattcatgtacgctcgtcgtctgatcgctgaggagggcttgcttgtcggaggttcatcgggctccgcgatggcagccatggttcgagccgtcaaggacttgaacctgggcgaggacgacgttgtggttgtcgtcctcccggatagcatccgcagctacctctccaagtttgccgacgatgattggctggccgccaacgacctcctccttcccacacccgacagcagcgtgaacggtgacacgctcgacagccccgcagttgccgaagcccaagctctgcacaagtctcgggcgcggagggccagcaacccctacggtggagcgacggtgcggtcgttgcgccttaagcccgtgacatccgtgctggccgacagcaagtgctccgaggccattgagacgatgcgcgacaagggctttgaccagctgcctgtggtgcgcgacaacaagctcgttgggttggttacacttggaaacatgctgagctacgtttctcgcggccgcgtcaagaccaatagccctgtcagcgacgtcatgtttgactttggccgacttgacgaggttatcaccgatcctcgcgatgttgagggcgcagccaagatgtcgaccgcacatggccgcaagaagcgcaactttgtcgagatcaccatgaacactcccctcgacgtgctcagcaagttcctcgagtggaacagcgcggccatcgtcactgagaagagcggcgaagtgtccaagcctgtggctgttgtcaccaaggttgacctcctgacctggatgatgaaggagctgaaggcttag

SEQ ID NO: 135193 - protein, 528 aa, Magnaporthe grisea 70-15
MAARGAQSVTESATDLIGNTPLVRLNKIPQSLGIKAQVFGKLELMNTGGSVKDRIALRMIEEAEKEGRIKPGDTLIEPTSGNTGIGLALVGAVKGYKTIITLPEKMSAEKVSVLKALGATIIRTPTQAAWDAPESHIGVAKRLLKEIPNSHILDQYSNPNNPLAHEHGTAEEIWAQTGGKITAVVAGAGTGGTISGLARGLRKHSKTVKVIAADPIGSILALPESLNDNGVNEPYKVEGIGYDFIPDVLDRELVDKWYKTEDRESFMYARRLIAEEGLLVGGSSGSAMAAMVRAVKDLNLGEDDVVVVVLPDSIRSYLSKFADDDWLAANDLLLPTPDSSVNGDTLDSPAVAEAQALHKSRARRASNPYGGATVRSLRLKPVTSVLADSKCSEAIETMRDKGFDQLPVVRDNKLVGLVTLGNMLSYVSRGRVKTNSPVSDVMFDFGRLDEVITDPRDVEGAAKMSTAHGRKKRNFVEITMNTPLDVLSKFLEWNSAAIVTEKSGEVSKPVAVVTKVDLLTWMMKELKA

SEQ ID NO: 135194 - DNA, 1128 bp, Magnaporthe grisea 70-15; identical to SEQ ID NO: 39598
  CDS (1)..(1128)

SEQ ID NO: 135195 - protein, 375 aa, Magnaporthe grisea 70-15; identical to SEQ ID NO: 39599

SEQ ID NO: 135196 - DNA, 1338 bp, Gibberella zeae PH-1; identical to SEQ ID NO: 39600
  CDS (1)..(1338)

SEQ ID NO: 135197 - protein, 445 aa, Gibberella zeae PH-1; identical to SEQ ID NO: 39601

SEQ ID NO: 135198 - DNA, 1554 bp, Gibberella zeae PH-1; identical to SEQ ID NO: 39602
  CDS (1)..(1554)

SEQ ID NO: 135199 - protein, 517 aa, Gibberella zeae PH-1; identical to SEQ ID NO: 39603

SEQ ID NO: 135200 - DNA, 1116 bp, Gibberella zeae PH-1; identical to SEQ ID NO: 39604
  CDS (1)..(1116)

SEQ ID NO: 135201 - protein, 371 aa, Gibberella zeae PH-1; identical to SEQ ID NO: 39605

SEQ ID NO: 135202 - DNA, 1506 bp, Candida glabrata CBS 138; identical to SEQ ID NO: 39606
  CDS (1)..(1506)

SEQ ID NO: 135203 - protein, 501 aa, Candida glabrata CBS 138; identical to SEQ ID NO: 39607

SEQ ID NO: 135204 - DNA, 1155 bp, Kluyveromyces lactis NRRL Y-1140
  CDS (1)..(1155)
atgactgctgcagacagatggaaggattatgcctgtgtaacatcccttttcgtggctgttgcatcgttatactatgcatataaggttaagacaactacattaactgctctatcaccaccaaaggatggagtggaagacttgataggaaatacaccaatggtaagaattaaatctctttccgattatactggtttgaacgtttttgccaaaatggagttaaataatccaggtggtagcgcaaaggacagagttgccttgaatattatcaaaaccatctcatcgcaggaaggtattaagggttcaagtgataagaaaaatagaatctttgaaggaacaagcggatctacaggtatatcccttgcaatatgttgtaacgcgttgggttactcatgccatatctcgctaccggacgatacaagccaagagaaactttctcttttaactgcacttggtgcaatagtgaacaaggtaaaacctgctagtatagtggatccgaaccaatacgtaaatgcagctaagtcgtgttcagaagagtacactgagggtgttggtgtatttgcagatcaattcgagaacgaggccaattggaaatgccattacgaaacgacaggacctgaaatttatctacaattaaatggggaagtggatgcattcatcacgggatgcggtactggtggtaccatggccggtgtttctcgttatctaaaggagaaaagaggtgacaaagtacatattgtgttggctgatccgcaaggctcgggtttctacaatagaatcaaatacggtgtcatgtacgataacgtagagaaagaaggaacaagaagaagacatcaagtggacacattagtggaaggaattggtcttaacagaattacaaacaactttctgaaagcggaaaattatatagatgattccatcagaattacagacgaggaagctattaagatggccaaattcttatgtgtaaatgacggattattcgttggtgccagtactgcaatcaatgcagtcgcagtgctgaaatatgcggaaaacttaccgaagggttcaaatgtttgcatcattgcatgtgacagtggctctagacatttaagcaagttctggaaagaggccctgcaggtgagtaacgatctttcaatttcagatatcatataa

SEQ ID NO: 135205 - protein, 384 aa, Kluyveromyces lactis NRRL Y-1140
MTAADRWKDYACVTSLFVAVASLYYAYKVKTTTLTALSPPKDGVEDLIGNTPMVRIKSLSDYTGLNVFAKMELNNPGGSAKDRVALNIIKTISSQEGIKGSSDKKNRIFEGTSGSTGISLAICCNALGYSCHISLPDDTSQEKLSLLTALGAIVNKVKPASIVDPNQYVNAAKSCSEEYTEGVGVFADQFENEANWKCHYETTGPEIYLQLNGEVDAFITGCGTGGTMAGVSRYLKEKRGDKVHIVLADPQGSGFYNRIKYGVMYDNVEKEGTRRRHQVDTLVEGIGLNRITNNFLKAENYIDDSIRITDEEAIKMAKFLCVNDGLFVGASTAINAVAVLKYAENLPKGSNVCIIACDSGSRHLSKFWKEALQVSNDLSISDII

SEQ ID NO: 135206 - DNA, 1068 bp, Kluyveromyces lactis NRRL Y-1140; identical to SEQ ID NO: 39610
  CDS (1)..(1068)

SEQ ID NO: 135207 - protein, 355 aa, Kluyveromyces lactis NRRL Y-1140; identical to SEQ ID NO: 39611

SEQ ID NO: 135208 - DNA, 1482 bp, Kluyveromyces lactis NRRL Y-1140; identical to SEQ ID NO: 39612
  CDS (1)..(1482)

SEQ ID NO: 135209 - protein, 493 aa, Kluyveromyces lactis NRRL Y-1140; identical to SEQ ID NO: 39613

SEQ ID NO: 135210 - DNA, 1476 bp, Debaryomyces hansenii CBS767; identical to SEQ ID NO: 39614
  CDS (1)..(1476)

SEQ ID NO: 135211 - protein, 491 aa, Debaryomyces hansenii CBS767; identical to SEQ ID NO: 39615

SEQ ID NO: 135212 - DNA, 1095 bp, Debaryomyces hansenii CBS767; identical to SEQ ID NO: 39616
  CDS (1)..(1095)

SEQ ID NO: 135213 - protein, 364 aa, Debaryomyces hansenii CBS767; identical to SEQ ID NO: 39617

SEQ ID NO: 135214 - DNA, 1173 bp, Yarrowia lipolytica CLIB122; identical to SEQ ID NO: 39618
  CDS (1)..(1173)

SEQ ID NO: 135215 - protein, 390 aa, Yarrowia lipolytica CLIB122; identical to SEQ ID NO: 39619

SEQ ID NO: 135216 - DNA, 1617 bp, Yarrowia lipolytica CLIB122; identical to SEQ ID NO: 39620
  CDS (1)..(1617)

SEQ ID NO: 135217 - protein, 538 aa, Yarrowia lipolytica CLIB122; identical to SEQ ID NO: 39621

SEQ ID NO: 135218 - DNA, 1134 bp, Yarrowia lipolytica CLIB122; identical to SEQ ID NO: 39622
  CDS (1)..(1134)

SEQ ID NO: 135219 - protein, 377 aa, Yarrowia lipolytica CLIB122; identical to SEQ ID NO: 39623

SEQ ID NO: 135220 - DNA, 1287 bp, Aspergillus nidulans FGSC A4
  CDS (1)..(1287)
atgccagatcattcgcatatctacattggctctgccttcgtggcaggagttgtcctgactatagctttcaaggacctattctaccccgagatcgaggaacgcatcagagattatcgcgctcggcattcctcaaaatcataccagaacgcctcagtggattcgttagctgtgaggcatgggcctccagctattgtagatgggatcgagggctgtattgggaatacccctctacttcgaatcaaatccctgtccgaagcgaccgggtgcgaaatcctagcgaaggctgaatttctgaacggcgccggtcagagctcaaaggatcgagtagctctgagcatgatcgaattggctgaggagaggggattgatgactccgcattcaggagatacgatctacgaaggaacatctgggtcgacaggaatctcattggccacgctagctagggcaaagggctatcttgctcatatttgtatgccatcagaccaggctatcgaaaagtcgaacttactcctcaaactaggcgcaatagttgaccgcgtgcctccagcacctatagttgagaaggacaacttcgttaaccgggcaagagcacttgcgcaagcacataccaattcgacagcgtcagaatcatcagttggtacagcctcccaaaggggaaggggttactttgcggaccaattcgagaacgaggcgaactggcgagcccactacaatggcaccggcccggagatctacgcccagtgcaatgggtcccttgacgcctttgttgcaggggccgggaccggaggcacaatctctggcgtggctctatatctcaagccgaggatccccaacatgactgtggtagtagccgatccccaaggtagtgggctctataatcgggttcgttacggagttatgttcgacactaaggagaaggaagggacacgtcgtcggaggcaggttgatactatcgtggaaggcattgggatcaaccgcgttaccgcaaatttcgaggcgggacgggaacttgttgacgacgctgttagggttacggacgcgcaggcactggcaatggctagatggcttgttgaaaaggacggcatctttgcggggagtagcagtgctgtcaactgtttcgccgccgtcaaaactgctttgaaactggggcccggccacagaatcgtcacaatgctgtctgattcaggctcaagacatctctcaaggttctgggcaaaagctgggaatgtgggcggcgctgtggacacaaagttggaggacgtcctgaatgcgaaagaagaccaatag

SEQ ID NO: 135221 - protein, 428 aa, Aspergillus nidulans FGSC A4
MPDHSHIYIGSAFVAGVVLTIAFKDLFYPEIEERIRDYRARHSSKSYQNASVDSLAVRHGPPAIVDGIEGCIGNTPLLRIKSLSEATGCEILAKAEFLNGAGQSSKDRVALSMIELAEERGLMTPHSGDTIYEGTSGSTGISLATLARAKGYLAHICMPSDQAIEKSNLLLKLGAIVDRVPPAPIVEKDNFVNRARALAQAHTNSTASESSVGTASQRGRGYFADQFENEANWRAHYNGTGPEIYAQCNGSLDAFVAGAGTGGTISGVALYLKPRIPNMTVVVADPQGSGLYNRVRYGVMFDTKEKEGTRRRRQVDTIVEGIGINRVTANFEAGRELVDDAVRVTDAQALAMARWLVEKDGIFAGSSSAVNCFAAVKTALKLGPGHRIVTMLSDSGSRHLSRFWAKAGNVGGAVDTKLEDVLNAKEDQ

SEQ ID NO: 135222 - DNA, 1608 bp, Aspergillus nidulans FGSC A4; identical to SEQ ID NO: 39624
  CDS (1)..(1608)

SEQ ID NO: 135223 - protein, 535 aa, Aspergillus nidulans FGSC A4; identical to SEQ ID NO: 39625

SEQ ID NO: 135224 - DNA, 1491 bp, Candida albicans SC5314; identical to SEQ ID NO: 39626
  CDS (1)..(1491): transl_table=12

SEQ ID NO: 135225 - protein, 496 aa, Candida albicans SC5314; identical to SEQ ID NO: 39627

SEQ ID NO: 135226 - DNA, 1197 bp, Candida albicans SC5314; identical to SEQ ID NO: 39628
  CDS (1)..(1197): transl_table=12

SEQ ID NO: 135227 - protein, 398 aa, Candida albicans SC5314; identical to SEQ ID NO: 39629

SEQ ID NO: 135228 - DNA, 1614 bp, Ustilago maydis 521
  CDS (1)..(1614)
atgtcgagcgtcggagcgagggcaacctcgtcagcgctcgcatccagctcgtcgtccaagctcgcgcacatccccggttggaccgtcatctcacgctattctcgttcacaccgcaaatcgacctttctcatcggcgtgtttaccggtctcgttctgggtcttggatccatcacatccgtctttttctttgcagaacgacgtgaacgcaaacgaagacgcagaaagttgcgctcctacggactcgacgatgaagacgaagaggagcgtcgacggcgcgagcttcgtgggcgcgatccaatccaaatccggtctggtcaagtggtgagcggtgtcgaaggtctaatcggaaatactccgctcatgcgtataaacagcctctccgaagcaacgggctgcgagatcctgggcaaagcagagtttctcaaccctgccggctcaccaaaggaccgtgtagcattgcaaattctcaaagacgctgaagaagaaggcttgctctacccgcacacgggcagctgcatctttgaaggtacagtaggaagcaccggtatctcactagccactctggcgcgagcaaaagggtatcgctgttcaattgtcattccggacgacgttgcacgcgaaaaagtggagctcctggaaaagctcggtgccgagatcgaatcggttcgaccgcgaggcattgtcgatccacgacactttgtcaacgaagcacgtgctcgggccgaagcgtttggcgaggtcgaactcgttggtccgcatccgaatggtttgggcacgtcccgatatgctggctcggacgcaggacagggggaagagtacgttcatcgccatgacctggttgtttcctccagacgcgtgccgaacaccgatgatgcatccggtattgtcaacgagacccaagcacgtggcttttttgcggatcagttcgagaatccatccaacttttgggcgcattacaacggtactggacccgaaatctggcgccagacgggcgggttgatcgacgcattcgtcgcgggtgcgggcacgggcgggacgctctctggatgtgcagcctttctgaaacgcgtatcatgcgatccggatgagtcccaacaaggaggaggtttcatccgacgtcctggatccgcacaagaggtcaaagtggtgctggccgatccgcagggtagtgggttatacaacaaggttaaatacggtgtcatgtacagtgccaccgaagcagaggggaagcgcaggaggcatcaagtggactcggtcgtagaagggattggcatcaatcgcatcacaagaaacttgcagatgggattgcagtgcattgacgacgccgagagggtcagcgacgatgaggcggcgcgcatgggaaggcatctgatcctcaacgatggactcttcctcggctcttcgtcagccgtcaactgcgttgctgctgtccgaacagcactgaaaatcaaacgccaacggggcgacgacccaccccctgttgtggtcactgtactctgcgattcgggctctcgccatctgtccaagtttcacaacgacgatgcactcgttcgtctgggcgtgtcggatgccggcagcagtgacatttctgacatcctctcttccatcgattag

SEQ ID NO: 135229 - protein, 537 aa, Ustilago maydis 521
MSSVGARATSSALASSSSSKLAHIPGWTVISRYSRSHRKSTFLIGVFTGLVLGLGSITSVFFFAERRERKRRRRKLRSYGLDDEDEEERRRRELRGRDPIQIRSGQVVSGVEGLIGNTPLMRINSLSEATGCEILGKAEFLNPAGSPKDRVALQILKDAEEEGLLYPHTGSCIFEGTVGSTGISLATLARAKGYRCSIVIPDDVAREKVELLEKLGAEIESVRPRGIVDPRHFVNEARARAEAFGEVELVGPHPNGLGTSRYAGSDAGQGEEYVHRHDLVVSSRRVPNTDDASGIVNETQARGFFADQFENPSNFWAHYNGTGPEIWRQTGGLIDAFVAGAGTGGTLSGCAAFLKRVSCDPDESQQGGGFIRRPGSAQEVKVVLADPQGSGLYNKVKYGVMYSATEAEGKRRRHQVDSVVEGIGINRITRNLQMGLQCIDDAERVSDDEAARMGRHLILNDGLFLGSSSAVNCVAAVRTALKIKRQRGDDPPPVVVTVLCDSGSRHLSKFHNDDALVRLGVSDAGSSDISDILSSID

SEQ ID NO: 135230 - DNA, 1146 bp, Ustilago maydis 521; identical to SEQ ID NO: 39630
  CDS (1)..(1146)

SEQ ID NO: 135231 - protein, 381 aa, Ustilago maydis 521; identical to SEQ ID NO: 39631

SEQ ID NO: 135232 - DNA, 1362 bp, Cryptococcus neoformans var. neoformans B-3501A
  CDS (1)..(1362)
atgggagtatcagactacttcatagcattctcagccaagttctgggaacggctacgttttccttcaaaattcacccgcgatctcgtatggggcataattctcggcatcaccgtatcactctcctccacttctgcggctttgatattacaggaatggagaagaaaaagagctgtacaaaggattccgcctaggcctatcgagctgaggagcgatgagatcgtacccggagtgacaggtctgataggaacaggcaacacaccactaatacgtataaattcgttgagtgatgccttgggggtagagatcctgggtaaagctgagttcctcaaccccggaggttcagtaaaagaccgagtagctttacaaattatagaagatgctgaggctcagggccttctgtatcccaataccggatcagtgctctttgaaggcacagtaggaagtacaggaatctcattggcaacggtgggaaaggctaagggctacgagagctgcattatcatgcctgatgatgttgcgatcgaaaaggtgcagatcttggaaaagctcggggcaagagtagagcgcgtcaggcctgcaagtattgtggatcagaaacaatttgtaaatcttgcgcgcaagagggctttggaatttggcaaatcggaacttaccaatatccctgggcatggagaagagattgccgtttcaacagcagctgagccatcagaaatcaatcatcatcatctttttccttccgcctttgaacacaaacctcgcggtttctttgccgaccagtttgaaaacgacagtaatttcatggcacattacaaagggactggcccagagatactgcggcagacgagcggacatttggatggtttcgtgagcggagccggaactggatgtttcttaaagaaggctttgcccgacctcaaaattgtcctttctgatcctgaaggttccggattgttcaacaaagtccgatttaatgttatgttcgaccccaaagaaagcgagggaaagaaacgacgacatcaggtggacaccgtggtggaaggtataggcatcaatcgaataacttataacttttctttgggattaccggtaatcgatgacgcctacagagtatcagacgaagaggctgtggcgatgtctcgatatcttgtccaacatgacggccttttcctcggctcctccagtgcttgtaacctaattgcatgtattcgactggccaaaactatgagtcgtgggtcccgaatagctacaatcttgtgtgactctgggtcaagacatcaaagcaagttttggtcagatgactacttacgagcaaacaacatcgctatcgatccttccattgttgatcgtttattggaatcataa

SEQ ID NO: 135233 - protein, 453 aa, Cryptococcus neoformans var. neoformans B-3501A
MGVSDYFIAFSAKFWERLRFPSKFTRDLVWGIILGITVSLSSTSAALILQEWRRKRAVQRIPPRPIELRSDEIVPGVTGLIGTGNTPLIRINSLSDALGVEILGKAEFLNPGGSVKDRVALQIIEDAEAQGLLYPNTGSVLFEGTVGSTGISLATVGKAKGYESCIIMPDDVAIEKVQILEKLGARVERVRPASIVDQKQFVNLARKRALEFGKSELTNIPGHGEEIAVSTAAEPSEINHHHLFPSAFEHKPRGFFADQFENDSNFMAHYKGTGPEILRQTSGHLDGFVSGAGTGCFLKKALPDLKIVLSDPEGSGLFNKVRFNVMFDPKESEGKKRRHQVDTVVEGIGINRITYNFSLGLPVIDDAYRVSDEEAVAMSRYLVQHDGLFLGSSSACNLIACIRLAKTMSRGSRIATILCDSGSRHQSKFWSDDYLRANNIAIDPSIVDRLLES

SEQ ID NO: 135234 - DNA, 1218 bp, Cryptococcus neoformans var. neoformans B-3501A; identical to SEQ ID NO: 39632
  CDS (1)..(1218)

SEQ ID NO: 135235 - protein, 405 aa, Cryptococcus neoformans var. neoformans B-3501A; identical to SEQ ID NO: 39633

SEQ ID NO: 135236 - DNA, 1098 bp, Strongylocentrotus purpuratus; identical to SEQ ID NO: 39634
  CDS (1)..(1098)

SEQ ID NO: 135237 - protein, 365 aa, Strongylocentrotus purpuratus; identical to SEQ ID NO: 39635

SEQ ID NO: 135238 - DNA, 1596 bp, Strongylocentrotus purpuratus; identical to SEQ ID NO: 39636
  CDS (1)..(1596)

SEQ ID NO: 135239 - protein, 531 aa, Strongylocentrotus purpuratus; identical to SEQ ID NO: 39637

SEQ ID NO: 135240 - DNA, 1605 bp, Tribolium castaneum; identical to SEQ ID NO: 39640
  CDS (1)..(1605)

SEQ ID NO: 135241 - protein, 534 aa, Tribolium castaneum; identical to SEQ ID NO: 39641

SEQ ID NO: 135242 - DNA, 969 bp, Prochlorococcus marinus str. MIT 9515; identical to SEQ ID NO: 39644
  CDS (1)..(969): transl_table=11

SEQ ID NO: 135243 - protein, 322 aa, Prochlorococcus marinus str. MIT 9515; identical to SEQ ID NO: 39645

SEQ ID NO: 135244 - DNA, 987 bp, Prochlorococcus marinus str. MIT 9515; identical to SEQ ID NO: 39646
  CDS (1)..(987): transl_table=11

SEQ ID NO: 135245 - protein, 328 aa, Prochlorococcus marinus str. MIT 9515; identical to SEQ ID NO: 39647

SEQ ID NO: 135246 - DNA, 969 bp, Prochlorococcus marinus str. NATL1A
  CDS (1)..(969): transl_table=11
atgcccattgctaatgacataacttatttagttggccaaacacctttggtcaaactgaatcgattacctaatgaatttaattgtagggctgaaattatagccaaattagaaagtttcaaccccacagcatccgtaaaagaccgcatagctggagcaatggtgaaatcagcagaaaaagagggcactatcaaacctggacatactgttcttgttgaaccaactagcggaaacacaggaattgcattagcgatggttgcggcagcaaaaggttatcggctcatacttacaatgcctgacacaatgagtactgaacgacgctcaatgttaagagcatttggagcagagcttcaactaactcctggccaagacggtatccaaggcgctattcagctagcaaaggaattggttgcttctgtacctaatgcatacttgcttcagcaattcgataatttatccaatcctgaaattcatgaaaaaacaaccgctgaagaaatatgggaagattgcgaaggcaaacttgatgcattaattgcaggagtaggaacaggaggaacaatcacaggttgtgccagattcttaaaacaaaaaaatccaaaaatcaaggtttttgcagtagaaccttcatcaagccctgttctgtcaggagggaatcctggatctcatgcgatacaaggcattggggctggtttcattcctaatgtattagatatgaatcagattgatgaagtcataagaatcaatgataatgaagcaatggacataggcagaagacttgccaaagaagagggattgctaagtggtgtcagcagtggtgctgcagtagccgctgctttaaaagtaggaaatcaacctgagtttgcgaataaacgcttgattgttattctgcctagttttggtgaaagatatctatcaacaacaatgtttacttctatccccgcaaagccagtaaaagggaatgagtttctctaa

SEQ ID NO: 135247 - protein, 322 aa, Prochlorococcus marinus str. NATL1A
MPIANDITYLVGQTPLVKLNRLPNEFNCRAEIIAKLESFNPTASVKDRIAGAMVKSAEKEGTIKPGHTVLVEPTSGNTGIALAMVAAAKGYRLILTMPDTMSTERRSMLRAFGAELQLTPGQDGIQGAIQLAKELVASVPNAYLLQQFDNLSNPEIHEKTTAEEIWEDCEGKLDALIAGVGTGGTITGCARFLKQKNPKIKVFAVEPSSSPVLSGGNPGSHAIQGIGAGFIPNVLDMNQIDEVIRINDNEAMDIGRRLAKEEGLLSGVSSGAAVAAALKVGNQPEFANKRLIVILPSFGERYLSTTMFTSIPAKPVKGNEFL

SEQ ID NO: 135248 - DNA, 987 bp, Prochlorococcus marinus str. MIT 9303; identical to SEQ ID NO: 39648
  CDS (1)..(987): transl_table=11

SEQ ID NO: 135249 - protein, 328 aa, Prochlorococcus marinus str. MIT 9303; identical to SEQ ID NO: 39649

SEQ ID NO: 135250 - DNA, 987 bp, Prochlorococcus marinus str. MIT 9303; identical to SEQ ID NO: 39650
  CDS (1)..(987): transl_table=11

SEQ ID NO: 135251 - protein, 328 aa, Prochlorococcus marinus str. MIT 9303; identical to SEQ ID NO: 39651

SEQ ID NO: 135252 - DNA, 909 bp, Clostridium thermocellum ATCC 27405; identical to SEQ ID NO: 39652
  CDS (1)..(909): transl_table=11

SEQ ID NO: 135253 - protein, 302 aa, Clostridium thermocellum ATCC 27405; identical to SEQ ID NO: 39653

SEQ ID NO: 135254 - DNA, 936 bp, Clostridium thermocellum ATCC 27405; identical to SEQ ID NO: 39654
  CDS (1)..(936): transl_table=11

SEQ ID NO: 135255 - protein, 311 aa, Clostridium thermocellum ATCC 27405; identical to SEQ ID NO: 39655

SEQ ID NO: 135256 - DNA, 972 bp, Mycobacterium sp. JLS
  CDS (1)..(972): transl_table=11
ttggcgcgttacgactcggtgctcgaggccctcggcaacaccccgctggtggggtgcccgcacctgtcgccgagatgggatgacgacgagaacggaccgcatgtgcggctgtgggccaaactcgaggaccgcaacccgaccggttcgatcaaggaccggcccgcgctgcggatgatcgaacaggccgagcgcgacgggctgctgcaccccggttcgacgatcctggaacccaccagcggcaacaccgggatctcgctggcgatggccgcgctgctcaagggctaccagatgatctgcgtgatgccggagaacacctcgatcgagcgcaggcagttgctcgaactctacggcgcccgcatcatcttctcgccggccgaaggcggctccaacaccgccgtcgcgcacgccaaggaactggcggcggccaacccggattgggtgatgctctaccagtacggcaaccccgcgaacgccgatgcgcactattacggcacgggacccgaactgctcgccgacctgcccgagatcacccacttcgtcgcgggtctgggcaccacggggacgctgatgggcaccggccggttcctgcgcgagaaggtgccgggtgtgcagatcgtggccgccgagccgcgctacggcgaaggcgtctacgcgctgcgcaacatcgacgagggcttcatccccgagctgtacgaccccgacgtgctgaccacccggttctccgtggggtcgttcgacgcgatcaagcggacccgcgaactggtcaccaaggaggggatcttcgcgggtgtctcgaccggggcgatcctgcacgccgcgctggggatggccgccaaggcgatcaaggcgggcgaacgcgccgacatcgcgttcaccgtgtgtgacgccggctggaagtatctgtcgaccggtgcgtacaccggtagcctcgacgacgcagaggacgcgttggaagggcagctatgggcgtga

SEQ ID NO: 135257 - protein, 323 aa, Mycobacterium sp. JLS
MARYDSVLEALGNTPLVGCPHLSPRWDDDENGPHVRLWAKLEDRNPTGSIKDRPALRMIEQAERDGLLHPGSTILEPTSGNTGISLAMAALLKGYQMICVMPENTSIERRQLLELYGARIIFSPAEGGSNTAVAHAKELAAANPDWVMLYQYGNPANADAHYYGTGPELLADLPEITHFVAGLGTTGTLMGTGRFLREKVPGVQIVAAEPRYGEGVYALRNIDEGFIPELYDPDVLTTRFSVGSFDAIKRTRELVTKEGIFAGVSTGAILHAALGMAAKAIKAGERADIAFTVCDAGWKYLSTGAYTGSLDDAEDALEGQLWA

SEQ ID NO: 135258 - DNA, 909 bp, Clostridium difficile 630; identical to SEQ ID NO: 39656
  CDS (1)..(909): transl_table=11

SEQ ID NO: 135259 - protein, 302 aa, Clostridium difficile 630; identical to SEQ ID NO: 39657

SEQ ID NO: 135260 - DNA, 987 bp, Prochlorococcus marinus str. MIT 9301
  CDS (1)..(987): transl_table=11
atggcaaaaatttatgaggacaacagttttgctattggaaacactccattagtaaaattaaaatcagttactaaaaacgcgaaagctacagtacttgcaaaaattgaaggtagaaaccccgcttatagtgtcaaatgtaggatcggcgcaaacatgatctgggatgccgagaaaagtgggaaacttacaaaagacaaaactattgttgagccaacttctggaaatacaggcatagctctagcttttactgcttcagcaagaggttataaactaatccttacaatgccagaatccatgtcaattgaaagaagaagggttatggcagtgttgggtgctgaaattgttttaacagaggcatctaaaggtatgcctggagcaatagctaaggctaaagaaattgcagaaagtaatccttctcaatatttcatgccaggtcaatttgataatccagcaaaccctgaaattcatttcaaaactactgggccagaaatctgggatgattgcgatggtgaaattgatgtcctagttgcaggggttggaactggcggcacaattacaggagtttcaagatacattaagcaagagaagggtaagaatattacttctgtagcagtagaaccatcacacagtcctgttattacacagacaatgaatggagaagaggttaaatccggaccacataaaatccaaggaattggagcaggatttattcctaagaaccttgacttatcaattgttgataaggtcgaacaagtaacaaatgacgaatcaattgagatggctcttaggttagctaaagaggagggtctattagtaggaatatcttgtggggctgccgctgctgccgctgttagattagctgaacaagatgaatatgcggggaagacaattgtagttgttctacctgatttagcagagaggtatttatcatcaattatgtttactgaagttccaagcggaatcattcaagaaccagtcaaagcctaa

SEQ ID NO: 135261 - protein, 328 aa, Prochlorococcus marinus str. MIT 9301
MAKIYEDNSFAIGNTPLVKLKSVTKNAKATVLAKIEGRNPAYSVKCRIGANMIWDAEKSGKLTKDKTIVEPTSGNTGIALAFTASARGYKLILTMPESMSIERRRVMAVLGAEIVLTEASKGMPGAIAKAKEIAESNPSQYFMPGQFDNPANPEIHFKTTGPEIWDDCDGEIDVLVAGVGTGGTITGVSRYIKQEKGKNITSVAVEPSHSPVITQTMNGEEVKSGPHKIQGIGAGFIPKNLDLSIVDKVEQVTNDESIEMALRLAKEEGLLVGISCGAAAAAAVRLAEQDEYAGKTIVVVLPDLAERYLSSIMFTEVPSGIIQEPVKA

SEQ ID NO: 135262 - DNA, 903 bp, Herminiimonas arsenicoxydans; identical to SEQ ID NO: 39662
  CDS (1)..(903): transl_table=11

SEQ ID NO: 135263 - protein, 300 aa, Herminiimonas arsenicoxydans; identical to SEQ ID NO: 39663

SEQ ID NO: 135264 - DNA, 903 bp, Burkholderia vietnamiensis G4; identical to SEQ ID NO: 39664
  CDS (1)..(903): transl_table=11

SEQ ID NO: 135265 - protein, 300 aa, Burkholderia vietnamiensis G4; identical to SEQ ID NO: 39665

SEQ ID NO: 135266 - DNA, 942 bp, Streptococcus pyogenes str. Manfredo
  CDS (1)..(942): transl_table=11
atgactaaaatttacaaaactataacagaattagtaggtcaaacacctattatcaaacttaaccgtttaattccaaacgaagctgctgacgtttatgtaaaattagaagcttttaacccaggatcttctgttaaagatcgtattgctttatcgatgattgaagctgctgaagctgaaggtctgataagtcctggtgacgttattatcgaaccaacaagtggtaatacaggtattggtcttgcatgggtaggtgctgctaaagggtatcgagtcattattgttatgcccgaaactatgagcttggaaagacggcaaatcattcaggcttatggtgcagagcttgtcttaacacctggagcagaaggtatgaaaggggctattgcaaaagctgaaactttagcaatagaactaggtgcttggatgcctatgcaatttaataaccctgccaatccaagcatccatgaaaaaacaacagctcaagaaattttggaagcttttaaggagatttctttagatgcattcgtatctggtgttggtactggaggaacactttctggtgtttcacatgtcttgaaaaaagctagccctgaaactgttatctatgctgttgaagctgaagaatctgctgtcttatctggtcaagagcctggaccacataaaattcaaggtatatcagctggatttatcccaaacacattagataccaaagcctatgaccaaattatccgtgttaaatcgaaagatgctttagaaactgctcgactaacaggagctaaggaaggcttcctggttgggatttcttctggagctgctctttacgctgctattgaagtcgctaaacagttaggaaaaggcaaacatgtgttaactattttaccagataatggcgaacgctatttatcgactgaactctatgatgtaccagtaattaagacgaaataa

SEQ ID NO: 135267 - protein, 313 aa, Streptococcus pyogenes str. Manfredo
MTKIYKTITELVGQTPIIKLNRLIPNEAADVYVKLEAFNPGSSVKDRIALSMIEAAEAEGLISPGDVIIEPTSGNTGIGLAWVGAAKGYRVIIVMPETMSLERRQIIQAYGAELVLTPGAEGMKGAIAKAETLAIELGAWMPMQFNNPANPSIHEKTTAQEILEAFKEISLDAFVSGVGTGGTLSGVSHVLKKASPETVIYAVEAEESAVLSGQEPGPHKIQGISAGFIPNTLDTKAYDQIIRVKSKDALETARLTGAKEGFLVGISSGAALYAAIEVAKQLGKGKHVLTILPDNGERYLSTELYDVPVIKTK

SEQ ID NO: 135268 - DNA, 930 bp, Leptospira interrogans serovar Copenhageni str. Fiocruz L1-130; identical to SEQ ID NO: 39676
  CDS (1)..(930): transl_table=11

SEQ ID NO: 135269 - protein, 309 aa, Leptospira interrogans serovar Copenhageni str. Fiocruz L1-130; identical to SEQ ID NO: 39677

SEQ ID NO: 135270 - DNA, 915 bp, Thermus thermophilus HB27; identical to SEQ ID NO: 39678
  CDS (1)..(915): transl_table=11

SEQ ID NO: 135271 - protein, 304 aa, Thermus thermophilus HB27; identical to SEQ ID NO: 39679

SEQ ID NO: 135272 - DNA, 927 bp, Desulfovibrio vulgaris subsp. vulgaris str. Hildenborough; identical to SEQ ID NO: 39680
  CDS (1)..(927): transl_table=11

SEQ ID NO: 135273 - protein, 308 aa, Desulfovibrio vulgaris subsp. vulgaris str. Hildenborough; identical to SEQ ID NO: 39681

SEQ ID NO: 135274 - DNA, 927 bp, Listeria monocytogenes str. 4b F2365
  CDS (1)..(927): transl_table=11
atgacaattgcaaattcaatcactgatttaattggaaagacacctattgtgaaacttaatcgtttaccagaagcaggaagcgcggatgtatacgtaaaattagaattccaaaatccaggtggcagcgtaaaagaccgtattgctaacgcgatgatcgaaagcgctgaaaaatctggtgcattaaaaccaggcgatacaatcattgagccaactagtgggaatactggtatcggcctagcaatggtagcagcagcaaaaggctaccaagcgattttcgtaatgccagaaacaatgagcttagaacgtcgcaaattacttcaagcttacggtgcaaaattagttttaacaccaggtccagacggcatgaaaggcgcaattgctaaagcggaagagcttgcaaaagaaaataactattttgttccacaacaattccacaacccagcaaatccagctgtccatgaagaaacaactggaccagaaatcgttgaagctttcggtaaagatggcttagatgctttcatcgcgggagttggaacaggtggaacagtaactggtgtaggacacgtacttaaaaagaactacccagatgttaaaatctatgctcttgaaccagaagaatccccagtacttagcggtggttctccatcacctcataaaatccaaggtatcggtgcaggcttcgttccggatacattagatacaaaagtgtatgacggcattctaaaagtttcaagtgaagatgctctagaaacagcacgtgaagtagcgaaaaaagaaggtatcttagtaggtatttcttccggagcaactgttaaagcagctctagaccttgcaaaagaacttggtgctggcaaaaaagtactagcaatcgttgcaagtaacggcgaacgctacctaagcacacctctttataattttgaagattaa

SEQ ID NO: 135275 - protein, 308 aa, Listeria monocytogenes str. 4b F2365
MTIANSITDLIGKTPIVKLNRLPEAGSADVYVKLEFQNPGGSVKDRIANAMIESAEKSGALKPGDTIIEPTSGNTGIGLAMVAAAKGYQAIFVMPETMSLERRKLLQAYGAKLVLTPGPDGMKGAIAKAEELAKENNYFVPQQFHNPANPAVHEETTGPEIVEAFGKDGLDAFIAGVGTGGTVTGVGHVLKKNYPDVKIYALEPEESPVLSGGSPSPHKIQGIGAGFVPDTLDTKVYDGILKVSSEDALETAREVAKKEGILVGISSGATVKAALDLAKELGAGKKVLAIVASNGERYLSTPLYNFED

SEQ ID NO: 135276 - DNA, 951 bp, Picrophilus torridus DSM 9790; identical to SEQ ID NO: 39682
  CDS (1)..(951): transl_table=11

SEQ ID NO: 135277 - protein, 316 aa, Picrophilus torridus DSM 9790; identical to SEQ ID NO: 39683

SEQ ID NO: 135278 - DNA, 918 bp, Bacillus thuringiensis serovar konkukian str. 97-27; identical to SEQ ID NO: 39684
  CDS (1)..(918): transl_table=11

SEQ ID NO: 135279 - protein, 305 aa, Bacillus thuringiensis serovar konkukian str. 97-27; identical to SEQ ID NO: 39685

SEQ ID NO: 135280 - DNA, 999 bp, Acinetobacter sp. ADP1; identical to SEQ ID NO: 39686
  CDS (1)..(999): transl_table=11

SEQ ID NO: 135281 - protein, 332 aa, Acinetobacter sp. ADP1; identical to SEQ ID NO: 39687

SEQ ID NO: 135282 - DNA, 924 bp, Acinetobacter sp. ADP1; identical to SEQ ID NO: 39688
  CDS (1)..(924): transl_table=11

SEQ ID NO: 135283 - protein, 307 aa, Acinetobacter sp. ADP1; identical to SEQ ID NO: 39689

SEQ ID NO: 135284 - DNA, 882 bp, Erwinia carotovora subsp. atroseptica SCRI1043; identical to SEQ ID NO: 39690
  CDS (1)..(882): transl_table=11

SEQ ID NO: 135285 - protein, 293 aa, Erwinia carotovora subsp. atroseptica SCRI1043; identical to SEQ ID NO: 39691

SEQ ID NO: 135286 - DNA, 969 bp, Erwinia carotovora subsp. atroseptica SCRI1043; identical to SEQ ID NO: 39692
  CDS (1)..(969): transl_table=11

SEQ ID NO: 135287 - protein, 322 aa, Erwinia carotovora subsp. atroseptica SCRI1043; identical to SEQ ID NO: 39693

SEQ ID NO: 135288 - DNA, 936 bp, Propionibacterium acnes KPA171202; identical to SEQ ID NO: 39694
  CDS (1)..(936): transl_table=11

SEQ ID NO: 135289 - protein, 311 aa, Propionibacterium acnes KPA171202; identical to SEQ ID NO: 39695

SEQ ID NO: 135290 - DNA, 921 bp, Desulfotalea psychrophila LSv54; identical to SEQ ID NO: 39696
  CDS (1)..(921): transl_table=11

SEQ ID NO: 135291 - protein, 306 aa, Desulfotalea psychrophila LSv54; identical to SEQ ID NO: 39697

SEQ ID NO: 135292 - DNA, 969 bp, Yersinia pseudotuberculosis IP 32953
  CDS (1)..(969): transl_table=11
atgagcaagatatatgaagacaactctttaacaatcggccatacgccgctggttcgtctgaaccgtatcggcaacggacgtattttggcgaaagttgaatcgcgtaacccaagtttcagtgtgaagtgccgtatcggcgccaacatgatttgggatgctgaaaaacggggtattctgaccgcaggcaaagagctggttgaaccaaccagcgggaatacaggtgttgccctggcatttgtcgccgctgcacgtggctataaattaacccttaccatgcctgaaaccatgagcattgagcgccgcaagttgctgaaagcactgggggcaaatttggtgcttaccgaaggtgccaaagggatgaaaggcgcgattgccaaagcggaagaaattcaagcaaccgatccagaacgctaccttatcttgcaacaattcagtaacccggctaaccctgaaattcatgaaaaaaccaccggccctgaaatttgggaagataccgatggtgatgtagatgtctttgtctccggggtaggtaccggtggtaccctaaccggtgtcagccgctatattaaaaacaccaaaggcaaagccatcacgactgtggccgtcgaacccactgactcccccgtgattacccaagcgctggccggtcaagagatcaaacctggtccgcataaaattcaaggtattggtgcgggttttatccccggtaacctcgacttgagtctggttgatcgtgtagcgctggtcaccaatgaagaagctatttcgatggcccgccgtttgatggatgaagaaggcattctggcgggtatttcttcaggtgcagccgttgctgccgccgttaagctttcagaagaggaaggctttactgacaaaacaattgtggttatccttccctcctcgggtgaacggtatttaagtacagcattgttcgcagatttgttcacagagcaagagctgcaacagtag

SEQ ID NO: 135293 - protein, 322 aa, Yersinia pseudotuberculosis IP 32953
MSKIYEDNSLTIGHTPLVRLNRIGNGRILAKVESRNPSFSVKCRIGANMIWDAEKRGILTAGKELVEPTSGNTGVALAFVAAARGYKLTLTMPETMSIERRKLLKALGANLVLTEGAKGMKGAIAKAEEIQATDPERYLILQQFSNPANPEIHEKTTGPEIWEDTDGDVDVFVSGVGTGGTLTGVSRYIKNTKGKAITTVAVEPTDSPVITQALAGQEIKPGPHKIQGIGAGFIPGNLDLSLVDRVALVTNEEAISMARRLMDEEGILAGISSGAAVAAAVKLSEEEGFTDKTIVVILPSSGERYLSTALFADLFTEQELQQ

SEQ ID NO: 135294 - DNA, 894 bp, Yersinia pseudotuberculosis IP 32953; identical to SEQ ID NO: 39698
  CDS (1)..(894): transl_table=11

SEQ ID NO: 135295 - protein, 297 aa, Yersinia pseudotuberculosis IP 32953; identical to SEQ ID NO: 39699

SEQ ID NO: 135296 - DNA, 936 bp, Symbiobacterium thermophilum IAM 14863; identical to SEQ ID NO: 39700
  CDS (1)..(936): transl_table=11

SEQ ID NO: 135297 - protein, 311 aa, Symbiobacterium thermophilum IAM 14863; identical to SEQ ID NO: 39701

SEQ ID NO: 135298 - DNA, 924 bp, Bacillus cereus E33L; identical to SEQ ID NO: 39704
  CDS (1)..(924): transl_table=11

SEQ ID NO: 135299 - protein, 307 aa, Bacillus cereus E33L; identical to SEQ ID NO: 39705

SEQ ID NO: 135300 - DNA, 918 bp, Bacillus cereus E33L; identical to SEQ ID NO: 39706
  CDS (1)..(918): transl_table=11

SEQ ID NO: 135301 - protein, 305 aa, Bacillus cereus E33L; identical to SEQ ID NO: 39707

SEQ ID NO: 135302 - DNA, 951 bp, Mannheimia succiniciproducens MBEL55E; identical to SEQ ID NO: 39710
  CDS (1)..(951): transl_table=11

SEQ ID NO: 135303 - protein, 316 aa, Mannheimia succiniciproducens MBEL55E; identical to SEQ ID NO: 39711

SEQ ID NO: 135304 - DNA, 924 bp, Bacillus licheniformis ATCC 14580; identical to SEQ ID NO: 39712
  CDS (1)..(924): transl_table=11

SEQ ID NO: 135305 - protein, 307 aa, Bacillus licheniformis ATCC 14580; identical to SEQ ID NO: 39713

SEQ ID NO: 135306 - DNA, 933 bp, Bacillus licheniformis ATCC 14580; identical to SEQ ID NO: 39716
  CDS (1)..(933): transl_table=11

SEQ ID NO: 135307 - protein, 310 aa, Bacillus licheniformis ATCC 14580; identical to SEQ ID NO: 39717

SEQ ID NO: 135308 - DNA, 933 bp, Methylococcus capsulatus str. Bath; identical to SEQ ID NO: 39720
  CDS (1)..(933): transl_table=11

SEQ ID NO: 135309 - protein, 310 aa, Methylococcus capsulatus str. Bath; identical to SEQ ID NO: 39721

SEQ ID NO: 135310 - DNA, 888 bp, Methylococcus capsulatus str. Bath; identical to SEQ ID NO: 39722
  CDS (1)..(888): transl_table=11

SEQ ID NO: 135311 - protein, 295 aa, Methylococcus capsulatus str. Bath; identical to SEQ ID NO: 39723

SEQ ID NO: 135312 - DNA, 891 bp, Azoarcus sp. EbN1; identical to SEQ ID NO: 39724
  CDS (1)..(891): transl_table=11

SEQ ID NO: 135313 - protein, 296 aa, Azoarcus sp. EbN1; identical to SEQ ID NO: 39725

SEQ ID NO: 135314 - DNA, 978 bp, Azoarcus sp. EbN1; identical to SEQ ID NO: 39726
  CDS (1)..(978): transl_table=11

SEQ ID NO: 135315 - protein, 325 aa, Azoarcus sp. EbN1; identical to SEQ ID NO: 39727

SEQ ID NO: 135316 - DNA, 1065 bp, Silicibacter pomeroyi DSS-3; identical to SEQ ID NO: 39730
  CDS (1)..(1065): transl_table=11

SEQ ID NO: 135317 - protein, 354 aa, Silicibacter pomeroyi DSS-3; identical to SEQ ID NO: 39731

SEQ ID NO: 135318 - DNA, 939 bp, Bacillus clausii KSM-K16; identical to SEQ ID NO: 39732
  CDS (1)..(939): transl_table=11

SEQ ID NO: 135319 - protein, 312 aa, Bacillus clausii KSM-K16; identical to SEQ ID NO: 39733

SEQ ID NO: 135320 - DNA, 933 bp, Bacillus clausii KSM-K16; identical to SEQ ID NO: 39736
  CDS (1)..(933): transl_table=11

SEQ ID NO: 135321 - protein, 310 aa, Bacillus clausii KSM-K16; identical to SEQ ID NO: 39737

SEQ ID NO: 135322 - DNA, 900 bp, Campylobacter jejuni RM1221
  CDS (1)..(900): transl_table=11
atgaaagtatatgaaaaagtaagtgagcttataggaaatactcctattatacatttgaaaaaatttggtatcaatgtttttgctaaatgtgaatttttaaatcctagtcattctataaaagatagagcagcttttgaaatgattaaagatgctttagatagtaaaaaaattaatcaagatactacaatagttgaagcaactagtggaaatactggaatttctttggctatgatttgtgcagatttgggacttaaatttattgctgtaatgcccgaatctatgagtttagaaagaagaaaaatgataacactctttggcgctaggttagaattaactcctgcaaatttaggaatgaaaggagcggttgataaagcaaatgaaatattattaaatactccaaattcttttatggtttctcaatttgaaaatatttcaaataaaaatgcgcatcgtaagaatacggctttagaaattttaagagatttggataatgaacttgatatttttgtagctggttttggaactggcggtactattagtggagttggggaaatactaaaagaaaaattagaaaaagtgcatattgttggagtcgagcctctaaattctccattgcttagcaaaggtgaagcgggaagccataaaatacaaggaataggggcgaattttatacctgctattttaaataaagaagttatagatgaagtgatcacagtaagtaatgaagatgctataaatacagccaaagaacttgccaaaagtggtttaatggtaggtatatcaagtggagcaaatgtatttgccgcaagtatgctagcaaagaaatttccagataaaagaattttaactatgctaaacgatacggctgaaagatacctctcaactgatctttttgcttaa

SEQ ID NO: 135323 - protein, 299 aa, Campylobacter jejuni RM1221
MKVYEKVSELIGNTPIIHLKKFGINVFAKCEFLNPSHSIKDRAAFEMIKDALDSKKINQDTTIVEATSGNTGISLAMICADLGLKFIAVMPESMSLERRKMITLFGARLELTPANLGMKGAVDKANEILLNTPNSFMVSQFENISNKNAHRKNTALEILRDLDNELDIFVAGFGTGGTISGVGEILKEKLEKVHIVGVEPLNSPLLSKGEAGSHKIQGIGANFIPAILNKEVIDEVITVSNEDAINTAKELAKSGLMVGISSGANVFAASMLAKKFPDKRILTMLNDTAERYLSTDLFA

SEQ ID NO: 135324 - DNA, 963 bp, Dehalococcoides ethenogenes 195; identical to SEQ ID NO: 39740
  CDS (1)..(963): transl_table=11

SEQ ID NO: 135325 - protein, 320 aa, Dehalococcoides ethenogenes 195; identical to SEQ ID NO: 39741

SEQ ID NO: 135326 - DNA, 951 bp, Bacteroides fragilis NCTC 9343; identical to SEQ ID NO: 39744
  CDS (1)..(951): transl_table=11

SEQ ID NO: 135327 - protein, 316 aa, Bacteroides fragilis NCTC 9343; identical to SEQ ID NO: 39745

SEQ ID NO: 135328 - DNA, 948 bp, Bacteroides fragilis NCTC 9343; identical to SEQ ID NO: 39746
  CDS (1)..(948): transl_table=11

SEQ ID NO: 135329 - protein, 315 aa, Bacteroides fragilis NCTC 9343; identical to SEQ ID NO: 39747

SEQ ID NO: 135330 - DNA, 936 bp, Corynebacterium glutamicum ATCC 13032
  CDS (1)..(936): transl_table=11
atgggcaatgtgtacaacaacatcaccgaaaccatcggccacaccccactggtaaagctgaacaagctcaccgaaggcctcgacgcaactgtcctggtcaagcttgagtcattcaacccagcaaactccgtcaaggaccgtatcggtctggccatcgttgaagatgcagagaagtccggtgcactgaagccaggcggcaccatcgttgaagcaacctccggcaacaccggtatcgcactggcaatggtcggcgctgcacgcggatacaacgttgttctcaccatgccggagaccatgtccaacgagcgtcgcgttctcctccgcgcttacggtgcagagatcgttcttaccccaggtgcagcaggcatgcagggtgcaaaggacaaggcagacgaaatcgtcgctgaacgcgaaaacgcagtccttgctcgccagttcgagaacgaggcaaacccacgcgtccaccgcgacaccaccgcgaaggaaatcctcgaagacaccgacggcaacgttgatatcttcgttgcaagcttcggcaccggcggaaccgtcaccggcgttggccaggtcctgaaggaaaacaacgcagacgtacaggtctacaccgtcgagccagaagcgtccccacttctgaccgctggcaaggctggtccacacaagatccagggcatcggcgcaaacttcatccccgaggtcctggaccgcaaggttctcgacgacgtgctgaccgtctccaacgaagacgcaatcgcattctcccgcaagctcgctaccgaagagggcatcctcggcggtatctccaccggcgcaaacatcaaggcagctcttgaccttgcagcaaagccagagaacgctggcaaaaccatcgtcaccgttgtcaccgacttcggcgagcgctacgtctccaccgttctttacgaagacatccgcgactaa

SEQ ID NO: 135331 - protein, 311 aa, Corynebacterium glutamicum ATCC 13032
MGNVYNNITETIGHTPLVKLNKLTEGLDATVLVKLESFNPANSVKDRIGLAIVEDAEKSGALKPGGTIVEATSGNTGIALAMVGAARGYNVVLTMPETMSNERRVLLRAYGAEIVLTPGAAGMQGAKDKADEIVAERENAVLARQFENEANPRVHRDTTAKEILEDTDGNVDIFVASFGTGGTVTGVGQVLKENNADVQVYTVEPEASPLLTAGKAGPHKIQGIGANFIPEVLDRKVLDDVLTVSNEDAIAFSRKLATEEGILGGISTGANIKAALDLAAKPENAGKTIVTVVTDFGERYVSTVLYEDIRD

SEQ ID NO: 135332 - DNA, 975 bp, Pseudomonas syringae pv. syringae B728a
  CDS (1)..(975): transl_table=11
atgagccgtatctacgctgataacgcccattccatcggtaatacgccgttggtgcagatcaaccgtatcgcgccgcgcggtgtcaccattctggccaagatcgaagggcgtaatccgggctattccgtcaagtgccgtatcggcgccaacatgatctgggacgccgaaagcagcggcaggctcaaaccgggcatgaccatcgtcgagccgacctctggcaacaccggcatcggtctggccttcgttgccgctgcccgtggctacaagctgatgctcaccatgcccgcttccatgagcatagaacgtcgcaaggtcctcaaggcactgggcgcagaactggtgctgaccgaagcggccaagggcatgaaaggcgcgattgccaaggccgaagaactgctggcaggcaaccccgggaaatatttcatgccggcgcaattcgaaaacccggccaacccggccatccatgaaaaaaccactggcccggaaatctgggcagacaccgacggtgccatcgatgtcctggtggcaggcgtaggaactggcgggactatcaccggtatctcccggtatatcaagcacaccgaaggcaaaccgatcctgtcggtcgcggtcgagccggacggttcgccgatcatcacccaggcgatggccggtgaaacgatcacgcccagcccgcacaagattcagggcatcggcgccggcttcatcccgaaaaacctcgacctgtcgattgtcgaccgggtggagcgtgtcaccgatgaagagtccaaggccatggcgcggcgtctgatgcaggaggagggcattctctgcggtatttcgtgcggcgcggcaatggcggcggccgtccgtctggctgaaaagccggagatgcagggcaagacgatcgtggtggtcctgccggactccggcgaacgttacctgtcgagcatgctgttcagcgatctgtttaccgatcaggagctttcccagtaa

SEQ ID NO: 135333 - protein, 324 aa, Pseudomonas syringae pv. syringae B728a
MSRIYADNAHSIGNTPLVQINRIAPRGVTILAKIEGRNPGYSVKCRIGANMIWDAESSGRLKPGMTIVEPTSGNTGIGLAFVAAARGYKLMLTMPASMSIERRKVLKALGAELVLTEAAKGMKGAIAKAEELLAGNPGKYFMPAQFENPANPAIHEKTTGPEIWADTDGAIDVLVAGVGTGGTITGISRYIKHTEGKPILSVAVEPDGSPIITQAMAGETITPSPHKIQGIGAGFIPKNLDLSIVDRVERVTDEESKAMARRLMQEEGILCGISCGAAMAAAVRLAEKPEMQGKTIVVVLPDSGERYLSSMLFSDLFTDQELSQ

SEQ ID NO: 135334 - DNA, 942 bp, Pseudomonas syringae pv. syringae B728a
  CDS (1)..(942): transl_table=11
atgataggcaccccccgcagtctggattgcgaagacgccatgaccctgcagtatcaaaccattgccgattgcgtcggcaacaccccgctggtgcgtctgcaacgcatggcgggtaataccagcaataccctcctgttgaaactcgaaggtaacaaccccgctggctcggtaaaagaccgcccggccttgtcgatgatcacccgcgccgagttgcgcggccagatccatccgggtgacacgctgatcgaagccacctccggcaataccggaatcgcgctggccatggctgcggcgatcaagggctaccggatgattctgatcatgccggacaactccagtgccgaacgcaaggccgcgatgaccgcctatggcgccgagctgatttcggtcagcaaggatgacggcatggaaggtgcccgtgatctggccgagcgcatgcaggccgaaggccgtggcaaggtgctcgatcagtttgccaatggcgacaaccccgaggcgcattacacgtccaccggtccggaaatctggcggcagacgggcggtaccgtgacccatttcgtcagttcgatgggcaccaccggcaccatcatgggcacctcgcgctacctcaaggagcagaatcccgacgtgcagatcgtcggtctgcaaccgatggagggcgcttcgatccccggtattcgccgctggccgcaggaatacctgccgaaaatctatcagtcggaccgtgtcgaccgcatcatcgacatgggccagagcgaagccgaagacaccatgcgccgcctcgctcgcgaagaaggcatcttctgtggcgtgtcgtccggtggctcggtcgccggggcgttgcgtatttcccgggaagtcgaaaacgccgtgattgtggcgatcatctgtgaccgaggcgaccgttacctgtcgaccggcgtctatgattcgcccaactga

SEQ ID NO: 135335 - protein, 313 aa, Pseudomonas syringae pv. syringae B728a
MIGTPRSLDCEDAMTLQYQTIADCVGNTPLVRLQRMAGNTSNTLLLKLEGNNPAGSVKDRPALSMITRAELRGQIHPGDTLIEATSGNTGIALAMAAAIKGYRMILIMPDNSSAERKAAMTAYGAELISVSKDDGMEGARDLAERMQAEGRGKVLDQFANGDNPEAHYTSTGPEIWRQTGGTVTHFVSSMGTTGTIMGTSRYLKEQNPDVQIVGLQPMEGASIPGIRRWPQEYLPKIYQSDRVDRIIDMGQSEAEDTMRRLAREEGIFCGVSSGGSVAGALRISREVENAVIVAIICDRGDRYLSTGVYDSPN

SEQ ID NO: 135336 - DNA, 1110 bp, Pseudomonas fluorescens Pf-5; identical to SEQ ID NO: 39748
  CDS (1)..(1110): transl_table=11

SEQ ID NO: 135337 - protein, 369 aa, Pseudomonas fluorescens Pf-5; identical to SEQ ID NO: 39749

SEQ ID NO: 135338 - DNA, 903 bp, Pseudomonas fluorescens Pf-5; identical to SEQ ID NO: 39750
  CDS (1)..(903): transl_table=11

SEQ ID NO: 135339 - protein, 300 aa, Pseudomonas fluorescens Pf-5; identical to SEQ ID NO: 39751

SEQ ID NO: 135340 - DNA, 957 bp, Psychrobacter arcticus 273-4; identical to SEQ ID NO: 39752
  CDS (1)..(957): transl_table=11

SEQ ID NO: 135341 - protein, 318 aa, Psychrobacter arcticus 273-4; identical to SEQ ID NO: 39753

SEQ ID NO: 135342 - DNA, 981 bp, Colwellia psychrerythraea 34H; identical to SEQ ID NO: 39754
  CDS (1)..(981): transl_table=11

SEQ ID NO: 135343 - protein, 326 aa, Colwellia psychrerythraea 34H; identical to SEQ ID NO: 39755

SEQ ID NO: 135344 - DNA, 975 bp, Pseudomonas syringae pv. phaseolicola 1448A; identical to SEQ ID NO: 39756
  CDS (1)..(975): transl_table=11

SEQ ID NO: 135345 - protein, 324 aa, Pseudomonas syringae pv. phaseolicola 1448A; identical to SEQ ID NO: 39757

SEQ ID NO: 135346 - DNA, 942 bp, Pseudomonas syringae pv. phaseolicola 1448A; identical to SEQ ID NO: 39758
  CDS (1)..(942): transl_table=11

SEQ ID NO: 135347 - protein, 313 aa, Pseudomonas syringae pv. phaseolicola 1448A; identical to SEQ ID NO: 39759

SEQ ID NO: 135348 - DNA, 900 bp, Dechloromonas aromatica RCB; identical to SEQ ID NO: 39760
  CDS (1)..(900): transl_table=11

SEQ ID NO: 135349 - protein, 299 aa, Dechloromonas aromatica RCB; identical to SEQ ID NO: 39761

SEQ ID NO: 135350 - DNA, 975 bp, Dechloromonas aromatica RCB; identical to SEQ ID NO: 39762
  CDS (1)..(975): transl_table=11

SEQ ID NO: 135351 - protein, 324 aa, Dechloromonas aromatica RCB; identical to SEQ ID NO: 39763

SEQ ID NO: 135352 - DNA, 933 bp, Dechloromonas aromatica RCB; identical to SEQ ID NO: 39764
  CDS (1)..(933): transl_table=11

SEQ ID NO: 135353 - protein, 310 aa, Dechloromonas aromatica RCB; identical to SEQ ID NO: 39765

SEQ ID NO: 135354 - DNA, 1368 bp, Thermobifida fusca YX; identical to SEQ ID NO: 39766
  CDS (1)..(1368): transl_table=11

SEQ ID NO: 135355 - protein, 455 aa, Thermobifida fusca YX; identical to SEQ ID NO: 39767

SEQ ID NO: 135356 - DNA, 948 bp, Thermobifida fusca YX
  CDS (1)..(948): transl_table=11
atgaggttcgattcgcttctggattcgctcggcggtacccccctggtcgggctgcctaatctgtcgccctcccccgaagtgcggctctgggccaaactggaggaccgtaacccgaccgggtcgatcaaggaccgcgcggcgttctacatgatcgagcaggcagaaaaggacggcctgctcactccggggtgcaccattctggagccgacctcggggaacacggggatttccttggcgatggtcgcccggctgcgcggttacaagatggtctgcgtcatgccggagaacacttccgcggaacgcagccaactcctgcgcatgtggggcgccgagatctactactccccggcggaaggcggctccaacgaggcggtgcgcgtcgccaaacggatggccgccgagaaccccgactgggtgatgctctaccagtacggcaacccggcgaatgcccgggcccactacgagacgaccggcccggaactcctcgccgacctgccggagatcacccacttcgtcgctggactgggcacgaccggaaccctcatgggggtcggccgctacctgcgggagcaccgtccggacgtccagatcgtggccgctgaaccccgctacggggagctcgtctacggtctgcggaaccttgacgaagggttcgtgcccgagctttacgacgagacgatcctcagcagccgctactctgtcccctccgacgcggcactgcgccgcacccgggagctcctcgacaaagaggggatcttcgcgggcatctccaccggaggggtcctgcacgccgccctcggcgtggcacagaaggccgtcaaagcagggcagcgtgccgatatcgcattcgtcgtcgctgacgcaggctggaagtacctgtccaccggcgcctacgaaggcacgctggaagaggctgcgcagcggctcgaaggccagctctgggcctga

SEQ ID NO: 135357 - protein, 315 aa, Thermobifida fusca YX
MRFDSLLDSLGGTPLVGLPNLSPSPEVRLWAKLEDRNPTGSIKDRAAFYMIEQAEKDGLLTPGCTILEPTSGNTGISLAMVARLRGYKMVCVMPENTSAERSQLLRMWGAEIYYSPAEGGSNEAVRVAKRMAAENPDWVMLYQYGNPANARAHYETTGPELLADLPEITHFVAGLGTTGTLMGVGRYLREHRPDVQIVAAEPRYGELVYGLRNLDEGFVPELYDETILSSRYSVPSDAALRRTRELLDKEGIFAGISTGGVLHAALGVAQKAVKAGQRADIAFVVADAGWKYLSTGAYEGTLEEAAQRLEGQLWA

SEQ ID NO: 135358 - DNA, 969 bp, Prochlorococcus marinus str. NATL2A; identical to SEQ ID NO: 39768
  CDS (1)..(969): transl_table=11

SEQ ID NO: 135359 - protein, 322 aa, Prochlorococcus marinus str. NATL2A; identical to SEQ ID NO: 39769

SEQ ID NO: 135360 - DNA, 987 bp, Prochlorococcus marinus str. NATL2A; identical to SEQ ID NO: 39770
  CDS (1)..(987): transl_table=11

SEQ ID NO: 135361 - protein, 328 aa, Prochlorococcus marinus str. NATL2A; identical to SEQ ID NO: 39771

SEQ ID NO: 135362 - DNA, 903 bp, Ralstonia eutropha JMP134; identical to SEQ ID NO: 39772
  CDS (1)..(903): transl_table=11

SEQ ID NO: 135363 - protein, 300 aa, Ralstonia eutropha JMP134; identical to SEQ ID NO: 39773

SEQ ID NO: 135364 - DNA, 927 bp, Methanosarcina barkeri str. Fusaro; identical to SEQ ID NO: 39776
  CDS (1)..(927): transl_table=11

SEQ ID NO: 135365 - protein, 308 aa, Methanosarcina barkeri str. Fusaro; identical to SEQ ID NO: 39777

SEQ ID NO: 135366 - DNA, 894 bp, Thiobacillus denitrificans ATCC 25259; identical to SEQ ID NO: 39778
  CDS (1)..(894): transl_table=11

SEQ ID NO: 135367 - protein, 297 aa, Thiobacillus denitrificans ATCC 25259; identical to SEQ ID NO: 39779

SEQ ID NO: 135368 - DNA, 960 bp, Anabaena variabilis ATCC 29413; identical to SEQ ID NO: 39780
  CDS (1)..(960): transl_table=11

SEQ ID NO: 135369 - protein, 319 aa, Anabaena variabilis ATCC 29413; identical to SEQ ID NO: 39781

SEQ ID NO: 135370 - DNA, 963 bp, Anabaena variabilis ATCC 29413
  CDS (1)..(963): transl_table=11
atgcgggttgctcgtaacattacagaacttgtgggtcgtacacctttagtacagctaaatcgcattcctcaagaggaaggatgtgtagctcagattcttgtgaagatggaaagcatgaatccatcatcatctgtgaaagaccgaattggggtgagtatgattaatgcagctgaacaggaggggttgattgctcctgggaagactgtattagtcgaacccacatcgggaaatacggggattgctttagcaatggcagcagcagccaagggttatcgcttaattttaacgatgccagaaaccatgagtggtgagcgtcgggctatgttgcgggcttatggagcggagctagaattgacaccaggaatggaaggaatgagtggagcaattcgccgcgcccaggagatagtgaatactacccctcacgcttatatgttgcagcagttccgtaatccagcgaacgtgaaaatacatcgggagactaccgccgaggaaatctgggaagataccgatggtcaggtagatatgattgtcgcaggggtgggtacaggtggtacgatcacaggtgtagcggaagtactgaaagcccgtaaaccaagttttcaggcgatcgcagttgagcctgccaatagtccagttttatctggaggtaaaccaggcccccataaaattcagggaattggtgcgggattcgttccccaagtcctaaaaacacaattgattgatgaagtgattacggtcacagatgaagaagcgatcgcttatggtcggcgtttagctagagaagaagggctattatctgggatttccagtggtgctgctttgtgtgctgccattcgcgtagctcaacgtccagaaaacgcaggacgcttaattgtattgattcagcctagttttggagaaaggtatctgagtacaccattgttccaagacctagaaacgaaggtaacagctagcattagctaa

SEQ ID NO: 135371 - protein, 320 aa, Anabaena variabilis ATCC 29413
MRVARNITELVGRTPLVQLNRIPQEEGCVAQILVKMESMNPSSSVKDRIGVSMINAAEQEGLIAPGKTVLVEPTSGNTGIALAMAAAAKGYRLILTMPETMSGERRAMLRAYGAELELTPGMEGMSGAIRRAQEIVNTTPHAYMLQQFRNPANVKIHRETTAEEIWEDTDGQVDMIVAGVGTGGTITGVAEVLKARKPSFQAIAVEPANSPVLSGGKPGPHKIQGIGAGFVPQVLKTQLIDEVITVTDEEAIAYGRRLAREEGLLSGISSGAALCAAIRVAQRPENAGRLIVLIQPSFGERYLSTPLFQDLETKVTASIS

SEQ ID NO: 135372 - DNA, 1386 bp, Anabaena variabilis ATCC 29413; identical to SEQ ID NO: 39784
  CDS (1)..(1386): transl_table=11

SEQ ID NO: 135373 - protein, 461 aa, Anabaena variabilis ATCC 29413; identical to SEQ ID NO: 39785

SEQ ID NO: 135374 - DNA, 975 bp, Pseudomonas fluorescens PfO-1; identical to SEQ ID NO: 39788
  CDS (1)..(975): transl_table=11

SEQ ID NO: 135375 - protein, 324 aa, Pseudomonas fluorescens PfO-1; identical to SEQ ID NO: 39789

SEQ ID NO: 135376 - DNA, 942 bp, Pseudomonas fluorescens PfO-1; identical to SEQ ID NO: 39792
  CDS (1)..(942): transl_table=11

SEQ ID NO: 135377 - protein, 313 aa, Pseudomonas fluorescens PfO-1; identical to SEQ ID NO: 39793

SEQ ID NO: 135378 - DNA, 1077 bp, Rhodobacter sphaeroides 2.4.1; identical to SEQ ID NO: 39794
  CDS (1)..(1077): transl_table=11

SEQ ID NO: 135379 - protein, 358 aa, Rhodobacter sphaeroides 2.4.1; identical to SEQ ID NO: 39795

SEQ ID NO: 135380 - DNA, 921 bp, Carboxydothermus hydrogenoformans Z-2901; identical to SEQ ID NO: 39796
  CDS (1)..(921): transl_table=11

SEQ ID NO: 135381 - protein, 306 aa, Carboxydothermus hydrogenoformans Z-2901; identical to SEQ ID NO: 39797

SEQ ID NO: 135382 - DNA, 903 bp, Burkholderia sp. 383; identical to SEQ ID NO: 39798
  CDS (1)..(903): transl_table=11

SEQ ID NO: 135383 - protein, 300 aa, Burkholderia sp. 383; identical to SEQ ID NO: 39799

SEQ ID NO: 135384 - DNA, 969 bp, Synechococcus sp. CC9605; identical to SEQ ID NO: 39802
  CDS (1)..(969): transl_table=11

SEQ ID NO: 135385 - protein, 322 aa, Synechococcus sp. CC9605; identical to SEQ ID NO: 39803

SEQ ID NO: 135386 - DNA, 927 bp, Geobacter metallireducens GS-15; identical to SEQ ID NO: 39804
  CDS (1)..(927): transl_table=11

SEQ ID NO: 135387 - protein, 308 aa, Geobacter metallireducens GS-15; identical to SEQ ID NO: 39805

SEQ ID NO: 135388 - DNA, 930 bp, Geobacter metallireducens GS-15; identical to SEQ ID NO: 39806
  CDS (1)..(930): transl_table=11

SEQ ID NO: 135389 - protein, 309 aa, Geobacter metallireducens GS-15; identical to SEQ ID NO: 39807

SEQ ID NO: 135390 - DNA, 924 bp, Geobacter metallireducens GS-15; identical to SEQ ID NO: 39808
  CDS (1)..(924): transl_table=11

SEQ ID NO: 135391 - protein, 307 aa, Geobacter metallireducens GS-15; identical to SEQ ID NO: 39809

SEQ ID NO: 135392 - DNA, 930 bp, Desulfovibrio desulfuricans G20; identical to SEQ ID NO: 39810
  CDS (1)..(930): transl_table=11

SEQ ID NO: 135393 - protein, 309 aa, Desulfovibrio desulfuricans G20; identical to SEQ ID NO: 39811

SEQ ID NO: 135394 - DNA, 969 bp, Prochlorococcus marinus str. MIT 9312; identical to SEQ ID NO: 39812
  CDS (1)..(969): transl_table=11

SEQ ID NO: 135395 - protein, 322 aa, Prochlorococcus marinus str. MIT 9312; identical to SEQ ID NO: 39813

SEQ ID NO: 135396 - DNA, 990 bp, Synechococcus elongatus PCC 7942; identical to SEQ ID NO: 39816
  CDS (1)..(990): transl_table=11

SEQ ID NO: 135397 - protein, 329 aa, Synechococcus elongatus PCC 7942; identical to SEQ ID NO: 39817

SEQ ID NO: 135398 - DNA, 1005 bp, Synechococcus elongatus PCC 7942; identical to SEQ ID NO: 39820
  CDS (1)..(1005): transl_table=11

SEQ ID NO: 135399 - protein, 334 aa, Synechococcus elongatus PCC 7942; identical to SEQ ID NO: 39821

SEQ ID NO: 135400 - DNA, 984 bp, Rhodospirillum rubrum ATCC 11170; identical to SEQ ID NO: 39824
  CDS (1)..(984): transl_table=11

SEQ ID NO: 135401 - protein, 327 aa, Rhodospirillum rubrum ATCC 11170; identical to SEQ ID NO: 39825

SEQ ID NO: 135402 - DNA, 1020 bp, Rhodospirillum rubrum ATCC 11170; identical to SEQ ID NO: 39826
  CDS (1)..(1020): transl_table=11

SEQ ID NO: 135403 - protein, 339 aa, Rhodospirillum rubrum ATCC 11170; identical to SEQ ID NO: 39827

SEQ ID NO: 135404 - DNA, 921 bp, Moorella thermoacetica ATCC 39073; identical to SEQ ID NO: 39828
  CDS (1)..(921): transl_table=11

SEQ ID NO: 135405 - protein, 306 aa, Moorella thermoacetica ATCC 39073; identical to SEQ ID NO: 39829

SEQ ID NO: 135406 - DNA, 927 bp, Moorella thermoacetica ATCC 39073; identical to SEQ ID NO: 39830
  CDS (1)..(927): transl_table=11

SEQ ID NO: 135407 - protein, 308 aa, Moorella thermoacetica ATCC 39073; identical to SEQ ID NO: 39831

SEQ ID NO: 135408 - DNA, 912 bp, Burkholderia thailandensis E264; identical to SEQ ID NO: 39832
  CDS (1)..(912): transl_table=11

SEQ ID NO: 135409 - protein, 303 aa, Burkholderia thailandensis E264; identical to SEQ ID NO: 39833

SEQ ID NO: 135410 - DNA, 2310 bp, Syntrophus aciditrophicus SB
  CDS (1)..(2310): transl_table=11
atgcagaaactttatgggaacattcttgaagcgattggaaatacgccgcttgttgagattcgcaggttgaacccgaacccgaacgtaaaaatctatgccaagctggaaagtttcaatcccggggggtccatcaaggaccggaccgccctttatatgatcaatgaggcagaacggcgcggggaactcaccaaagataaaatcatcctggaagcaaccagcggcaataccggcattggtctggccctcattgcggcggcaaagggttatcgcgtctgctttgcaatggcggagtcggcgagtgacgagaggaaaaaaatactgaaggccctgggggcggaattgcattttactccagccagcctgggcaccgatggtgcgatagaaacagtatacagcatgatgcgggaaaacccggaccgttatttcgtccctgatcagtttaacaatcccgataatattctggcccattatcacgggacggccgaggaaatctggcagcagaccgggggccgtgtcaccatggcgattgccacaatggggacaacgggaaccgtcatggggattgccaggcggttgaaggagtataatccggaagtacggattgtcggggtggaaccttatctgcagcacaagattcagggtctgaaaaatatgaaggaatcctaccgtcccggaatctacgacaaacgctgccttgatgaaaaagtcaatattcttgatgaggatgcctatgagatggccagaaggctggccagagaagaaggaatcctggctggaatgagctccggagcggccatgcacgtggcggcacaaaaggcaaaagaaatgaaagagggcgtgatcgtggttatttttccggacagcggcgaacgctatctcagtacagagctcttcatggataaggaagaatcgaccatacgattctacaatgtcctgtcccggagcaaaaacttcttccggcctgttaatccggataaggtgctgatgcattcctgcggtcccacgacccacgaagttccgcacatcggcagttaccgccggtttgtggtgtccgacttgatccggcgttatctggaattccggggatatgaagtgaaacatgttctcaatatcatcgatctggctgaccggtccattcgaggcgccgagcgggaagggatggatctgggtgtatacactgctcgctgcgaagaggtattccttaatgatatcaataaattgaatataaaaaaggatgaaagctatccacgggccagtgagaattttgacagcatggtgaagctggtggaaaagctggttgacaagggatttgcctatgaaaaattgagatccgtctattttgatatatccaagctgagagattatggatgcctttccaatattgacctggtcagggtgcagcatggcagaaggatcgatctggacgattatgaaaaagacagccccgtggatttcacactccttaaacgatccaccctgagtgaactgaaacggggggtattcttcaagacccgctggggcaacgtcaggccgagttggcacttggaatgcgctgccatcgcccagcactatctggcggatacctttgacattcacgcgagcggttccgatattgtattccctcactgtgaaaatgtcatggcaatcggcaaggcagccacggggaaaaggattgcaaattactggatcaacacggaactggtcatggtcggcgggaaaaagatgtcccgctcgctcaacaacgctctgacccttgaggatttggaaaagaagggttattccggcagggaagtccggttcttcctggtcagctcgcactatcggaagccgctgaatttttccttcggcgccctggatacggccaagaatacggttttgaaattaaatgggttcatccagcgtctgatccggttaaaggccggggagggcgatcccgatcttgaacagaagctgtacgatcttcgccagggtttcacagcggccatggatgatgatctgaacatttccggggctttggccgttctgttcgactttgtcaaaaaagtcagcagctcacttgctcaaggcgttctgaccgtggagcagcgggatcaggttctggaggccttgaaaaaaatcgatgacgtgcttggcgtgatgaagttcgaggaggaacaaatcagtgaagaggccctgcagctaatgaaaaggagagaagccttgcgtcaggaaggccggtgggcgcaggcggatgaaattcgccagaggcttctggacatgggcgttgttgtggccgatacaccggaaggcatggtttggcgcctgaaatga

SEQ ID NO: 135411 - protein, 769 aa, Syntrophus aciditrophicus SB
MQKLYGNILEAIGNTPLVEIRRLNPNPNVKIYAKLESFNPGGSIKDRTALYMINEAERRGELTKDKIILEATSGNTGIGLALIAAAKGYRVCFAMAESASDERKKILKALGAELHFTPASLGTDGAIETVYSMMRENPDRYFVPDQFNNPDNILAHYHGTAEEIWQQTGGRVTMAIATMGTTGTVMGIARRLKEYNPEVRIVGVEPYLQHKIQGLKNMKESYRPGIYDKRCLDEKVNILDEDAYEMARRLAREEGILAGMSSGAAMHVAAQKAKEMKEGVIVVIFPDSGERYLSTELFMDKEESTIRFYNVLSRSKNFFRPVNPDKVLMHSCGPTTHEVPHIGSYRRFVVSDLIRRYLEFRGYEVKHVLNIIDLADRSIRGAEREGMDLGVYTARCEEVFLNDINKLNIKKDESYPRASENFDSMVKLVEKLVDKGFAYEKLRSVYFDISKLRDYGCLSNIDLVRVQHGRRIDLDDYEKDSPVDFTLLKRSTLSELKRGVFFKTRWGNVRPSWHLECAAIAQHYLADTFDIHASGSDIVFPHCENVMAIGKAATGKRIANYWINTELVMVGGKKMSRSLNNALTLEDLEKKGYSGREVRFFLVSSHYRKPLNFSFGALDTAKNTVLKLNGFIQRLIRLKAGEGDPDLEQKLYDLRQGFTAAMDDDLNISGALAVLFDFVKKVSSSLAQGVLTVEQRDQVLEALKKIDDVLGVMKFEEEQISEEALQLMKRREALRQEGRWAQADEIRQRLLDMGVVVADTPEGMVWRLK

SEQ ID NO: 135412 - DNA, 888 bp, Syntrophus aciditrophicus SB; identical to SEQ ID NO: 39834
  CDS (1)..(888): transl_table=11

SEQ ID NO: 135413 - protein, 295 aa, Syntrophus aciditrophicus SB; identical to SEQ ID NO: 39835

SEQ ID NO: 135414 - DNA, 978 bp, Syntrophus aciditrophicus SB
  CDS (1)..(978): transl_table=11
atgcaggaggacagctccatgaaacgaatctacgaagacaactcccggtccatcggcaatacaccgctggtgaaacttaataatctcaccagggggttgcaggcgacggttcttgccaaggtggaaggtagaaatccttcttattcggtaaaatgccggatcggtgcagccatgatctgggatgctgaggaacggggggtgcttcagcccggcatggaaatcatcgaaccgacaagcggtaatacagggatcgcccttgcatatgtggcggcagcccggggatatgaactgaccctgaccatgcccgaaaccatgagcctcgaacgccgccgggttctggcagtcttcggcgccaatctgatcctgacccccggcgctgaagggatgaagggggcaattaaccgggcagaggctttggtggcttccgcgccggaacattatttcctgccccagcagttcaaaaacccggctaatcctgccatccacgagaaaaccaccggtcccgagatctggacggaaacggatggagaagtggatgtccttgtctccggcgtcgggacagggggaacgatttccggggtatcgcggtatatcaaaaaagctcaaggtaaaccgatcttgtctgtggcggtggagccgaaggaaagtccggtcatgactcagaagctggccggggaagaactgcgggcgggacctcataaaattcaaggaatcggcgccgggttcatcccggatacgctggatctttcccttgtggatcgtgtggaacaggtggaaagcgatgaagccgtgctgacagctcggaagctggctcgggatgagggcatccttgtgggcatctccagtggtgcggccgctgcagtcgcgctgcgtctggccgcacgggaagaatttgcagggaagatcttcgttgtaatcctcccggatgccggggaacggtacctgtccaccgtccttttcgaaggtatcggcgaatga

SEQ ID NO: 135415 - protein, 325 aa, Syntrophus aciditrophicus SB
MQEDSSMKRIYEDNSRSIGNTPLVKLNNLTRGLQATVLAKVEGRNPSYSVKCRIGAAMIWDAEERGVLQPGMEIIEPTSGNTGIALAYVAAARGYELTLTMPETMSLERRRVLAVFGANLILTPGAEGMKGAINRAEALVASAPEHYFLPQQFKNPANPAIHEKTTGPEIWTETDGEVDVLVSGVGTGGTISGVSRYIKKAQGKPILSVAVEPKESPVMTQKLAGEELRAGPHKIQGIGAGFIPDTLDLSLVDRVEQVESDEAVLTARKLARDEGILVGISSGAAAAVALRLAAREEFAGKIFVVILPDAGERYLSTVLFEGIGE

SEQ ID NO: 135416 - DNA, 1389 bp, Frankia sp. CcI3; identical to SEQ ID NO: 39836
  CDS (1)..(1389): transl_table=11

SEQ ID NO: 135417 - protein, 462 aa, Frankia sp. CcI3; identical to SEQ ID NO: 39837

SEQ ID NO: 135418 - DNA, 948 bp, Frankia sp. CcI3; identical to SEQ ID NO: 39838
  CDS (1)..(948): transl_table=11

SEQ ID NO: 135419 - protein, 315 aa, Frankia sp. CcI3; identical to SEQ ID NO: 39839

SEQ ID NO: 135420 - DNA, 930 bp, Frankia sp. CcI3; identical to SEQ ID NO: 39840
  CDS (1)..(930): transl_table=11

SEQ ID NO: 135421 - protein, 309 aa, Frankia sp. CcI3; identical to SEQ ID NO: 39841

SEQ ID NO: 135422 - DNA, 999 bp, Novosphingobium aromaticivorans DSM 12444; identical to SEQ ID NO: 39842
  CDS (1)..(999): transl_table=11

SEQ ID NO: 135423 - protein, 332 aa, Novosphingobium aromaticivorans DSM 12444; identical to SEQ ID NO: 39843

SEQ ID NO: 135424 - DNA, 918 bp, Novosphingobium aromaticivorans DSM 12444; identical to SEQ ID NO: 39844
  CDS (1)..(918): transl_table=11

SEQ ID NO: 135425 - protein, 305 aa, Novosphingobium aromaticivorans DSM 12444; identical to SEQ ID NO: 39845

SEQ ID NO: 135426 - DNA, 915 bp, Staphylococcus aureus subsp. aureus NCTC 8325
  CDS (1)..(915): transl_table=11
atgattacttatgatttaattggcaatacaccattagtactgttagaacattatagtgatgataaagttaaaatttatgccaagcttgaacaatggaatcctggaggcagtgttaaagacagactcgggaaatatttagtagagaaggcaattcaagaagggcgtgtgcgtgcaggtcaaactattgttgaagcgactgctggtaatacaggcatagggttagctattgcagcgaatagacatcatttgaaatgtaagatctttgcgccgtatggtttttcagaagaaaagattaatattatgatagcgcttggtgcagaagtttcaaggacgagtcagtctgaaggtatgcatggggcacaattagctgcacgttcctatgctgaaaaatatggtgccgtttatatgaatcaatttgaatccgaacataatccggatacatattttcatacattgggacccgaattgacttcagcattacagcaaattgattattttgtggctggtattggctctggcggtacatttacaggtaccgcacgttatttaaagcaacatcacgtgcaatgttatgccgttgagccagaagggtccgtgttaaatggagggccagctcatgcacatgacactgaaggtatcggttctgagaaatggccgatatttttagagagacgtcttgtagatgggatatttacgattaaagatcaagatgcctttcgaaatgtcaaaagtttggctataaatgaagggttgttagtaggcagttcttcaggtgcagcattacaaggtgcattgaatttaaaagcgcaattatctgaaggtacgattgttgtcgtatttccagatggtagtgatcgatatatgtctaagcaaatatttaattatgaggagaataataatgaacaagaaaactaa

SEQ ID NO: 135427 - protein, 304 aa, Staphylococcus aureus subsp. aureus NCTC 8325
MITYDLIGNTPLVLLEHYSDDKVKIYAKLEQWNPGGSVKDRLGKYLVEKAIQEGRVRAGQTIVEATAGNTGIGLAIAANRHHLKCKIFAPYGFSEEKINIMIALGAEVSRTSQSEGMHGAQLAARSYAEKYGAVYMNQFESEHNPDTYFHTLGPELTSALQQIDYFVAGIGSGGTFTGTARYLKQHHVQCYAVEPEGSVLNGGPAHAHDTEGIGSEKWPIFLERRLVDGIFTIKDQDAFRNVKSLAINEGLLVGSSSGAALQGALNLKAQLSEGTIVVVFPDGSDRYMSKQIFNYEENNNEQEN

SEQ ID NO: 135428 - DNA, 954 bp, Desulfitobacterium hafniense Y51; identical to SEQ ID NO: 39848
  CDS (1)..(954): transl_table=11

SEQ ID NO: 135429 - protein, 317 aa, Desulfitobacterium hafniense Y51; identical to SEQ ID NO: 39849

SEQ ID NO: 135430 - DNA, 936 bp, Desulfitobacterium hafniense Y51
  CDS (1)..(936): transl_table=11
atgtcgaaaatcgccagaagtttaactgacctaattggtaataccccattattagaactgtccaattataataggaccactgaattagaggctaaggtcatagcaaaacttgaatactttaaccctctttccagcgtcaaagacagaattggctacgccatgatcaaagacgcggaagagaaaggattgctgaacaaggatacggtcattattgagcccaccagtggcaatacaggaattgctctggcttttgtatccgctgcccgtggctatcgcttgattttaaccatgcctgaaaccatgagcgtggaaagaaggaacctgctcaaggctttgggagcggagctggtgctgactccaggaccggccggtatgaaaggagctattcaaaaagctgaggaattagctgctgaatatcagaattcctttataccacaacagttcaacaatccggctaacccggaaattcataggcaaaccaccgctgaagagatctggagagatacagatggagaagtggacatctttgtggccggagtgggcaccggcggaacggtaaccggtgtgggtgaagccctgaagaagaagaaaccaggggtaaaagttatcgctgtggaaccggcagattcaccggtgttatcggggggaactcccggggctcataagattcagggcattggtgccggatttgtccccggtgtttataactcagaagtcatcgatgaaattttccaggttaaaaatgaggaagcttttgagacctctcgaaaactctcgaagactgaaggtctgctggttgggatctcctcaggtgctgcggcttatgcagcgacccaaatcgccaagagaccggaaaataaaggaaagaatatcgtcgttctgctcccggatacgggggaaagatatctctccacggtcttattccaagaaggttga

SEQ ID NO: 135431 - protein, 311 aa, Desulfitobacterium hafniense Y51
MSKIARSLTDLIGNTPLLELSNYNRTTELEAKVIAKLEYFNPLSSVKDRIGYAMIKDAEEKGLLNKDTVIIEPTSGNTGIALAFVSAARGYRLILTMPETMSVERRNLLKALGAELVLTPGPAGMKGAIQKAEELAAEYQNSFIPQQFNNPANPEIHRQTTAEEIWRDTDGEVDIFVAGVGTGGTVTGVGEALKKKKPGVKVIAVEPADSPVLSGGTPGAHKIQGIGAGFVPGVYNSEVIDEIFQVKNEEAFETSRKLSKTEGLLVGISSGAAAYAATQIAKRPENKGKNIVVLLPDTGERYLSTVLFQEG

SEQ ID NO: 135432 - DNA, 891 bp, Saccharophagus degradans 2-40; identical to SEQ ID NO: 39850
  CDS (1)..(891): transl_table=11

SEQ ID NO: 135433 - protein, 296 aa, Saccharophagus degradans 2-40; identical to SEQ ID NO: 39851

SEQ ID NO: 135434 - DNA, 954 bp, Saccharophagus degradans 2-40; identical to SEQ ID NO: 39852
  CDS (1)..(954): transl_table=11

SEQ ID NO: 135435 - protein, 317 aa, Saccharophagus degradans 2-40; identical to SEQ ID NO: 39853

SEQ ID NO: 135436 - DNA, 888 bp, Methylobacillus flagellatus KT; identical to SEQ ID NO: 39854
  CDS (1)..(888): transl_table=11

SEQ ID NO: 135437 - protein, 295 aa, Methylobacillus flagellatus KT; identical to SEQ ID NO: 39855

SEQ ID NO: 135438 - DNA, 948 bp, Burkholderia xenovorans LB400; identical to SEQ ID NO: 39856
  CDS (1)..(948): transl_table=11

SEQ ID NO: 135439 - protein, 315 aa, Burkholderia xenovorans LB400; identical to SEQ ID NO: 39857

SEQ ID NO: 135440 - DNA, 903 bp, Burkholderia xenovorans LB400; identical to SEQ ID NO: 39858
  CDS (1)..(903): transl_table=11

SEQ ID NO: 135441 - protein, 300 aa, Burkholderia xenovorans LB400; identical to SEQ ID NO: 39859

SEQ ID NO: 135442 - DNA, 930 bp, Methanococcoides burtonii DSM 6242; identical to SEQ ID NO: 39860
  CDS (1)..(930): transl_table=11

SEQ ID NO: 135443 - protein, 309 aa, Methanococcoides burtonii DSM 6242; identical to SEQ ID NO: 39861

SEQ ID NO: 135444 - DNA, 936 bp, Ralstonia metallidurans CH34; identical to SEQ ID NO: 39862
  CDS (1)..(936): transl_table=11

SEQ ID NO: 135445 - protein, 311 aa, Ralstonia metallidurans CH34; identical to SEQ ID NO: 39863

SEQ ID NO: 135446 - DNA, 972 bp, Acidobacteria bacterium Ellin345; identical to SEQ ID NO: 39864
  CDS (1)..(972): transl_table=11

SEQ ID NO: 135447 - protein, 323 aa, Acidobacteria bacterium Ellin345; identical to SEQ ID NO: 39865

SEQ ID NO: 135448 - DNA, 948 bp, Acidobacteria bacterium Ellin345; identical to SEQ ID NO: 39866
  CDS (1)..(948): transl_table=11

SEQ ID NO: 135449 - protein, 315 aa, Acidobacteria bacterium Ellin345; identical to SEQ ID NO: 39867

SEQ ID NO: 135450 - DNA, 1185 bp, Silicibacter sp. TM1040; identical to SEQ ID NO: 39868
  CDS (1)..(1185): transl_table=11

SEQ ID NO: 135451 - protein, 394 aa, Silicibacter sp. TM1040; identical to SEQ ID NO: 39869

SEQ ID NO: 135452 - DNA, 1368 bp, Myxococcus xanthus DK 1622; identical to SEQ ID NO: 39874
  CDS (1)..(1368): transl_table=11

SEQ ID NO: 135453 - protein, 455 aa, Myxococcus xanthus DK 1622; identical to SEQ ID NO: 39875

SEQ ID NO: 135454 - DNA, 918 bp, Rubrobacter xylanophilus DSM 9941; identical to SEQ ID NO: 39878
  CDS (1)..(918): transl_table=11

SEQ ID NO: 135455 - protein, 305 aa, Rubrobacter xylanophilus DSM 9941; identical to SEQ ID NO: 39879

SEQ ID NO: 135456 - DNA, 1041 bp, Mesorhizobium sp. BNC1; identical to SEQ ID NO: 39882
  CDS (1)..(1041): transl_table=11

SEQ ID NO: 135457 - protein, 346 aa, Mesorhizobium sp. BNC1; identical to SEQ ID NO: 39883

SEQ ID NO: 135458 - DNA, 885 bp, Cytophaga hutchinsonii ATCC 33406; identical to SEQ ID NO: 39884
  CDS (1)..(885): transl_table=11

SEQ ID NO: 135459 - protein, 294 aa, Cytophaga hutchinsonii ATCC 33406; identical to SEQ ID NO: 39885

SEQ ID NO: 135460 - DNA, 1413 bp, Rhodococcus sp. RHA1; identical to SEQ ID NO: 39886
  CDS (1)..(1413): transl_table=11

SEQ ID NO: 135461 - protein, 470 aa, Rhodococcus sp. RHA1; identical to SEQ ID NO: 39887

SEQ ID NO: 135462 - DNA, 963 bp, Rhodococcus sp. RHA1; identical to SEQ ID NO: 39888
  CDS (1)..(963): transl_table=11

SEQ ID NO: 135463 - protein, 320 aa, Rhodococcus sp. RHA1; identical to SEQ ID NO: 39889

SEQ ID NO: 135464 - DNA, 1386 bp, Rhodococcus sp. RHA1
  CDS (1)..(1386): transl_table=11
atgcgcatcgcggaacacgtcgtcgacctgatcggcaacacccctctcgtcaagctctcttctgtcatcggtgagaaccacgggaccgttgcagccaagatcgaatacctcaacccgggtggaagctcgaaggaccgcatcgcggtcaagatgatcgacgccgcggaggcgtccggtgagctgaagccgggcgggaccatcgtcgagcccacgtccggcaacaccgggatcggcctcgccctggtcgcacagaagcgcggatacaagtgcgtgttcgtctgccccgacaaggtcagcgaagacaagcggaacgtcctcaaggcctacggcgccgaggtcgtggtgtgcccgaccgcggtcgcgcccgagcacccggacagctactacagcgtctccgaccggctcgcacgcgaacttcccggcggctggaagcccaaccagtactccaaccccggcggcccgcagagccactacgagaccaccggccccgagatctgggccgacaccgacggcaagatcacccacttcgtggcgggcgtcggcaccggcggcaccatcaccggcaccgggcgctatctcaaggaggtgtccggcggcaaggtcaaggtcatcggcgccgaccccgagggttccgtgtactcgggtggcaccggccgtccgtacctggtcgagggcgtgggcgaggacttctggccgagcgcctacgacccgtccatccccgacgagatcatcgccgtgtccgacgccgactccttcgagatgacccgacgtctcgcccgcgaagagggcctgctggtcggtggctcctgcggcatggccgtcgtcgccgcactcgaggtggccaagcgcgagggccccgacgccgtcatcgtcgtcctgctgcccgacggtggtcgcggatacctgtcgaagatcttcaacgacaagtggatggcgtcctacggattcctccgcaccccgctcgacggcaagcccgacgagaagaccgtcggcgacgtgctgcgcggcaagtccggcgaactcccggacctcgtccacacccacccgtccgagacgctgcgcgacgccatcgagatcctccgcgagtacggggtgtcccagatgcccgtcgtcggcgcggagccgcccgtcatggccggtgaagtggcgggcagcgtcaccgagcgcgacctgctcagtgccgtgttcgagggccgcgcgcacctcgccgacccggtggagaagcacatgagcaagccgttcccgctcatcggttccggtgagcccgtgtcggccgccaccaaggcgctcggcgacaccgacgcgctcatggtcgtcgacgacggcaagcccgccggggtcatcacccgccacgaccttctcggtttcctcagcgccggttcctag

SEQ ID NO: 135465 - protein, 461 aa, Rhodococcus sp. RHA1
MRIAEHVVDLIGNTPLVKLSSVIGENHGTVAAKIEYLNPGGSSKDRIAVKMIDAAEASGELKPGGTIVEPTSGNTGIGLALVAQKRGYKCVFVCPDKVSEDKRNVLKAYGAEVVVCPTAVAPEHPDSYYSVSDRLARELPGGWKPNQYSNPGGPQSHYETTGPEIWADTDGKITHFVAGVGTGGTITGTGRYLKEVSGGKVKVIGADPEGSVYSGGTGRPYLVEGVGEDFWPSAYDPSIPDEIIAVSDADSFEMTRRLAREEGLLVGGSCGMAVVAALEVAKREGPDAVIVVLLPDGGRGYLSKIFNDKWMASYGFLRTPLDGKPDEKTVGDVLRGKSGELPDLVHTHPSETLRDAIEILREYGVSQMPVVGAEPPVMAGEVAGSVTERDLLSAVFEGRAHLADPVEKHMSKPFPLIGSGEPVSAATKALGDTDALMVVDDGKPAGVITRHDLLGFLSAGS

SEQ ID NO: 135466 - DNA, 951 bp, Haemophilus somnus 129PT
  CDS (1)..(951): transl_table=11
atgacaatttatgcagataattcctattctattggtaatacaccattagttcgtttaaaaaactttggtaataacggcaacattatagcgaaaattgaagggagaaaccccagctttagcgtgaaatgccgtattggtgccaacatggtatggcaagcagaaaaagatggtattttaaccaaagataaagaaattattgatgcaaccagtggtaatacaggtattgctttagcttatgttgctgcagcacgtggctataaaatcacgttaactatgccggagactatgagttccgaacgtaaacgcttattgcgaggtttaggggtaaatttagtgttgactgaaggtgtcaatggtatgaagggggctattgctaaagcggaagaaattgttgcttcaaatccaaatcactatgtaatgctaaaacagtttgaaaaccctgcaaatccagccattcatcaacaaacaacaggacctgaaatttggtcaggcactgaaggtaaaattgatgtattggtagctggtgttggtactggcggaacaattagtggaattagccgttacattaagcaagatcaaggcaaaaaaattattaccgtagccgttgaacctgaagaatcaccagtgataactcaaacgctggcaggtgaagaaaccaaaccgggtccacataaaattcaaggtattggtgcggggttcattccgaaaaacttagatttatctttagtagatcaagtagaaaaagtcagtagtgaaacagcgattataacggctcgtcgtctaatggcagaagaaggtattctcggagggatctcatccggtgcagcactcgctgtagccgatcgaattgcacaacgtccggaattttccgataaactcattgttgttatcttaccttctgcatcagaacgctatttaagcaccgccttgtttgacggcttcgaaggataa

SEQ ID NO: 135467 - protein, 316 aa, Haemophilus somnus 129PT
MTIYADNSYSIGNTPLVRLKNFGNNGNIIAKIEGRNPSFSVKCRIGANMVWQAEKDGILTKDKEIIDATSGNTGIALAYVAAARGYKITLTMPETMSSERKRLLRGLGVNLVLTEGVNGMKGAIAKAEEIVASNPNHYVMLKQFENPANPAIHQQTTGPEIWSGTEGKIDVLVAGVGTGGTISGISRYIKQDQGKKIITVAVEPEESPVITQTLAGEETKPGPHKIQGIGAGFIPKNLDLSLVDQVEKVSSETAIITARRLMAEEGILGGISSGAALAVADRIAQRPEFSDKLIVVILPSASERYLSTALFDGFEG

SEQ ID NO: 135468 - DNA, 963 bp, Trichodesmium erythraeum IMS101; identical to SEQ ID NO: 39890
  CDS (1)..(963): transl_table=11

SEQ ID NO: 135469 - protein, 320 aa, Trichodesmium erythraeum IMS101; identical to SEQ ID NO: 39891

SEQ ID NO: 135470 - DNA, 1032 bp, Synechococcus sp. CC9311; identical to SEQ ID NO: 39894
  CDS (1)..(1032): transl_table=11

SEQ ID NO: 135471 - protein, 343 aa, Synechococcus sp. CC9311; identical to SEQ ID NO: 39895

SEQ ID NO: 135472 - DNA, 969 bp, Synechococcus sp. CC9311; identical to SEQ ID NO: 39896
  CDS (1)..(969): transl_table=11

SEQ ID NO: 135473 - protein, 322 aa, Synechococcus sp. CC9311; identical to SEQ ID NO: 39897

SEQ ID NO: 135474 - DNA, 879 bp, Shewanella sp. MR-4
  CDS (1)..(879): transl_table=11
gtgtctgactttccgactattgaagcctgtattgggcaaactccgctggtacgtttgcagcgacttgattgtggtagctcaacggtattattaaagctggaggggaataaccccgcgggttcggtaaaggatcgcgcggcgctgaatatgattattcaggcggagcttcgccaagagattgcccctggggataccctgattgaagcgaccagtggcaataccggcatcgccttagccatggcggcggcgattaaaggctacaagatgatcctgatcatgccgtcgaattcgacccaagagcgtaaggatgccatgctggcctatggcgccgagctgctgctggtggacaatatggaagccgcgcgggatttagccttagagcttcaggcacaaggcaaaggtaaggtgctggatcagttcaataatcaagataacgccaacgcccatttccagaccactggccccgaaatttggcagcagagccaaggtaagatcacccactttgtctccagcatgggcaccacaggcactattatgggcgtgtcgaaatacctaaagagccgcaacccagatgtcaccattgtcgggctacaacccgccgatggcagttcgattccggggattcgtcgttggccgcaggaatatctaccgggtattttcgatgctgcccgtgtcgatgcggtgatggatattgaggagcaagatgcgaaagccatggcaagaaccttggcccgtgaagaaggcatttgtgctggcgtgagttctggcggcgcggtatttgcggcgctcgagattgcgaggcagaatccgggttcggttgtggtcgcgattgtgtgtgataggggcgaccgttatctgtcatctgggttattttcttaa

SEQ ID NO: 135475 - protein, 292 aa, Shewanella sp. MR-4
MSDFPTIEACIGQTPLVRLQRLDCGSSTVLLKLEGNNPAGSVKDRAALNMIIQAELRQEIAPGDTLIEATSGNTGIALAMAAAIKGYKMILIMPSNSTQERKDAMLAYGAELLLVDNMEAARDLALELQAQGKGKVLDQFNNQDNANAHFQTTGPEIWQQSQGKITHFVSSMGTTGTIMGVSKYLKSRNPDVTIVGLQPADGSSIPGIRRWPQEYLPGIFDAARVDAVMDIEEQDAKAMARTLAREEGICAGVSSGGAVFAALEIARQNPGSVVVAIVCDRGDRYLSSGLFS

SEQ ID NO: 135476 - DNA, 879 bp, Shewanella sp. MR-7
  CDS (1)..(879): transl_table=11
gtgtctgactttccgactattgaagcctgtattgggcaaactccgctggtacgtttgcagcgacttgattgtggtagctcaacggttttattaaagctggaggggaataaccccgcgggttcggtaaaagatcgcgcggcgctgaatatgatttttcaggcggagcttcgccaagagattgcccctggggataccctgattgaagcgaccagtggcaatacgggtatcgccttagccatggcggcggcgattaaaggctacaagatgatcctgatcatgccgtcgaattcgactcaagagcgtaaggatgccatgcaggcctatggcgccgagctgctgctggtggacaatatggaagccgcgcgggatttagccttagatcttcaggcacaaggcaaaggtaaggtgctggatcagttcaataatcaagataacgctaacgcccattttcagaccactggccccgaaatttggcagcagagccaaggtaagatcactcactttgtctctagcatgggtaccactggcactattatgggagtgtcgaaatacctaaagagccgcaaccccgatgtcaccattgtcgggctacaacccgccgatggcagttcgattccggggatccgccgctggccacaggaatatctaccgggtattttcgatgctgcccgtgtcgatgccgtgatggatattgaggagcaagatgcgaaagccatggcaagaaccttggcccgtgaagaaggtatttgtgctggcgtgagttctggcggggctgtgtttgcggcgctcgagattgcgaggcagaatccgggttccgttgtggtcgcgattgtgtgtgataggggcgaccgttatctgtcatctgggttattttcttaa

SEQ ID NO: 135477 - protein, 292 aa, Shewanella sp. MR-7
MSDFPTIEACIGQTPLVRLQRLDCGSSTVLLKLEGNNPAGSVKDRAALNMIFQAELRQEIAPGDTLIEATSGNTGIALAMAAAIKGYKMILIMPSNSTQERKDAMQAYGAELLLVDNMEAARDLALDLQAQGKGKVLDQFNNQDNANAHFQTTGPEIWQQSQGKITHFVSSMGTTGTIMGVSKYLKSRNPDVTIVGLQPADGSSIPGIRRWPQEYLPGIFDAARVDAVMDIEEQDAKAMARTLAREEGICAGVSSGGAVFAALEIARQNPGSVVVAIVCDRGDRYLSSGLFS

SEQ ID NO: 135478 - DNA, 894 bp, Alkalilimnicola ehrlichei MLHE-1; identical to SEQ ID NO: 39898
  CDS (1)..(894): transl_table=11

SEQ ID NO: 135479 - protein, 297 aa, Alkalilimnicola ehrlichei MLHE-1; identical to SEQ ID NO: 39899

SEQ ID NO: 135480 - DNA, 984 bp, Hyphomonas neptunium ATCC 15444; identical to SEQ ID NO: 39902
  CDS (1)..(984): transl_table=11

SEQ ID NO: 135481 - protein, 327 aa, Hyphomonas neptunium ATCC 15444; identical to SEQ ID NO: 39903

SEQ ID NO: 135482 - DNA, 1074 bp, Hyphomonas neptunium ATCC 15444; identical to SEQ ID NO: 39904
  CDS (1)..(1074): transl_table=11

SEQ ID NO: 135483 - protein, 357 aa, Hyphomonas neptunium ATCC 15444; identical to SEQ ID NO: 39905

SEQ ID NO: 135484 - DNA, 1008 bp, Hyphomonas neptunium ATCC 15444; identical to SEQ ID NO: 39906
  CDS (1)..(1008): transl_table=11

SEQ ID NO: 135485 - protein, 335 aa, Hyphomonas neptunium ATCC 15444; identical to SEQ ID NO: 39907

SEQ ID NO: 135486 - DNA, 963 bp, Rhizobium leguminosarum bv. viciae 3841; identical to SEQ ID NO: 39908
  CDS (1)..(963): transl_table=11

SEQ ID NO: 135487 - protein, 320 aa, Rhizobium leguminosarum bv. viciae 3841; identical to SEQ ID NO: 39909

SEQ ID NO: 135488 - DNA, 975 bp, Pseudomonas aeruginosa UCBPP-PA14; identical to SEQ ID NO: 39912
  CDS (1)..(975): transl_table=11

SEQ ID NO: 135489 - protein, 324 aa, Pseudomonas aeruginosa UCBPP-PA14; identical to SEQ ID NO: 39913

SEQ ID NO: 135490 - DNA, 912 bp, Oenococcus oeni PSU-1; identical to SEQ ID NO: 39914
  CDS (1)..(912): transl_table=11

SEQ ID NO: 135491 - protein, 303 aa, Oenococcus oeni PSU-1; identical to SEQ ID NO: 39915

SEQ ID NO: 135492 - DNA, 954 bp, Solibacter usitatus Ellin6076
  CDS (1)..(954): transl_table=11
atggccaacgcattgcccgtcccccatttggcgcgtacccaagcggagccgctgctcgccaccgtcggcaacacgcccttgctgcgtttggaaaggatcccccgggaattccccggcattgagatccttgcgaaggccgaatacttcaatcccggtggcagcgtgaaggaccgcgccgccgtcaacatggtgctggatggcgaacgctccggcaaactcaaccacacccgcacgatcctggattcgaccagcggcaacaccggcatcgcctatgccatgatcggggccaaccggggataccacgtcaaactagtgcttccaggcaacgccagcgaagagcgcaagcgcatcctgaaagcttacggcgccgagaccattttcagcgaccccggcgaaggcagcgacggagcgatcctgctctgccgccaaatttatcgcgaggatccggaccgctacttctacccggaccagtacaacaatccggccaactggaaggcccacttcgacggcacgggccccgagatcatcaaacagaccaacggcaccattacccactttgtttccgccatggggaccagtggaaccttcaccgggaccaccaggcgcctgcgccgcgatctgccggaggtgaagtgctactccgcccagccctccagcggcttccacggcctggaagggctcaagcacatgcccaccgccatccgcccgggcttttacgacgacaccctggccgatggcaatctgtggatcgaaaccgaggacgcctaccgcatggtccgccgcttggcgcgtgaggaagggctgctggtcggcatctcctcgggttgcaacgtccatgccgcgaccttgctggcgcgcgacatcgcggcccgcggtgaaaccgccacgatcgtgaccgtgctctgcgatagcgccgaaaaatatctcagcgaacacttctgggacgaagaatga

SEQ ID NO: 135493 - protein, 317 aa, Solibacter usitatus Ellin6076
MANALPVPHLARTQAEPLLATVGNTPLLRLERIPREFPGIEILAKAEYFNPGGSVKDRAAVNMVLDGERSGKLNHTRTILDSTSGNTGIAYAMIGANRGYHVKLVLPGNASEERKRILKAYGAETIFSDPGEGSDGAILLCRQIYREDPDRYFYPDQYNNPANWKAHFDGTGPEIIKQTNGTITHFVSAMGTSGTFTGTTRRLRRDLPEVKCYSAQPSSGFHGLEGLKHMPTAIRPGFYDDTLADGNLWIETEDAYRMVRRLAREEGLLVGISSGCNVHAATLLARDIAARGETATIVTVLCDSAEKYLSEHFWDEE

SEQ ID NO: 135494 - DNA, 960 bp, Solibacter usitatus Ellin6076; identical to SEQ ID NO: 39918
  CDS (1)..(960): transl_table=11

SEQ ID NO: 135495 - protein, 319 aa, Solibacter usitatus Ellin6076; identical to SEQ ID NO: 39919

SEQ ID NO: 135496 - DNA, 891 bp, Magnetococcus sp. MC-1; identical to SEQ ID NO: 39920
  CDS (1)..(891): transl_table=11

SEQ ID NO: 135497 - protein, 296 aa, Magnetococcus sp. MC-1; identical to SEQ ID NO: 39921

SEQ ID NO: 135498 - DNA, 969 bp, Shewanella sp. ANA-3
  CDS (1)..(969): transl_table=11
atgagcaaaattttcgaagacaattcatatactattggcaatactccgttagtgcgtttaaaccgcgtaagccaaggtaaagtgctggcaaaggtcgaagcacgtaatccaagtttcagtgtcaaatgccgtatcggtgccaatatgatttgggatgccgagaaaaaaggcctgctcaccaaagatcacgaactgattgagcctacctctggtaatacagggattgccttagcctatgtggcggccgcccgtggttataaactgacgttaactatgccaaatactatgagcttagagcgtcgtaaactgctgaaagccttaggtgcaaacctagtgctgaccgaaggcgcaaaaggcatgaaaggtgctatcgataaagcggaagaaatccgtcaatcggcgcctgaaaaatacattatgctgcagcagtttaataacccagcaaaccctgaaatccatgaaaaaaccactggtccagagatttggaacgataccgatggtgcagtggatgtgtttgttgcaggcgtgggtactggcggtactatcacaggtgtaagccgttacctgaagaaagtcgctggcaaagccattacttctgtcgcggtagaacctgctgattcaccagttatcacccaaaccttagcgggattaccagtgcaacctggtccacacaaaattcaaggtattggcgcaggttttatccctggtaacttagatcttgagttaatcgatcgcgttgaaaccgtcaccaacgatgaagccatcgacatggcgcgccgcttaatgcaagaagaaggcattttagtcggtatttcttctggcgctgctgtggttgcggcgaaccgcatcgcggctctgcctgaatttgcggataaaaacattgtggttatcctgccttcggctgccgagcgttacttatcttctgtactgttccaaggccagtttggcgacgaagagaacattcagtaa

SEQ ID NO: 135499 - protein, 322 aa, Shewanella sp. ANA-3
MSKIFEDNSYTIGNTPLVRLNRVSQGKVLAKVEARNPSFSVKCRIGANMIWDAEKKGLLTKDHELIEPTSGNTGIALAYVAAARGYKLTLTMPNTMSLERRKLLKALGANLVLTEGAKGMKGAIDKAEEIRQSAPEKYIMLQQFNNPANPEIHEKTTGPEIWNDTDGAVDVFVAGVGTGGTITGVSRYLKKVAGKAITSVAVEPADSPVITQTLAGLPVQPGPHKIQGIGAGFIPGNLDLELIDRVETVTNDEAIDMARRLMQEEGILVGISSGAAVVAANRIAALPEFADKNIVVILPSAAERYLSSVLFQGQFGDEENIQ

SEQ ID NO: 135500 - DNA, 879 bp, Shewanella sp. ANA-3; identical to SEQ ID NO: 39924
  CDS (1)..(879): transl_table=11

SEQ ID NO: 135501 - protein, 292 aa, Shewanella sp. ANA-3; identical to SEQ ID NO: 39925

SEQ ID NO: 135502 - DNA, 933 bp, Mycobacterium avium 104; identical to SEQ ID NO: 39928
  CDS (1)..(933): transl_table=11

SEQ ID NO: 135503 - protein, 310 aa, Mycobacterium avium 104; identical to SEQ ID NO: 39929

SEQ ID NO: 135504 - DNA, 972 bp, Mycobacterium smegmatis str. MC2 155
  CDS (1)..(972): transl_table=11
gtgacgcgctacgactccctgctgcaggccctgggcaacaccccgctggtgggcctgcagaacctgtcgccccggtgggacgacgaggacgggaaaccccacgtgcggctgtgggccaagctcgaggaccgcaacccgaccggttccatcaaggaccgccccgcgctgcggatgatcgaacaggccgagcgcgacgggctgctgcagcccggcgccacgatcctggaacccaccagcggcaacaccggcatctcgctggccatggcggccctgctcaagggctacaacatgatctgcgtgatgccggagaacacgtcgatcgaacggcgccagatcctcgagctctacggcgcgcgcatcatcttcagccccgccgagggcggctccaacaccgcggtcgcgaccgcgaaagagcttgccgcgcagaacccgtcgtgggtcatgctgtatcagtacggcaacccggccaacagcgatgcgcactacttcggcaccggccccgaactgctcgcggacctgcccgagatcacccacttcgtcgcggggctcggcaccaccgggaccctgatgggcaccggacgtttcctgcgcgagcacgttcccggcgtgcagatcgtggcggccgaaccgcgttacggcgagggcgtgtacgcactgcgcaacatcgacgagggcttcatccccgagttgtacgacgccgacgtgctcaccacccggttctcggtgggctcgttcgacgccgtgcgccgcacccgtgaactcgtcacgcgcgagggcatattcgcgggcatctcgaccggcgcggtgctgcacgccgcgctggggatggccgccaaggccgtcaaggccggtgagcgtgccgacatcgcgttcgtcgtcgccgacgccggatggaagtatctgtcgaccggcgcgtacgccggtagcctggatgacgccgaggacgcgctggaagggcagctatgggcatga

SEQ ID NO: 135505 - protein, 323 aa, Mycobacterium smegmatis str. MC2 155
MTRYDSLLQALGNTPLVGLQNLSPRWDDEDGKPHVRLWAKLEDRNPTGSIKDRPALRMIEQAERDGLLQPGATILEPTSGNTGISLAMAALLKGYNMICVMPENTSIERRQILELYGARIIFSPAEGGSNTAVATAKELAAQNPSWVMLYQYGNPANSDAHYFGTGPELLADLPEITHFVAGLGTTGTLMGTGRFLREHVPGVQIVAAEPRYGEGVYALRNIDEGFIPELYDADVLTTRFSVGSFDAVRRTRELVTREGIFAGISTGAVLHAALGMAAKAVKAGERADIAFVVADAGWKYLSTGAYAGSLDDAEDALEGQLWA

SEQ ID NO: 135506 - DNA, 1392 bp, Mycobacterium smegmatis str. MC2 155; identical to SEQ ID NO: 39930
  CDS (1)..(1392): transl_table=11

SEQ ID NO: 135507 - protein, 463 aa, Mycobacterium smegmatis str. MC2 155; identical to SEQ ID NO: 39931

SEQ ID NO: 135508 - DNA, 963 bp, Nocardioides sp. JS614; identical to SEQ ID NO: 39934
  CDS (1)..(963): transl_table=11

SEQ ID NO: 135509 - protein, 320 aa, Nocardioides sp. JS614; identical to SEQ ID NO: 39935

SEQ ID NO: 135510 - DNA, 930 bp, Nocardioides sp. JS614; identical to SEQ ID NO: 39936
  CDS (1)..(930): transl_table=11

SEQ ID NO: 135511 - protein, 309 aa, Nocardioides sp. JS614; identical to SEQ ID NO: 39937

SEQ ID NO: 135512 - DNA, 891 bp, Azoarcus sp. BH72; identical to SEQ ID NO: 39938
  CDS (1)..(891): transl_table=11

SEQ ID NO: 135513 - protein, 296 aa, Azoarcus sp. BH72; identical to SEQ ID NO: 39939

SEQ ID NO: 135514 - DNA, 981 bp, Azoarcus sp. BH72; identical to SEQ ID NO: 39940
  CDS (1)..(981): transl_table=11

SEQ ID NO: 135515 - protein, 326 aa, Azoarcus sp. BH72; identical to SEQ ID NO: 39941

SEQ ID NO: 135516 - DNA, 972 bp, Mycobacterium sp. KMS
  CDS (1)..(972): transl_table=11
ttggcgcgttacgactcggtgctcgaggccctcggcaacaccccgctggtggggtgcccgcacctgtcgccgagatgggatgacgacgagaacggaccgcatgtgcggctgtgggccaaactcgaggaccgcaacccgaccggttcgatcaaggaccggcccgcgctgcggatgatcgaacaggccgagcgcgacgggctgctgcagcccggttcgacgatcctggaacccaccagcggcaacaccgggatctcgctggcgatggcagcgctgctcaagggctaccagatgatctgcgtgatgccggagaacacctcgatcgagcgcaggcagctgctcgaactctacggggcccgcatcatcttctcgccggccgaaggcggctccaacaccgccgtcgcgcacgccaaggaactggcggcggcaaacccggactgggtgatgctctaccagtacggcaaccccgcgaacgccgatgcgcactattacggcacgggacccgaactgctcgccgacctgcccgagatcacccacttcgtcgcgggtctgggcaccacggggacgctgatgggcaccggccggttcctgcgcgagaaggtgccgggtgtgcagatcgtggccgccgagccgcgctacggcgaaggcgtgtacgcgctgcgcaacatcgacgagggcttcatccccgagctgtacgaccccgacgtgctgaccacccggttctccgtggggtcgttcgacgcgatcaagcggacccgcgaactggtcaccaaagaggggatcttcgcgggtgtctcgaccggggcgatcctgcacgccgcgctggggatggccgccaaggcgatcaaggcgggcgaacgcgccgacatcgcgttcaccgtgtgtgacgccggctggaagtatctgtcgaccggtgcgtacaccggtagcctcgtcgacgcagaggacgcgttggaagggcagctatgggcgtga

SEQ ID NO: 135517 - protein, 323 aa, Mycobacterium sp. KMS
MARYDSVLEALGNTPLVGCPHLSPRWDDDENGPHVRLWAKLEDRNPTGSIKDRPALRMIEQAERDGLLQPGSTILEPTSGNTGISLAMAALLKGYQMICVMPENTSIERRQLLELYGARIIFSPAEGGSNTAVAHAKELAAANPDWVMLYQYGNPANADAHYYGTGPELLADLPEITHFVAGLGTTGTLMGTGRFLREKVPGVQIVAAEPRYGEGVYALRNIDEGFIPELYDPDVLTTRFSVGSFDAIKRTRELVTKEGIFAGVSTGAILHAALGMAAKAIKAGERADIAFTVCDAGWKYLSTGAYTGSLVDAEDALEGQLWA

SEQ ID NO: 135518 - DNA, 1395 bp, Mycobacterium sp. KMS; identical to SEQ ID NO: 39942
  CDS (1)..(1395): transl_table=11

SEQ ID NO: 135519 - protein, 464 aa, Mycobacterium sp. KMS; identical to SEQ ID NO: 39943

SEQ ID NO: 135520 - DNA, 987 bp, Neisseria meningitidis FAM18; identical to SEQ ID NO: 39944
  CDS (1)..(987): transl_table=11

SEQ ID NO: 135521 - protein, 328 aa, Neisseria meningitidis FAM18; identical to SEQ ID NO: 39945

SEQ ID NO: 135522 - DNA, 906 bp, Acidovorax sp. JS42; identical to SEQ ID NO: 39946
  CDS (1)..(906): transl_table=11

SEQ ID NO: 135523 - protein, 301 aa, Acidovorax sp. JS42; identical to SEQ ID NO: 39947

SEQ ID NO: 135524 - DNA, 1047 bp, Magnetospirillum magnetotacticum MS-1; identical to SEQ ID NO: 39950
  CDS (1)..(1047): transl_table=11

SEQ ID NO: 135525 - protein, 348 aa, Magnetospirillum magnetotacticum MS-1; identical to SEQ ID NO: 39951

SEQ ID NO: 135526 - DNA, 963 bp, Nostoc punctiforme PCC 73102; identical to SEQ ID NO: 39954
  CDS (1)..(963): transl_table=11

SEQ ID NO: 135527 - protein, 320 aa, Nostoc punctiforme PCC 73102; identical to SEQ ID NO: 39955

SEQ ID NO: 135528 - DNA, 963 bp, Nostoc punctiforme PCC 73102; identical to SEQ ID NO: 39956
  CDS (1)..(963): transl_table=11

SEQ ID NO: 135529 - protein, 320 aa, Nostoc punctiforme PCC 73102; identical to SEQ ID NO: 39957

SEQ ID NO: 135530 - DNA, 960 bp, Nostoc punctiforme PCC 73102; identical to SEQ ID NO: 39958
  CDS (1)..(960): transl_table=11

SEQ ID NO: 135531 - protein, 319 aa, Nostoc punctiforme PCC 73102; identical to SEQ ID NO: 39959

SEQ ID NO: 135532 - DNA, 1068 bp, Bifidobacterium longum DJO10A
  CDS (1)..(1068): transl_table=11
atgaccatccacaacagcctcgcagaactcatcggcaacaccccgctcgtcaagctcaaccacatcccgcaggcggccggcgtcaaagccaccatcgccgtcaaagtcgaatacttcaaccccggcggctcctccaaggaccgcatcgccgagcgcatcatcgacgccgccgaacagtccggccagctgaagcccggcggcgtgatcgtcgagcccacctcgggcaacaccggcgtcggcctggccctggtcgctcagcagcgcggctaccgcacgattttcaccctgccggacaaggtctccgaatccaagcgcgcggtgctgcgcgcctacggtgccgaagtcatcgtcacgccaaccgacgccggcccggacgacccgcgctcctactaccaggtcgccgaacgactggccaatacgattcccggcggcttccgcccgaaccagtacgacaacccgaacggcccgctgagccactactacaccaccggacctgagatctgggaggccacggaccacaaggtcacgcacttcgtagccggcatcggcaccggcggcaccatctccggcaccggcaagtacctcaaggaagcctccaacggcgcggtcaaggtcatcggctccgatccggaaggctccatctactccgcttcctcacgcgacgaagtccaccagtacgatatcgagggcgtaggggaggacttctatcccaaggccttcgaccggaacatcaccgacgacatcgtgcgcgtgtccgacgccgaggcctttgaaatgacccgccgtctggccggcgaggaggcgctgctggtcggcggctcgtccggcatggccgtggccagcgccatcaagtacgcgcttgccaatgatttggacgagaaccagatcgtggtggtgctcgcccctgattccggccgcagctacttggagaagatcttcaatgacgactggatgcgcgccaacggctacggcgacatcgtggagcgcaccagcaagccctccctcgccgagcagtaccttaacggagctccctctgatgagggagctggggacggactccataactag

SEQ ID NO: 135533 - protein, 355 aa, Bifidobacterium longum DJO10A
MTIHNSLAELIGNTPLVKLNHIPQAAGVKATIAVKVEYFNPGGSSKDRIAERIIDAAEQSGQLKPGGVIVEPTSGNTGVGLALVAQQRGYRTIFTLPDKVSESKRAVLRAYGAEVIVTPTDAGPDDPRSYYQVAERLANTIPGGFRPNQYDNPNGPLSHYYTTGPEIWEATDHKVTHFVAGIGTGGTISGTGKYLKEASNGAVKVIGSDPEGSIYSASSRDEVHQYDIEGVGEDFYPKAFDRNITDDIVRVSDAEAFEMTRRLAGEEALLVGGSSGMAVASAIKYALANDLDENQIVVVLAPDSGRSYLEKIFNDDWMRANGYGDIVERTSKPSLAEQYLNGAPSDEGAGDGLHN

SEQ ID NO: 135534 - DNA, 951 bp, Haemophilus somnus 2336; identical to SEQ ID NO: 39960
  CDS (1)..(951): transl_table=11

SEQ ID NO: 135535 - protein, 316 aa, Haemophilus somnus 2336; identical to SEQ ID NO: 39961

SEQ ID NO: 135536 - DNA, 924 bp, Bacillus cereus G9241
  CDS (1)..(924): transl_table=11
atggaaataaaaaattcaattacagaattaatagggaaaacccctgttgttaaattaaatcatattgtaaagggaaatgttgcagatatttacttgaagttagaatttatgaatcccggaagcagtgttaaggatcgtattgcattagcgatgattgaagatgctgaaaaaaaaggggtactaaaaaagggagatacaattattgaagctacaagtggtaacacaggaattagtttagctatgatagctgctgcaaaaaattataaatctattcttgttatgccagatacaatgagtgtcgaaagacgtaatttattgagtgcttatggtgctaaattaatattaactccagggcatgaaggtatgagcggcgcaatccagaaagcaaatgaattagcaaagataaatggttactttattcctcagcaatttaaaaatcaaacgaatcctgaaatacatcgtttgacaacaggaccagaaattgttgagcaaatggggaatcaattagatgtatttatagcaggagttggtactggtggaacaattactggtgctggcagtttccttaaagaagtatataaagatataaaaatttgcgcggttgagccagcagattctcccgtattatctggtggaaaaccaaaaaaacaccaacttcaaggaatcggagctggatttgttcctgagactttagatgttagggtatatgatgaggttattcaagtgagagcagatcaggcatttgaatatgctagaaaagtagcttgtaaagaggggattttacttggaatttctgcaggtgcagcaatttatgcatcagttaaaattgcaaaaaagataggaagaggaaaaaagattttaaccattattccgagcaatggtgaaagatatttaagtaccatgttataccgatttgaacaataa

SEQ ID NO: 135537 - protein, 307 aa, Bacillus cereus G9241
MEIKNSITELIGKTPVVKLNHIVKGNVADIYLKLEFMNPGSSVKDRIALAMIEDAEKKGVLKKGDTIIEATSGNTGISLAMIAAAKNYKSILVMPDTMSVERRNLLSAYGAKLILTPGHEGMSGAIQKANELAKINGYFIPQQFKNQTNPEIHRLTTGPEIVEQMGNQLDVFIAGVGTGGTITGAGSFLKEVYKDIKICAVEPADSPVLSGGKPKKHQLQGIGAGFVPETLDVRVYDEVIQVRADQAFEYARKVACKEGILLGISAGAAIYASVKIAKKIGRGKKILTIIPSNGERYLSTMLYRFEQ

SEQ ID NO: 135538 - DNA, 918 bp, Bacillus cereus G9241; identical to SEQ ID NO: 39962
  CDS (1)..(918): transl_table=11

SEQ ID NO: 135539 - protein, 305 aa, Bacillus cereus G9241; identical to SEQ ID NO: 39963

SEQ ID NO: 135540 - DNA, 963 bp, Crocosphaera watsonii WH 8501; identical to SEQ ID NO: 39966
  CDS (1)..(963): transl_table=11

SEQ ID NO: 135541 - protein, 320 aa, Crocosphaera watsonii WH 8501; identical to SEQ ID NO: 39967

SEQ ID NO: 135542 - DNA, 954 bp, Exiguobacterium sibiricum 255-15; identical to SEQ ID NO: 39968
  CDS (1)..(954): transl_table=11

SEQ ID NO: 135543 - protein, 317 aa, Exiguobacterium sibiricum 255-15; identical to SEQ ID NO: 39969

SEQ ID NO: 135544 - DNA, 927 bp, Prosthecochloris aestuarii DSM 271; identical to SEQ ID NO: 39972
  CDS (1)..(927): transl_table=11

SEQ ID NO: 135545 - protein, 308 aa, Prosthecochloris aestuarii DSM 271; identical to SEQ ID NO: 39973

SEQ ID NO: 135546 - DNA, 1383 bp, Kineococcus radiotolerans SRS30216
  CDS (1)..(1383): transl_table=11
gtgcgggatgatggggccatgcgctacgccgagaccgtcgtcgacctcgtgggcgggaccccgctggtcaagctcaaccgcgtcaccgagggcctggcctgcacggtgctcgcgaaggtcgagtacctcaacccgggcggctccgtgaaggaccgcatcgcgacccgcatgatcgaggccgccgaggccgaggggctgctgaagccgggcggcacgatcgtcgagcccaccagcggcaacaccggcgtcggcctcgcgctcgtcgcccagcaacgcggctacaagtgcgtcttcgtgtgccccgacaaggtcggcgccgacaagcggaacgtgctcaaggcctacggcgcggaggtcgtcgtgtgccccaccgccgtcccgccggaggacccgcagtcctactactcggtctccgaccgcctcgtgcgcgagatcgagggcgcctggaagccgaaccagtacagcaacgtccacggcccgcgcagccactacgagacgaccggcccggagatctgggccgacaccgagggccggatcacccacttcgtcaccggcgtcggcaccggcgggacgatcaccggcaccggccgctacctcaaggagcagggcccggtgaaggtcatcggcgccgacccggagggctcggtctactccggcggcaccgggcgcccctacctcgtcgagggggtgggggaggacttctggcccaccgcctacgacccctcgatcccggacgagatcatcgccgtctccgacgcggactccttcgagatgacccgccgcctggcccgcgaggagggtctgctggtcggcggctcctgcgggatggccgtcgtcgcggccctgcgcgcggcgaaggacctcggccccgacgacgtcgtcgtcgtgctcctgcccgacggcggccgcggctacctcggcaagatcttcaacgacgactggatggcgtcctacgggttcctcgactccggggcccgcggcacggtgggcgaggtgctgcgcgcgaagaccaccgggctgcccgcgctggtgcacacccaccccaccgagaccgtccacgacgtcatcgagatcatgcgtgagtacggcgtctcgcagctgcccgtcgtgggggccgaaccgcccgtgatggccggtgagatcgccggggcggtgaacgagcgcgccctgctcgacgccctgttcaccggccgggcgaagatgtccgacgccgtcagcgcccacatgggcccggccctgccgctggtcggggcgggtcagtcggtcgaggacgtgcgctcggtgttctccggcgccgacgccgccgtcgtggtcgaggacggcaagcccaccggcgtcatcacccgccacgacctgctggcctacctggccatctcccactga

SEQ ID NO: 135547 - protein, 460 aa, Kineococcus radiotolerans SRS30216
MRDDGAMRYAETVVDLVGGTPLVKLNRVTEGLACTVLAKVEYLNPGGSVKDRIATRMIEAAEAEGLLKPGGTIVEPTSGNTGVGLALVAQQRGYKCVFVCPDKVGADKRNVLKAYGAEVVVCPTAVPPEDPQSYYSVSDRLVREIEGAWKPNQYSNVHGPRSHYETTGPEIWADTEGRITHFVTGVGTGGTITGTGRYLKEQGPVKVIGADPEGSVYSGGTGRPYLVEGVGEDFWPTAYDPSIPDEIIAVSDADSFEMTRRLAREEGLLVGGSCGMAVVAALRAAKDLGPDDVVVVLLPDGGRGYLGKIFNDDWMASYGFLDSGARGTVGEVLRAKTTGLPALVHTHPTETVHDVIEIMREYGVSQLPVVGAEPPVMAGEIAGAVNERALLDALFTGRAKMSDAVSAHMGPALPLVGAGQSVEDVRSVFSGADAAVVVEDGKPTGVITRHDLLAYLAISH

SEQ ID NO: 135548 - DNA, 960 bp, Xylella fastidiosa Dixon; identical to SEQ ID NO: 39974
  CDS (1)..(960): transl_table=11

SEQ ID NO: 135549 - protein, 319 aa, Xylella fastidiosa Dixon; identical to SEQ ID NO: 39975

SEQ ID NO: 135550 - DNA, 960 bp, Xylella fastidiosa Ann-1; identical to SEQ ID NO: 39976
  CDS (1)..(960): transl_table=11

SEQ ID NO: 135551 - protein, 319 aa, Xylella fastidiosa Ann-1; identical to SEQ ID NO: 39977

SEQ ID NO: 135552 - DNA, 927 bp, Streptococcus suis 89/1591
  CDS (1)..(927): transl_table=11
atggctatttatcaaaacattactcaattagttggaaaaacacctgttattaaactcaataatatcgttccagagggggcagcggaagtctatgtgaaattagaggcctttaacccaggatcttctgtaaaagaccggatcgccttggctatgattgaagatgctgagaaggctggtacaatcaaacctggagatactattgttgagccaacaagtggtaacactggtatcggtcttgcttgggttggagcagcaaaaggttataaggtgattatcgtcatgcctgaaactatgagtgttgagcgtcgtaagattatccaagcttatggagctgagcttgtcttgactcctggtagcgaagggatgaagggggctatcgccaaagcaaaagagattgctgaagaaaaaaatggctgggttcctttccagtttgctaatccatccaatccaaaagttcacgaagatacaacaggacaggaaattttggaagactttggaacaactggtttagatgcctttgtatctggcgttggtactggtggtaccgtttcaggtgtttcgcatgttttgaagacagcaaatccagatattgctatctatgctgtcgaagctgatgaatcagctgtcttatctggtgaagcacctggtccgcacaagatccaaggtatttcggcaggttttattccagatactttggacactagcgcctatgatggcattattcgtgtcaaatccgatgatgccttagctacaggtcgtgctatcggtggaaaagaaggattcttagttggtatttcttcaggtgcagcaattcacgctgctatcgaagtcgctaaggagttgggaactggaaaaaaagtgttggcaatcttacctgataacggagaacgttacttgtcaacagctctttatgagttcaatgattaa

SEQ ID NO: 135553 - protein, 308 aa, Streptococcus suis 89/1591
MAIYQNITQLVGKTPVIKLNNIVPEGAAEVYVKLEAFNPGSSVKDRIALAMIEDAEKAGTIKPGDTIVEPTSGNTGIGLAWVGAAKGYKVIIVMPETMSVERRKIIQAYGAELVLTPGSEGMKGAIAKAKEIAEEKNGWVPFQFANPSNPKVHEDTTGQEILEDFGTTGLDAFVSGVGTGGTVSGVSHVLKTANPDIAIYAVEADESAVLSGEAPGPHKIQGISAGFIPDTLDTSAYDGIIRVKSDDALATGRAIGGKEGFLVGISSGAAIHAAIEVAKELGTGKKVLAILPDNGERYLSTALYEFND

SEQ ID NO: 135554 - DNA, 981 bp, Croceibacter atlanticus HTCC2559
  CDS (1)..(981): transl_table=11
atgcaatacgctgaaaatatattgggtactattggaaatacaccaatggtaaaacttaacaaacttactgcagagctaccttgtctagtacttgctaaatatgaaacatttaatccaggtaactcggttaaagatcgtatggcggtacaaatgattgaagacgcagaagcagatggccgcttaaaaccaggcggaacaataatagaaggcacaagtggtaatacaggaatgggattagcattagcagctattgttaagggctataaaatgatttgtgtattgagtgacaaacagagtaaagaaaagatggatatcttaagagctgtaggaagtgaagtacacgtttgccctacagatgttgctccagatgatccaaggtcttattactctacttcagcaagattagctaaagaaatcccaaactcttggtatgttaatcaatatgataatttaagcaatacaaaagcacactatgaaagtactggcccagaaatatgggagcaaacagatggcaaggtaactcactttgttgtaggagtaggtactggtggtactatttctggtgttgggaaatatttaaaagaacaaaacccgaatgtaaaaatatggggagttgatacttacggtagtgtctttaaaaagtatcatgaaacaggagagtttgatgagaaagaaatttatccttacgttacagaaggtattggtgaagatattttgccgaaaaatgtaaattttgatatcatagatggttttaccaaagtaacagataaagatgctgcggtttatacacaacgcttatctaaagaagaaggtatgttcttagggaactctgctggagcagctattaaaggattacttcagcttaaagaacacttttcaaaagatgatgttgttgtggtattatttcacgatcacggtagccgttatgttggtaaaatgtataatgacgattggatgagaaagatgggttatattgagtaa

SEQ ID NO: 135555 - protein, 326 aa, Croceibacter atlanticus HTCC2559
MQYAENILGTIGNTPMVKLNKLTAELPCLVLAKYETFNPGNSVKDRMAVQMIEDAEADGRLKPGGTIIEGTSGNTGMGLALAAIVKGYKMICVLSDKQSKEKMDILRAVGSEVHVCPTDVAPDDPRSYYSTSARLAKEIPNSWYVNQYDNLSNTKAHYESTGPEIWEQTDGKVTHFVVGVGTGGTISGVGKYLKEQNPNVKIWGVDTYGSVFKKYHETGEFDEKEIYPYVTEGIGEDILPKNVNFDIIDGFTKVTDKDAAVYTQRLSKEEGMFLGNSAGAAIKGLLQLKEHFSKDDVVVVLFHDHGSRYVGKMYNDDWMRKMGYIE

SEQ ID NO: 135556 - DNA, 1053 bp, Sulfitobacter sp. EE-36
  CDS (1)..(1053): transl_table=11
atgaatattcgtactcaggtaaagacccactcccatacggcgacgccctttgcggccacgcggatcgcggacaatgtgctcgacctcatcggccagacgccgatggtgcgcctgccccgctatctcgaccgcgaggatgttaatctggtcgccaaagtcgaggcgctgaaccccgggggcagcgccaaggaccggcccgcgcggcatatgatcgaacgcgctttggcggacggtcgcctaaagcccggcgatacggtggttgaatcctcctccggcaacatgggcatcgggttggcacaagcttgtgcagtgcatgggctgcaattcatctgcgtcgttgaccccaatgcgcagtcccagaacgtggcgatcatccgcgccttggggggccagattgaactggtcgatcacgcgcctgacggtgatttcctcgccgcgcgtctggatcgggtcgccaagcttctggaggaaaattcccgccgtttctggcccaaccaatatgccaacctcgacaatccggagtcccacgagctcggcaccatcgccgagattgacgcggcgcttggcgggcagattgatgtgcttttcgtcgcttgttcgagcactggcacggcgcgaggatgtcgcgactatctgcgccggatggggcgcaaaaccaaggtcgtcgcggtggatgccatgggtagcacgctcttcaacggcaccgcaggcccgcgcaaaatctcgggcatgggcgcgggtcgtatcccagaactggccaatgggcaggagttcgacgatctcgtccgcgtttccgatgtgacctgcgtcgccgggtgtcgccgcgccgttgcgcgcgaagggctgctggtcggcggctccggcggtggcgtgcttgaagccgtgcgcggtatgcaggacgagctcgccggtctgaccgtcgccgcgattatccacgattccggctcgcgctatctgggcaccgtctttgatcccgagtgggtcgagcgcgagctggggatttgcgaggcggatgtgaccgcattagcaggattggcccccgcggattcatga

SEQ ID NO: 135557 - protein, 350 aa, Sulfitobacter sp. EE-36
MNIRTQVKTHSHTATPFAATRIADNVLDLIGQTPMVRLPRYLDREDVNLVAKVEALNPGGSAKDRPARHMIERALADGRLKPGDTVVESSSGNMGIGLAQACAVHGLQFICVVDPNAQSQNVAIIRALGGQIELVDHAPDGDFLAARLDRVAKLLEENSRRFWPNQYANLDNPESHELGTIAEIDAALGGQIDVLFVACSSTGTARGCRDYLRRMGRKTKVVAVDAMGSTLFNGTAGPRKISGMGAGRIPELANGQEFDDLVRVSDVTCVAGCRRAVAREGLLVGGSGGGVLEAVRGMQDELAGLTVAAIIHDSGSRYLGTVFDPEWVERELGICEADVTALAGLAPADS

SEQ ID NO: 135558 - DNA, 1032 bp, Roseovarius nubinhibens ISM; identical to SEQ ID NO: 39982
  CDS (1)..(1032): transl_table=11

SEQ ID NO: 135559 - protein, 343 aa, Roseovarius nubinhibens ISM; identical to SEQ ID NO: 39983

SEQ ID NO: 135560 - DNA, 1032 bp, Oceanicola batsensis HTCC2597
  CDS (1)..(1032): transl_table=11
atgcttgtcgcgcaggatctggcccatgcggtcggcaacaccccgatgatcaaactgcgcaaggtgagtgaggccacgggctgcaccatcctcggcaaggccgaattcctcaatcccggccagtcggtcaaggaccgcgccgcgctgtggatcatccaggacgcgatcgagaaggggctgctggaacccggcggcaccatcgtcgaggggacggcgggcaacaccgggatcgggctggccctcgtcggcgcgtcgatggggttcaggacggtgatcgtcattcccgagacgcagagccaggaaaagaaggaaatgatccgcctggcgggcgcggaactcgttcaggtgccggcggtgccctacaagaatcccaacaactacgtgcgctattccgaacggctggcggcggaactggccaagaccgaacagcatggcgccatctgggccaatcagttcgacaatgtcgcgaaccggcaggcgcatatcgaatcgaccggccccgaggtctgggaacagaccggcggcaaggtcgacggctttgtcgccgcggtcggctccggcggcacgctggccggcgtgggcatggcgcttcagcccaagggcgtgaagatggcgctggccgatcccatgggctcgggcgtctattcgctctacaaggacggtgaatccaggcccgagggcgggtcgatcaccgaaggtatcgggcaggggcgaatcacgaagaacctcgaagggttccgacccgacatgctctaccagatccccgatgacgaggcgctgccctatgtcttcgacctgctggccgaagaggggctctgcgtgggcgggtcctcgggcatcaacatcgcgggcgccgtccggatggcgcgcgagatgggcccgggccataccatcgtcaccgtgctctgcgactacgggacccgctatcagtcgaaactgttcaacccggatttcctgaaggagaagggtcttcccgtgcccgactggctgaccgaggcgccgcgctccatccccggcgtgttcaccgagtga

SEQ ID NO: 135561 - protein, 343 aa, Oceanicola batsensis HTCC2597
MLVAQDLAHAVGNTPMIKLRKVSEATGCTILGKAEFLNPGQSVKDRAALWIIQDAIEKGLLEPGGTIVEGTAGNTGIGLALVGASMGFRTVIVIPETQSQEKKEMIRLAGAELVQVPAVPYKNPNNYVRYSERLAAELAKTEQHGAIWANQFDNVANRQAHIESTGPEVWEQTGGKVDGFVAAVGSGGTLAGVGMALQPKGVKMALADPMGSGVYSLYKDGESRPEGGSITEGIGQGRITKNLEGFRPDMLYQIPDDEALPYVFDLLAEEGLCVGGSSGINIAGAVRMAREMGPGHTIVTVLCDYGTRYQSKLFNPDFLKEKGLPVPDWLTEAPRSIPGVFTE

SEQ ID NO: 135562 - DNA, 969 bp, Prochlorococcus marinus str. MIT 9211; identical to SEQ ID NO: 39984
  CDS (1)..(969): transl_table=11

SEQ ID NO: 135563 - protein, 322 aa, Prochlorococcus marinus str. MIT 9211; identical to SEQ ID NO: 39985

SEQ ID NO: 135564 - DNA, 1023 bp, Erythrobacter sp. NAP1; identical to SEQ ID NO: 39986
  CDS (1)..(1023): transl_table=11

SEQ ID NO: 135565 - protein, 340 aa, Erythrobacter sp. NAP1; identical to SEQ ID NO: 39987

SEQ ID NO: 135566 - DNA, 969 bp, Synechococcus sp. RS9917; identical to SEQ ID NO: 39990
  CDS (1)..(969): transl_table=11

SEQ ID NO: 135567 - protein, 322 aa, Synechococcus sp. RS9917; identical to SEQ ID NO: 39991

SEQ ID NO: 135568 - DNA, 987 bp, Synechococcus sp. RS9917; identical to SEQ ID NO: 39992
  CDS (1)..(987): transl_table=11

SEQ ID NO: 135569 - protein, 328 aa, Synechococcus sp. RS9917; identical to SEQ ID NO: 39993

SEQ ID NO: 135570 - DNA, 987 bp, Synechococcus sp. WH 5701; identical to SEQ ID NO: 39996
  CDS (1)..(987): transl_table=11

SEQ ID NO: 135571 - protein, 328 aa, Synechococcus sp. WH 5701; identical to SEQ ID NO: 39997

SEQ ID NO: 135572 - DNA, 951 bp, Synechococcus sp. WH 7805; identical to SEQ ID NO: 39998
  CDS (1)..(951): transl_table=11

SEQ ID NO: 135573 - protein, 316 aa, Synechococcus sp. WH 7805; identical to SEQ ID NO: 39999

SEQ ID NO: 135574 - DNA, 987 bp, Synechococcus sp. WH 7805; identical to SEQ ID NO: 40000
  CDS (1)..(987): transl_table=11

SEQ ID NO: 135575 - protein, 328 aa, Synechococcus sp. WH 7805; identical to SEQ ID NO: 40001

SEQ ID NO: 135576 - DNA, 969 bp, Pseudoalteromonas tunicata D2; identical to SEQ ID NO: 40002
  CDS (1)..(969): transl_table=11

SEQ ID NO: 135577 - protein, 322 aa, Pseudoalteromonas tunicata D2; identical to SEQ ID NO: 40003

SEQ ID NO: 135578 - DNA, 969 bp, Oceanospirillum sp. MED92; identical to SEQ ID NO: 40004
  CDS (1)..(969): transl_table=11

SEQ ID NO: 135579 - protein, 322 aa, Oceanospirillum sp. MED92; identical to SEQ ID NO: 40005

SEQ ID NO: 135580 - DNA, 900 bp, Oceanospirillum sp. MED92; identical to SEQ ID NO: 40006
  CDS (1)..(900): transl_table=11

SEQ ID NO: 135581 - protein, 299 aa, Oceanospirillum sp. MED92; identical to SEQ ID NO: 40007

SEQ ID NO: 135582 - DNA, 987 bp, Xanthobacter autotrophicus Py2; identical to SEQ ID NO: 40008
  CDS (1)..(987): transl_table=11

SEQ ID NO: 135583 - protein, 328 aa, Xanthobacter autotrophicus Py2; identical to SEQ ID NO: 40009

SEQ ID NO: 135584 - DNA, 1017 bp, Flavobacteria bacterium BBFL7
  CDS (1)..(1017): transl_table=11
atggaatacgtagaaaatatattaggtacaatagggaatacacctctagttaagatgaataaactagtagaggatttaccatgtctagtacttgcaaagtatgaaacctttaacccaggtaactcgactaaagatcgcatgggattaaaaatggttgaagatgctgaagctgatggacgattaaaaccaggaggaaccatcatcgaaggaactagtggtaacactggtatgggacttgctctagcggcaattatgaaaggttataagctgatctgtgttcttgcagataagcagtctaaagaaaaaatggatattctacgagctgtaggagctgaggtttatgtgtgtccaactaatgtagagccagatgatccacggtcttattattctactagtaagcgattgagtgaagagatacctaattcatggtatgtgaatcaatatgataatccttcaaatgcacaagcgcattatgaaagtactggtccagaaatctggaaacagacagatggaaaaattacccattttgtggtaggtgtaggtaccggcggaacgattagtggagtaggaaaatatcttaaagagcaaaatcctaatataaaaattcacggtattgatacttatgggtcagtatttaaaaagtatcatgaaaccggaatctttgacgagaatgaaatttactcatatgtaactgaaggaataggagaagatatcttgcctaaaaacgtgaactttgagatcatagatcactttactaaagtgactgataaagacgcagcaatctacacgagaagattagcaaaagaagaaggaatgtttctagggaatagtgctgggtctgcaattaaaggtttaagacagattcataaagaatatggttttacaaaagatgatgtggtagtagtgttgtttcatgatcatggtagtcgttatgtagggaaatttttcaacgatgactggatgcttgaaaaaggatatattaatgaagatggctcatatcctcaagaggataactag

SEQ ID NO: 135585 - protein, 338 aa, Flavobacteria bacterium BBFL7
MEYVENILGTIGNTPLVKMNKLVEDLPCLVLAKYETFNPGNSTKDRMGLKMVEDAEADGRLKPGGTIIEGTSGNTGMGLALAAIMKGYKLICVLADKQSKEKMDILRAVGAEVYVCPTNVEPDDPRSYYSTSKRLSEEIPNSWYVNQYDNPSNAQAHYESTGPEIWKQTDGKITHFVVGVGTGGTISGVGKYLKEQNPNIKIHGIDTYGSVFKKYHETGIFDENEIYSYVTEGIGEDILPKNVNFEIIDHFTKVTDKDAAIYTRRLAKEEGMFLGNSAGSAIKGLRQIHKEYGFTKDDVVVVLFHDHGSRYVGKFFNDDWMLEKGYINEDGSYPQEDN

SEQ ID NO: 135586 - DNA, 888 bp, marine gamma proteobacterium HTCC2207; identical to SEQ ID NO: 40010
  CDS (1)..(888): transl_table=11

SEQ ID NO: 135587 - protein, 295 aa, marine gamma proteobacterium HTCC2207; identical to SEQ ID NO: 40011

SEQ ID NO: 135588 - DNA, 939 bp, delta proteobacterium MLMS-1; identical to SEQ ID NO: 40012
  CDS (1)..(939): transl_table=11

SEQ ID NO: 135589 - protein, 312 aa, delta proteobacterium MLMS-1; identical to SEQ ID NO: 40013

SEQ ID NO: 135590 - DNA, 894 bp, Oceanobacter sp. RED65; identical to SEQ ID NO: 40016
  CDS (1)..(894): transl_table=11

SEQ ID NO: 135591 - protein, 297 aa, Oceanobacter sp. RED65; identical to SEQ ID NO: 40017

SEQ ID NO: 135592 - DNA, 969 bp, Synechococcus sp. RS9916; identical to SEQ ID NO: 40020
  CDS (1)..(969): transl_table=11

SEQ ID NO: 135593 - protein, 322 aa, Synechococcus sp. RS9916; identical to SEQ ID NO: 40021

SEQ ID NO: 135594 - DNA, 987 bp, Synechococcus sp. RS9916; identical to SEQ ID NO: 40022
  CDS (1)..(987): transl_table=11

SEQ ID NO: 135595 - protein, 328 aa, Synechococcus sp. RS9916; identical to SEQ ID NO: 40023

SEQ ID NO: 135596 - DNA, 969 bp, Alteromonadales bacterium TW-7; identical to SEQ ID NO: 40024
  CDS (1)..(969): transl_table=11

SEQ ID NO: 135597 - protein, 322 aa, Alteromonadales bacterium TW-7; identical to SEQ ID NO: 40025

SEQ ID NO: 135598 - DNA, 906 bp, marine gamma proteobacterium HTCC2143; identical to SEQ ID NO: 40030
  CDS (1)..(906): transl_table=11

SEQ ID NO: 135599 - protein, 301 aa, marine gamma proteobacterium HTCC2143; identical to SEQ ID NO: 40031

SEQ ID NO: 135600 - DNA, 906 bp, marine gamma proteobacterium HTCC2080; identical to SEQ ID NO: 40032
  CDS (1)..(906): transl_table=11

SEQ ID NO: 135601 - protein, 301 aa, marine gamma proteobacterium HTCC2080; identical to SEQ ID NO: 40033

SEQ ID NO: 135602 - DNA, 1053 bp, marine gamma proteobacterium HTCC2080; identical to SEQ ID NO: 40034
  CDS (1)..(1053): transl_table=11

SEQ ID NO: 135603 - protein, 350 aa, marine gamma proteobacterium HTCC2080; identical to SEQ ID NO: 40035

SEQ ID NO: 135604 - DNA, 2316 bp, Candidatus Desulfococcus oleovorans Hxd3
  CDS (1)..(2316): transl_table=11
atggaccatactctgttaaacaagatcggcaacactcctttggtggagattcggcggctctccccgaatccgagggttaaaatttttgccaagctggagtacatgaaccccggcggatcgatcaaggaccgggccgctgttgccatgatcgaagacggtgaagcctccggccgcctgacaaaagagaagatcgtgctggaggccaccagcggcaacaccggcatcggacttgccatggtgtgcgccatcaaggggtaccggctgctgttggccatgtccgagcgggccagtgaagagcgcaagaagattctgcgggcccggggagccgagattctgctcacgcccggccatctgggaacggacggcgccattgaagaggtctaccggctggcccgggaaaacccggaaacctatttctgtaccgaccagttcaacaacgaggccaactggaaggcccattacaccggcacggcccaggagatatgggatcagaccgagggaaaggtggacgtggtggtggccaccctgggcaccagcggaacagccatgggcctttcccggcgccttaaagaactcaaaccggatattcgcatcgtgggggtggaaccgtttctagggcacaagattcaggggctcaaaaacatgaaggagtcctaccgcccggaaatttttgaacagaagcggctggacgccaaacccaacatcgaggatgaggccgcctacgaaatgacccgccgcctggccagggaagaagggctgctggtgggcatgagcagcggggccgccatgcacgttgccgcagaagaggcccgggccatggaagccggcatcatcgtggtgatcctgccggacagcggcgagcgttatctttccaccacgctgtttgtggagcccgagaagagcggtgtggtgctgttcaacaccctgacccgggaaaaggaggcgtttgcgcccctggcgcagggaaaggcctccatctattcctgcggccccacggtccacgcccgcatggacctgggccagtgccgtcgcatggtgtttgccgatctgctttgccgttacctggtctacaggggattcgaggtccggcatattgtcaatattaccgattttgacgacaggaccatagagggcgcccagaaggcgggcatggacctggccgcgtttaccggcacctacatcgatctttttaaagcggatctcaagaccctgcgggtccatccggccgacgcctatcccctggccagccaggaggcgccggagatggtggccctggtcgaaaagctggtggaccgaggcgtggcctatgaaaaactgcggtcggtctattttgatattgccagcgccgaagggtatggcgggctttccaacatagacaccaacaaaattcggctgggcgccacagtggacctggacgaatatgaaaaggagaacccccgggactttaccctgctcaagcgggccaagatgtccgagctcaagcaaggatggtatctgaagacccgttggggcaatgtgcggccgtcgttgcacattcaatgcgccgccatttccagaaaatacctgggggaccggtttgatattcataccggcagccgggatctggtgtttccccaccatgaaaacgagattgccattgcccgggccgccaccggccgggagccggcccgttattgggttcactgcgacagcgtgctggagtcggacgacagtgtgcactggaagacggcccgcaccaccctagagcaggccctggacatggggtttaccggtcgccagctgcggtactggctgatttccggccattaccggaaggccctttctttttccgccgatcgtattgcggccgcggcatcggccctggcccggctggacggctgcgtccggtcgctggccgacctggcggcgaacccgtccgcggaaagtgcccggcaaatggaaggcgcggaacaggatgtggaccagctgctctatgatatccggcagggatttgtcgacgccatggacgatgacctgaatgtgtcggcggccctggccaacatttttaaaaatgtgaaaaccgtcaacgtgatgctggaccagtcgcgcctggacggcccggccgcggaaaagatacaggacgcctttgccggcatcgatagcgtgctgcaggtgtttgattttgaccagaccccggccgacgatcttttgcccgaagtaaaacagctgatggaacagcgggaagcggcccggaaagcaaaggactgggaactggcggaccgcctgcgggagacgttgcgcgacatgggcgtttccgtgaccgatgaaaagttgtaa

SEQ ID NO: 135605 - protein, 771 aa, Candidatus Desulfococcus oleovorans Hxd3
MDHTLLNKIGNTPLVEIRRLSPNPRVKIFAKLEYMNPGGSIKDRAAVAMIEDGEASGRLTKEKIVLEATSGNTGIGLAMVCAIKGYRLLLAMSERASEERKKILRARGAEILLTPGHLGTDGAIEEVYRLARENPETYFCTDQFNNEANWKAHYTGTAQEIWDQTEGKVDVVVATLGTSGTAMGLSRRLKELKPDIRIVGVEPFLGHKIQGLKNMKESYRPEIFEQKRLDAKPNIEDEAAYEMTRRLAREEGLLVGMSSGAAMHVAAEEARAMEAGIIVVILPDSGERYLSTTLFVEPEKSGVVLFNTLTREKEAFAPLAQGKASIYSCGPTVHARMDLGQCRRMVFADLLCRYLVYRGFEVRHIVNITDFDDRTIEGAQKAGMDLAAFTGTYIDLFKADLKTLRVHPADAYPLASQEAPEMVALVEKLVDRGVAYEKLRSVYFDIASAEGYGGLSNIDTNKIRLGATVDLDEYEKENPRDFTLLKRAKMSELKQGWYLKTRWGNVRPSLHIQCAAISRKYLGDRFDIHTGSRDLVFPHHENEIAIARAATGREPARYWVHCDSVLESDDSVHWKTARTTLEQALDMGFTGRQLRYWLISGHYRKALSFSADRIAAAASALARLDGCVRSLADLAANPSAESARQMEGAEQDVDQLLYDIRQGFVDAMDDDLNVSAALANIFKNVKTVNVMLDQSRLDGPAAEKIQDAFAGIDSVLQVFDFDQTPADDLLPEVKQLMEQREAARKAKDWELADRLRETLRDMGVSVTDEKL

SEQ ID NO: 135606 - DNA, 990 bp, Escherichia coli B; identical to SEQ ID NO: 40036
  CDS (1)..(990): transl_table=11

SEQ ID NO: 135607 - protein, 329 aa, Escherichia coli B; identical to SEQ ID NO: 40037

SEQ ID NO: 135608 - DNA, 975 bp, Pseudomonas putida GB-1
  CDS (1)..(975): transl_table=11
atgagccgtatctttgcagacaacgcccattccatcggcaacacgccgttggtgcagatcaaccgcatcgcccctcgcggtgtgaccatccttgccaagatcgaagggcgcaacccaggttattcggtcaaatgccgcatcggcgcgaacatggtctgggacgccgagagcagcggcaagctcaagccgggcatgaccatcgtcgagcctacctcgggcaacaccggtatcggcctggccttcgttgccgctgcccgtggctacaagctgatgctgaccatgcccgcctcgatgagcctggagcgccgcaaggtgctgaaggcgctgggcgccgaactggtgctgaccgacccggccaagggcatgaagggcgccatcgagaaggccaacgaaatcgtcgcctccgaccccgcccagtacttcctgccgggccagttcgaaaacccggccaacccggccatccacgaaaagaccacaggaccggagatctggaacgataccgacggtgcggttgacgtgctggtggcgggcgtgggtaccggtggcaccatcaccggtgtatcgcgctacatcaagcacacccagggcaaggcgatcctctcggtggccgtggaacccgtttcgtcgccgctgattacccagaccctggccggcgaagaactcaagcccagcccgcacaaaatccagggcattggcgccggtttcgtgccgaaaaacctcgacttgtcgatcgtcgaccaagtggcgacggtgaccgacgaagagtccaaggccatggccattcgcctgatgcaggaagagggcatcctgtgcggcatttcttgcggtgcggccatggcggcggccgtgcgcctggccgaaaagccggaaatgcaaggtaagaccatcgtcgtaatcctgcccgattcgggcgagcgttacctgtcgagcatgctgttcagcgacctgttcagcgagcaggaaaaccagcaataa

SEQ ID NO: 135609 - protein, 324 aa, Pseudomonas putida GB-1
MSRIFADNAHSIGNTPLVQINRIAPRGVTILAKIEGRNPGYSVKCRIGANMVWDAESSGKLKPGMTIVEPTSGNTGIGLAFVAAARGYKLMLTMPASMSLERRKVLKALGAELVLTDPAKGMKGAIEKANEIVASDPAQYFLPGQFENPANPAIHEKTTGPEIWNDTDGAVDVLVAGVGTGGTITGVSRYIKHTQGKAILSVAVEPVSSPLITQTLAGEELKPSPHKIQGIGAGFVPKNLDLSIVDQVATVTDEESKAMAIRLMQEEGILCGISCGAAMAAAVRLAEKPEMQGKTIVVILPDSGERYLSSMLFSDLFSEQENQQ

SEQ ID NO: 135610 - DNA, 939 bp, Pseudomonas putida GB-1; identical to SEQ ID NO: 40038
  CDS (1)..(939): transl_table=11

SEQ ID NO: 135611 - protein, 312 aa, Pseudomonas putida GB-1; identical to SEQ ID NO: 40039

SEQ ID NO: 135612 - DNA, 894 bp, Marinobacter sp. ELB17; identical to SEQ ID NO: 40040
  CDS (1)..(894): transl_table=11

SEQ ID NO: 135613 - protein, 297 aa, Marinobacter sp. ELB17; identical to SEQ ID NO: 40041

SEQ ID NO: 135614 - DNA, 918 bp, Sporosarcina halophila; identical to SEQ ID NO: 40042
  CDS (1)..(918): transl_table=11

SEQ ID NO: 135615 - protein, 305 aa, Sporosarcina halophila; identical to SEQ ID NO: 40043

SEQ ID NO: 135616 - DNA, 1200 bp, Oryza sativa subsp
  CDS (1)..(1200)
atggccatggcgatggcgtcgccgcccgcttgcccattcctcctctcgctctcggccggcgccaccgccatttccaccgtgtccgccgcctacggttccgtttccgccccgcgcgcgcctctcttcctcctcgcctccccgcgtcccgtcccgcctcgccgacccctcgccgcgggctcctcatctcccaaggccgcggcacccgccgccgtcgagatccccgaggagtacgtggacgatgttgatgcggtgaacattgcgcaggacgtcacccagctgattgggaaaaccccaatggtgtatctgaataatgttgtcgacggatgtgttgctaatatcgctgcaaaacttgagtacatgggaccttgcaggagcgtcaaagacaggattggattaagcatgattgatgatgctgaagagaaaggattaatttttccaaacaagaccattttggttgaaccaactactggaaatactggtataggcctagcttctgtggctgctgctaggggatacaagctaatagcaactgtaccttcatcaatagatgttgagagacgtgttcttctacgtgcatttggagctgagattgtgttaactgatcctaacaagggactaaaaggagctcttgataaagcagaggaaattgtttcgaagacaccaaatgcatacatgtttcagcagtttaacaattcagctaatagtgagatccactttcaaaccacaggcccagaaatatgggaagacaccttgggtactgttgacatactagttgcaagcattggcacaggtggcaccattacaggcactgggcgttatctgaaaatgatgaacaaagatattaaggttattggggtagaacctgctgaaactagtgtaatctctggtgataatgctggttatattccaagcatattagatgttcagctgcttgatgaagttgtgaaggttaccaccacagaggcagtcgatgttgcaagggaacttgcactaaaagagggcctgctggttggcatttcgtcaggtgctgccacagttgctgctattaacgtcgctaaaagacctgaaaatgctggaaaattgattgcgattttgaagggtgaggttccaggtagattacaacgagcagtgcctgaaattttgaaacgccataggcactggccagcctcacagaaggttgaaattgcgcacggttgctga

SEQ ID NO: 135617 - protein, 399 aa, Oryza sativa subsp
MAMAMASPPACPFLLSLSAGATAISTVSAAYGSVSAPRAPLFLLASPRPVPPRRPLAAGSSSPKAAAPAAVEIPEEYVDDVDAVNIAQDVTQLIGKTPMVYLNNVVDGCVANIAAKLEYMGPCRSVKDRIGLSMIDDAEEKGLIFPNKTILVEPTTGNTGIGLASVAAARGYKLIATVPSSIDVERRVLLRAFGAEIVLTDPNKGLKGALDKAEEIVSKTPNAYMFQQFNNSANSEIHFQTTGPEIWEDTLGTVDILVASIGTGGTITGTGRYLKMMNKDIKVIGVEPAETSVISGDNAGYIPSILDVQLLDEVVKVTTTEAVDVARELALKEGLLVGISSGAATVAAINVAKRPENAGKLIAILKGEVPGRLQRAVPEILKRHRHWPASQKVEIAHGC

SEQ ID NO: 135618 - DNA, 1020 bp, Oryza sativa subsp
  CDS (1)..(1020)
atggaggaaggaggcaggagagggatcccttctctgctaaattcatcgtcatcagatgaacatatcgccactgatatcactcagcttgtaggatggacgccactgatagagctgaaccggatcgtccgaaaagacggggtaaatgcccggattgttggcaaattggagtcataccaacccctctgctctgtcaaggatcgcagtgctctgagaatgattgaggatgcagaggagaaaggtctgatctcaccaggcgttacgactctagtcgagccgacaagtggtaatcttggaataggtgtggcatacaatgctctgctcaaaggttacaggttcgttgcagtcatgcctgctgagtattcacttgataagcaaatgttgttgacgtatctaggggccgaggttattttaactgatcctacacttggttttcagggacaattagacaaagttgaacagatcaagaatgatatgcctaacgtacatcatcttgatcagtttaaaaatgcagcaaatcctgaagcacactttgtatggacagggcctgagatttggaaggatacggcaggcaaagtagatatctttgtggctggttctggcacaggaggaacaatttcaggtgtagggaaatatttgaagatgaaaaacccagcagttaaagtaatttgtgttgagcctgcggaaagccctgtaatttcaggtggtaagccttcgcggcataaaattcagggaatgggtccaggctttgtaccaaaaaacctggatatctcaatcgtcgatgagatcatcacagtaactgcacaagatgcaatggctaatgcaaagaggctggcaagagaagagggtttagttgtgggcatatcatccggagctaatttggcagcttgtctgaaggtggcatcgaggaaagaatacgagggaaagatgattgtaaccattttccctagtggtggtgaaagatacatgaactctgacctctttgcacaagcaagggaggagtgcagcgccatgaccttttga

SEQ ID NO: 135619 - protein, 339 aa, Oryza sativa subsp
MEEGGRRGIPSLLNSSSSDEHIATDITQLVGWTPLIELNRIVRKDGVNARIVGKLESYQPLCSVKDRSALRMIEDAEEKGLISPGVTTLVEPTSGNLGIGVAYNALLKGYRFVAVMPAEYSLDKQMLLTYLGAEVILTDPTLGFQGQLDKVEQIKNDMPNVHHLDQFKNAANPEAHFVWTGPEIWKDTAGKVDIFVAGSGTGGTISGVGKYLKMKNPAVKVICVEPAESPVISGGKPSRHKIQGMGPGFVPKNLDISIVDEIITVTAQDAMANAKRLAREEGLVVGISSGANLAACLKVASRKEYEGKMIVTIFPSGGERYMNSDLFAQAREECSAMTF

SEQ ID NO: 135620 - DNA, 1215 bp, Oryza sativa subsp
  CDS (1)..(1215)
atggcgatggcggctgcggcggtggaggtggaagaggggaggacggggatcccttctctgctgcggctctccgccgtgggggaggaggccatcgcctccaatgtcgctcagctgataggctggacgccactgattgagatgaagaacatcgccaagaaagaaggcatccaagctcgtttggttggaaagatggaagcataccaaccccttttctcggtcaaggacagaactgctctcggtatggttgaagatgcagaggagaaaggcttgattacacctggtgttacgacgctgattgaaccaactggtggtaatcttggtaccggtttggtattggttgctattcagagaggctacaggttcattgctgttatgcctgctggatattcacttgacaagcagatgctactgaggtttttgggtgctgaagtgatattaacagatcctgcaggtggattcaagggtatgatggacaaagtggaagagctcaccaaggtcatgccaaattatcactgttttaaccaatcaattaacccagcgaacccagatgcacacttcaaatggactggacctgagatctggaaggatacagccggcaaagttgatatctttgtaaccgccgctggaacagggggcacactgtcaggtgtaggaagaaataaaaatacggggaaaagcagtgcttgcaagggttcatacactgacttgagaaacatgacaaagcaaactgaaatagcatcggagggaagaggtccaaacctgcaagcctgcatactgcctcatctcaagtcctcatcaccttcatcggtgcctcctactgcttgggctctgccagtccggaagagcagtggcagtcggcgtgaaagccaggagcaccattgcttgattgattcaggtggttcaccaggttttcacaagattcaaggcactgggccaggtttcataccggaaaatttggatagatctatcatcgatgaagttgtgaccgtaagctcggaggaatccataacaatggccagaaggcttgcaaaggaggaggggctgcttgttggcatatcttctggtgcaaatgtgtctgcttgcatcaagattgcagctagagaggagaacaagggtaagatgattgttacaatgctgccgagtgggggtgaaagatacatgaactctgatctctttgcagatgtaagggaggaatgtgctaatatgaccttctaa

SEQ ID NO: 135621 - protein, 404 aa, Oryza sativa subsp
MAMAAAAVEVEEGRTGIPSLLRLSAVGEEAIASNVAQLIGWTPLIEMKNIAKKEGIQARLVGKMEAYQPLFSVKDRTALGMVEDAEEKGLITPGVTTLIEPTGGNLGTGLVLVAIQRGYRFIAVMPAGYSLDKQMLLRFLGAEVILTDPAGGFKGMMDKVEELTKVMPNYHCFNQSINPANPDAHFKWTGPEIWKDTAGKVDIFVTAAGTGGTLSGVGRNKNTGKSSACKGSYTDLRNMTKQTEIASEGRGPNLQACILPHLKSSSPSSVPPTAWALPVRKSSGSRRESQEHHCLIDSGGSPGFHKIQGTGPGFIPENLDRSIIDEVVTVSSEESITMARRLAKEEGLLVGISSGANVSACIKIAAREENKGKMIVTMLPSGGERYMNSDLFADVREECANMTF

SEQ ID NO: 135622 - DNA, 1290 bp, Glycine max; identical to SEQ ID NO: 40044
  CDS (128)..(1105)

SEQ ID NO: 135623 - protein, 325 aa, Glycine max; identical to SEQ ID NO: 40045

SEQ ID NO: 135624 - DNA, 1287 bp, Glycine max; identical to SEQ ID NO: 40046
  CDS (128)..(1105)

SEQ ID NO: 135625 - protein, 325 aa, Glycine max; identical to SEQ ID NO: 40047

SEQ ID NO: 135626 - DNA, 1401 bp, Glycine max
  CDS (264)..(1235)
tgcatcgagtattcggtttgtacgtgtgccataattgaattgttttgtgttgttttcttgaacatgattggctaattaaaccaaagctttgtttctgatgagaaagactttggctgggttgtttataaattgtgaaacaggcagagctagctagtcaattatcttattcagtatttctgcacagccctttttttggtgaattattctgcacctacaccccttggtgaagaattataattaagtttgcaggccttccaattaacatggagccacagtgtgcaatcaagaaagatgccactgaattgataggtaataccccaatggtatacctgaacaacatagtggaggggtgtatggcccgcattgctgctaagttagagtccatgcaaccttgcttcagtatcaaagataggacagcatttagcatgatcaaagatgctgaggataaaggcctcattacaccgggaaagagtgttcttgttgaggctacaagtgggaacacgggcattggaatggcattcgtagcaacattgaaggggtataaagtcatagtggctatgccagcttctgtgagtcttgagagaaaaattgtacttcgagcctttggagctgaagtctatctcactgaccctgccaaaggaaccgatgcagttcttaggaaggccgaggagatagtgaataacacgcccggaagttacatgctccgccagatagataatcctgctaatccaaaaattcattacgagaccactggtcctgagatttggagagactccggagggaaagttgatgctttggttgcaggggtaggaaccgggggtaccataacgggtgctggcagattcctcaaggagagaaaccccaatgtcaagctgtacggcatagaaccggttgaaagtacagtcctcagtggaggaccgccaggtgatcacctaatccaagggattggtaatggtctcattccaagtgtactggattttaatctcctagatgaagttattcagatatcaagtgaagaagctatagaaactgctaagcttcttgctttaaaagaaggtttgttgatgggaatttcatcaggagccgcagctgcagctgccataaaattggggaagagaccagaaaatgccggaaaactcatcgttgtggtatttcctagttacggggagcgttatttatcttcaccattgtttgaatccattcggcatgaagctgaacatatgacatttgattaagaacaaaaatactatgtaacagtgctctgcgaatttgatagtattatagtttttttttttttttgtctggtgatctcctattcaggacgatccatatgtttgacttcaataatacataagaattttataggacaaaaaaaaaaaaaaaaaaaaaaaaaaaaaaaag

SEQ ID NO: 135627 - protein, 323 aa, Glycine max; identical to SEQ ID NO: 40049

SEQ ID NO: 135628 - DNA, 1172 bp, Glycine max; identical to SEQ ID NO: 40050
  CDS (19)..(993)

SEQ ID NO: 135629 - protein, 324 aa, Glycine max; identical to SEQ ID NO: 40051

SEQ ID NO: 135630 - DNA, 1035 bp, Rhodobacter sphaeroides; identical to SEQ ID NO: 40054
  CDS (1)..(1035): transl_table=11

SEQ ID NO: 135631 - protein, 344 aa, Rhodobacter sphaeroides; identical to SEQ ID NO: 40055

SEQ ID NO: 135632 - DNA, 1492 bp, Chlamydomonas reinhardtii; identical to SEQ ID NO: 40056
  CDS (73)..(1131)

SEQ ID NO: 135633 - protein, 352 aa, Chlamydomonas reinhardtii; identical to SEQ ID NO: 40057

SEQ ID NO: 135634 - DNA, 2331 bp, Saccharomyces cerevisiae
  CDS (621)..(2144)
ctccaattggcaaagtcaagacttttgttatgtcaatatgtgctaccaaaaatcaagggtattttcccaccagagcttatcaatggcaactgtgagatatgaacagcagttagtaagggtgtgttctcatccgaccctctgattcatttggtggccattacattttccctcaatgacacattcccctatttcataactgattaaaatggtaatggcacgtgatagtagtggctcacaaaacaaaattttctttctcagcgctgacaaagcttcatttgcattctaaccttatcacaacaacttcaacttcacccaagtaaggataatcagctctgtcgtgactgataaatgctatatccggcatatgcagtccacacggcattaccgtttcactaatttattgccatcttcctccacagttttgcaccgaaaggaaaaaaagaaaccaacaccgaaaatttttttctcctaaaggttaaagtaaacgcaaggcacttcaccaggcttgtatatataaatgtcgtgatgcttctatgccaaagtaaaaggcaacacttgaagatttcgttgtaggccacttgctcaaaggacatctagataaatacgacgtaagaataaaaatgactaaatctgagcagcaagccgattcaagacataacgttatcgacttagttggtaacaccccattgatcgcactgaaaaaattgcctaaggctttgggtatcaaaccacaaatttatgctaagctggaactatacaatccaggtggttccatcaaagacagaattgccaagtctatggtggaagaagctgaagcttccggtagaattcatccttccagatctactctgatcgaacctacttctggtaacaccggtatcggtctagctttaatcggcgccatcaaaggttacagaactatcatcaccttgccggaaaaaatgtctaacgagaaagtttctgtcctaaaggctctgggtgctgaaatcatcagaactccaactgctgctgcctgggattctccagaatcacatattggtgttgctaagaagttggaaaaagagattcctggtgctgttatacttgaccaatataacaatatgatgaacccagaagctcattactttggtactggtcgcgaaatccaaagacagctagaagacttgaatttatttgataatctacgcgctgttgttgctggtgctggtactggtgggactattagcggtatttccaagtacttgaaagaacagaatgataagatccaaatcgttggtgctgagggattcggttcaattttagcccaacctgaaaacttgaataagactgatatcactgactacaaagttgagggtattggttatgattttgttcctcaggttttggacagaaaattaattgatgtttggtataagacagacgacaagccttctttcaaatacgccagacaattgatttctaacgaaggtgtcttggtgggtggttcttccggttctaccttcactgcggttgtgaaatactgtgaagaccaccctgaactgactgaagatgatgtcattgttgccatattcccagattccatcaggtcgtacctaaccaaattcgtcgatgacgaatggttgaaaaagaacaatttgtgggatgatgacgtgttggcccgttttgactcttcaaagctggaggcttcgacgacaaaatacgctgatgtgtttggtaacgctactgtaaaggatcttcacttgaaaccggttgtttccgttaaggaaaccgctaaggtcactgatgttatcaagatattaaaagacaatggctttgaccaattgcctgtgttgactgaagacggcaagttgtctggtttagttactctctctgagcttctaagaaaactatcaatcaataattcaaacaacgacaacactataaagggtaaatacttggacttcaagaaattaaacaatttcaatgatgtttcctcttacaacgaaaataaatccggtaagaagaagtttattaaattcgatgaaaactcaaagctatctgacttgaatcgtttctttgaaaaaaactcatctgccgttatcactgatggcttgaaaccaatccatatcgttactaagatggatttactgagctacttagcataaataagaacccacgcttcaaataaaagcaaacatagaagcaaaatccgtcattcctttcctattcaattgcaccgttctctttatataactacttaattaaatagcgcctatacgaagcagcattgttctattatttttacaaattccttatcatgcatgcatcacatcagtgtttgaatctgttaac

SEQ ID NO: 135635 - protein, 507 aa, Saccharomyces cerevisiae
MTKSEQQADSRHNVIDLVGNTPLIALKKLPKALGIKPQIYAKLELYNPGGSIKDRIAKSMVEEAEASGRIHPSRSTLIEPTSGNTGIGLALIGAIKGYRTIITLPEKMSNEKVSVLKALGAEIIRTPTAAAWDSPESHIGVAKKLEKEIPGAVILDQYNNMMNPEAHYFGTGREIQRQLEDLNLFDNLRAVVAGAGTGGTISGISKYLKEQNDKIQIVGAEGFGSILAQPENLNKTDITDYKVEGIGYDFVPQVLDRKLIDVWYKTDDKPSFKYARQLISNEGVLVGGSSGSTFTAVVKYCEDHPELTEDDVIVAIFPDSIRSYLTKFVDDEWLKKNNLWDDDVLARFDSSKLEASTTKYADVFGNATVKDLHLKPVVSVKETAKVTDVIKILKDNGFDQLPVLTEDGKLSGLVTLSELLRKLSINNSNNDNTIKGKYLDFKKLNNFNDVSSYNENKSGKKKFIKFDENSKLSDLNRFFEKNSSAVITDGLKPIHIVTKMDLLSYLA

SEQ ID NO: 135636 - DNA, 1038 bp, Ostreococcus tauri
  CDS (1)..(1038)
atgaagagtactatctcggtgcgcgcgaagcgctcgagcgcgcgggcgtcgcgggtggcgacgcgggcggcgaacgcggtgaacatcgcggacaacgtgacgcagctcgtcgggtgcacgcctatggtgtacctgaacaaagtctcggaaggatgcggagcagagatcgcggccaagctagagattatggaaccgtgctgcagcgtgaaggatcgcatcggttggagcatgatcgccgcggcggaacaagaggggaagatcactccgggtaagacgacgctcgtggagccgacgagtggaaacacgggcattggcttggcgttcatcgccgccgcgaagggatacaagctcacgctcacgatgccggcgtccatgtcgcttgaacgtcgcatcttgttgaaggcgttcggggcgaacttggtgttgacggacccggcaaaaggtatgaagggtgcggtcggcaaggctgaggaaatcgccgccaagacggcggactcttacattctgcaacagttcgaaaacccggccaacccaaaggtgcactttgaaacgacggggccggagatctgggaagataccgcgggtcaaatcgacatttttgtcgcgggcgtcggcaccggcggtaccatcacaggcacgggtcgctacctcaagagcaagaacccaaactgcaagatcgttgccgtcgaaccgactgagtctccggtgctctcgggtggcggaccgggcccgcacaagattcaaggtatcggtgcgggcttcatcccgggtattctcgacgtggacatcatcgacgaaattgtgcaagtggcgagtgacgacgccatcgcgatggcaaagcagttggcgttgcaagagggcttgatggtcggtatctcctccggtgcggcggcagtcgcggcgattcaactcgctaagcgcccggaaaatgccggcaagctcatcgggacagtgttcccgtcctttggtgaacgttacctctcttccgctctcttcagcaccatccgggacgaagccgaggcgatggttgccgaataa

SEQ ID NO: 135637 - protein, 345 aa, Ostreococcus tauri
MKSTISVRAKRSSARASRVATRAANAVNIADNVTQLVGCTPMVYLNKVSEGCGAEIAAKLEIMEPCCSVKDRIGWSMIAAAEQEGKITPGKTTLVEPTSGNTGIGLAFIAAAKGYKLTLTMPASMSLERRILLKAFGANLVLTDPAKGMKGAVGKAEEIAAKTADSYILQQFENPANPKVHFETTGPEIWEDTAGQIDIFVAGVGTGGTITGTGRYLKSKNPNCKIVAVEPTESPVLSGGGPGPHKIQGIGAGFIPGILDVDIIDEIVQVASDDAIAMAKQLALQEGLMVGISSGAAAVAAIQLAKRPENAGKLIGTVFPSFGERYLSSALFSTIRDEAEAMVAE

SEQ ID NO: 135638 - DNA, 1323 bp, Ostreococcus tauri; identical to SEQ ID NO: 40058
  CDS (1)..(1323)

SEQ ID NO: 135639 - protein, 440 aa, Ostreococcus tauri; identical to SEQ ID NO: 40059

SEQ ID NO: 135640 - DNA, 1143 bp, Phaeosphaeria nodorum
  CDS (1)..(1143)
atgttcaggacagcggcgcgtggctttgccgcttcagcatggcggagcgctgaaagcatcggccagatacagtcagatgcggtgcaccaaactgctgtgaacatctccaaagcccaaggcattggacagcggggcttcatcgatgccattggcaagaccccgctcatccgcctcaagaggctctctgaagaaaccggctgcaacgtcctcggcaaggctgaatttcagaaccccggtggctccgtcaaggatcgcgccgctctcttcgtcgtcgagaatgccgaacgcctgggccttatcaagcccggcggtaccgtcatcgaaggcacagctggcaacactggtatcggtctggcgcatgtctgccggtcaaagggctacaaattggtcatctacatgccaaatacacagtcgcagggcaaaattgatttgctacgcctcttgggggccgaggtgtacccagtgcccgccgtggcattcgacaatccagaaaactacaatcaccaggctaaacgacacgcggaccgcttagacaacgccgtatggacgaaccagttcgacaacgtggcgaaccgacaggcacatatcgagactactggacccgagatctggtatcagaccgccggcaagattgacgccttcacttgcgccacaggcaccggtggttcgttggccggtgtcacacgatatctcaaggagaagagtgacggaagagtgaagagcttcttggcagatcctccaggctcagtgctacattcatacatacagagcggcggcaagcttgcggagaggcaaggaggctcgataacagaaggaatcggccagggccgagtgacagacaatctgaagcccgacatcgacctgctagatggctcagtccacattagcgatgagaagaccattgagatggtatacagatgcttagacgaggagggtttgtatcttggtgctagctcatgcttgaacgtcgttgcggcaaaggaggtggcagagaagatgggcaagggcagcacagtcgtcacgctactttgcgatggcgcataccgctacgctgaccgtctattctccaagaaatggttagagtcgaagaagctgtatggcgcgatacccgaacatttgcgaaagtacatagtcctcgagtag

SEQ ID NO: 135641 - protein, 380 aa, Phaeosphaeria nodorum
MFRTAARGFAASAWRSAESIGQIQSDAVHQTAVNISKAQGIGQRGFIDAIGKTPLIRLKRLSEETGCNVLGKAEFQNPGGSVKDRAALFVVENAERLGLIKPGGTVIEGTAGNTGIGLAHVCRSKGYKLVIYMPNTQSQGKIDLLRLLGAEVYPVPAVAFDNPENYNHQAKRHADRLDNAVWTNQFDNVANRQAHIETTGPEIWYQTAGKIDAFTCATGTGGSLAGVTRYLKEKSDGRVKSFLADPPGSVLHSYIQSGGKLAERQGGSITEGIGQGRVTDNLKPDIDLLDGSVHISDEKTIEMVYRCLDEEGLYLGASSCLNVVAAKEVAEKMGKGSTVVTLLCDGAYRYADRLFSKKWLESKKLYGAIPEHLRKYIVLE

SEQ ID NO: 135642 - DNA, 1605 bp, Phaeosphaeria nodorum
  CDS (1)..(1605)
atgtctaccaaaactcgccccgccatcccacctgtggtgatggacaacattacccagcagatcggcaacacgcctcttgtgcgcctgaacaagatcccacagtctctcggcatcgaggctaccgtatacgtcaaagttgaagccttcaacgccggtggttcagtcaaagaccgtattgccctgcgcatgatcgaggcggccgaaaagtccgggcgcataaagcctggagacacactgatcgagcctacctctggaaacactggaatcggtctagcgctcgtcggcgctgtgaagggttacaggaccatcatcactcttcccgagaagatgagcccagagaaggtggcggtattgaaggcactcggtgccgagatcataagaacaccaactagtgctgcttgggacagccccgagagccacattggtgtagcgaggaagcttgtaaaagagctgccaaatgctcatatcctcgaccagtactcgaaccccgacaacccactcgcacacgaatacggcacagctgaggagatctgggagcagaccgagggcaaggtgacttgtctggtggctggtgcgggcactggcggcaccatcacaggccttgctcggggtctgcggaaacacaagcacgatgtcaaaatcgtggctgccgatcctcatggcagtatcctggcgctgcctgaatcgctgaaccaggatcgtgtcaatgagggctacaaggtcgagggtattggttacgacttcattcccgatgtgctggagcagaacatcgtggacaagtggtacaagacagacgaccgaacctctttcctgtacgcacgacgattgatcgccgaggaaggcatcctgtgcggtggaagcagcggcagtgctatggctgcttttgttgaagcttctagggatatgaaactgaccaaggacgatgttgtggtcgtcgtactgccagactcgatccgaagctatctcagcaagttcgtcgacgatgactggctcgctgccaacgaccttctccctcccacaccaccactcacgcccaacacaaacggtgcaaaccagtcaatttcgcgccgtgactcgatcgccaaaaaggacactttccacggcgccacaattgcttctctgcgtctgaagcccgtcaccacagtctcggctacttccccatgcagtgaagccatcgagacgatgcgcgagaagggcttcgaccagctccccgtctctgtctcctcgtcatcaggcaaagcacgcctcgtgggtctcgtcactctcggcaacctgctgtcctacatcgcagctggtcgcgcaaaccccaaatcgccagtcgaggacgtcatgttcgacttccgcaagctcaatgaagtcgtcaaggacctcggacgcttgcacttggatggtgctgatgagggcaagaaagctggctcaaggagggaatttgtcgagatcaccaaggacacaagcttgagtgatctcaacaagttcttcgagtggaacagtgccgcggttgttaccgagagggtagacggagagccgagggcccttgctgttgtcacaaaggtcgatctcctcacatggatggtcagacagggcaacttgaatggacacgcatga

SEQ ID NO: 135643 - protein, 534 aa, Phaeosphaeria nodorum
MSTKTRPAIPPVVMDNITQQIGNTPLVRLNKIPQSLGIEATVYVKVEAFNAGGSVKDRIALRMIEAAEKSGRIKPGDTLIEPTSGNTGIGLALVGAVKGYRTIITLPEKMSPEKVAVLKALGAEIIRTPTSAAWDSPESHIGVARKLVKELPNAHILDQYSNPDNPLAHEYGTAEEIWEQTEGKVTCLVAGAGTGGTITGLARGLRKHKHDVKIVAADPHGSILALPESLNQDRVNEGYKVEGIGYDFIPDVLEQNIVDKWYKTDDRTSFLYARRLIAEEGILCGGSSGSAMAAFVEASRDMKLTKDDVVVVVLPDSIRSYLSKFVDDDWLAANDLLPPTPPLTPNTNGANQSISRRDSIAKKDTFHGATIASLRLKPVTTVSATSPCSEAIETMREKGFDQLPVSVSSSSGKARLVGLVTLGNLLSYIAAGRANPKSPVEDVMFDFRKLNEVVKDLGRLHLDGADEGKKAGSRREFVEITKDTSLSDLNKFFEWNSAAVVTERVDGEPRALAVVTKVDLLTWMVRQGNLNGHA

SEQ ID NO: 135644 - DNA, 1464 bp, Arabidopsis thaliana; identical to SEQ ID NO: 40060
  CDS (1)..(1464)

SEQ ID NO: 135645 - protein, 487 aa, Arabidopsis thaliana; identical to SEQ ID NO: 40061

SEQ ID NO: 135646 - DNA, 972 bp, Klebsiella pneumoniae; identical to SEQ ID NO: 40062
  CDS (1)..(972): transl_table=11

SEQ ID NO: 135647 - protein, 323 aa, Klebsiella pneumoniae; identical to SEQ ID NO: 40063

SEQ ID NO: 135648 - DNA, 1542 bp, Aedes aegypti
  CDS (1)..(1542)
atgtcgcacagagcttgtccgatgaaaaatgggcacagtggttgcagtagtgactttgagtcgtactttgtgaggccggatttgacctccaggtgtacctggaagctgggaacgaccgaagccagtccgcaccagaaccgaccaccaatttacaacgagaaagccatcaacaacatcttggaagcaatcggaaatactcccctcgtgaagttaaacaaacttcctaaagaatttggagtaaaatgcaacatttacgccaaatgcgaattcctgaacccggccggctcggtcaaggaccgcatcgggttgcgcatgatcgaggaagctgaggaacgtggtctgctgaagcccgggtccaccatcgtggaaccaacttcgggcaacaccggtatcgggctggccctgggagcggccgtcaagggttacaagtgtgtcatcgttatgccggagaagatgtccaacgagaaggttgacaccctgcaggcgctgggagccgaagtgatccgcacaccgaacgaggcgtccttcgatcatcctgaaggactgatcgccgtcgctcagcgacttcaacgagagatacctaacgcggttatcttaaaccagtacaccaactcgggcaatcctttggcgcactacgacggcacggcatcggagatcatccgacagctggatgggaaggtcgacatgatcgtaatgggagccggaaccggcggcactgccaccggattgggtcgtaaagtaaaggaacacaatcccaactgcagggttgtctgctcggatcctctcggctcgattctggccttcccggcaagcttgaacaaaaccgactgcaagttctgggaagtggaaggcgtagggtacgacttcgtgccgacggtttgcgatcgcagcgtggtggacgagtggatcaaatacggagataaggacgcattccaaactgctaggaagatgatcgccgaagagggtctgctgtgcggaggaagcgccggaggaaacatgtgggttgcactgcaggccgcaaagagccttgacgagggtcaaaacgtggtggttatcctaccggataacatccggaaccacctgacgaagttcgtttccgacaactggatggaggcgcgcaacttcaaggaatgcgtcaatgttcagaaacacaaatggtggaaccagaaggtttcgacgatcgatatggccacaccggtcacgatcacggtggacgtctcgatccaagaggccgtccggatcatgaagaaggacaaattcaaccaactgccggtgatcaaccacgacggaagcatccggggagcggtctacttggcgaaccttatcggaaagctgctgaacggaatggtgcagccgggtgatccggcttcccgggccatctacaagcagtttgtgaaaatcgaccggaactgtacgatgggaagggctgctcgcatcctggagaaggatccgttcgttctggtgacggatcttggggtggacacagcagctcttccacctatcaataaatgtcagatgaaacattctagcttccggcaataa

SEQ ID NO: 135649 - protein, 513 aa, Aedes aegypti
MSHRACPMKNGHSGCSSDFESYFVRPDLTSRCTWKLGTTEASPHQNRPPIYNEKAINNILEAIGNTPLVKLNKLPKEFGVKCNIYAKCEFLNPAGSVKDRIGLRMIEEAEERGLLKPGSTIVEPTSGNTGIGLALGAAVKGYKCVIVMPEKMSNEKVDTLQALGAEVIRTPNEASFDHPEGLIAVAQRLQREIPNAVILNQYTNSGNPLAHYDGTASEIIRQLDGKVDMIVMGAGTGGTATGLGRKVKEHNPNCRVVCSDPLGSILAFPASLNKTDCKFWEVEGVGYDFVPTVCDRSVVDEWIKYGDKDAFQTARKMIAEEGLLCGGSAGGNMWVALQAAKSLDEGQNVVVILPDNIRNHLTKFVSDNWMEARNFKECVNVQKHKWWNQKVSTIDMATPVTITVDVSIQEAVRIMKKDKFNQLPVINHDGSIRGAVYLANLIGKLLNGMVQPGDPASRAIYKQFVKIDRNCTMGRAARILEKDPFVLVTDLGVDTAALPPINKCQMKHSSFRQ

SEQ ID NO: 135650 - DNA, 1638 bp, Aedes aegypti
  CDS (1)..(1638)
atgtcagccgatcagggtagtaatcgagtgtgcccaatggccaatggccacggcaatggagctgccgtcgaaagccgggaggaattcctggctcacttcaagcgacctgatctgccgtcgaggtgtacgtgggccgttggtaccaccgaacccagcccgcaccatcacaagccactgatgcctcgtccgaaggtcatgcaaaccatcttggaagctgtcggtaacacacccctggtcaagctgaacaagattccacagtcagagggactgaagtgtaatgtgtacgtgaaatgcgaattcctcagcgctggtggatcggtcaaggaccgcatcggtctacgcatgatcgaggaagccgaacgcaagggcatgctgaaagcaggctacaccatcatcgagcccacctcgggcaacaccggtatcgggctggcactgggagcggccgtcaaaggctacaagtgcatcatcgtcatgccggagaagatgtccaacgagaaggtcgatacgctgaaggccctcggtgccaaggtcatccgtacgccgaccgaggcgtcgttcgattcacccgaaggcctgatcgcggttgctcagcgtctggagcgtgagattccgaactcgatcgtgctcaaccaatacaccaatgaaggcaatcccttggcccattacgacggaaccggttcggagatcatcgatcaactggagggaaaggtcgatatggtcgtcgtcggagccggtaccggaggcactgtgtgcggtatcggacgcaagatcaaggaaacccacccgcactgcgttgtggtgggaggcgatcccgaaggatcgatcctggccgaaccggaagaactcaacaagacggacgtcaacttctacgaagtggaaggcgttgggtacgacttcatccctacggttctggatcgcagcgtagttgatcgttgggtgaagttcaacgacaaggaagctctaccaatggctaggcgcttgattgccgaagaaggtctgctatgcggaggaagcagcggtggcaacttgatcgtcgctttgaaggccgccaaggagctcaaggaaggtcaaaactgtgtcgtcattatgccggataacattcgtaactacttgaccaagtttgtctcggacagctggatggaggctcgcaacttcaaggcttctgaaaatgtgcacaatcactcatggtggaacaacagcatctcgacgctgaacctcaagaccccgatcaccgtcggagtcgacgtgtgcctgcaggaagtcatgaacatcatgaagaccaactcgatcaaccagctgccggtgatcgatcgcgacggcacgatcaagggtatggccttcctgcccaacatcatgagcaaactgctgaaccgtctggccaaaccgagcgatcccgtagcacgggccgtcttcaagaagttcgtccgagtcgatcgcaacgatggcttgggacacgtgtcgcgcatcctcgagcaggatccgttcgttctggtggtgcagcaggagaagaaatttaccgatggtgccaacttcgagctaagggaaacagtcgttggaatcatcacccaacgggatctcctggactacctgaccacggcggagaacttggttaatgacgttgaaaaactgaaattgtaa

SEQ ID NO: 135651 - protein, 545 aa, Aedes aegypti
MSADQGSNRVCPMANGHGNGAAVESREEFLAHFKRPDLPSRCTWAVGTTEPSPHHHKPLMPRPKVMQTILEAVGNTPLVKLNKIPQSEGLKCNVYVKCEFLSAGGSVKDRIGLRMIEEAERKGMLKAGYTIIEPTSGNTGIGLALGAAVKGYKCIIVMPEKMSNEKVDTLKALGAKVIRTPTEASFDSPEGLIAVAQRLEREIPNSIVLNQYTNEGNPLAHYDGTGSEIIDQLEGKVDMVVVGAGTGGTVCGIGRKIKETHPHCVVVGGDPEGSILAEPEELNKTDVNFYEVEGVGYDFIPTVLDRSVVDRWVKFNDKEALPMARRLIAEEGLLCGGSSGGNLIVALKAAKELKEGQNCVVIMPDNIRNYLTKFVSDSWMEARNFKASENVHNHSWWNNSISTLNLKTPITVGVDVCLQEVMNIMKTNSINQLPVIDRDGTIKGMAFLPNIMSKLLNRLAKPSDPVARAVFKKFVRVDRNDGLGHVSRILEQDPFVLVVQQEKKFTDGANFELRETVVGIITQRDLLDYLTTAENLVNDVEKLKL

SEQ ID NO: 135652 - DNA, 1486 bp, Malus domestica
  CDS (68)..(1195)
ggcacgaggctcaattccttctctacctcactacttgcagcacagtaatagtagctagcatccattaatggctgccctaaggagctttctcaagaaaagatcctctgtgctttgcaatggaggagcagtgagacacaggctcttctccgctcaggtgtcccaacccatccccgattctccatctttcgctcagagaatcggaaatctccccaaggatcttcctgccacccaaatcaaaacccaagtttcccaactcattggtagaactcccattgtttatcttaacaaagtcactgagggatgtggagctttcattgctgtcaagcaagagatgttccaacccaccgctagcatcaaggacagaccggcactttctatgatcaacgatgcagaagagaagggcttgataactcccggggagacaacgctgatcgagccaacgtcggggaatatgggaatcagcatggcttttatggcggccatgaaagggtataagatggttctaactatgccgtcttacactagtttggagagaagggtgtgtatgagatgctttggagctgatttaattctcactgatccaaccaaggggatgggagggactgttaagaaggcgtatgatcttttggaatctacgccgaatgcctttatgctccaacaattctcaaatcccgccaatactaaggtgcattttgaaactacgggccctgagatatgggaggataccaacggacaagttgacatcttcgtaatgggaattggtagcggaggcactgtctctggggtcgggcagtatctcaaatctaaaaatcctaatgttcagatatacggagtggagcctgctgaaagtaatgtgctgaatggtggtaaaccaggtcctcattcaatcacgggcaacggggttggattcaaaccagatatattggacatggatatgatggaaagagtgattgaggttcgtagcgaagatgcagtaaacatggcaagacaattggcactgaaagaagggcttatggtgggaatatcgtctggagccaacacagtggcagcaatggagcttgctaaaaagcctgaaaacaaaggcaaactcattgtgactgttcacgcgagctttggggagcgatacttgtcatctgttctatttcaagacctgaggcaggaagccgaaaacatgcaaccagttgcagtcgactaaccttaagtactccaaggttctccgtgtgacatgtaaaatcgcttgtatcagtgtatgcgttgatgtctgtcttgacgatataaggccttatgtcttgaagttagattttatgcatagaacattgtctgcaatttacctttcttgtgaaacttgtgttgtgactctctgaaagtgtaatgtaatgcaattcatctttgagtctgcagagcatgtgtgcacacgtataaccacacatataaccttcggaatctgtcttctgagttttgaggtaaaaaaaaaaaaaaaaaaaaa

SEQ ID NO: 135653 - protein, 375 aa, Malus domestica; identical to SEQ ID NO: 40065

SEQ ID NO: 135654 - DNA, 1497 bp, Malus domestica; identical to SEQ ID NO: 40066
  CDS (107)..(1237)

SEQ ID NO: 135655 - protein, 376 aa, Malus domestica; identical to SEQ ID NO: 40067

SEQ ID NO: 135656 - DNA, 1143 bp, Medicago truncatula; identical to SEQ ID NO: 40068
  CDS (1)..(1143)

SEQ ID NO: 135657 - protein, 380 aa, Medicago truncatula; identical to SEQ ID NO: 40069

SEQ ID NO: 135658 - DNA, 1152 bp, Medicago truncatula; identical to SEQ ID NO: 40070
  CDS (1)..(1152)

SEQ ID NO: 135659 - protein, 383 aa, Medicago truncatula; identical to SEQ ID NO: 40071

SEQ ID NO: 135660 - DNA, 1095 bp, Medicago truncatula; identical to SEQ ID NO: 40074
  CDS (1)..(1095)

SEQ ID NO: 135661 - protein, 364 aa, Medicago truncatula; identical to SEQ ID NO: 40075

SEQ ID NO: 135662 - DNA, 978 bp, Medicago truncatula; identical to SEQ ID NO: 40076
  CDS (1)..(978)

SEQ ID NO: 135663 - protein, 325 aa, Medicago truncatula; identical to SEQ ID NO: 40077

SEQ ID NO: 135664 - DNA, 978 bp, Bacillus cereus
  CDS (1)..(978): transl_table=11
atgctcaagaaattagagagtttagaaagggtaatcggcaacacacctatgattaaattagagcatgaaaagattaatctgtatgcaaaactagaatattacaatttgatgaatagtgttaaagtacgtgctgcttaccatattttaaaatcagcaataaatcgcggtgaagtgaatgaaaattctacaattatcgaatcttcatctggtaactttgcggttgctcttgctactctttgtaggtatattggtctgaaattcataccagttattgatccaaatattaatgatagttatgagaattttttgagagcaacttcctatcaagtagctaatgtggatgaacgagatgaaacaggtggctatttattaacgcgtttaaataaggtgaaagaacttttaaatactattcctaatgcctactggacaaatcaatataataatgccgataactttgaagctcattatcaaggaattggtggagaaatatctaatgattttaaacagttagattatgccttcattggagtgagtactggaggaactatcgctggggtatctacacgattaaaagaaaaattccctaatattaaaattattgcggtagacagtcaaggatccattatttttggtgataagcctcgtaaacggtacataccaggaattggtgccagtatgatacctggtatggttaaaaaagcattgattgatgatgtaatgattgtaccggaggttcatactgttgcaggttgttatgagctatttaataaacatgcaatatttgccggtggatcatcagggacttcatattatgcaatccaaaagtattttgaaaatagagatgttcaaaatacccctaatgttgttttcttatgtcctgataatggtcaagcttacacatctactatttacaacgtagaatgggtagaatggcttaatacacaaaaatcagtagaagatcaattagtttctttataa

SEQ ID NO: 135665 - protein, 325 aa, Bacillus cereus
MLKKLESLERVIGNTPMIKLEHEKINLYAKLEYYNLMNSVKVRAAYHILKSAINRGEVNENSTIIESSSGNFAVALATLCRYIGLKFIPVIDPNINDSYENFLRATSYQVANVDERDETGGYLLTRLNKVKELLNTIPNAYWTNQYNNADNFEAHYQGIGGEISNDFKQLDYAFIGVSTGGTIAGVSTRLKEKFPNIKIIAVDSQGSIIFGDKPRKRYIPGIGASMIPGMVKKALIDDVMIVPEVHTVAGCYELFNKHAIFAGGSSGTSYYAIQKYFENRDVQNTPNVVFLCPDNGQAYTSTIYNVEWVEWLNTQKSVEDQLVSL

SEQ ID NO: 135666 - DNA, 960 bp, Azospirillum brasilense; identical to SEQ ID NO: 40078
  CDS (1)..(960): transl_table=11

SEQ ID NO: 135667 - protein, 319 aa, Azospirillum brasilense; identical to SEQ ID NO: 40079

SEQ ID NO: 135668 - DNA, 978 bp, Bacillus thuringiensis
  CDS (1)..(978): transl_table=11
atgctcaagaaattagagagtttagaaagggtaatcggcaacacacctatgattaaattagagcatgaaaagattaatctgtatgcaaaactagaatatcacaatttaatgaatagtgttaaagtgcgtgctgctcaccatattttaaaatcagcaataagtcgcggtgaagtgactgaaaattctacaattatcgaatcttcatctggtaactttgcggttgctcttgctactctttgtaggtatatcggcctgaaattcataccagttattgatccaaatattaatgatagttatgagaattttttgagagcaacttcctatcaagtagctaaagtggatgaacgagatgaaacaggtggctatttattaacgcgtttaaataaggtggaagaacttttaaatactattcctaatgcatactggacaaatcaatataataatgctgataactttgaagcccattatcaaggaattggtggggaaatatctaatgattttaaacagttagattatgccttcattggagtgagtactggaggaactatcgctggggtatctacacgattaaaagaaaaattccctaatattaaaattattgcggtagatagtcaagggtccattatttttggtgataagcctcgtaaacggtacataccaggaattggtgccagtatgatacctggtatggttaaaaaagcattgattgatgatgtaatgattgtaccggaggttcatactgttgcaggttgttatgagctatttaataaacatgcaatatttgctggtggatcatcagggacttcatattatgcaatccaaaagtattttgaaaataaggatgttcaaaatacacctaatgttgttttcttgtgtcctgataatggacaagcttacacatcaactatttacaacgtagaatgggtagaatggcttaatacacaaaaatcagtagaagaccaattagtttctttataa

SEQ ID NO: 135669 - protein, 325 aa, Bacillus thuringiensis
MLKKLESLERVIGNTPMIKLEHEKINLYAKLEYHNLMNSVKVRAAHHILKSAISRGEVTENSTIIESSSGNFAVALATLCRYIGLKFIPVIDPNINDSYENFLRATSYQVAKVDERDETGGYLLTRLNKVEELLNTIPNAYWTNQYNNADNFEAHYQGIGGEISNDFKQLDYAFIGVSTGGTIAGVSTRLKEKFPNIKIIAVDSQGSIIFGDKPRKRYIPGIGASMIPGMVKKALIDDVMIVPEVHTVAGCYELFNKHAIFAGGSSGTSYYAIQKYFENKDVQNTPNVVFLCPDNGQAYTSTIYNVEWVEWLNTQKSVEDQLVSL

SEQ ID NO: 135670 - DNA, 1227 bp, Oryza sativa subsp; identical to SEQ ID NO: 40220
  CDS (1)..(1227)

SEQ ID NO: 135671 - protein, 408 aa, Oryza sativa subsp; identical to SEQ ID NO: 40221

SEQ ID NO: 135672 - DNA, 1020 bp, Aspergillus oryzae; identical to SEQ ID NO: 40080
  CDS (1)..(1020)

SEQ ID NO: 135673 - protein, 339 aa, Aspergillus oryzae; identical to SEQ ID NO: 40081

SEQ ID NO: 135674 - DNA, 1116 bp, Aspergillus oryzae; identical to SEQ ID NO: 40082
  CDS (1)..(1116)

SEQ ID NO: 135675 - protein, 371 aa, Aspergillus oryzae; identical to SEQ ID NO: 40083

SEQ ID NO: 135676 - DNA, 1323 bp, Aspergillus oryzae
  CDS (1)..(1323)
atgaatgaccattcgcgtgtctatataggtacagccttcatagctggggccctcttgacgctgggattcaaggatcttctctatccggagttagaacagcgcctccgagaatatcgagctcgacgtcatgatcagtctacaagtgacctacaggatctccccgcaggtgttctagcagctaggcccgggcctcctgtgattgtggaggggatcgagggttgtataggaaatacgcccttattccgaatcaagtccttgtccgacgcaacgggatgtgagatactgggaaaggctgaatttttgaatggagctggccaaagctctaaagaccgtgtcgcactgagcatgatcgaacttgctgaggaacgagaaatcttgacaccccattctggagatacaatatacgagggcacttctggttcaactgggatatcgttggccactctggcccgtgcaaagggctatctggctcatatctgtatgccatctgatcaagcgattgagaaatcaaacctgcttctcaaactcggcgcaattgtggatcgtgttccgcctgctccaattgtggaaaaggacaactttgttaatcgagcacgagccctcgccaatgttcatacagctacttcaactacaaagtcaaacctggaacctttgatgcccgatcctccagagttttccgggccaaaagcgggaagaggcttttttgcagatcagtttgagaacgaagcgaactggagggctcatttcaaaggcacgggtcccgagatttacgctcagtgcaacggaagactcgatgcatttgttgcaggagctgggaccggaggcacaatctctggtgtagcgctcttcctgaagccgcgtatacctcacttaagtgtggtgcttgctgatccacagggcagtggactttacaacagagttcgctatggcgtgatgtttgatctaaaagagaaagaaggtactagaagacggcggcaagttgacactattgtcgagggtattggaatcaaccgtgtgacagccaattttgaagcaggaaaggagctggttgatgatgctgttagagtgacagatgcccaggccttagcaatggccaggtggcttgtggaaaaggatggcatcttcatcgggagcagtagtgctgttaattgctttgcagcggtcaagacggcaatgaaacttggtccgggccacagaatcgtcacagtcctatctgattctggctccagacatctttcaagattctgggctagggccggggatgtcggcggggcggtagacacaaaattggaggacgttttgaatgcgaaggatgaccactaa

SEQ ID NO: 135677 - protein, 440 aa, Aspergillus oryzae
MNDHSRVYIGTAFIAGALLTLGFKDLLYPELEQRLREYRARRHDQSTSDLQDLPAGVLAARPGPPVIVEGIEGCIGNTPLFRIKSLSDATGCEILGKAEFLNGAGQSSKDRVALSMIELAEEREILTPHSGDTIYEGTSGSTGISLATLARAKGYLAHICMPSDQAIEKSNLLLKLGAIVDRVPPAPIVEKDNFVNRARALANVHTATSTTKSNLEPLMPDPPEFSGPKAGRGFFADQFENEANWRAHFKGTGPEIYAQCNGRLDAFVAGAGTGGTISGVALFLKPRIPHLSVVLADPQGSGLYNRVRYGVMFDLKEKEGTRRRRQVDTIVEGIGINRVTANFEAGKELVDDAVRVTDAQALAMARWLVEKDGIFIGSSSAVNCFAAVKTAMKLGPGHRIVTVLSDSGSRHLSRFWARAGDVGGAVDTKLEDVLNAKDDH

SEQ ID NO: 135678 - DNA, 981 bp, uncultured gamma proteobacterium
  CDS (1)..(981): transl_table=11
atgagcagactttaccagaacaatgcagagacaatcggcggcacaccactggtcaaaatcaatcacatcagcgacggtaacatctatgccaagctggagagccgtaaccccgccatgtccgtcaagtgtcgtattggcgccagcatggtggcggcggctgaacaggacggaagcctgaaacccggcatgaccattgtcgagcccaccagcgggaatacgggaatcgccctcgccttcgtggccgctgccaagggctatggctgtatcctcaccatgcccaataccatgagtcttgaacgccgcatgctgatgaaatcgctcggggcggaggttattctcacagatggcgccaagggcattcccgctgcgatagagcgggcggaaaacattatcacctccgacccatcgaagtactggggaccccaccaatttgaaaatcccgccaacccggcgatccacgagcagactaccgggccggagatatgggaggacaccgggggcggcatcgacatcctggtctcgggtgtgggcaccggcgggaccattaccggcatctcccgctacctcaagcggatctgcggtaaagacgtcctcagcgttgcggtagagccggattccaccaccatgatcacggccgccaaggccggcgaaaccccaagccacgcgccccacaaaattcaggggatcggggccggtttcgtgccgcaaaacctggaccttgaaatggtcgaccaggtggaacaggtatccagtgaggaagccatggaatgggcacacaaactgatgcaacaggagggcatactggcgggcatctcctcgggtgccgcaatggccgtggcacaccgtctgtcgcaacaggaagtgcaccgcggcaaaatgatagtcgctattctgccggactcgggagaacgctacctttcatcggcgctgtttgccggccgattctccgaaaacgaaacagtacaggctgccgtgagttaa

SEQ ID NO: 135679 - protein, 326 aa, uncultured gamma proteobacterium
MSRLYQNNAETIGGTPLVKINHISDGNIYAKLESRNPAMSVKCRIGASMVAAAEQDGSLKPGMTIVEPTSGNTGIALAFVAAAKGYGCILTMPNTMSLERRMLMKSLGAEVILTDGAKGIPAAIERAENIITSDPSKYWGPHQFENPANPAIHEQTTGPEIWEDTGGGIDILVSGVGTGGTITGISRYLKRICGKDVLSVAVEPDSTTMITAAKAGETPSHAPHKIQGIGAGFVPQNLDLEMVDQVEQVSSEEAMEWAHKLMQQEGILAGISSGAAMAVAHRLSQQEVHRGKMIVAILPDSGERYLSSALFAGRFSENETVQAAVS

SEQ ID NO: 135680 - DNA, 1236 bp, Allium sativum
  CDS (60)..(1079)
gactcccaaaacaaaacaaaaaaatcagcttcagaaagaaaaaagaaaaagagcgaaagatgggagaaagaacgggacttgcttcttttattgctgcacacaacgaagatgcctccgaaaatattgttcaagacataactcagcttgttggatggacaccactgatagaaatcaaaagcataacaaaagctgacagcgttggtgcccgaatcattgcaaagctggagtcatatcagccttctaattccgttaaagaccgcagtgctctcagaatgattgaagaggctgaagagaaaggtttaatcaaaccaggtgttaccactctattagagccaactagcggaaaccttgggattgctttggcttacattggtttgaaaaaaggttacaagttccttggagttatgccctcccattattcgatcgaacgaaggatgttgctcaagtatttgggcgctgatcttgcgttaactgatactaatcttgggttcaagggagtgcttgacaaggtagcagagctgagtgcaagtgatccaaatttttacgttctcaatcagttttctaactcagcaaaccctggagcacattatgccaccactggacctgaaatatggaaagatacagctggcaaggtcgatatttttgtagtgggttctggatcaggaggtacggtttccggtgctggcaagtatctcaaagagaagaatccaaatgtgaaagtagtctgtgttgaaccagccgaaagtgctgtcattgcaggtgggccacctggtccccatggcatccaaggatttggtcctggttttgttcctgataatgttgattattctgtgatcgatgaatttttgtctgtcacaacccaagaggctctggcttgtgcaagaaggatagcaaaagaagaaggtttacttatgggcatttcctctggtgctaacttagttgcttgcttgagggtaggagcaaggcctgaaaacaaaggcaaaatgattgtgacaaccttctcaagtggaggagaaagatacatgagcacccagttgtctgatgaggtcagggaagaatgcattaacatgacattttaatcgcaacgaagcactccgactcacacctgcgaatatttgttgtatgttttctgtattggaaagaataaatcttatcatgtactgaatttgcgttgtaccaagaacgatatcatgttgtatgagttcatgatcaagatatttgatttcagcattgtgg

SEQ ID NO: 135681 - protein, 339 aa, Allium sativum; identical to SEQ ID NO: 40085

SEQ ID NO: 135682 - DNA, 1296 bp, Allium sativum; identical to SEQ ID NO: 40086
  CDS (125)..(1096)
  misc_feature (1229)..(1229): n is a, g, c or t

SEQ ID NO: 135683 - protein, 323 aa, Allium sativum; identical to SEQ ID NO: 40087

SEQ ID NO: 135684 - DNA, 1424 bp, Allium sativum; identical to SEQ ID NO: 40088
  CDS (36)..(1187)

SEQ ID NO: 135685 - protein, 383 aa, Allium sativum; identical to SEQ ID NO: 40089

SEQ ID NO: 135686 - DNA, 1256 bp, Nicotiana tabacum; identical to SEQ ID NO: 40090
  CDS (55)..(1032)

SEQ ID NO: 135687 - protein, 325 aa, Nicotiana tabacum; identical to SEQ ID NO: 40091

SEQ ID NO: 135688 - DNA, 1468 bp, Spinacia oleracea
  CDS (167)..(1273)
cggatcctcgccctggccttcaaaaccttcactttccacccaccaaccatatatatacttctatataacaaacattaacagactcatataaaacacattgttattgctatttgttctgctcaaaattgtagatttgtagatttgtagttggtaaactgaagaaatcatggcaactgtgtcaagctgtttgctgaggagatcaagaacagcctcacggatctttaaaacatcactcagatgtttctccaccacttcttcttctgcacaaactgtttctggttcatctccctttccttttactgggactaatattaaaaccaatgtttcccaacttattgggagaactcccctagtttatctaagcaaaattagtgaaggatctggagcttacatagccgtcaagcaagagatgatgcagcctactgctagtgttaaagatagacctgcattggctatgattgaagatgcagagaaaaagggattaatttctccaggaaagacggtgttgatcgagccaacatcaggaaacatgggaataagcatggcgttcatggcggctatgaagggatacaaaatggtattgacaatgccatcatacacaagcatggaaagaagggtagtaatgagggcttttggtgctgatcttattctcactgaccctgacaaaggaatggggggaactgtcaaaaaggctaaccagcttttagactccacccctgatggtttcatgcttcaacaatttaataatcctgctaatactcaggttcattttgagacgacaggtcctgaaatatgggaggatactcaagggaaagtggacatctttgtcatgggaatcggaagtggaggcactgtttctggtgttggacgctatctcaaatctcaaaatcctaatgtgaagatctatggagttgaaccagctgaaagcaacatactcaatggaggcaaaccaggtcctcaccttataactggaaacggggttgggtttaaaccagagattttagacatggatgtaatggatgcagttctcgaggttaaaagtgacgatgctgttaagatggccaggcagttggcattacaggaaggacttttggttgggatatcatcaggggctaatacaattgctgcccttgatcttgctaagaggccagaaaacaagggcaaactaattgtgacgattcacccgagttttggagagcgatatctgtcgtctgccttgttcaaggagctgagggaagaggctgaaaacatgcaaccagtccctgttgaatgattccagcatcttatagctccagatatgctaaataaaggatctgttactgttttgtcactactactagtatatgacagtaactacatgatatctctttgagaaaaattgtaaaattgcaagtcaattgtgtattaattttcaatgaaattgttagggatgaaaattatttatcaatgaagtaattgtaattctttt

SEQ ID NO: 135689 - protein, 368 aa, Spinacia oleracea; identical to SEQ ID NO: 40093

SEQ ID NO: 135690 - DNA, 1278 bp, Arabidopsis thaliana
  CDS (87)..(1061)
gaattcgcacgagcgattttctccattttcttcaaaacgattcgggtcaaggttattgactttcctcattcagtgaagcttgaatcatggcctcgagaattgctaaagatgtgactgaattgattgggaacactccattggtgtatttgaacaatgttagcctgaagggatgtgttggtcgtgttgctgctaagcttgagatgatggaaccgtgctctagcgtcagcgtcaaagacaggattggttttagcatgatttctgatgcagaaaagaagggtcttatcaaacaaggagagagtgtgctgattgagccaacaagtggaaacactggagagttgctgttagcattcacggcagcctgcaaaggctacaagcttattattacaatgccagcttctatgagtactgagagaagaatcattctcttagcctttggagttgaagttgttttaactgacccagctaagggcatgaaaggaagctatcgcaaagcgcaagagattttggccaaaacacccaatggttacatgcttcagcagtttgagaacccggccaacccagaaatccactatgagccgacgggacctgagatatggaaaggcactggtgctaaaatcgatggctttgtttctgggattggtactggtggtaccattacaggtgctgggaagtatcttaaagaacagaacccaaacttcaagctgtatggagtggagccagttgaaagtgctattctatccggtgggaagccaggccctaccaagattcaagggataggagctggttttataccaagtgtattgaatgttgatcttattgacgaagttgttcaggtttcaagtgatgaatccattgacatggcaaggcagcttgctcttaaagaaggtcttcttgtgggaatatcatccggcgctgctgcagcaattaaacttgcacagaggccagaaaacgctgggaagctatttgtggccatattcccgagtttcgggagaaggtatctatcaacgtaccttttcgatgccgacaaggaaagaagtcggaacatgccttcaaggccttgaacattctccatttcttcttaagagacgcaaaataaaagagatgttcagtttctcctatagagactcttcatctttagttacattggcgtctttgcttccatctgtatcttctcttgtgtgccaataaaaggttcaaactagattttctctgtttcttttgtgaaccacttgcttgttaatgaagtttaaatttgctaaaaaaaaaaaaaaaaaaaaa

SEQ ID NO: 135691 - protein, 324 aa, Arabidopsis thaliana; identical to SEQ ID NO: 40095

SEQ ID NO: 135692 - DNA, 1134 bp, Oryza sativa subsp; identical to SEQ ID NO: 40096
  CDS (1)..(1134)

SEQ ID NO: 135693 - protein, 377 aa, Oryza sativa subsp; identical to SEQ ID NO: 40097

SEQ ID NO: 135694 - DNA, 1411 bp, Hevea brasiliensis; identical to SEQ ID NO: 40098
  CDS (60)..(1172)

SEQ ID NO: 135695 - protein, 370 aa, Hevea brasiliensis; identical to SEQ ID NO: 40099

SEQ ID NO: 135696 - DNA, 1047 bp, Oryza sativa subsp; identical to SEQ ID NO: 40100
  CDS (1)..(1047)

SEQ ID NO: 135697 - protein, 348 aa, Oryza sativa subsp; identical to SEQ ID NO: 40101

SEQ ID NO: 135698 - DNA, 906 bp, uncultured bacterium 561
  CDS (1)..(906): transl_table=11
atgaatcccgctgaaaattcgtaccccacgattgagagtgttgtgggggaaaccccgttagtacgtttgcagaggctgacgcagaactccagtaaccatgtgctctgtaaactcgagggcaataaccccgcaggttctgtgaaggataggcccgcgttgagtatgattgttgaggctgaagcgcggggcgatattcgacctggggatacgttgattgaggcgaccagtggtaacacgggaattgccctggctatggctgctgcgattcggggctaccatatgcgcttgattatgcccgctcatatgagttcggagcgaaaattggcgatggctgcctatggcgccgagcttattcaggtgactcgagaggagggtatggagggtgcaagagacctggcggaggcgatgcaggctcgaggagagggcacggttcttaatcagtttggaaactttgataacccgttggcgcattaccgtggcaccggaccagaaatttggcgtcagaccggtggacaagtaacgcactttattagctcgatgggcaccacgggaactatcatgggagtctcagcctttttaaaggaacaaaatcccgacattgagatcattggcttacaacctcaagatggctctcagatcccaggaataaggcgttggtcagaggcgtatcggccaacaatttttcagtcagcgaaggtcgaccgtaccattgacatctctcaggcggaatccgaagttatgatgcgccgtctcgccagtgaggaggggatttttgctggagtatcttccggggggtcaatcagtgctgcactgcaagtcagtcaggaagttgagggcgcaaccattgtcgcgatcgtctgtgatcggggcgatcgctatctttcgacgggtgtttacggaatttga

SEQ ID NO: 135699 - protein, 301 aa, uncultured bacterium 561
MNPAENSYPTIESVVGETPLVRLQRLTQNSSNHVLCKLEGNNPAGSVKDRPALSMIVEAEARGDIRPGDTLIEATSGNTGIALAMAAAIRGYHMRLIMPAHMSSERKLAMAAYGAELIQVTREEGMEGARDLAEAMQARGEGTVLNQFGNFDNPLAHYRGTGPEIWRQTGGQVTHFISSMGTTGTIMGVSAFLKEQNPDIEIIGLQPQDGSQIPGIRRWSEAYRPTIFQSAKVDRTIDISQAESEVMMRRLASEEGIFAGVSSGGSISAALQVSQEVEGATIVAIVCDRGDRYLSTGVYGI

SEQ ID NO: 135700 - DNA, 1098 bp, Spinacia oleracea
  CDS (78)..(1076)
tctcatatactaacattcaactgcacgttctcttgattctactttggaaatttggttgtgtagctttgcttgggtatatggagggagagtgcagcattgcaaaagatgtgactgaactggtgggaaacacacctgtagtttatcttaatcatgtcgcagagggttgtgttgcacgcattgcagccaagcttgaaatgatggaaccatactccagtgttaaagacaggattgcagttagtatgatcaaagatgctgaagaaaaaggcttgatttctcctgagaagactgttctcatagaaatgacaagtggtaatactggcattggattggcgtttattgctgctgcaaagggctataagctaatcattgtaatgccttcgtatgtgagtcttgagagaagagtaatccttctagccttgggagcagagttgcacctcatgggtccaacaaaaagctttcctgatttcgtggccaaagctagagaattattggacaaaactccaggcggctattacattaatcaattcgaaaaccctgggaatccaaagactcattttgaaactacggggccagagatctggagagccacggaagggaaagtggatgcatttgtctctggcatagggactggtggtaccgtcactggggcaggaagattccttaaggagaaaaattctgctatcaaggtctatggtgtagagccaactgaaagtgcagtcctaaatggagaaaagcctggcaagcataaaatccaagggattggtgctggtgtcatccctccattactggactttgacataattgaggaagttgtaaaggtatctagtgacgaagcctttgaaactgctaagcttcttgcattgaaagaaggtttgctggttgggatatcgtcgggagctgccgttgctgctgctattaagctagcaaaaaagcctgagtttgctgagaaattgattgttgtgcttatccctagctttggagagcgttatttatctaccgagttgtttgcttcagagaggcaagaagtggaggctttgacttatgaaagggccgatttgccactttcccccttgtgaaacacccgctgaaaaatgagac

SEQ ID NO: 135701 - protein, 332 aa, Spinacia oleracea; identical to SEQ ID NO: 40105

SEQ ID NO: 135702 - DNA, 1221 bp, Penicillium chrysogenum
  CDS (45)..(1160)
ggtcgatgggaccatttgttcctgcattgcaagctcaagtcaggatgtttcgtcaaagtgttcggcggttcgccactacggcggctcgtgctgccgagggatccactgcctactgcacccgggtgtcaacagcccagggcgttgtcaatggactgaccgaggcgattggcaacaccccacttatccgattgaagaagctctccgagcaaaccggttgcaatgttctcggaaaggcagagttccaaaaccccggaggtagcgtgaaggaccgagcagcgctctttgtggtcaaaaacgccgaggagaagggactcctgaagcccggtggcaccgtggttgaaggaacggctggaaacactggtattggactggcgcatgtgtgtcggtcaaagggctacaagctcgtgatctatatgcccaacacccagtcccagggcaagattgacttgctccgtctgctgggagcggaagtatacccggtccccgcagtggccttcgacaacccccagaactacaaccaccaggcgcgccgacacgccgagtcactagacaacgcagtctggaccaaccagttcgacaacgttgcgaaccgtcaagcacacatcgaaactaccgggcccgagatctgggcacagacccagggcaagattgacgcctttacctgcgctaccggaaccggaggtaccctggctggtactacgcgctatctgaagactgtcagtgatggacgtgtaaagagcttcctcgccgatcctccgggcagtgttctccacagctacatccaaagtggtggcacactgatcgatcgttctggcagcagtatcactgagggtatcggccagggacgtgtgacagataaccttcagcccgatattgacttgctagatggctctgtgaacatcagtgacgagaagactatcgagatggtttaccgctgtctggatgaggagggcctgtaccttggtgccagttccgcgatgaacgtcgtggccgccaaggaggttgccgagaagttgggcaagggtaacaccgttgtgaccattctctgtgacggtgcttatcggtatgcggatcgcttgttctccagcaaatggctcgagagcaagaacctgcttggctccattccgaagcacctgcagaagtacgttgtgttgccttagaggactgtataaattgaataaactgtattcccaaaaaaaaaaaaaaaaaaaaaaaaaaaaa

SEQ ID NO: 135703 - protein, 371 aa, Penicillium chrysogenum; identical to SEQ ID NO: 40107

SEQ ID NO: 135704 - DNA, 1206 bp, Solanum tuberosum
  CDS (35)..(1090)
gacaaattgtagtgagtgatttacaacttctacaatggcgtccttactaaggagaaggttttattcgagtgaatcatcatttgctcagaggctaagagatctgccaaagtatcttcctggtaccaacatcaaaactcaagtttctcaactcattgggaaaacaccattggtgtatcttaacaaagtgagtgaaggatgtggtgcttatattgctgttaaacaagaaatgatgcaacctacttctagtatcaaagatagaccagcatttgctatgataaacgatgcagaaaagaaaggattaatcacccctgggaaaacaacactaatcgagccaacatcagggaatatgggaataagtatggcatttatggctgccatgaaaggctacaaaatgattttgacaatgccatcctatacaagcttggagaggagggtgaccatgagagcattcggagctgatttagtgaccactgatccaactaaaggaatgggaggaactattaagaaagcgtatgatcttttggaatctacacctaatgcttatatgcttcaacaattctccaatccagccaatactcaagctcattttgagactactggccctgaaatttgggaagatactcaaggtaatgttgacatctttgtcatgggaataggaagcggaggcacagtctctggtgttggacagtatctgaaatcgaaaaatcctaatgtcaagatatatggaattgagccaactgaaagcaatgtattgaatggtggaaacccaggtcctcacgaaataactggcaatggggttggattcaagccggatatccttgacatggatgtaatggaagaagttctgatggtttcgagcgaagaatcggtaaacatggctagggaattggcgttgaaggaaggccttatggttggtatatcatcaggagcaaatacagtagctgcacttagactcgccaacaggccagaaaacaaaggaaaactcatagtgacaatacatccaagttttggagagaggtacttgtcatctgttctgtatgaagatatcaggaaagaggcacagaatatgcaacctgtatcagttgattaatggtctattattatagtgatagctgtagtgaaactagtacaaaaagaaataatatatgtactacattttctgaaataatgtttatgctttaaataataatgaaaatttatcctttt

SEQ ID NO: 135705 - protein, 351 aa, Solanum tuberosum; identical to SEQ ID NO: 40109

SEQ ID NO: 135706 - DNA, 1059 bp, Betula verrucosa; identical to SEQ ID NO: 40112
  CDS (1)..(1059)

SEQ ID NO: 135707 - protein, 352 aa, Betula verrucosa; identical to SEQ ID NO: 40113

SEQ ID NO: 135708 - DNA, 927 bp, Bacillus stearothermophilus; identical to SEQ ID NO: 40114
  CDS (1)..(927): transl_table=11

SEQ ID NO: 135709 - protein, 308 aa, Bacillus stearothermophilus [sequence omitted]

SEQ ID NO: 135710 - DNA, 1041 bp, Bacillus thuringiensis subsp; identical to SEQ ID NO: 40116
  CDS (1)..(1041): transl_table=11

SEQ ID NO: 135711 - protein, 346 aa, Bacillus thuringiensis subsp; identical to SEQ ID NO: 40117

SEQ ID NO: 135712 - DNA, 1075 bp, Fusobacterium nucleatum
  CDS (135)..(1055): transl_table=11
aaaatttaatttattatatttcaatattattctttaaaaaataagaactctatattttttttaatgagttcttttattttttttcttttagttatacaattaagttgaaaataaagttttataggaggatttttatgttagcaaattctgtaattgatttaattgggaacaccccattagtaaaaattaataatattaatacttttggaaatgaaatatatgtaaaactagaaggttcaaatcctggtagaagtacaaaagacagaattgccttaaaaatgattgaagaagctgaaaaagaaggtttaattgataaagatactgttattatagaagctacaagtggaaatacaggaattgggcttgctatgatatgtgcagttaaaaactataagttaaagattgttatgcctgatactatgagtgttgaaagaattcaacttatgagagcctatggaactgaagttatacttactgatggttcttttggaatgaaagcttgtttagaaaaattagaagaacttaaaaaacaagaaaagaaatattttattcctaaccaatttactaatgtaaataatccaaaagctcactatgaaactacagctgaggaaattttaagagatatggataataaagttgatgtatatatttgtggaacaggaacaggaggaagtttttctggaactgctaaaaaattaaaagaaaaattacctaatattaaaacttaccccgttgaacctgcgtcatctcctttactttcaaagggatatataggtccacataaaattcaaggtatgggaatgagtataggtggtataccagttgtctacgatggtagtttagctgatggaattttagtttgtgaagatgatgaagcctttaaaatgatgagagaattaagctttaaagaaggtatcttagctgggatttcaacaggtgctactctaaaagcagctcttgattattcaaaagaaaatgctaataaaagtttaagaatagttgttctttctactgactcaggagaaaaatatctatctagttctcatggcttataaaaaatattccaagaagttgc

SEQ ID NO: 135713 - protein, 306 aa, Fusobacterium nucleatum; identical to SEQ ID NO: 40119

SEQ ID NO: 135714 - DNA, 1386 bp, Rhodococcus erythropolis; identical to SEQ ID NO: 40120
  CDS (1)..(1386): transl_table=11

SEQ ID NO: 135715 - protein, 461 aa, Rhodococcus erythropolis; identical to SEQ ID NO: 40121

SEQ ID NO: 135716 - DNA, 975 bp, Arabidopsis thaliana; identical to SEQ ID NO: 40122
  CDS (1)..(975)

SEQ ID NO: 135717 - protein, 324 aa, Arabidopsis thaliana; identical to SEQ ID NO: 40123

SEQ ID NO: 135718 - DNA, 972 bp, Arabidopsis thaliana; identical to SEQ ID NO: 40124
  CDS (1)..(972)

SEQ ID NO: 135719 - protein, 323 aa, Arabidopsis thaliana; identical to SEQ ID NO: 40125

SEQ ID NO: 135720 - DNA, 1602 bp, Magnaporthe grisea; identical to SEQ ID NO: 40126
  CDS (1)..(1602)

SEQ ID NO: 135721 - protein, 533 aa, Magnaporthe grisea; identical to SEQ ID NO: 40127

SEQ ID NO: 135722 - DNA, 1011 bp, Rhizobium fredii
  CDS (1)..(1011): transl_table=11
atgctgcacacgaccgtaacacaattgatcggccagacgccggtcatgtcgatcgacgtgccgggccgcaacgccaccttggttctgaagatcgagaagaacaatcccggcggctcgatgaaggatcgtatggctcgcagcatggtgattgcggcccttgaggatgggcgcctcgctccgggcggcacgatcgttgaatcatcgtcgggaaatactggcacggggctggcgctcgcagcgctggaattcgggctgcgcttcattgccgtggtggaccaccatgcagcgcccgacaagatccgcatgatgcgggcgctaggggctgagatccgctatgtcgaaggcgactttcgcgaagacgaggtcgcagtcgtcgagcgccaacgcctcgcagcgcaactcggcgcgcagcttccgggcgcgctgttcatgaaccagtccgacaacccggcaaatccggcaggctataccggcctcgtggacgaactggttgcccagcttcccgacggcatcgacgcctttgtcggctgcgtggggaccggcggctcgatgaccggaatctcccagcgtgtgaagcgtaacaatccggccgtacgcactattgccgtggagccggccggctcgatcgttttcggcaagccggggcacccctattaccagtcaggaacgggcacgcccgccggcgatgaggtcggcaaggtgctggactatggctgcatcgacgaaggcgtgcaggtgaccgatacgcaagccttcgagacggcgcggtacatcgcccggcgcaagggactgctcgttggcggctcgaccggcggcgccatctacaaggcgctggagttcattggcgccggcaagctcaccggcacggtcgtcacgacggttgccgatggcggcgagaaatatcttggcacgattttcgatgaggaatggatggcgaagcgccgcctgctcgacccggcaatcgctgcccagttggatggctggctattcggaaaggcgcgggcagcatga

SEQ ID NO: 135723 - protein, 336 aa, Rhizobium fredii
MLHTTVTQLIGQTPVMSIDVPGRNATLVLKIEKNNPGGSMKDRMARSMVIAALEDGRLAPGGTIVESSSGNTGTGLALAALEFGLRFIAVVDHHAAPDKIRMMRALGAEIRYVEGDFREDEVAVVERQRLAAQLGAQLPGALFMNQSDNPANPAGYTGLVDELVAQLPDGIDAFVGCVGTGGSMTGISQRVKRNNPAVRTIAVEPAGSIVFGKPGHPYYQSGTGTPAGDEVGKVLDYGCIDEGVQVTDTQAFETARYIARRKGLLVGGSTGGAIYKALEFIGAGKLTGTVVTTVADGGEKYLGTIFDEEWMAKRRLLDPAIAAQLDGWLFGKARAA

SEQ ID NO: 135724 - DNA, 1267 bp, Glycine max; identical to SEQ ID NO: 40128
  CDS (82)..(1059)

SEQ ID NO: 135725 - protein, 325 aa, Glycine max; identical to SEQ ID NO: 40129

SEQ ID NO: 135726 - DNA, 1601 bp, Pichia pastoris; identical to SEQ ID NO: 40130
  CDS (14)..(1519)

SEQ ID NO: 135727 - protein, 501 aa, Pichia pastoris; identical to SEQ ID NO: 40131

SEQ ID NO: 135728 - DNA, 1200 bp, Arabidopsis thaliana
  CDS (1)..(1200)
atgttttctgctgttcgatttttttttttctctgatttatattcgagtttgaacttaaatcatggttttggtttcactttacaattttggatctcatgcagtttcaaaacactcttcgatttatatgaatgttttatattattagggacattgcttgcagactgtgtcttaaatctttttgattttcttgtgatcttcagaactcaaattgggaagaattttgacatggaggaggaccggtgttcgatcaaggatgatgcaactcaattgataggtaacaccccaatggtatatctgaacaacattgtggatggttgtgtagctcgtattgcagctaagcttgaaatgatggagccttgctctagtgtcaaggagcgaattgcttatggtatgattaaagatgcagaagacaagggattgattactcctgggaagagcacactgattgaggctacctctggtaacaccgggattggtttagccttcatcggtgcagctaaaggttacaaagtggtcctcacaatgccctcatcaatgagccttgagagaaaaatcattcttttagcattaggtgcggaggttcacctcacagatcctagtaaaggcgttcaaggaataatcgacaaagctgaagagatatgtagcaaaaatccagatagtatcatgctagaacagttcaaaaatccttcaaacccgcaaactcattatcgaaccacgggtccagagatatggagagactctgcaggggaagtagacatattggttgccggtgttggaactggtggaacgctttccggatcaggaagattcctcaaggagaagaataaagactttaaggtttatggtgtggaacctacagaaagtgcggtaataagtggaggcaaaccgggtacacatttgatccaaggtattggggctggactcatcccagacaatttggatttcaacgttcttgatgaagtcatccaagtgacaagtgtggaagcaattgaaacagccaaacttcttgccctgaaagaaggattactggtgggaatatcttctggagctgctgcagccgctgcgataaaggtggcaaagcggccagaaaacgccggcaaactcatagttgtgattttccctagcggtggggaacgttacctatcgacctcattgttcgaatcagtcagacatgaagcagagaatttgccaattcaatga

SEQ ID NO: 135729 - protein, 399 aa, Arabidopsis thaliana
MFSAVRFFFFSDLYSSLNLNHGFGFTLQFWISCSFKTLFDLYECFILLGTLLADCVLNLFDFLVIFRTQIGKNFDMEEDRCSIKDDATQLIGNTPMVYLNNIVDGCVARIAAKLEMMEPCSSVKERIAYGMIKDAEDKGLITPGKSTLIEATSGNTGIGLAFIGAAKGYKVVLTMPSSMSLERKIILLALGAEVHLTDPSKGVQGIIDKAEEICSKNPDSIMLEQFKNPSNPQTHYRTTGPEIWRDSAGEVDILVAGVGTGGTLSGSGRFLKEKNKDFKVYGVEPTESAVISGGKPGTHLIQGIGAGLIPDNLDFNVLDEVIQVTSVEAIETAKLLALKEGLLVGISSGAAAAAAIKVAKRPENAGKLIVVIFPSGGERYLSTSLFESVRHEAENLPIQ

SEQ ID NO: 135730 - DNA, 1392 bp, Streptomyces venezuelae; identical to SEQ ID NO: 40132
  CDS (1)..(1392): transl_table=11

SEQ ID NO: 135731 - protein, 463 aa, Streptomyces venezuelae; identical to SEQ ID NO: 40133

SEQ ID NO: 135732 - DNA, 927 bp, Bacillus stearothermophilus; identical to SEQ ID NO: 40134
  CDS (1)..(927): transl_table=11

SEQ ID NO: 135733 - protein, 308 aa, Bacillus stearothermophilus; identical to SEQ ID NO: 40135

SEQ ID NO: 135734 - DNA, 951 bp, Selenomonas ruminantium; identical to SEQ ID NO: 40136
  CDS (19)..(951): transl_table=11

SEQ ID NO: 135735 - protein, 310 aa, Selenomonas ruminantium; identical to SEQ ID NO: 40137

SEQ ID NO: 135736 - DNA, 1375 bp, Solanum tuberosum
  CDS (55)..(1185)
agtggtaacaacgcagagtacgcggggaaggaagatagagatagcaaagcaacaatggcatctttcatcaacaatcccttaacttctctctgtaacactaagtctgaagctaataatctcttcaaaatttcccctttaagagctcaatcactgggtttttccaagcttaatggcagcagaaaagttgctttcccttctgttgtttgcaaagcggtgtctgtaccaacgaaatcgagtacagagattgaagggcttaacatcgctgaagatgttacacagcttattgggaacacaccaatggtttaccttaacaccatcgctaagggttgtgtagcaaacattgctgctaaacttgagattatggagccatgttgcagtgttaaggacaggatagggttcagtatgatagttgatgcagaggagaagggacttatatctccggggaagactgttctagttgagcctacaagtggaaacacaggcattgggcttgccttcattgctgcttccagaggatataagctcatcttaacgatgcctgcatcaatgagtcttgaaagaagggtcattctaaaagcttttggagctgaacttgttttaactgacccagccaaagggatgaaaggagctgtttcaaaggctgaagaaatattgaataacacaccagatgcctatatccttcaacaatttgacaatcctgccaacccaaagatacactatgaaacaacgggtccagagatctgggaagacacaaaaggcaagattgacatacttgttgctggcattggaactggcggaaccattacaggaacaggccgattccttaaagagcaaaatccaaacattaagattattggtgtggagcccacagaaagtaacgttctatcagggggcaaacctggttttattccaggaaacttggatcaagatgtcatggatgaagtgatagagatatcgagtgacgaagctgttgaaactgcaaagcaattagcgctacaagaagggttgttggttgggatttcttccggagcagctgcccttgctgccattcaggttgggaagagacctgagaatgcaggaaagcttattggggttgtatttccaagctatggggaacgatacctctcctctatccttttccagtcaatacgtgaggaatgcgagaaaatgaagccagaattgtgaagatcttccttttttcgagctatcttctgattcttgataatgctatctggcttttctagctgccacacttttgtttgttatatttagttggctgctggtgtatacaatagatcaggtattaagatggttctcataacaaagattaaacaatctcatcgattcggtttggaaaaaaaaaaaaaaaaaaaaa

SEQ ID NO: 135737 - protein, 376 aa, Solanum tuberosum
MASFINNPLTSLCNTKSEANNLFKISPLRAQSLGFSKLNGSRKVAFPSVVCKAVSVPTKSSTEIEGLNIAEDVTQLIGNTPMVYLNTIAKGCVANIAAKLEIMEPCCSVKDRIGFSMIVDAEEKGLISPGKTVLVEPTSGNTGIGLAFIAASRGYKLILTMPASMSLERRVILKAFGAELVLTDPAKGMKGAVSKAEEILNNTPDAYILQQFDNPANPKIHYETTGPEIWEDTKGKIDILVAGIGTGGTITGTGRFLKEQNPNIKIIGVEPTESNVLSGGKPGFIPGNLDQDVMDEVIEISSDEAVETAKQLALQEGLLVGISSGAAALAAIQVGKRPENAGKLIGVVFPSYGERYLSSILFQSIREECEKMKPEL

SEQ ID NO: 135738 - DNA, 1378 bp, Solanum tuberosum; identical to SEQ ID NO: 40138
  CDS (55)..(1215)

SEQ ID NO: 135739 - protein, 386 aa, Solanum tuberosum; identical to SEQ ID NO: 40139

SEQ ID NO: 135740 - DNA, 1354 bp, Solanum tuberosum
  CDS (85)..(1062)
agtggtaacaacgcagagtacgcggggagtcacagtagatttcatttcttgtcttttgtcaaatcctagaattaacctgataatatggcgggggaaaagattggaattgccaaggatgtaactgaattgattggtaacactcctttggtatacctgaataatgttgtggatgggtgtgttgcacgtgttgctgccaggctggaaagcatggagccatgctctagtgttaaggataggatcggttatagtatgattacagatgctgaggagaagggtctcatcaaacccggcgagagtgtcctcatcgaacctacgagtggaaacactggtgtaggattggcattcatggctgctgctaaaggctacaaactcatcattacgatgccttcttcaatgagtcttgagagaagaattattctgcgtgctttcggtgctgagttggtgcttaccgatccagcaaaagggatgaagggtgctatttcaaaggctgaagagataaaggccaaaatacccaactcctatattcttcagcaatttgaaaaccctgctaacccaaagatacactatgagaccactggtcctgagatctggaaaggctcaaatgggaaagtggatgctctagtctctggaattggaacaggaggcacgataactggttcaggcaagtatttgagagagcagaaccccaacgttaagctgtatggcgtggaaccagttgaaagtgctatcctttctggtggaaagcctggtccacataagattcaggggattggtgctggtttcattcctggtgttttggaagttaaccttattgatgatgtagttcaggtttcaagtgaagaatccatagaaatggctaagcttctggcattgaaggaaggattgctagtgggaatttcatctggtgctgctgcggcggcggcaattaaagtcgctaagcgccctgaaaatgctgggaagctcattgttgttattttcccaagcttcggagagcgatatctttcctctgtactcttcgaaactgtcagacgagaagcagagaacatgactgtggagccttgaactttttgccctccgattaccacatcatagtcgcaaagtgggcttccgatgaaagcagaatgttcttgtctgaaccttcccctttctattttgctgaaactgctagaaaataaggccttttctttcttttattggctatgtactttaaagtaaagaaaccattcaagtatattttagtgcttttgtaattctactgtttctacaacatttgtaattctactgtttctacaacatttgaaatttaaagaggtgttgcttcttgttcatggaaaaaaaaaaaaaaaaaaaaaaa

SEQ ID NO: 135741 - protein, 325 aa, Solanum tuberosum
MAGEKIGIAKDVTELIGNTPLVYLNNVVDGCVARVAARLESMEPCSSVKDRIGYSMITDAEEKGLIKPGESVLIEPTSGNTGVGLAFMAAAKGYKLIITMPSSMSLERRIILRAFGAELVLTDPAKGMKGAISKAEEIKAKIPNSYILQQFENPANPKIHYETTGPEIWKGSNGKVDALVSGIGTGGTITGSGKYLREQNPNVKLYGVEPVESAILSGGKPGPHKIQGIGAGFIPGVLEVNLIDDVVQVSSEESIEMAKLLALKEGLLVGISSGAAAAAAIKVAKRPENAGKLIVVIFPSFGERYLSSVLFETVRREAENMTVEP

SEQ ID NO: 135742 - DNA, 1250 bp, Solanum tuberosum
  CDS (96)..(1139)
ggaggtacacaaaaaaaagaagctcaattgcatagagagtacctttttttttttttgtgtaaattttaaagtgcaataattttgagaattcatcaatggcaactttaagcagattcttaaagaaaagatcattagctagcaacagattgttctctacacaacttcctcatactaacatcaagtctgaagtttctcaattaattgggaaaacaccaatggtttatcttaaaaaagtgacagaaggatgtggagcatatatagctgtgaaacaagagatgtttcagcctacttctagcatcaaagacagaccagcattggcaatgatcaatgatgcagaaaagaaaggcttaatatcacctgaaaagacgacgttgattgagccaacatcaggaaatatggggattagtatggcatttatggcagcaatgaaaggctacaaaatggttttgactatgccatcgtacacgagcatggagaggagagtgacaatgagagcatttggagccgatttaatcctcaccgatccaaccaaaggaatgggaggcactgttaagaaggcttatgagcttttggaatctacacctaatgctttcatgcttcaacaattttccaaccctgcaaacactcaggttcatttcgacacaactggccctgaaatatgggaagaaactctaggtaatgttgacatatttgtcatgggaataggaagtggaggcactgttactggtgttggactatatcttaaatccaaaaatcctaatgtcaagatatatggactcgagccaactgaaagcaatatactgaatggtggaaaaccaggtcctcatcatataacgggaaatggggtcggatccaagccagatatcgttgatatggatctaatggaggaagtactaatggtttctagcgaagacgctgtaaacatggctagggagttggcagtgaaggaaggactcatggttgggatatcgtcaggagctaatacagtagcagctctaagacttgctcaaaaaccagaaaacaaaggcaaactcatagtgactgtacatgcaagttttggagagcgatacttatcatctgtgttgtatcaagatctgaggaaagaagctgagaatatgcaacctgtttcagtcgattaaatatcgaaaactcagcaagaaaaatgtatttttttttgttcattctaaatgatgttttctgaatgtctactgttggttgattaaaaaaaaaaaaaaaaaaaaaaaaaaaaa

SEQ ID NO: 135743 - protein, 347 aa, Solanum tuberosum; identical to SEQ ID NO: 40141

SEQ ID NO: 135744 - DNA, 1493 bp, Nicotiana tabacum
  CDS (88)..(1062)
ttgttgttgttgttgtgtttttgcagaatcacaagataaggaagctagctaacttcaaagcatccactagcaactcagcaagaaactatggaagagaagagtgatattgcaaaggatgtcacagagcttatcgggaacacccctatggtatatctcaacaaaatcgttgaaggttgcgctgcccaaattgcagccaagttggagtcaatggaaccatgctcaagtgtcaaagacaggatggcatacagtatgatcaaagatgcagaagataagggcctgattactcctggaaagacagtcctccttgaggtgaccagtggtaataccggcattggtcttgcatttattgcagcagctcgtggctacaagctcgtgacagtgatgccagcatcatacagtcttgagagaaggattgttcttaaagctttgggttctgagttatacatcacagatccagccaaaggtatagatggtgtgcttcagaaggctgaagaaatactagataggacgccaaactgtcatttctttcgtcagtttgagaaccctgccaatccaaagatccattatgaaacaactggaccagaaatatggaagtgcacaggagggaaaattgatatttttattgccgggattggaactggaggcacagtgacgggagctggaaggttccttaaggagaagaatccagaaataaaggtatatggtatggaaccagcccgaaaatgcaattctgaatggaggacaaaagggccacataaaatccaaggaattggtgctggttttgtcccagtcgttctcgatctcagcatcctggatgaagttcttcaagtatctagtgatgaagctattgaaatgacaaagcttcttgcattgaaagaaggtttgctggtaggaatatcgtcgggggctgcagctgctgcagcgataaaagtagcaaaaaagccagaaaatgctgggaaactcattgcggttatcttccctagttttggggaacgttatctctccaccgtgctgtttgattctattcgagaagaggtggctaacatgacttttgaacaatagtatgcttctttggactgagtgatagggtattgaaggaagttatgtgttgtaacttgaggttaaatagaaaatacaactgtaagtgtttcctcctaaataggtgaactattgttcacaaatacaaatgttctcatcatttgtaaggtataaagaacaattatctctttgcctgcggatatcaacctctcttattctagtgttctgcagttgtttgttatgacttatgagttccttggttggctctcgtctctgcgagctcagcggcagcttgttgggctgggcagccagcttgagtctgttcctgatgctggacttcaccaatggtaatcactgcttcttcagcctaagattttgctcgtctcctttgtaatttacacaagaattagcttttaacctctcttttttcttggtgaaaaaaaaaaaaaaaaaaa

SEQ ID NO: 135745 - protein, 324 aa, Nicotiana tabacum; identical to SEQ ID NO: 40143

SEQ ID NO: 135746 - DNA, 927 bp, Methanosarcina thermophila; identical to SEQ ID NO: 40144
  CDS (1)..(927): transl_table=11

SEQ ID NO: 135747 - protein, 308 aa, Methanosarcina thermophila; identical to SEQ ID NO: 40145

SEQ ID NO: 135748 - DNA, 915 bp, Clostridium sticklandii; identical to SEQ ID NO: 40146
  CDS (1)..(915): transl_table=11

SEQ ID NO: 135749 - protein, 304 aa, Clostridium sticklandii; identical to SEQ ID NO: 40147

SEQ ID NO: 135750 - DNA, 1671 bp, Allium tuberosum; identical to SEQ ID NO: 40148
  CDS (417)..(1394)

SEQ ID NO: 135751 - protein, 325 aa, Allium tuberosum; identical to SEQ ID NO: 40149

SEQ ID NO: 135752 - DNA, 1014 bp, Zymomonas mobilis; identical to SEQ ID NO: 40150
  CDS (1)..(1014): transl_table=11

SEQ ID NO: 135753 - protein, 337 aa, Zymomonas mobilis; identical to SEQ ID NO: 40151

SEQ ID NO: 135754 - DNA, 927 bp, Streptococcus suis; identical to SEQ ID NO: 40152
  CDS (1)..(927): transl_table=11

SEQ ID NO: 135755 - protein, 308 aa, Streptococcus suis; identical to SEQ ID NO: 40153

SEQ ID NO: 135756 - DNA, 1524 bp, Saccharomyces cerevisiae; identical to SEQ ID NO: 40154
  CDS (1)..(1524)

SEQ ID NO: 135757 - protein, 507 aa, Saccharomyces cerevisiae; identical to SEQ ID NO: 40155

SEQ ID NO: 135758 - DNA, 969 bp, Arabidopsis thaliana; identical to SEQ ID NO: 40156
  CDS (1)..(969)

SEQ ID NO: 135759 - protein, 322 aa, Arabidopsis thaliana; identical to SEQ ID NO: 40157

SEQ ID NO: 135760 - DNA, 1280 bp, Brassica juncea; identical to SEQ ID NO: 40158
  CDS (74)..(1042)

SEQ ID NO: 135761 - protein, 322 aa, Brassica juncea; identical to SEQ ID NO: 40159

SEQ ID NO: 135762 - DNA, 1056 bp, Schizosaccharomyces pombe; identical to SEQ ID NO: 40160
  CDS (1)..(1056)

SEQ ID NO: 135763 - protein, 351 aa, Schizosaccharomyces pombe; identical to SEQ ID NO: 40161

SEQ ID NO: 135764 - DNA, 975 bp, Brassica juncea
  CDS (1)..(975)
atggcctctcgtattggtattgctaatgatgtgaccgaattgattgggaacactccgttggtgtatctgaacagtgttgctgaaggatgtgttggtcgcgttgccgctaagcttgagatgatggaaccctgctccagcgtcaaagacaggattggttttagcatgatctctgatgcagagaaaaagggtctgattaaaccaggagagagtgtgttgattgagccaacgagtggaaacacgggagttgggttggcattcacggcggctgccaagggctacaagcttattattaccatgccagcttcaatgagtattgagagaagaatcattctcttagcctttggtgttgagttggttttaactgacccggccaagggcatgaaaggcgctatcgcaaaggcggaagagattttggccaaaacacccaatggttacatgctccaacagtttgagaaccctgctaacccaaagatccactatgagactactggacctgagatttggaaaggcactgagggtaaaatcgatggctttatttctgggattggtactggtggtaccataacaggtgctgggaagtatctcaaggaacagaacccgaacgttaagctgtatggtgtggagccagtcgaaagcgctattctatctggtggaaagccaggccctcacaagattcaagggataggtgctggttttataccaaatgtattggagactaatcttattgatgaagttgttcaagtttcaagtgatgaatccatcgacatggcaaggcttcttgctcgcgaagaaggtcttcttgtgggaatatcatccggtgcagcagctgcagcagcaatcaaacttgcaaagaggccagaaaacgccgggaagcttttcgtggcagtgttcccaagtttcggagagaggtacctgtcgaccgtactgttcgatgccacaaggaaagaagcagaatccatgaccttcgaggcttga

SEQ ID NO: 135765 - protein, 324 aa, Brassica juncea; identical to SEQ ID NO: 40163

SEQ ID NO: 135766 - DNA, 1188 bp, Schizosaccharomyces pombe; identical to SEQ ID NO: 40164
  CDS (1)..(1188)

SEQ ID NO: 135767 - protein, 395 aa, Schizosaccharomyces pombe; identical to SEQ ID NO: 40165

SEQ ID NO: 135768 - DNA, 1215 bp, Arabidopsis thaliana; identical to SEQ ID NO: 40166
  CDS (1)..(1215)

SEQ ID NO: 135769 - protein, 404 aa, Arabidopsis thaliana; identical to SEQ ID NO: 40167

SEQ ID NO: 135770 - DNA, 1293 bp, Arabidopsis thaliana
  CDS (1)..(1293)
atggtggcgatgatcatggcttcaaggtttaaccgggaagctaagctcgcatctcaaatcttgtctacacttttgggaaaccgaagctgctacacatccatggccgccacatcttcctctgctttacttcttaatccgttgacttcttcttcttcttcttctactctccgtcgtttcagatgctcgccagagatctcttctctctccttctcctccgcttctgatttctctctagcgatgaagaggcagagtcggagttttgctgatggttcggaacgagatccgtctgttgtgtgtgaggctgttaagcgcgagactggacctgatggactcaacatcgctgacaatgtgtctcagctcattgggaaaactcctatggtgtacttgaacagtatagcaaaaggttgtgtagcaaatattgctgccaaactcgagatcatggagccatgttgcagtgtcaaggataggattgggtacagtatggttactgatgctgagcaaaaaggatttatatcacctggaaagagtgttcttgtggaacctacaagtggaaacacgggtattggcctagcattcatcgctgcttcaaggggctatagacttatcttgacaatgccagcatccatgagtatggaaagaagggttcttttaaaggcatttggagctgagcttgtattaacagatcctgctaaaggcatgactggagcggttcagaaggctgaagagatcttgaaaaacactcctgatgcatacatgctccaacagtttgacaaccctgcaaatccaaagattcattacgagactactggtcctgagatctgggatgatacaaagggcaaggtggatatctttgttgcaggaattggaactggtggaactatcactggtgttggtcgatttattaaagagaaaaatcccaaaacgcaggttattggtgtagaacccaccgaaagcgatatactttctggtggcaaaccgggacctcacaagattcaaggaattggagctggatttatacctaagaatttggatcagaaaattatggatgaagtcatagcgatttcaagtgaggaagctatagaaaccgcaaagcaactagctcttaaggaaggcttgatggttggtatatcatctggagctgcagctgctgctgcaatcaaggtggctaagagacctgagaatgctggaaaactcatagctgttgttttcccgagcttcggggagagatatctatcgaccccgctgttccagtctatccgggaagaggtggagaaaatgcagcctgaggtatga

SEQ ID NO: 135771 - protein, 430 aa, Arabidopsis thaliana
MVAMIMASRFNREAKLASQILSTLLGNRSCYTSMAATSSSALLLNPLTSSSSSSTLRRFRCSPEISSLSFSSASDFSLAMKRQSRSFADGSERDPSVVCEAVKRETGPDGLNIADNVSQLIGKTPMVYLNSIAKGCVANIAAKLEIMEPCCSVKDRIGYSMVTDAEQKGFISPGKSVLVEPTSGNTGIGLAFIAASRGYRLILTMPASMSMERRVLLKAFGAELVLTDPAKGMTGAVQKAEEILKNTPDAYMLQQFDNPANPKIHYETTGPEIWDDTKGKVDIFVAGIGTGGTITGVGRFIKEKNPKTQVIGVEPTESDILSGGKPGPHKIQGIGAGFIPKNLDQKIMDEVIAISSEEAIETAKQLALKEGLMVGISSGAAAAAAIKVAKRPENAGKLIAVVFPSFGERYLSTPLFQSIREEVEKMQPEV

SEQ ID NO: 135772 - DNA, 1210 bp, Arabidopsis thaliana; identical to SEQ ID NO: 40168
  CDS (1)..(1179)

SEQ ID NO: 135773 - protein, 392 aa, Arabidopsis thaliana; identical to SEQ ID NO: 40169

SEQ ID NO: 135774 - DNA, 1313 bp, Capsicum annuum; identical to SEQ ID NO: 40170
  CDS (2)..(1126)

SEQ ID NO: 135775 - protein, 374 aa, Capsicum annuum; identical to SEQ ID NO: 40171

SEQ ID NO: 135776 - DNA, 1404 bp, Solanum tuberosum; identical to SEQ ID NO: 40172
  CDS (21)..(1181)

SEQ ID NO: 135777 - protein, 386 aa, Solanum tuberosum; identical to SEQ ID NO: 40173

SEQ ID NO: 135778 - DNA, 927 bp, Bacillus subtilis; identical to SEQ ID NO: 40174
  CDS (1)..(927): transl_table=11

SEQ ID NO: 135779 - protein, 308 aa, Bacillus subtilis; identical to SEQ ID NO: 40175

SEQ ID NO: 135780 - DNA, 1855 bp, Citrullus lanatus; identical to SEQ ID NO: 40176
  CDS (564)..(1541)

SEQ ID NO: 135781 - protein, 325 aa, Citrullus lanatus; identical to SEQ ID NO: 40177

SEQ ID NO: 135782 - DNA, 1113 bp, Emericella nidulans; identical to SEQ ID NO: 40178
  CDS (1)..(1113)

SEQ ID NO: 135783 - protein, 370 aa, Emericella nidulans; identical to SEQ ID NO: 40179

SEQ ID NO: 135784 - DNA, 951 bp, Haemophilus influenzae; identical to SEQ ID NO: 40182
  CDS (1)..(951): transl_table=11

SEQ ID NO: 135785 - protein, 316 aa, Haemophilus influenzae; identical to SEQ ID NO: 40183

SEQ ID NO: 135786 - DNA, 1319 bp, Zea mays; identical to SEQ ID NO: 40184
  CDS (73)..(1050)

SEQ ID NO: 135787 - protein, 325 aa, Zea mays; identical to SEQ ID NO: 40185

SEQ ID NO: 135788 - DNA, 933 bp, Mycobacterium bovis; identical to SEQ ID NO: 40186
  CDS (1)..(933): transl_table=11

SEQ ID NO: 135789 - protein, 310 aa, Mycobacterium bovis; identical to SEQ ID NO: 40187

SEQ ID NO: 135790 - DNA, 933 bp, Mycobacterium leprae; identical to SEQ ID NO: 40188
  CDS (1)..(933): transl_table=11

SEQ ID NO: 135791 - protein, 310 aa, Mycobacterium leprae; identical to SEQ ID NO: 40189

SEQ ID NO: 135792 - DNA, 1308 bp, Solanum tuberosum; identical to SEQ ID NO: 40190
  CDS (35)..(1012)

SEQ ID NO: 135793 - protein, 325 aa, Solanum tuberosum; identical to SEQ ID NO: 40191

SEQ ID NO: 135794 - DNA, 1281 bp, Spinacia oleracea; identical to SEQ ID NO: 40192
  CDS (52)..(1029)

SEQ ID NO: 135795 - protein, 325 aa, Spinacia oleracea [sequence omitted]

SEQ ID NO: 135796 - DNA, 933 bp, Staphylococcus epidermidis; identical to SEQ ID NO: 40194
  CDS (1)..(933): transl_table=11

SEQ ID NO: 135797 - protein, 310 aa, Staphylococcus epidermidis; identical to SEQ ID NO: 40195

SEQ ID NO: 135798 - DNA, 1371 bp, Triticum aestivum; identical to SEQ ID NO: 40196
  CDS (72)..(1049)

SEQ ID NO: 135799 - protein, 325 aa, Triticum aestivum; identical to SEQ ID NO: 40197

SEQ ID NO: 135800 - DNA, 1730 bp, Saccharomyces cerevisiae
  CDS (336)..(1517)
aatgtttacagcagagcaacaatcatgtgaacaatgtcaaacatttattttaacacttaataattataatataaccacaccagcggtaagtttcataaggaaaacctttcagacaaacattccagtgaatcgtatacgtaaatcagcaaaattagcttataaaatacagaatccgaagatacttgatctactcgcgttactattaatgcgggtaatgatctatattgaattttgcacgtctatagtaacttaaaagtcttgtaatatttgaagtaacaatgccgtataatactgcataatagccctatcaatcggaatataccaaaacatcctttatgtcctgttctcaaaataagacttctgtcagtctggcctggcgtgaatgcatatccatcgcttccgtcctaattggcgcgtatgcatcatacaaatactataagctgttcaaaacacgcgatattccacgtccaaaagaaggcgttgaagaactcataggaaacactcctctggttaagatcagatctcttaccaaggctactggagttaacatttacgctaagttggagttatgcaacccagcaggaagtgctaaggatagagtggctttaaacatcataaagacggctgaggaattaggcgagctcgtcagaggtgaacctggctgggtatttgaaggaacaagtgggtcgactggtatctctatagcagtggtctgtaatgcgttgggttatagggcacacatttctttgcccgatgacacatcgctagaaaaattggcattactagaaagcctcggtgctactgttaataaggttaagcccgctagtattgtcgatccaaaccaatacgtaaatgccgccaaaaaggcatgtaatgaactaaagaagagtggtaatggaataagagcagtttttgccgatcagttcgaaaacgaagccaactggaaagtacattaccagaccacaggcccagaaattgcccatcaaactaagggaaatattgacgcattcattgctggctgcggtactggtggcaccataactggtgtggcaaaattcttaaaggaaagagcaaagataccttgccatgtcgttctagcggatccacaaggatctggcttttataatagagtcaactatggcgtgatgtatgactatgtagagaaggaaggtactagaagaaggcatcaagttgacactatcgtagaagggattgggttaaacagaatcactcataattttcatatgggcgaaaagtttattgatgaatcaatacgagtcaacgataatcaagccattagaatggcaaaatacctatcggtaaacgacgggctattcgtggggagtagtacagctattaatgcggtagccgctattcaggttgcaaaaacgcttcctcacggctcaaacattgtgattattgcatgcgacagcggttcaagacacctaagtaaattctggaaagaagctaaagaaatcgatcacgacgtgtcattagaagaagtaataaatatctaacatagatgtataaatcagtactgagttatcttctattaaattgtaggaacaaatataaaaaagcagttttcgctgctacattttttgctactttccgtggtaatgatgcccgctaaaaagtgcaaaagtaattagatagatcaagaacaaaaacagaccaggaccaaaatcaagctcataaaagttccttaagagtacgtcgatttacagaac

SEQ ID NO: 135801 - protein, 393 aa, Saccharomyces cerevisiae; identical to SEQ ID NO: 40199

SEQ ID NO: 135802 - DNA, 936 bp, Bacillus subtilis; identical to SEQ ID NO: 40202
  CDS (1)..(936): transl_table=11

SEQ ID NO: 135803 - protein, 311 aa, Bacillus subtilis; identical to SEQ ID NO: 40203

SEQ ID NO: 135804 - DNA, 900 bp, Campylobacter jejuni; identical to SEQ ID NO: 40204
  CDS (1)..(900): transl_table=11

SEQ ID NO: 135805 - protein, 299 aa, Campylobacter jejuni; identical to SEQ ID NO: 40205

SEQ ID NO: 135806 - DNA, 918 bp, Helicobacter pylori J99; identical to SEQ ID NO: 40208
  CDS (1)..(918): transl_table=11

SEQ ID NO: 135807 - protein, 305 aa, Helicobacter pylori J99; identical to SEQ ID NO: 40209

SEQ ID NO: 135808 - DNA, 921 bp, Helicobacter pylori; identical to SEQ ID NO: 40210
  CDS (1)..(921): transl_table=11

SEQ ID NO: 135809 - protein, 306 aa, Helicobacter pylori; identical to SEQ ID NO: 40211

SEQ ID NO: 135810 - DNA, 972 bp, Mycobacterium bovis
  CDS (1)..(972): transl_table=11
atgacacgatacgactcgctgttgcaggccttgggcaacacgccgctggttggcctgcagcgattgtcgccacgctgggatgacgggcgagacggaccgcacgtgcggctgtgggccaagctcgaggaccgcaatccgaccgggtcgatcaaggaccgcccggctgtgcggatgatcgagcaggccgaggccgacgggttgttgcggccgggcgccaccatcctggagcccaccagcggaaacaccggcatttcgctggcgatggcggcccggttgaaggggtaccgattgatctgcgtgatgccggagaacacatcggttgaacggcggcagctgctcgagctctacggcgcgcagattatcttctcggcggccgaaggcgggtccaacactgcggtggccaccgccaaagagctggccgcgaccaacccgtcatgggtgatgctgtaccagtacggcaatcccgccaacaccgactcgcactactgcggcaccggccccgagctgctggccgacctgcccgaaatcacgcacttcgtcgccggcctaggcaccacgggcacgctgatgggcactggccgtttcctgcgcgagcacgttgccaacgtcaagatcgtggcggccgaaccccgctacggtgagggggtatacgccctgcgcaacatggacgaaggctttgtgcccgagctgtatgacccggaaatactgaccgcgcgatattctgtcggcgcggtggacgcagtgcgccgcacccgcgagttggtgcacaccgaaggcatctttgcgggcatctcaaccggcgcggtgctacacgccgcactcggagtcggggccggcgccctggcggccggcgagcgggccgacattgcgttggtggtcgccgacgccgggtggaagtatctgtccaccggcgcctacgccggtagcctggatgacgccgagaccgctctggaagggcaactatgggcatga

SEQ ID NO: 135811 - protein, 323 aa, Mycobacterium bovis
MTRYDSLLQALGNTPLVGLQRLSPRWDDGRDGPHVRLWAKLEDRNPTGSIKDRPAVRMIEQAEADGLLRPGATILEPTSGNTGISLAMAARLKGYRLICVMPENTSVERRQLLELYGAQIIFSAAEGGSNTAVATAKELAATNPSWVMLYQYGNPANTDSHYCGTGPELLADLPEITHFVAGLGTTGTLMGTGRFLREHVANVKIVAAEPRYGEGVYALRNMDEGFVPELYDPEILTARYSVGAVDAVRRTRELVHTEGIFAGISTGAVLHAALGVGAGALAAGERADIALVVADAGWKYLSTGAYAGSLDDAETALEGQLWA

SEQ ID NO: 135812 - DNA, 900 bp, Pseudomonas aeruginosa; identical to SEQ ID NO: 40212
  CDS (1)..(900): transl_table=11

SEQ ID NO: 135813 - protein, 299 aa, Pseudomonas aeruginosa; identical to SEQ ID NO: 40213

SEQ ID NO: 135814 - DNA, 1011 bp, Rhizobium sp
  CDS (1)..(1011): transl_table=11
atgctgcacacgaccgtaacacaattgatcggccagacgccggtcatgtcgatcgacgtgccgggccgcaacgccaccttggttctgaagatcgagaagaacaatcccggcggctcgatgaaggatcgtatggctcgcagcatggtgattgcggcccttcaggatgggcgcctccctccgggcggcacgatcgttgaatcatcgtcgggaaatactggcacggggctggcgctcgcagcgctggaattcgggctgcgcttcattgccgtggtggaccaccatgcagcgcccgacaagatccgcatgatgcgggcgctaggggctgagatccgctatgtcgaaggcgactttcgcgaagacgaggtcgcagtcgtcgagcgccagcgcctcgcagcgcaactcggcgcgcagcttccgggcgcgctgttcatgaaccagtccgacaacccggcaaatccggaaggctataccggcctcgtggacgaactggttgcccagcttcccgacggcatcgacgcctttgtcggctgcgtcgggaccggcggctcgatgaccggaatctcccagcgtctgaagcgtaacaatccggccgtacgcactattgccgtggagccggccggctcgatcgttttcggcaagccggggcacccctattaccagtcaggaacgggcacgcccgccggcgatgaggtcggcaaggtgctggactatggctgcatcgacgaaggcgtgcaggtgaccgatacgcaagccttcgagacggcgcgctacatcgcccgccgcaagggactgctcgttggcggctcgaccggcggcgccatctacaaggcgctggagttcattggcgccggcaagctcaccggcaccgtcgtcacgacggttgccgatggcggcgagaaatatcttggcacgattttcgatgaggaatggatggcgaagcgccgcctgctcgacccggcaatcgctgcccagttggatggctggctattcggaaaggcgcgggcagcatga

SEQ ID NO: 135815 - protein, 336 aa, Rhizobium sp
MLHTTVTQLIGQTPVMSIDVPGRNATLVLKIEKNNPGGSMKDRMARSMVIAALQDGRLPPGGTIVESSSGNTGTGLALAALEFGLRFIAVVDHHAAPDKIRMMRALGAEIRYVEGDFREDEVAVVERQRLAAQLGAQLPGALFMNQSDNPANPEGYTGLVDELVAQLPDGIDAFVGCVGTGGSMTGISQRLKRNNPAVRTIAVEPAGSIVFGKPGHPYYQSGTGTPAGDEVGKVLDYGCIDEGVQVTDTQAFETARYIARRKGLLVGGSTGGAIYKALEFIGAGKLTGTVVTTVADGGEKYLGTIFDEEWMAKRRLLDPAIAAQLDGWLFGKARAA

SEQ ID NO: 135816 - DNA, 1188 bp, Oryza sativa; identical to SEQ ID NO: 40216
  CDS (1)..(1188)

SEQ ID NO: 135817 - protein, 395 aa, Oryza sativa; identical to SEQ ID NO: 40217

SEQ ID NO: 135818 - DNA, 1023 bp, Oryza sativa; identical to SEQ ID NO: 40218
  CDS (1)..(1023)

SEQ ID NO: 135819 - protein, 340 aa, Oryza sativa; identical to SEQ ID NO: 40219

SEQ ID NO: 135820 - DNA, 1179 bp, Brassica napus; identical to SEQ ID NO: 40222
  CDS (1)..(1179)

SEQ ID NO: 135821 - protein, 392 aa, Brassica napus; identical to SEQ ID NO: 40223

SEQ ID NO: 135822 - DNA, 1179 bp, Brassica napus; identical to SEQ ID NO: 40224
  CDS (1)..(1179)

SEQ ID NO: 135823 - protein, 392 aa, Brassica napus; identical to SEQ ID NO: 40225

SEQ ID NO: 135824 - DNA, 972 bp, Brassica napus; identical to SEQ ID NO: 40226
  CDS (1)..(972)

SEQ ID NO: 135825 - protein, 323 aa, Brassica napus; identical to SEQ ID NO: 40227

SEQ ID NO: 135826 - DNA, 1191 bp, Zea mays
  CDS (1)..(1191)
atgtcgtcgtggtcgtcgccctcatccgccgccgccgcctcgggcgcccgattcggccccttcccgagccgagcgcagcggctcgtgccgtatccgtcgctcgcccgcggaacccccgcctcgacgctcgtcctcaggccccacccggacggccgtggccatggccacctcgcgcacaccggctcctcttcctcgcggtgccgcgccgtagccgccgaggtcgagggcctcaacatcgccaaccacgtcagccagctcatcggcaagacaccaatggtatatctcaacaatgtcgtcaagggctctgtcgccaatgttgctgctaagcttgagattatggagccctgttgtagcgtcaaggacaggatagggtacagtatgataaatgatgctgaacagaagggcttgattactcctggaaagagtgttttagtggaagcaacaagtggaaatacaggcattggtcttgcctttattgctgcttccaaaggatataagttgatattaacaatgccttcatcaatgagcatggagagaagagtcctactcagagcttttggtgctgaacttgtccttactgatgctgcaaaagggatgaaaggggccgtagataaggctacagagattttaaataagacacccaattcttacatgcttcaacagtttgataaccctgccaaccctaaggtacattatgagaccactggcccagagatctgggaggattcaaaggggaaggtggatatactcattggcggaattggaacaggtgggacaatatctggtgctggccgtttcctcaaggagaaaaattctggaattaaggttattggtattgagccttctgaaagtaacatactctccggtggaaaacctggtccacataagattcagggaattggtgcaggatttgttccaaggaacttggatagcgatattcttgatgaagtaattgagatatcaagtgatgaagctgttgagacagcaaaacagttggctgttcaggaaggattactggttggaatctcctctggagcagctgctgccgctgccataaaggttgcgaaaagaccagaaaatgctggaaagttgatagtggttgtgtttccgagttttggcgagaggtacctttcatctgtcctctatcagtccataagagaagaatgcgagaacatgcagcctgagccatga

SEQ ID NO: 135827 - protein, 396 aa, Zea mays; identical to SEQ ID NO: 40287

SEQ ID NO: 135828 - DNA, 1197 bp, Zea mays; identical to SEQ ID NO: 40232
  CDS (1)..(1197)

SEQ ID NO: 135829 - protein, 398 aa, Zea mays; identical to SEQ ID NO: 40233

SEQ ID NO: 135830 - DNA, 1047 bp, Hordeum vulgare; identical to SEQ ID NO: 40234
  CDS (1)..(1047)

SEQ ID NO: 135831 - protein, 348 aa, Hordeum vulgare; identical to SEQ ID NO: 40235

SEQ ID NO: 135832 - DNA, 1140 bp, Hordeum vulgare; identical to SEQ ID NO: 40236
  CDS (1)..(1140)

SEQ ID NO: 135833 - protein, 379 aa, Hordeum vulgare; identical to SEQ ID NO: 40237

SEQ ID NO: 135834 - DNA, 1137 bp, Helianthus annuus; identical to SEQ ID NO: 40240
  CDS (1)..(1137)

SEQ ID NO: 135835 - protein, 378 aa, Helianthus annuus; identical to SEQ ID NO: 40241

SEQ ID NO: 135836 - DNA, 1050 bp, Zea mays; identical to SEQ ID NO: 40242
  CDS (1)..(1050)

SEQ ID NO: 135837 - protein, 349 aa, Zea mays; identical to SEQ ID NO: 40243

SEQ ID NO: 135838 - DNA, 1047 bp, Brassica napus; identical to SEQ ID NO: 40244
  CDS (1)..(1047)

SEQ ID NO: 135839 - protein, 348 aa, Brassica napus; identical to SEQ ID NO: 40245

SEQ ID NO: 135840 - DNA, 969 bp, Brassica napus; identical to SEQ ID NO: 40246
  CDS (1)..(969)

SEQ ID NO: 135841 - protein, 322 aa, Brassica napus; identical to SEQ ID NO: 40247

SEQ ID NO: 135842 - DNA, 1290 bp, Brassica napus; identical to SEQ ID NO: 40248
  CDS (1)..(1290)

SEQ ID NO: 135843 - protein, 429 aa, Brassica napus; identical to SEQ ID NO: 40249

SEQ ID NO: 135844 - DNA, 1107 bp, Brassica napus; identical to SEQ ID NO: 40250
  CDS (1)..(1107)

SEQ ID NO: 135845 - protein, 368 aa, Brassica napus; identical to SEQ ID NO: 40251

SEQ ID NO: 135846 - DNA, 1191 bp, Brassica napus; identical to SEQ ID NO: 40252
  CDS (1)..(1191)

SEQ ID NO: 135847 - protein, 396 aa, Brassica napus; identical to SEQ ID NO: 40253

SEQ ID NO: 135848 - DNA, 969 bp, Brassica napus; identical to SEQ ID NO: 40254
  CDS (1)..(969)

SEQ ID NO: 135849 - protein, 322 aa, Brassica napus; identical to SEQ ID NO: 40255

SEQ ID NO: 135850 - DNA, 1293 bp, Brassica napus; identical to SEQ ID NO: 40256
  CDS (1)..(1293)

SEQ ID NO: 135851 - protein, 430 aa, Brassica napus; identical to SEQ ID NO: 40257

SEQ ID NO: 135852 - DNA, 1119 bp, Glycine max; identical to SEQ ID NO: 40258
  CDS (1)..(1119)

SEQ ID NO: 135853 - protein, 372 aa, Glycine max; identical to SEQ ID NO: 40259

SEQ ID NO: 135854 - DNA, 1278 bp, Glycine max
  CDS (1)..(1278)
atggcggctgtggcagcgagaagcacaggcagcgttggtgttggtgctgtcatcttcatctcagtcgctctcaccacttatttcatctcgaaaaagaagaagaagaagaagaaggaatccaggaagaagaagaagggactggtggacgccataggcaacactcctttgattcggatcaacagcctctccgccgccactggttgccaaattctcggcaagtgcgagttcttaaaccccggaggcagcgtcaaagaccgcgttgctgttcaaattattcaagaggctctagaatctggccagctacgtccaggtggaatagtcactgaagggagtgctggaagcactgccattagcattgccactgttgctcctgcctacgggtgcaggacccatgtggttataccagatgatgctgccattgagaagtctcaaatacttgaagcccttggggcaactgttgaaagagtgagaccggtgtccatcacccacaaagaccattttgtcaatatcgcaagaagacgggcatctgaagcaaatgagtttgcattgaagcgtacaaattcacaacaattgaatggcaaggaggacaccgagaaaataaatggttatgaatctgatggatgcagttacagctctctgtttcctgaagattgccaaggtggcttttttgctgatcagtttgagaacctagcgaacttcagggcccattatgagggtacagggcctgagatttgggaacagaccaatggaaagttagatgcatttgttgcagcagcgggtaccggtggtactgtggctggtgtttctaagtttcttcaggaaaagaatccaaacatcaagtgcttcctcttagatcctcctggctctggtttgtttaataaggtaaccaggggagtgatgtacaccaaagaggaggcagaaggaagaagactcaagaatccatttgacactataacagaaggaattggaattaacaggataacaaggaattttgcaatggcaaaacttgatggggcctttagaggcaccgatagggaagctgttgaaatgtctaggtttcttttgaagaacgatggtctcttccttgggagttcttctgcaatgaactgtgttggagcagttagagtagcgcaagcaattggcactggtcacacaattgtaaccattctctgcgacagtggaatgagacatttgagcaaattctatgatgctgaatacttgtctcagcttggtttgacaccgaaagcaattggtttggagttcttaggcgtcaagtga

SEQ ID NO: 135855 - protein, 425 aa, Glycine max
MAAVAARSTGSVGVGAVIFISVALTTYFISKKKKKKKKESRKKKKGLVDAIGNTPLIRINSLSAATGCQILGKCEFLNPGGSVKDRVAVQIIQEALESGQLRPGGIVTEGSAGSTAISIATVAPAYGCRTHVVIPDDAAIEKSQILEALGATVERVRPVSITHKDHFVNIARRRASEANEFALKRTNSQQLNGKEDTEKINGYESDGCSYSSLFPEDCQGGFFADQFENLANFRAHYEGTGPEIWEQTNGKLDAFVAAAGTGGTVAGVSKFLQEKNPNIKCFLLDPPGSGLFNKVTRGVMYTKEEAEGRRLKNPFDTITEGIGINRITRNFAMAKLDGAFRGTDREAVEMSRFLLKNDGLFLGSSSAMNCVGAVRVAQAIGTGHTIVTILCDSGMRHLSKFYDAEYLSQLGLTPKAIGLEFLGVK

SEQ ID NO: 135856 - DNA, 1170 bp, Glycine max; identical to SEQ ID NO: 40260
  CDS (1)..(1170)

SEQ ID NO: 135857 - protein, 389 aa, Glycine max; identical to SEQ ID NO: 40261

SEQ ID NO: 135858 - DNA, 972 bp, Glycine max; identical to SEQ ID NO: 40262
  CDS (1)..(972)

SEQ ID NO: 135859 - protein, 323 aa, Glycine max; identical to SEQ ID NO: 40263

SEQ ID NO: 135860 - DNA, 1122 bp, Hordeum vulgare; identical to SEQ ID NO: 40266
  CDS (1)..(1122)

SEQ ID NO: 135861 - protein, 373 aa, Hordeum vulgare; identical to SEQ ID NO: 40267

SEQ ID NO: 135862 - DNA, 972 bp, Brassica napus; identical to SEQ ID NO: 40268
  CDS (1)..(972)

SEQ ID NO: 135863 - protein, 323 aa, Brassica napus; identical to SEQ ID NO: 40269

SEQ ID NO: 135864 - DNA, 978 bp, Triticum aestivum; identical to SEQ ID NO: 40270
  CDS (1)..(978)

SEQ ID NO: 135865 - protein, 325 aa, Triticum aestivum; identical to SEQ ID NO: 40271

SEQ ID NO: 135866 - DNA, 1137 bp, Triticum aestivum; identical to SEQ ID NO: 40272
  CDS (1)..(1137)

SEQ ID NO: 135867 - protein, 378 aa, Triticum aestivum; identical to SEQ ID NO: 40273

SEQ ID NO: 135868 - DNA, 1047 bp, Triticum aestivum; identical to SEQ ID NO: 40274
  CDS (1)..(1047)

SEQ ID NO: 135869 - protein, 348 aa, Triticum aestivum; identical to SEQ ID NO: 40275

SEQ ID NO: 135870 - DNA, 1104 bp, Triticum aestivum; identical to SEQ ID NO: 40276
  CDS (1)..(1104)

SEQ ID NO: 135871 - protein, 367 aa, Triticum aestivum; identical to SEQ ID NO: 40277

SEQ ID NO: 135872 - DNA, 978 bp, Triticum aestivum; identical to SEQ ID NO: 40278
  CDS (1)..(978)

SEQ ID NO: 135873 - protein, 325 aa, Triticum aestivum; identical to SEQ ID NO: 40279

SEQ ID NO: 135874 - DNA, 1155 bp, Zea mays; identical to SEQ ID NO: 40290
  CDS (1)..(1155)

SEQ ID NO: 135875 - protein, 384 aa, Zea mays; identical to SEQ ID NO: 40291

SEQ ID NO: 135876 - DNA, 1041 bp, Zea mays; identical to SEQ ID NO: 40280
  CDS (1)..(1041)

SEQ ID NO: 135877 - protein, 346 aa, Zea mays; identical to SEQ ID NO: 40281

SEQ ID NO: 135878 - DNA, 1323 bp, Zea mays; identical to SEQ ID NO: 40282
  CDS (1)..(1323)

SEQ ID NO: 135879 - protein, 440 aa, Zea mays; identical to SEQ ID NO: 40283

SEQ ID NO: 135880 - DNA, 1191 bp, Zea mays; identical to SEQ ID NO: 40284
  CDS (1)..(1191)

SEQ ID NO: 135881 - protein, 396 aa, Zea mays; identical to SEQ ID NO: 40285

SEQ ID NO: 135882 - DNA, 978 bp, Zea mays; identical to SEQ ID NO: 40288
  CDS (1)..(978)

SEQ ID NO: 135883 - protein, 325 aa, Zea mays; identical to SEQ ID NO: 40289

SEQ ID NO: 135884 - DNA, 1191 bp, Zea mays
  CDS (1)..(1191)
atggcgtcgtggtcgtcgccctcatccgccgccgccgcctcgggcgcccgattcggccccttcccgagccgagcgcagcggctcgtgccgtatccgtcgctcgcccgcggaacccccgcctcgacgctcgtcctcaggccccacccggacggccgtggccatggcctcctcgcgcacaccggctcctcttcctcgcggtgccgcgccgtcgccgccgaggtcgagggcctcaacatcgccaaccacgtcagccagctcatcggcaagacaccaatggtatatatcaacaatgtcgtcaagggctctgtcgccaatgttgctgctaagcttgagattatggagccctgttgtagcgtcaaggacaggatagggtacagtatgataaatgatgctgaacagaagggcttgattactcctggaaagagtgttttagtggaagctacaagtggaaatacaggcattggtcttgcctttattgctgcttccaaaggatataagttgatattaacaatgccttcatcaatgagcatggagagaagagtcctactcagagcttttggtgctgaacttgtccttactgatgctgcaaaagggatgaaaggagccgtagataaggctacagagattttaaataagacacccaattcttacatgcttcaacagtttgataaccctgccaaccctaaggtacattatgagaccactggcccagagatctgggaggattcaaaggggaaggtggatatactaattggtggaattggaacaggcgggacaatatctggtgctggccgtttcctcaaggagaaaaattctggaattaaggttattggtattgagccttctgaaagtaacatactctccggtggaaaacctggtccacataagattcagggaattggtgcaggatttgttccaaggaacttggatagcgatattcttgatgaagtaattgagatatcaagtgatgaagctgttgagactgcaaaacagttggctgttcaggaaggattactggttggaatctcctctggagcagctgctgccgctgccataaaggttgcgaaaagaccagaaaatgctggaaagttgatagtggttgtgtttccgagttttggcgagaggtacctttcatctgtcctttatcagtccataagagaagaatgcgagaacatgcagcctgagccatga

SEQ ID NO: 135885 - protein, 396 aa, Zea mays
MASWSSPSSAAAASGARFGPFPSRAQRLVPYPSLARGTPASTLVLRPHPDGRGHGLLAHTGSSSSRCRAVAAEVEGLNIANHVSQLIGKTPMVYINNVVKGSVANVAAKLEIMEPCCSVKDRIGYSMINDAEQKGLITPGKSVLVEATSGNTGIGLAFIAASKGYKLILTMPSSMSMERRVLLRAFGAELVLTDAAKGMKGAVDKATEILNKTPNSYMLQQFDNPANPKVHYETTGPEIWEDSKGKVDILIGGIGTGGTISGAGRFLKEKNSGIKVIGIEPSESNILSGGKPGPHKIQGIGAGFVPRNLDSDILDEVIEISSDEAVETAKQLAVQEGLLVGISSGAAAAAAIKVAKRPENAGKLIVVVFPSFGERYLSSVLYQSIREECENMQPEP

SEQ ID NO: 135886 - DNA, 27 bp, Artificial sequence
  primer
atgagtacattagaacaaacaataggc

SEQ ID NO: 135887 - DNA, 21 bp, Artificial sequence
  primer
ttaaatccccgccccctggct

SEQ ID NO: 135888 - protein, 512 aa, Artificial sequence
  consensus sequence
  Variant (2)..(2): Xaa in position 2 is any amino acid
  Variant (3)..(4): Xaa in position 3 to 4 is any or no amino acid
  Variant (7)..(9): Xaa in position 7 to 9 is any amino acid
  Variant (11)..(17): Xaa in position 11 to 17 is any amino acid
  Variant (18)..(30): Xaa in position 18 to 30 is any or no amino acid
  Variant (32)..(32): Xaa in position 32 is any amino acid
  Variant (34)..(36): Xaa in position 34 to 36 is any amino acid
  Variant (37)..(37): Xaa in position 37 is any or no amino acid
  Variant (39)..(40): Xaa in position 39 to 40 is any amino acid
  Variant (41)..(42): Xaa in position 41 to 42 is any or no amino acid
  Variant (48)..(51): Xaa in position 48 to 51 is any amino acid
  Variant (53)..(55): Xaa in position 53 to 55 is any amino acid
  Variant (58)..(59): Xaa in position 58 to 59 is any amino acid
  Variant (61)..(65): Xaa in position 61 to 65 is any amino acid
  Variant (66)..(74): Xaa in position 66 to 74 is any or no amino acid
  Variant (76)..(76): Xaa in position 76 is any amino acid
  Variant (83)..(83): Xaa in position 83 is any amino acid
  Variant (85)..(85): Xaa in position 85 is any amino acid
  Variant (88)..(93): Xaa in position 88 to 93 is any amino acid
  Variant (96)..(100): Xaa in position 96 to 100 is any amino acid
  Variant (103)..(105): Xaa in position 103 to 105 is any amino acid
  Variant (107)..(107): Xaa in position 107 is any amino acid
  Variant (109)..(116): Xaa in position 109 to 116 is any amino acid
  Variant (119)..(132): Xaa in position 119 to 132 is any amino acid
  Variant (133)..(173): Xaa in position 133 to 173 is any or no amino acid
  Variant (175)..(183): Xaa in position 175 to 183 is any amino acid
  Variant (184)..(250): Xaa in position 184 to 250 is any or no amino acid
  Variant (253)..(253): Xaa in position 253 is any amino acid
  Variant (255)..(256): Xaa in position 255 to 256 is any amino acid
  Variant (257)..(257): Xaa in position 257 is any or no amino acid
  Variant (259)..(260): Xaa in position 259 to 260 is any amino acid
  Variant (261)..(262): Xaa in position 261 to 262 is any or no amino acid
  Variant (264)..(265): Xaa in position 264 to 265 is any amino acid
  Variant (266)..(266): Xaa in position 266 is any or no amino acid
  Variant (268)..(269): Xaa in position 268 to 269 is any amino acid
  Variant (272)..(273): Xaa in position 272 to 273 is any amino acid
  Variant (274)..(276): Xaa in position 274 to 276 is any or no amino acid
  Variant (278)..(281): Xaa in position 278 to 281 is any amino acid
  Variant (282)..(287): Xaa in position 282 to 287 is any or no amino acid
  Variant (289)..(291): Xaa in position 289 to 291 is any amino acid
  Variant (297)..(298): Xaa in position 297 to 298 is any amino acid
  Variant (300)..(315): Xaa in position 300 to 315 is any amino acid
  Variant (316)..(368): Xaa in position 316 to 368 is any or no amino acid
  Variant (370)..(382): Xaa in position 370 to 382 is any amino acid
  Variant (383)..(420): Xaa in position 383 to 420 is any or no amino acid
  Variant (422)..(446): Xaa in position 422 to 446 is any amino acid
  Variant (447)..(450): Xaa in position 447 to 450 is any or no amino acid
  Variant (452)..(454): Xaa in position 452 to 454 is any amino acid
  Variant (457)..(459): Xaa in position 457 to 459 is any amino acid
  Variant (461)..(461): Xaa in position 461 is any amino acid
  Variant (463)..(463): Xaa in position 463 is any amino acid
  Variant (465)..(466): Xaa in position 465 to 466 is any amino acid
  Variant (467)..(468): Xaa in position 467 to 468 is any or no amino acid
  Variant (471)..(487): Xaa in position 471 to 487 is any amino acid
  Variant (488)..(503): Xaa in position 488 to 503 is any or no amino acid
  Variant (505)..(505): Xaa in position 505 is any amino acid
  Variant (506)..(508): Xaa in position 506 to 508 is any or no amino acid
GXXXTPXXXLXXXXXXXXXXXXXXXXXXXXKXEXXXXPXXXXSVKDRXXXXMXXXAEXXGXXXXXXXXXXXXXXEXTSGNTGXIXLAXXXXXXGYXXXXXMPXXXSXEXXXXXXXXGAXXXXXXXXXXXXXXXXXXXXXXXXXXXXXXXXXXXXXXXXXXXXXXXXXXXXXXXAXXXXXXXXXXXXXXXXXXXXXXXXXXXXXXXXXXXXXXXXXXXXXXXXXXXXXXXXXXXXXXXXXXXXXXXXXXXXQFXNXXXNXXXXHXXXTXXEIXXXXXGXXXXXXXXXXVXXXGTGGTXXGXXXXXXXXXXXXXXXXXXXXXXXXXXXXXXXXXXXXXXXXXXXXXXXXXXXXXXXXXXXXXXXXXXXXXPXXXXXXXXXXXXXXXXXXXXXXXXXXXXXXXXXXXXXXXXXXXXXXXXXXXPXXXXXXXXXXXXXXXXXXXXXXXXXXXXXLXXXEGXXXGXSXGXXXXAAXXXXXXXXXXXXXXXXXXXXXXXXXXXXXXXXXGXXXXRYLS

SEQ ID NO: 135889 - protein, 12 aa, Artificial sequence
  protein pattern
  Variant (2)..(2): Xaa in position 2 is Ala, Gly, Pro or Ser
  Variant (4)..(4): Xaa in position 4 is Ala, Gly, Ser or Thr
  Variant (9)..(9): Xaa in position 9 is Ile, Leu, Met or Val
  Variant (10)..(10): Xaa in position 10 is Ala, Gly or Ser
EXTXGNTGXXLA

SEQ ID NO: 135890 - protein, 19 aa, Artificial sequence
  protein pattern
  Variant (2)..(2): Xaa in position 2 is Phe or Tyr
  Variant (3)..(3): Xaa in position 3 is any amino acid
  Variant (5)..(5): Xaa in position 5 is any amino acid
  Variant (6)..(6): Xaa in position 6 is Ala, Asp, Asn or Ser
  Variant (8)..(10): Xaa in position 8 to 10 is any amino acid
  Variant (12)..(14): Xaa in position 12 to 14 is any amino acid
  Variant (16)..(16): Xaa in position 16 is Ala or Gly
  Variant (17)..(17): Xaa in position 17 is any amino acid
QXXNXXNXXXHXXXTXXEI

SEQ ID NO: 135891 - protein, 14 aa, Artificial sequence
  protein pattern
  Variant (2)..(2): Xaa in position 2 is any amino acid
  Variant (4)..(5): Xaa in position 4 to 5 is any amino acid
  Variant (6)..(6): Xaa in position 6 is Glu, Asn or Gln
  Variant (8)..(9): Xaa in position 8 to 9 is any amino acid
  Variant (11)..(11): Xaa in position 11 is any amino acid
KXEXXXPXXSXKDR

SEQ ID NO: 135892 - protein, 19 aa, Artificial sequence
  protein pattern
  Variant (2)..(2): Xaa in position 2 is Ala, Asp, Glu or Ser
  Variant (3)..(4): Xaa in position 3 to 4 is any amino acid
  Variant (5)..(5): Xaa in position 5 is Ala, Ser or Thr
  Variant (6)..(6): Xaa in position 6 is any amino acid
  Variant (7)..(7): Xaa in position 7 is Asp or Glu
  Variant (8)..(8): Xaa in position 8 is Lys or Arg
  Variant (9)..(11): Xaa in position 9 to 11 is any amino acid
  Variant (12)..(12): Xaa in position 12 is Ile, Leu or Met
  Variant (13)..(15): Xaa in position 13 to 15 is any amino acid
  Variant (18)..(18): Xaa in position 18 is any amino acid
  Variant (19)..(19): Xaa in position 19 is Phe, Ile, Leu or Val
PXXXXXXXXXXXXXXGAXX

SEQ ID NO: 135893 - DNA, 1188 bp, Escherichia coli; identical to SEQ ID NO: 14126
  CDS (1)..(1188): transl_table=11

SEQ ID NO: 135894 - protein, 395 aa, Escherichia coli; identical to SEQ ID NO: 14127

SEQ ID NO: 135895 - DNA, 1191 bp, Vibrio cholerae
  CDS (1)..(1191): transl_table=11
atgtcagaaggtaaaaagacccgcctcgttaccgcgggacgcaacaaaaaatggacacttggcgtggttaaccccccagtacaacgcgcttctactgtggtgtttgatacggtcgcacaaaaaaaccaagcggcgatcaatcgcgccaacaaaaccctgttttacggacgtcgtggcaccacaactcacttcgcgtttcaagaagcaatggttgagattgaaggcggcgcgggttgcgtgctctacccttgtggcgcagcggccatcaccaacgcgattctctcttttgttgcgcaaggtgaccatatcttgatggtcgatacctgttacgaacccacccgtgacttttgtgagaaagtcctgaaaaaacttggtgtatcaaccacctattatgatcctatgcttggcgaaggtattcgcgagttgattcaacctaataccaaggttctgtttaccgaatcaccgggctcactgaccatggaagtgcaggatattccgacactctctcgcatcgctcacgagcacgacatcgttgtcatgttggataacacttgggcggctggggtactgttctcacccttcgaacatggcgtcgatatttccattcaagcagcgaccaaatacattgtcggtcattctgatgtgatgctcggtactgcggtcgccaatgagaagtgttgggcacaactgcgtgaacacagctatttgatgggacaatatgcctcacctgacgatgtgtacatggcaatgcgtggattgcgcaccctcgatgtacgtttacgccagcatgaacaaaacagtttacagattgcccagtggttgcaaactcgcccagaagtcgatcatgttcgccaccctgcgttagcgacctgtccggggcacgagtttttcgaacgtgattttactggcggcaatggcttgttctcttttgtgttgaaaacgacgcatccagaagccacaaccgctctactcgatggcatgcaacacttcagcatgggcttttcttggggtggatttgaaagtttgatcttagcccacgaacccaaagcctttacctctcttcgctcagtcgcaaaccctcacttctgcggcactctactccgggttcatatcgggttagaagatgtcgaagatttaatcgccgatctggaagcgggttttgcgcgctacaaccaaatcctgcatgcatag

SEQ ID NO: 135896 - protein, 396 aa, Vibrio cholerae
MSEGKKTRLVTAGRNKKWTLGVVNPPVQRASTVVFDTVAQKNQAAINRANKTLFYGRRGTTTHFAFQEAMVEIEGGAGCVLYPCGAAAITNAILSFVAQGDHILMVDTCYEPTRDFCEKVLKKLGVSTTYYDPMLGEGIRELIQPNTKVLFTESPGSLTMEVQDIPTLSRIAHEHDIVVMLDNTWAAGVLFSPFEHGVDISIQAATKYIVGHSDVMLGTAVANEKCWAQLREHSYLMGQYASPDDVYMAMRGLRTLDVRLRQHEQNSLQIAQWLQTRPEVDHVRHPALATCPGHEFFERDFTGGNGLFSFVLKTTHPEATTALLDGMQHFSMGFSWGGFESLILAHEPKAFTSLRSVANPHFCGTLLRVHIGLEDVEDLIADLEAGFARYNQILHA

SEQ ID NO: 135897 - DNA, 1191 bp, Haemophilus influenzae
  CDS (1)..(1191): transl_table=11
atgcaaacaaaatatgatctttcaacaatgtttattcattctggtcgtcaaaaacgtttttcacaaggatcggtaaaccctgttttacagcgagcttcttcattactatttgacagtattgaagataaaaaacacgctactcaacgtagagcaaaaggcgaattattttatggcagaagagggacgctaacacattttgctttacaagatttaatgtgcgaaatggaggggggggcaggttgttatctttatccttgtggtacagcagcagtaactaattcgattctttcttttgttaaaactggcgatcatgtgctaatgagtggcgcagcttacgagccaacccaatatttctgtaatattgtgctgaaaaaaatgcagatcgatataacttattacgatcctcttattggtgaagatattgcaacgcttattcaaccgaatacaaaagtacttttcttagaagcaccgagttctattacaatggaaattcccgatattccgactattgtgaaggctgcaagaaaggtgaaccctaatattgtgattatgattgataatacttggtcggcaggtgttctatttaaagcgttagagcatgatattgatatttctattcaggcgggtacgaaatatttagtgggtcattcagatattatgattggtactgccgttgcgaatgcgcgaacttgggatcaacttagagaacattcctatttaatggggcaaatggttgatgcagattccgcttatacgactgctcgtggtatccgtacattgggggtacgattaaaacaacatcaggaaagcagtattaaagtggcaaaatggttgagtgagcaaccagaagtaaaaactgtgtaccatccagctttaccaagttgccctggtcatgaattctttttacgtgattttagtggaagcagtggtttattttcttttgaattaacccagcgattaacttcagagcaagtatcaaaatttatggatcattttcaactgttcgctatggcttattcatggggaggatttgagtctctaattctttgtaatcaaccagaagaaattgcacatattcgtccaaatattaaacgtaatcttacaggttcattaattcgtgtgcatattggttttgaaaatgtggatgaactaattgcagatttgaaagctggttttgagcgaattgcttaa

SEQ ID NO: 135898 - protein, 396 aa, Haemophilus influenzae
MQTKYDLSTMFIHSGRQKRFSQGSVNPVLQRASSLLFDSIEDKKHATQRRAKGELFYGRRGTLTHFALQDLMCEMEGGAGCYLYPCGTAAVTNSILSFVKTGDHVLMSGAAYEPTQYFCNIVLKKMQIDITYYDPLIGEDIATLIQPNTKVLFLEAPSSITMEIPDIPTIVKAARKVNPNIVIMIDNTWSAGVLFKALEHDIDISIQAGTKYLVGHSDIMIGTAVANARTWDQLREHSYLMGQMVDADSAYTTARGIRTLGVRLKQHQESSIKVAKWLSEQPEVKTVYHPALPSCPGHEFFLRDFSGSSGLFSFELTQRLTSEQVSKFMDHFQLFAMAYSWGGFESLILCNQPEEIAHIRPNIKRNLTGSLIRVHIGFENVDELIADLKAGFERIA

SEQ ID NO: 135899 - DNA, 1188 bp, Photobacterium profundum
  CDS (1)..(1188): transl_table=11
atggaaaaaaaagcattagatacaaaaatcataacagcaggtcgctcgaaaaagtggacccagcatctagttaatccacctgtaagccgtgcatcaacaattgtatttgataccgttgctgaaatgaaacatgccactgccaaccgtgcgaataaagagctcttttatggacgccgtggtacgaatacgcattttgcttttcaagacgcaatggttgaactggaaggcggtgttggctgtgcattatatccttgtggtacggctgctatctcaaatgccattttatcgtttgtgaaaacaggcgatcatatcttaatggttgatggcacttacgagccaacgcgtgatttctgtgacaaaattttagataagatgggcgttgaaacaacctattatgacccgatggtcggcgaaggtattcgcgatcttattcgcccgaatacaacggttctattcttagagtctccatgctctatcacgatggaagtgcaagatgtgccgttactcgcgagtattgcacatgagcatgatatcgtcgtgatgttggataatacgtgggcatcaccgattaatttccagccattcgatcatggcgttgatatctcgattcaagcggcaacaaaatatattgtgggtcattcggatgtaatgttaggcacagcaacagcgaatgaacgctgctgggatcaattacgtgaaggtagctatttgatggggcagtgcacctcgccagatgatgtttatcttgctatgcgcgggctacgtacattaggcgttcgtttaaggcagcacgaaaaaaacagcatcaaagttgctcaatggttatctgagcgcgaagaagtggatcatgttcgccatcctgcctttgaaagctgtgaaggtcatgagatttacaagcgcgatttcaaagggtgtaacggtttattctctttggtactgaagcgcggtaatactgcagcgttaacggcgttattagacggcatggagcacttcagcatgggctattcatggggcggttttgaaagcctaatattagcgaatgaaaatgttaactctatacgtacagcgaaaaagaaagaatttgttggaccaatgctgcgtctacacgtgggcttagaagatgttgatgatttgattcgagatcttgaaaaaggttttgaacgttttaatgctgtgcttgagcaataa

SEQ ID NO: 135900 - protein, 395 aa, Photobacterium profundum
MEKKALDTKIITAGRSKKWTQHLVNPPVSRASTIVFDTVAEMKHATANRANKELFYGRRGTNTHFAFQDAMVELEGGVGCALYPCGTAAISNAILSFVKTGDHILMVDGTYEPTRDFCDKILDKMGVETTYYDPMVGEGIRDLIRPNTTVLFLESPCSITMEVQDVPLLASIAHEHDIVVMLDNTWASPINFQPFDHGVDISIQAATKYIVGHSDVMLGTATANERCWDQLREGSYLMGQCTSPDDVYLAMRGLRTLGVRLRQHEKNSIKVAQWLSEREEVDHVRHPAFESCEGHEIYKRDFKGCNGLFSLVLKRGNTAALTALLDGMEHFSMGYSWGGFESLILANENVNSIRTAKKKEFVGPMLRLHVGLEDVDDLIRDLEKGFERFNAVLEQ

SEQ ID NO: 135901 - DNA, 1194 bp, Bradyrhizobium sp. ORS278
  CDS (1)..(1194): transl_table=11
atggcatcctcgaacgaccccgcttcggcggtgcgacaaaacgtcgaaacacggctggtcacggtgggacgggacaccaaggcgcagcacggattcgtgaatccgccggtcgtgcatggctcgaccgtgctgtatcccaccgcggaggatctgcatgcacaccgcggcgaattccagtatggccgccacggcacaccgacgacgaaagcgctgcagcaggccttgatggccctcgaaggtccgcaatgcgcaggcgtcggaatcgcgccgtccggtctcggagccatctccacgaccctgctgtcggtgctgaaggccggggaccatgttctggtctgcgacagcatttatcgtcccacccgaaatttctgcaacggtatgctggcgcgctacggcgtcgaaacgacctatttcgatccattgatcggcacaggaattgagcaactgctcaaaccgaatacacgcgcggtggttgtcgaggcgcccggctcgcagtccttcgaaatgccggacattccggcgattgcagcggtggcgcatgcgcatggcgcgctggtcatcgacgacaacacctgggccacgccgctgtaccaccgctccctcgaccagggcgtcgacatcagcatgcaggcggccaccaaatatatcggcggccactccgacatcatgttcggcacgatttcggccaacgcgaaggcgtggccgctgatctccgaaggcatccgcctgcttggcgtctgcgccggccccgacgacgtgttcctcgccctgcgcggcgtgcggacgctcggcgtgcggctcgcgcagcatcatcgctcgggactggagatggcgcgttggctcgcggcgcgccccgaggtgatcgaggtgctgcatcccgcgctcgagagccatccgggccacgcgatctggaagcgcgacttcaccggcgcctccggtctgttcagcatcgtgctgcaaccaaagccgcaagccgccgtcgacgccatgctcgacacgctgaccttgttcggcatgggttattcctggggcggcttcgagagtctcgcgatcccgttcgactgctcgagctatcgcaccgcaacctcatgggcgcccggcggacccacgctgcggctgcacatcgggctggagaacaccgaggatctcaaggccgatctcgaccgcggcttcgcggccttcaacgccgcgtaa

SEQ ID NO: 135902 - protein, 397 aa, Bradyrhizobium sp. ORS278
MASSNDPASAVRQNVETRLVTVGRDTKAQHGFVNPPVVHGSTVLYPTAEDLHAHRGEFQYGRHGTPTTKALQQALMALEGPQCAGVGIAPSGLGAISTTLLSVLKAGDHVLVCDSIYRPTRNFCNGMLARYGVETTYFDPLIGTGIEQLLKPNTRAVVVEAPGSQSFEMPDIPAIAAVAHAHGALVIDDNTWATPLYHRSLDQGVDISMQAATKYIGGHSDIMFGTISANAKAWPLISEGIRLLGVCAGPDDVFLALRGVRTLGVRLAQHHRSGLEMARWLAARPEVIEVLHPALESHPGHAIWKRDFTGASGLFSIVLQPKPQAAVDAMLDTLTLFGMGYSWGGFESLAIPFDCSSYRTATSWAPGGPTLRLHIGLENTEDLKADLDRGFAAFNAA

SEQ ID NO: 135903 - DNA, 1182 bp, Bombyx mori; identical to SEQ ID NO: 13390
  CDS (1)..(1182)

SEQ ID NO: 135904 - protein, 393 aa, Bombyx mori; identical to SEQ ID NO: 13391

SEQ ID NO: 135905 - DNA, 1197 bp, Pasteurella multocida subsp. multocida str. Pm70
  CDS (1)..(1197): transl_table=11
atgtcagaaaaacaaacattatcaacacaatttattcatacaggacgtagaaaaccctttttacaggggggagtgaatcctgtgattcaacgcgcttcatcattggtttttgacagtttagcccataaaaaacaagcgaccattgggcgtgcacagggagaattattttacgggcgtcgaggaactttaacccattttgccttgcaagaagcgatggcggaattagaaggcggagaaggttgttatttgtatccttgtggtgccgcagcggtcacacaaagtattttatcttttgtccaaagcggtgatcatattttaatgacgggtgcggcttatgagccgacgcaagagttttgtaattgtgttttgaagaaaatgcaaatagacacgacttattacgatcccatgataggtgaaggcattgctgagcttgtacaagaaaatactaaagtactttttttggaggcaccaagttcactgacaatggaggtttcagatataccggcgattgttaaagccgcacgtcgtgttaatcctgatatcgtgatcatgatcgataatacatggtcagcgggtgtgttctttaaggcacttgaacaaggtattgatatctcgattcaagctggaaccaaatatttagtgggacattccgatgtgatgattggtactgcggtggcgaataaacgttgttgggcacaattacgagagcattcttatttaatgggacaaatggtagatgcggaaagtgcttatatgaccgcacgaggtattcgaacattggggattcgcttgaaacaacatgaagaaaatgcgttgaaggtggcacactggttagcggcacaacctgaagtaaaagccgtttatcatcccgcattagaaagctgtcccggacatcaattttttaagcgtgattttagtggggcaacaggcttgttctcatttgagttgaatcaaagactaaacccgcaacaattagcgaggtttatggatcattttacgttatttagcatggcatattcttggggaggatttgaatcgttgattttacattatcaaccggaagagatcatggcgatgcgtccgaatatcacacgtcagctgaacgggacattgattcgtgttcatattggcttagaagatccggttgacttaatcgctgatctagaagccgggtttgcgcgcttaaacgcgatgtga

SEQ ID NO: 135906 - protein, 398 aa, Pasteurella multocida subsp. multocida str. Pm70
MSEKQTLSTQFIHTGRRKPFLQGGVNPVIQRASSLVFDSLAHKKQATIGRAQGELFYGRRGTLTHFALQEAMAELEGGEGCYLYPCGAAAVTQSILSFVQSGDHILMTGAAYEPTQEFCNCVLKKMQIDTTYYDPMIGEGIAELVQENTKVLFLEAPSSLTMEVSDIPAIVKAARRVNPDIVIMIDNTWSAGVFFKALEQGIDISIQAGTKYLVGHSDVMIGTAVANKRCWAQLREHSYLMGQMVDAESAYMTARGIRTLGIRLKQHEENALKVAHWLAAQPEVKAVYHPALESCPGHQFFKRDFSGATGLFSFELNQRLNPQQLARFMDHFTLFSMAYSWGGFESLILHYQPEEIMAMRPNITRQLNGTLIRVHIGLEDPVDLIADLEAGFARLNAM

SEQ ID NO: 135907 - DNA, 1218 bp, Halobacterium sp. NRC-1; identical to SEQ ID NO: 125831
  CDS (1)..(1218): transl_table=11

SEQ ID NO: 135908 - protein, 405 aa, Halobacterium sp. NRC-1; identical to SEQ ID NO: 125832

SEQ ID NO: 135909 - DNA, 1188 bp, Escherichia coli O157:H7 EDL933; identical to SEQ ID NO: 13426
  CDS (1)..(1188): transl_table=11
  misc_feature (47)..(47): s is g or c

SEQ ID NO: 135910 - protein, 395 aa, Escherichia coli O157:H7 EDL933; identical to SEQ ID NO: 13427
  misc_feature (16)..(16): The Xaa at location 16 stands for Ser, or Thr.

SEQ ID NO: 135911 - DNA, 1161 bp, Escherichia coli O157:H7 EDL933; identical to SEQ ID NO: 13428
  CDS (1)..(1161): transl_table=11

SEQ ID NO: 135912 - protein, 386 aa, Escherichia coli O157:H7 EDL933; identical to SEQ ID NO: 13429

SEQ ID NO: 135913 - DNA, 1185 bp, Agrobacterium tumefaciens str. C58; identical to SEQ ID NO: 13460
  CDS (1)..(1185): transl_table=11

SEQ ID NO: 135914 - protein, 394 aa, Agrobacterium tumefaciens str. C58; identical to SEQ ID NO: 13461

SEQ ID NO: 135915 - DNA, 1188 bp, Agrobacterium tumefaciens str. C58; identical to SEQ ID NO: 13464
  CDS (1)..(1188): transl_table=11

SEQ ID NO: 135916 - protein, 395 aa, Agrobacterium tumefaciens str. C58; identical to SEQ ID NO: 13465

SEQ ID NO: 135917 - DNA, 1284 bp, Agrobacterium tumefaciens str. C58; identical to SEQ ID NO: 13438
  CDS (1)..(1284): transl_table=11

SEQ ID NO: 135918 - protein, 427 aa, Agrobacterium tumefaciens str. C58; identical to SEQ ID NO: 13439

SEQ ID NO: 135919 - DNA, 1188 bp, Sinorhizobium meliloti 1021
  CDS (1)..(1188): transl_table=11
atggcagacaacaagatcgggaaggcggagcagggcatcaatacccgtctcgcgcacaccggcaacaacccctccgacttccatggcttcgtcaatccgccggtggttcacgcctccaccgtgctgttcccgaatgcgaggacgatggagacgcgggcgcagaaatatacctatgggacgcgcggcacaccgacgaccgacgcgctctgcgaggccgtgaacgagttggagggcgcagcgggcacgatcctcgttccctccgggctcgctgcggtcacggtgccgttcctcgcctatctctcctcgggcgaccatgtgctcattgtcgattcggtctatttccccacccgccacttctgcgacacgatgctctccaggctcggcgtcacggtcgaatattatgacccgacgatcggcgccggcatcgaaaacctgatcaggccgaacacgcggctggtgcatacggaagccccgggctcgaatacgttcgagatgcaggatattccggcaatcgccgccgcggcgcaccggcacggctgtatcgtgaccatggacaatacctgggcgacgccggtctacttccggcccctcgaccacggcgtcgacgtgtcgatccatgcggcgaccaagtacccttccggtcactcggacgttcttctcggaaccgtttcggccaatgcggcccattggccggcactcagcgaggcgatggtcacgctcggcgtctccgtttcgccggacgacagctatcagatcctgcgcggcctgcgcacgatgggcgttcgcctggtgcgtcatcaggcaagcgcgctcgcgatcgctgaatggctggagggccgagacgaggtggcgcgcgtgcttcatccggcactgccgagctttcccggacacgaattgtggaagcgcgacttcggcggcgcgagcgggatattctccttcgtgctcaaggcggaaccggaagacggcaaggcaaaggcgcatgccttcctggatgcgctctcgctgttcgggctcggctactcctggggcggcttcgaaagcctcgccgttcacgtgaacctctccgatcgcaaggtggcgaaggcaccgtccgaagggccggtcatccggctgcagatcggactcgaggatgtaccggacatccgccgggatatcgaggcgggcctcgccgcggcaaacgccgtctga

SEQ ID NO: 135920 - protein, 395 aa, Sinorhizobium meliloti 1021
MADNKIGKAEQGINTRLAHTGNNPSDFHGFVNPPVVHASTVLFPNARTMETRAQKYTYGTRGTPTTDALCEAVNELEGAAGTILVPSGLAAVTVPFLAYLSSGDHVLIVDSVYFPTRHFCDTMLSRLGVTVEYYDPTIGAGIENLIRPNTRLVHTEAPGSNTFEMQDIPAIAAAAHRHGCIVTMDNTWATPVYFRPLDHGVDVSIHAATKYPSGHSDVLLGTVSANAAHWPALSEAMVTLGVSVSPDDSYQILRGLRTMGVRLVRHQASALAIAEWLEGRDEVARVLHPALPSFPGHELWKRDFGGASGIFSFVLKAEPEDGKAKAHAFLDALSLFGLGYSWGGFESLAVHVNLSDRKVAKAPSEGPVIRLQIGLEDVPDIRRDIEAGLAAANAV

SEQ ID NO: 135921 - DNA, 1161 bp, Caulobacter crescentus CB15
  CDS (1)..(1161): transl_table=11
atggatgaagaaacccgcctgatccacacgggctcggagcctgctcgcctggggcggaccgtcaatccgccgatccagcggggctcgaccgtcctgctgccggacgccgcctcgctctacgacgacgaccagctgacctacggaatcacgggtctctccacgcccgtggcgctgcagaacgccctggccgaactggagggcgcgacgaacgtcaccctctacccctcgggtctcgccgcgatcaccggcgccatgctggccgtgctgaaggccggcgatgaggtgctggtcgtcgacagcgcctacaaacccacccgccggttctgcgatcgcgtgctgggccggttcggcgtcacgacgcgctactatgacccgaagctctcgcccgaggcgctgatgggcctggtgacctcgagcacccgcctgatcgtgctggaagcgcccggctcgttgaccttcgagatgcaggacatccccgctatcgccgccgcggcgaacgcgcgcggcgtcctgaccctgatcgacaacacctgggcggccggcctgctgttcaagccgctggcgcatggcgtgacgatgagcgtccaggccctgaccaaatatgtcggcgggcactctgactgcttcatgggctcggtcgccacctgcgacgacgcggtcgccaagctcttgggcgacgccatgtgggacatcggttggtcggtgtcgtccgacgacgcctacaccatgctgcgcggtctgcggacgctcgcgacgcgcctgccccgccacgcggagaacggcctcgccatcgcccgctggcttcaggagcgacccgaggtggcgcgggtgctgcaccccgccctccccggcgacgccggacacgcgatctggaagcgcgacttcaccggcgcctgcggcctgtttggcgtcgtgttgaagccctgctcgcagaaagcggtccacgccttcctcgatagcctgaagctctttggcctgggcttctcgtggggcggctatgagagccttgcgctgaactgcgacccgcagcttggcgcgcgatcaatcccggtcgatctggagggtccgctgctgcgcttccacatcgggctggaaggcatcgaagacctcaaggccgaccttcggcgggggttcgaggccctgaacgccgcgaaggcctga

SEQ ID NO: 135922 - protein, 386 aa, Caulobacter crescentus CB15
MDEETRLIHTGSEPARLGRTVNPPIQRGSTVLLPDAASLYDDDQLTYGITGLSTPVALQNALAELEGATNVTLYPSGLAAITGAMLAVLKAGDEVLVVDSAYKPTRRFCDRVLGRFGVTTRYYDPKLSPEALMGLVTSSTRLIVLEAPGSLTFEMQDIPAIAAAANARGVLTLIDNTWAAGLLFKPLAHGVTMSVQALTKYVGGHSDCFMGSVATCDDAVAKLLGDAMWDIGWSVSSDDAYTMLRGLRTLATRLPRHAENGLAIARWLQERPEVARVLHPALPGDAGHAIWKRDFTGACGLFGVVLKPCSQKAVHAFLDSLKLFGLGFSWGGYESLALNCDPQLGARSIPVDLEGPLLRFHIGLEGIEDLKADLRRGFEALNAAKA

SEQ ID NO: 135923 - DNA, 1161 bp, Corynebacterium glutamicum ATCC 13032; identical to SEQ ID NO: 13476
  CDS (1)..(1161): transl_table=11

SEQ ID NO: 135924 - protein, 386 aa, Corynebacterium glutamicum ATCC 13032; identical to SEQ ID NO: 13477

SEQ ID NO: 135925 - DNA, 1149 bp, Corynebacterium glutamicum ATCC 13032; identical to SEQ ID NO: 13478
  CDS (1)..(1149): transl_table=11

SEQ ID NO: 135926 - protein, 382 aa, Corynebacterium glutamicum ATCC 13032; identical to SEQ ID NO: 13479

SEQ ID NO: 135927 - DNA, 1182 bp, Drosophila melanogaster; identical to SEQ ID NO: 13484
  CDS (1)..(1182)

SEQ ID NO: 135928 - protein, 393 aa, Drosophila melanogaster; identical to SEQ ID NO: 13485

SEQ ID NO: 135929 - DNA, 1224 bp, Streptomyces coelicolor A3(2); identical to SEQ ID NO: 13494
  CDS (1)..(1224): transl_table=11

SEQ ID NO: 135930 - protein, 407 aa, Streptomyces coelicolor A3(2); identical to SEQ ID NO: 13495

SEQ ID NO: 135931 - DNA, 1161 bp, Streptomyces coelicolor A3(2); identical to SEQ ID NO: 13496
  CDS (1)..(1161): transl_table=11

SEQ ID NO: 135932 - protein, 386 aa, Streptomyces coelicolor A3(2); identical to SEQ ID NO: 13497

SEQ ID NO: 135933 - DNA, 1212 bp, Yersinia pestis KIM
  CDS (1)..(1212): transl_table=11
atggcagtgaataaagcaatcccagaaaaactggaaacagccttagtcagcgcagggcgaagtaaaaaatttactcaaggctcagtgaataccgtgatccaacgagcatcatctctggttttcgaatctgtaaaagcgaaaaaacatgccacgatcaatcggggcaatggtgagttgttctatggccgcagggggacattaacccacttctctttgcaagaggcaatgacggagctggagggcggcgcaggttgcgtgctttatccttgtggcgctgccgccatcagtaatgcgattttatcgtttgtcgccacgggcgatcatgtgctgatgaccggctcagcttatgagcccgcccaaagtttctgcgataagattttatcgcgcatgaatatcacgacgacctattttgatcccatgataggtgctgggattgcttcactgattaccccgaaaaccaaggtgatatttcttgagtcacccggctccatcaccatggaagtgcaggatattcctgcgatggtggcggccatccgggcggtggctccggatgtcgttatcatgatggacaacacctgggccgcaggtgtgttatttaaagcactggattttgatatcgatatctctattcaatccggcactaaatacattattggtcactctgatgccatgctgggcattgcggttgccaatgcccgctgctgggaacaactgcgtgaagactcttatttgatgggccagatggtcgatgctgatactgcctatcttgccagccggggcttacgcacgttaagcgtccggttaaaacaacatgagaaaaacagcattgaaatcgctaactggttggcagagcgcccggaagtggcggtggtttatcatcccgcactgccaggctgcaagggccatgaattctacaagcgggattttaatggctgcaatggtttgttttctttcgaattaaaagaagaattaacccagcaacaactggagaattacctggatcactttacccatttcagcatggcgttttcatggggtggttttgaatcgctgatattaggttatcagccgaaggatattcgtgcgatccgcaaatatgacgcggaaggcatcaaaggaacattattccgtctgcatattggccttgagaatgtgcaagatttgcaagacgatctggccgcaggatttgagcgaattcaagccgtaaaatag

SEQ ID NO: 135934 - protein, 403 aa, Yersinia pestis KIM
MAVNKAIPEKLETALVSAGRSKKFTQGSVNTVIQRASSLVFESVKAKKHATINRGNGELFYGRRGTLTHFSLQEAMTELEGGAGCVLYPCGAAAISNAILSFVATGDHVLMTGSAYEPAQSFCDKILSRMNITTTYFDPMIGAGIASLITPKTKVIFLESPGSITMEVQDIPAMVAAIRAVAPDVVIMMDNTWAAGVLFKALDFDIDISIQSGTKYIIGHSDAMLGIAVANARCWEQLREDSYLMGQMVDADTAYLASRGLRTLSVRLKQHEKNSIEIANWLAERPEVAVVYHPALPGCKGHEFYKRDFNGCNGLFSFELKEELTQQQLENYLDHFTHFSMAFSWGGFESLILGYQPKDIRAIRKYDAEGIKGTLFRLHIGLENVQDLQDDLAAGFERIQAVK

SEQ ID NO: 135935 - DNA, 1170 bp, Brucella suis 1330
  CDS (1)..(1170): transl_table=11
gtggctaagcagcagttgaagacagagaagttgggcataaacacgcggcttgctcatgacggttattgccccggcgactatcacggctttgtcaacccgcccgtcgtgcgcgcatcgaccgtgctttttcccgatgcagaaaccatggcaagcaacggccagaaatatacctatggcacacgcggcacgcccacaagcgaagcgctttgcaaagccatagacgcgctggagggctctgcgggaacggtttgcgttccatcggggctagcggccataaccgttccgctgctgggatttctttcacccggcgatcatgcgcttcttgtcgattcgatttattacccgacccgccacttcgccaatacgatcctgaaacgcatgggtgtggacgtcgaatattacgatccggaaatcggtgcggacattgcaaagctgatgcgcccgaacaccaaggtcgtgtttacggaatcacccgcctccaacacattcgagatacaggatattcctgccatcgctgaagccgcccacaagggcaatgccatcgtcatgatggacaatacctgggcgacaccgctttatttccgggcgctcgatttcggcgtggacatcagcattcacgccgcaaccaaatatccctccggccattccgacattcttttcggcaccatttcgaccaatgagaaatgctggccgcaattgctggaaacacacggcacgatgggcctttgtgccgggcctgacgacacctaccagatcttgcgcggactgcgcaccatgggcatccggctggaacatcatcgcaaaagcgcactggagattgcccgctggctggaaaatcatccaatggtggaacgcgttctgcatccagccctcgaaagccatcccggccatgaaatctggaaacgcgatttttccggttcgtccggcattttctcctttgttctggcaaagggcggacatgcgcaagcgagcgccttcctcaacgcgctggagattttcggcctcggctattcgtggggtggctatcaaagccttgcgcttgaagtgaagcttggcgaccgcaccgtttcgaagaacgattatgccgggccggtcatccgccttcagatcggtctggaagacgtgctcgacctcatcgccgatctcgaaagaggttttgctgcaatctga

SEQ ID NO: 135936 - protein, 389 aa, Brucella suis 1330
MAKQQLKTEKLGINTRLAHDGYCPGDYHGFVNPPVVRASTVLFPDAETMASNGQKYTYGTRGTPTSEALCKAIDALEGSAGTVCVPSGLAAITVPLLGFLSPGDHALLVDSIYYPTRHFANTILKRMGVDVEYYDPEIGADIAKLMRPNTKVVFTESPASNTFEIQDIPAIAEAAHKGNAIVMMDNTWATPLYFRALDFGVDISIHAATKYPSGHSDILFGTISTNEKCWPQLLETHGTMGLCAGPDDTYQILRGLRTMGIRLEHHRKSALEIARWLENHPMVERVLHPALESHPGHEIWKRDFSGSSGIFSFVLAKGGHAQASAFLNALEIFGLGYSWGGYQSLALEVKLGDRTVSKNDYAGPVIRLQIGLEDVLDLIADLERGFAAI

SEQ ID NO: 135937 - DNA, 1188 bp, Shigella flexneri 2a str. 301
  CDS (1)..(1188): transl_table=11
atggcggacaaaaagcttgatactcaactggtgaatgcaggacgcagcaaaaaatacactcttggcgcggtaaatagcgtgattcagcgcgcttcttcgctggtatttgagagtatggaagccaaaaagcacgcgacgcgcaatcgcgccaatggcgagttgttctatggacggcgcggaacgttaacccatttttccttacaacaagcgatgtgtgaactggaaggtggcgcaggctgcgcgctatttccctgcggggcggcagcggttgctaattcgattcttgcttttgtcgaacagggcgatcatgtgttgatgaccaacaccgcctatgaaccgagtcaggatttctgtagcaaaatcctcagcaaactgggcgtaacgacatcgtggtttgatccgctgattggtgccgatatcgttaagcatctgcagccaaacactaaaatcgtgtttctggaatcgccgggttccatcactatggaagtccacgacgttccggcgattgttgccgccgtgcgcagtgtggtgccggatgccatcattatgatcgacaacacctgggcagccggtgtgctgtttaaggcgctggattttggcatcgatgtttctattcaggccgccaccaaatatctggttgggcattcagatgcgatgattggcactgccgtgtgcaatgcccgttgctgggagcagctacgggaaaatgcctatctgatgggccagatggtcgatgccgataccgcctatataaccagccgtggcctgcgcacattaggtgtgcgtttgcgtcaacatcatgaaagcagtctgaaagtggccgaatggctggcagaacatccgcaagttgcgcgagttaaccaccctgccctgcctggcagtaaaggacacgaattctggaaacgagactttacaggcagcagcgggctattttcctttgtgcttaagaaaaaactcaatgatgaagagctggcgaactatctggataacttcagtttattcagcatggcctactcgtggggcgggtatgaatcgttgatcctggcaaatcaaccagaacatatcgccgccattcgcccacaaggcgagatcgattttagcgggaccttgattcgcctgcatattggtctggaagatgtcgacgatctgattgccgatctggacgccggttttgcacggattgtataa

SEQ ID NO: 135938 - protein, 395 aa, Shigella flexneri 2a str. 301
MADKKLDTQLVNAGRSKKYTLGAVNSVIQRASSLVFESMEAKKHATRNRANGELFYGRRGTLTHFSLQQAMCELEGGAGCALFPCGAAAVANSILAFVEQGDHVLMTNTAYEPSQDFCSKILSKLGVTTSWFDPLIGADIVKHLQPNTKIVFLESPGSITMEVHDVPAIVAAVRSVVPDAIIMIDNTWAAGVLFKALDFGIDVSIQAATKYLVGHSDAMIGTAVCNARCWEQLRENAYLMGQMVDADTAYITSRGLRTLGVRLRQHHESSLKVAEWLAEHPQVARVNHPALPGSKGHEFWKRDFTGSSGLFSFVLKKKLNDEELANYLDNFSLFSMAYSWGGYESLILANQPEHIAAIRPQGEIDFSGTLIRLHIGLEDVDDLIADLDAGFARIV

SEQ ID NO: 135939 - DNA, 1200 bp, Shewanella oneidensis MR-1
  CDS (1)..(1200): transl_table=11
atgacagataaacatcagctcgccacccaaatcgtcagcgtcggtcgcgataaaaaatggaccaagggcgtgattaatccgcccgtatttcgcgcatcgaccatagtgttcgacacgatggaggatatgcgtcatgccgccaaaaacaaaaccaatggcgaaatgttttacggccgccgcggcaccccgacccactttgcgtttcaagcggcggtaagcgaactcgaaggtggcgctggcacagcactgtatccctctggcgcggcagcgattagcgcggctttgttatcgtttttacaggcgggcgatcatctgctgatggtcgatagcgtttacgagccaacacgcgatttttgcagccatattctggcaggctttaatattgagaccacctattacgatcccctgattggtgaaggcattcgcgcgcttatccgccccaatactaaggtattgtttttagagtctcccggctccatcaccatggaagtgcaagacgtcccaaccctatgccgcatcgcccatgaacatggattggtgaccattctcgacaacacatgggcctcgccaatcaatagcaagcccttcgagatgggtgtcgatgtgtcgattcaagccgccacaaagtatattgtcggccactcggatgtgatgataggcacggcgaccgccaacgagcaatactggccgcagctgcgtgagcgcagttatttactggggcaaaccacttcccccgatgatgtgtatctcgccacgcgcggattacgcaccttaggcgtgcgcatggcgcaacatgagaaaaatgccctaaaagtagctaactggttacaaacccgtcctgaagtagaccatttacgtcatcccgcctttgagacctgcccaggacatgaattctttaaacgcgactttagcgcatcaaatggtttgttttcctttgtattaaaacaaggcgatcaggaagcggttaccgcactcgttgaaaatatgcagcactttaaaatgggcttttcttggggtggttatgagagtctgatcttagggatttttggcattgaaagaatccgtagtgcgaccaagtgggatgctagcaaaccgttgatccgtgttcatattggtcttgaagatcccgaggatttaattgccgatctcagcgcaggattcgagcgttttaatgccgtgctcgccgctaaggtcaaataa

SEQ ID NO: 135940 - protein, 399 aa, Shewanella oneidensis MR-1
MTDKHQLATQIVSVGRDKKWTKGVINPPVFRASTIVFDTMEDMRHAAKNKTNGEMFYGRRGTPTHFAFQAAVSELEGGAGTALYPSGAAAISAALLSFLQAGDHLLMVDSVYEPTRDFCSHILAGFNIETTYYDPLIGEGIRALIRPNTKVLFLESPGSITMEVQDVPTLCRIAHEHGLVTILDNTWASPINSKPFEMGVDVSIQAATKYIVGHSDVMIGTATANEQYWPQLRERSYLLGQTTSPDDVYLATRGLRTLGVRMAQHEKNALKVANWLQTRPEVDHLRHPAFETCPGHEFFKRDFSASNGLFSFVLKQGDQEAVTALVENMQHFKMGFSWGGYESLILGIFGIERIRSATKWDASKPLIRVHIGLEDPEDLIADLSAGFERFNAVLAAKVK

SEQ ID NO: 135941 - DNA, 1272 bp, Pseudomonas putida KT2440; identical to SEQ ID NO: 13524
  CDS (1)..(1272): transl_table=11

SEQ ID NO: 135942 - protein, 423 aa, Pseudomonas putida KT2440; identical to SEQ ID NO: 13525

SEQ ID NO: 135943 - DNA, 1197 bp, Pseudomonas putida KT2440; identical to SEQ ID NO: 13526
  CDS (1)..(1197): transl_table=11

SEQ ID NO: 135944 - protein, 398 aa, Pseudomonas putida KT2440; identical to SEQ ID NO: 13527

SEQ ID NO: 135945 - DNA, 1182 bp, Pseudomonas putida KT2440; identical to SEQ ID NO: 13532
  CDS (1)..(1182): transl_table=11

SEQ ID NO: 135946 - protein, 393 aa, Pseudomonas putida KT2440; identical to SEQ ID NO: 13533

SEQ ID NO: 135947 - DNA, 1188 bp, Salmonella enterica subsp. enterica serovar Typhi Ty2
  CDS (1)..(1188): transl_table=11
atgacggataaacagttggataccaaactggtaaacgcaggacgcagcaaaaaatacacgcttggctcagtgaatagtgtgattcaacgcgcttcttcactggtgtttgacaccgtcgaggccaaaaaacacgctacccgcaatcgcgccaacggcgaattattttacggacgccggggaacgctgactcacttttcgctccaggaagccatgtgtgaactggaaggcggcgccggatgcgcgctcttcccgtgcggtgcggcggcggtcgccaacaccattctggcattcgttgaacagggcgaccacatcctgatgaccaacacagcctatgaacccagccaggatttctgcagcaaaattctcggcaaactgggcgtgacgacaagctggttcgacccgctcatcggcgctgatatcacgcaacatattcagccgaacacgaaagtcgtatttctggaatcccccggttctattaccatggaagtacatgatattccgaccattgttagtgcggtcagacgcgtcgcgccagacgccgtcatcatgattgataatacctgggcggctggcgttctgttcaaagctctggaattcgatattgatatctctatccaggcgggcactaagtatctaattggtcattctgatgcgatggtcggtactgccgttgcaaatgcgcgctgctgggaacaattgcgggaaaacgcctatctgatggggcaaatgctcgacgccgacacggcttatatgaccagccgcggtctgcgcacgctcggcgtccgactgcgccagcatcaagaaagcagcctcaaaatcgccgcgtggctggcgaaccattctcaggtcgcgcgcgttaatcatccggccctgccgggtagcaaaggtcatgcgttctggaaacgagactttacaggcagcagcggcctgttctcctttgtgctcaataaaaagctgaccgaggcagaattatcagcctatctggataacttttcgctgttcagtatggcctactcctggggaggctacgaatcgctgattattgctaatcagccggaacagatcgccgcgattcgtcccgcaggcggcgtagattttaccggtacgctggttcgagtgcatattggtttagagagtgttgatgatttgatcgctgatttagccgccggcttcgccagaattgtgtaa

SEQ ID NO: 135948 - protein, 395 aa, Salmonella enterica subsp. enterica serovar Typhi Ty2
MTDKQLDTKLVNAGRSKKYTLGSVNSVIQRASSLVFDTVEAKKHATRNRANGELFYGRRGTLTHFSLQEAMCELEGGAGCALFPCGAAAVANTILAFVEQGDHILMTNTAYEPSQDFCSKILGKLGVTTSWFDPLIGADITQHIQPNTKVVFLESPGSITMEVHDIPTIVSAVRRVAPDAVIMIDNTWAAGVLFKALEFDIDISIQAGTKYLIGHSDAMVGTAVANARCWEQLRENAYLMGQMLDADTAYMTSRGLRTLGVRLRQHQESSLKIAAWLANHSQVARVNHPALPGSKGHAFWKRDFTGSSGLFSFVLNKKLTEAELSAYLDNFSLFSMAYSWGGYESLIIANQPEQIAAIRPAGGVDFTGTLVRVHIGLESVDDLIADLAAGFARIV

SEQ ID NO: 135949 - DNA, 1176 bp, Candidatus Blochmannia floridanus
  CDS (1)..(1176): transl_table=11
atgaaagatgaaactaaaattattaattctgggcgaaatatacaatttacccacagagccattaatcctattgttcaaagaacatcctcaataatttttaattctattgcacaaaaaaaacatgctgcaaaaaattacaaaaacggagaactattttacggaagatatggaaccctatcccatttttccttacaaaaatctatgattgaactagaaaatggatcaggttgtatgttatttccatgtggaacagctgctattactcacacaatttttgcctttatcacttacggagatcatattttaattacagaatcggcatacgcaccaacacaaaatttttgtcgatttctcttgaataaaatgaatgttcatactacttggtttcattcatcaattagtaataatattactaatcttattcaacataatactaagttaattatattagaatcacctggttccataactatggaagtacaagatattccaactcttattcaagcaacgcgcaaaaaaaaaccagatattataatattattagataacacttggtcatcaggagtatttttaaaagcattagatatcggagtagacatctctattcaatccggaacaaaatatattataggacattcagatggaatgatgggaacagcagtttctaatgcgcgatgttggaacacattacaagaacaatcctacttaatgggccaaactatagatgcagatactgcatacatagcagctcgaggactgcgaacattatatgttagattaaaacaacatgaaaaaactggattacatctagcacaatggttaaataatcatccaaaagtagaccgagttaatcatcctgctctgccttcatgtcaaggtcataaatattttataagagattttacaggatccagtggattattttcttttattttaaaaaaacgattaactgataaacaattatctaactttcttgacaacatgaagtattttaaaatggcatattcttggggaggtttcgagtcattgatcacaaccatgcaaatagaagaactcaattctattcgtcctattaataaattaaacttcacagggacactaatacgtatacatgcaggattagaacatcaagaagatttaattcaagatttatcggatggtttaaatcgaatctaa

SEQ ID NO: 135950 - protein, 391 aa, Candidatus Blochmannia floridanus
MKDETKIINSGRNIQFTHRAINPIVQRTSSIIFNSIAQKKHAAKNYKNGELFYGRYGTLSHFSLQKSMIELENGSGCMLFPCGTAAITHTIFAFITYGDHILITESAYAPTQNFCRFLLNKMNVHTTWFHSSISNNITNLIQHNTKLIILESPGSITMEVQDIPTLIQATRKKKPDIIILLDNTWSSGVFLKALDIGVDISIQSGTKYIIGHSDGMMGTAVSNARCWNTLQEQSYLMGQTIDADTAYIAARGLRTLYVRLKQHEKTGLHLAQWLNNHPKVDRVNHPALPSCQGHKYFIRDFTGSSGLFSFILKKRLTDKQLSNFLDNMKYFKMAYSWGGFESLITTMQIEELNSIRPINKLNFTGTLIRIHAGLEHQEDLIQDLSDGLNRI

SEQ ID NO: 135951 - DNA, 1164 bp, Bordetella bronchiseptica RB50
  CDS (1)..(1164): transl_table=11
atgaaacccgatacccggttggtgcacctgggccgcgatcccgagcggttcgaggggctggtgaacattccgccgtgcaggacctcgaccttcctgcacgcgtcggtggcggattaccaggcggcggcgtcgcgcaagcaggacagcctgtactacggccgcttcggcagccagaccagccgggcgctggaggccgcctgcaccgagctcgacggcggccatggcgccatgctgttcccgtgcgggctggcggccatcacgcgcgtgctgggcagcctgctcgaaccgggccagcatctgctgatggccgacacggtgtatgggccggcacgggcgttctgcgaacaggagctggcccggctgggcgtcgagaccacctggtacgcgccggacgcggacctcgacgcgctggtgcggcccgccacgcgcgtgatctacggcgaggcgcccggttcgctgaccttcgaaatgcaggacctgcgcgcgctggccgaggtggcgcgccgccacggcctggtctcggtggtggacaacacctgggccacgtcgtggttctgccagccgctggcgctgggcatagacatcagcatccagtcggcctccaagtacatcgtgggccattcggacgcgatgctgggcgtggcggtggccaacgaggcacagtttccggcgctgcggcgcgcggccgcgcagtatggcaacgccgtcagcccggacgattgctatatggcgctgcgcgggctgcgcacgctgggggtgcggctggagcgccaccaggccagcgcgctgcgcgtggcgcagtggctgcgcacgcgcgccgaggtcgagcaggtgctgcatccggcgctgcccgacagccccggccacgccttgtggcggcgcgatttctccggggccagcggcctgttcggcgtggcgtttcgcgccggcgacgacgccgcgctggcgcgcttcgtggacgatctgcggctctttggcatcggcgtgagctggggcgggttcgaaagccttgccttgcccagccatccggtgcgcaatacgtcggcggcggccctgggcggccggccgctggtgcgcctgcacatcggcctggaagacccggacgacctgattgccgacctggctcgcgcgctggaccgccatatggcggcggcgcgcggctga

SEQ ID NO: 135952 - protein, 387 aa, Bordetella bronchiseptica RB50
MKPDTRLVHLGRDPERFEGLVNIPPCRTSTFLHASVADYQAAASRKQDSLYYGRFGSQTSRALEAACTELDGGHGAMLFPCGLAAITRVLGSLLEPGQHLLMADTVYGPARAFCEQELARLGVETTWYAPDADLDALVRPATRVIYGEAPGSLTFEMQDLRALAEVARRHGLVSVVDNTWATSWFCQPLALGIDISIQSASKYIVGHSDAMLGVAVANEAQFPALRRAAAQYGNAVSPDDCYMALRGLRTLGVRLERHQASALRVAQWLRTRAEVEQVLHPALPDSPGHALWRRDFSGASGLFGVAFRAGDDAALARFVDDLRLFGIGVSWGGFESLALPSHPVRNTSAAALGGRPLVRLHIGLEDPDDLIADLARALDRHMAAARG

SEQ ID NO: 135953 - DNA, 1191 bp, Photorhabdus luminescens subsp. laumondii TTO1
  CDS (1)..(1191): transl_table=11
atggcagaaaaaaaactggaaactttactggtcaatgcaggtagaagccaaaaatttactcaaggcgcagtcaatcccatcattcagcgaacttcatcggtgatcttcgattctgtcgccgacaaaagacgtgctacgcaaaaccggggcaagagcgagctgttttatggccgccgtggtacacagactcatttttcttttcaagcagcaatggctgaactggaaagtggcgcaggctgtatgctttacccttctggtgctgccgcgattagtcatgccattctcgcttttgccgccgcaggcgatcatattctattaaccggttcagcttatgacccgacgcaaagtttctgtgacaaaatattgtcacggatgaatattaccaccgattatttcgatcccatgattggcgaagagattgctgatctgattaagcccaataccaaagtggtgtttcttgaatcccccggctccatcacaatggaagtacaagatatccccgctattgtccgcgcagtgcgccaagtcaatccagatattgtcatcatgctcgataatacttgggcggcaggtgtgctgtttaaagcgctagaattcggcgtcgatatttcgattcaatcaggcaccaaatatattattggtcactcagacgcaatgttagggattgctgtggctaatgaacgttgttgggcgcaactgcgagaaaactcctatttgatggggcagatagccgatgccgatacggtctatatggccagtcgcggattgcgtactttagccattcgcttgaaacaacatgaaaaaagcagtattgaagtcgcacactggctgcaacaacgaaccgaagttgccgctgtctatcaccccgctctgccttcctgccccggtcacaataattttatccgtgatttcagtggcagtagcggcctgttctcttttcaattgaaaaagaagttaactccccaacaatttacggattatctggataattttcaccattttaaaatggcattctcatggggcggttttgaatctctgatcctaggctatcaaccagaagagataaaaatgatgcgtcaatacgatatttcacaaaggacaggcactctgttccgcctgcatgtcgggctggaaaatgttcaagatttgattgatgacctcgcagagggatttggtcgaatttcgacttga

SEQ ID NO: 135954 - protein, 396 aa, Photorhabdus luminescens subsp. laumondii TTO1
MAEKKLETLLVNAGRSQKFTQGAVNPIIQRTSSVIFDSVADKRRATQNRGKSELFYGRRGTQTHFSFQAAMAELESGAGCMLYPSGAAAISHAILAFAAAGDHILLTGSAYDPTQSFCDKILSRMNITTDYFDPMIGEEIADLIKPNTKVVFLESPGSITMEVQDIPAIVRAVRQVNPDIVIMLDNTWAAGVLFKALEFGVDISIQSGTKYIIGHSDAMLGIAVANERCWAQLRENSYLMGQIADADTVYMASRGLRTLAIRLKQHEKSSIEVAHWLQQRTEVAAVYHPALPSCPGHNNFIRDFSGSSGLFSFQLKKKLTPQQFTDYLDNFHHFKMAFSWGGFESLILGYQPEEIKMMRQYDISQRTGTLFRLHVGLENVQDLIDDLAEGFGRIST

SEQ ID NO: 135955 - DNA, 1299 bp, Vibrio vulnificus YJ016
  CDS (1)..(1299): transl_table=11
ttgtcggggatgtttttgctttgcaacccttgccaagcctatacgctccatgttttaaatagggcattctctcatagacaaggaattaacatgtcggaaggcaaacaaaccaagctggtcaccgctggacgcgataaaaaatggacaaatggcgtggtaaacccgccaattcaacgtgcgtcgacggtggtttttgacacagtggcagacaaacaccacgcgaccgtcaatcgagccaacaaaacacttttttacggccgtcgtggcactcatacccacttcgcctttcaagaagcgatgacacaaattgagggcggtgctggctgcgcactttacccatgtggcaccgccgccatttccaacgcgattctttccttcgtcgaaaccggtgatcacattctgatggtcgatacctgctacgaaccaactcgcgatttctgcgataagatcatgaaaaaaatgggggtagaaaccacctattacgatccgatggttggagaaggcattcgtgagctcatcaaacccaataccaaagtgctgtttttggaatctcccggctctattaccatggaagtgcaagatgtccctaccctcgcacgtattgcgcatgagcacggtatcatcgtgatgctggataacacgtggggtgccggtgtcaacttctcacctttcgagcacggagtagacatctcgattcaagcagcaacgaagtacatcgtcggccattcggatgtgatgctgggaaccgctgtcgcaagcgagccctattgggatcagttgcgtgagcaaagttatttgatgggacagtgcgtctcaccggatgacgcctaccttggtctgcgtggtctgagaacgattgatgtacgtttgcgtcaacacgaacaagccagcctaaaagtagcgcaatggctcgcaacccgaccagaagtggaccatgttcgccacccagcattggagagctgccctggtcacgagttttttaaccgtgatttcactggcggtaatggcctgttttcttttgtattgaagacctcatactctcgtgcaaccacagcgctgctcgatggaatgaaacacttcagcatgggctattcgtggggtggatttgaaagcttaattttggccaatgaaccaaagagtttctcaagcttacgtactgtcgccaatccgaactttgaaggtaccttgatccgcctgcatattggtttagaaaatgtcgaagacctaattgccgatctcgaagcggggtttgaacgttataacgcattgattcttgaaagagaaacctctcttagctag

SEQ ID NO: 135956 - protein, 432 aa, Vibrio vulnificus YJ016
MSGMFLLCNPCQAYTLHVLNRAFSHRQGINMSEGKQTKLVTAGRDKKWTNGVVNPPIQRASTVVFDTVADKHHATVNRANKTLFYGRRGTHTHFAFQEAMTQIEGGAGCALYPCGTAAISNAILSFVETGDHILMVDTCYEPTRDFCDKIMKKMGVETTYYDPMVGEGIRELIKPNTKVLFLESPGSITMEVQDVPTLARIAHEHGIIVMLDNTWGAGVNFSPFEHGVDISIQAATKYIVGHSDVMLGTAVASEPYWDQLREQSYLMGQCVSPDDAYLGLRGLRTIDVRLRQHEQASLKVAQWLATRPEVDHVRHPALESCPGHEFFNRDFTGGNGLFSFVLKTSYSRATTALLDGMKHFSMGYSWGGFESLILANEPKSFSSLRTVANPNFEGTLIRLHIGLENVEDLIADLEAGFERYNALILERETSLS

SEQ ID NO: 135957 - DNA, 1197 bp, Rhodopseudomonas palustris CGA009
  CDS (1)..(1197): transl_table=11
atggacgcctccgactccagcgggacacccgcgccgctcagcacgcagacccgcctcgtcaccgcggggcgcgacactgcggcgcagaagggcttcgtcaatcctccggtggtgcacggttcgacggtgctgtatccgaccgcggccgacctgcacgcccaccgcggcgagtactcctatggacggcacggtaccccaaccaccaaggcgctgcagcaggcgttgatcgcgcttgaaggtccgcagtgtgccggcgtcggcatcaccccctccggcgtgtcggcgatctcgaccgccctgctcgccgtggtcaaagccggcgatcatgtgctggtctgtgacaacgcctatcgcccgacccggctgttctgcgatcagatgctgaatcggctcggcgtcgagaccagttatttcgatccgctgatcggcgccggcatcgcgtcgcatcttcggccgaacaccgtggcagtggtggtcgaggcgccgggatcgcagtcgttcgagatgccggatatcccggcgatcgccgcggtcgccaagcagcacggtgcgctggtgatcgacgacaacacctgggcgacgccgctgtatcatcgctcgctggaacaaggcgtggatatctcgatccaggccgcgaccaaatatattggcggtcactccgacatcatgttcggcaccgtctcggccaatgcggcggcgtggccgaaggtgtcggaagcgatccggctgctcggcgtctgcgccggaccggacgatgtgttcctggcgctgcgcggcctgcgcaccctggaggtgcggctggcccgccactatcaggccggcctggacatggcgcgctggctcacggcgcgtccggaggtgcagcgcgtgctgcatcccggcctcgacaccgatccgggccatgcgatctggaagcgcgacttcaccggcgcatcgggcctgttctcgatcgtgctgcagccggcgccgcaggccgccgtcgatgcgctgctcgacaccgtgtcgctgttcgggatgggctattcctggggcggcttcgaaagcctggtgatcccgttcgactgcgcgtcataccggacggcgacgcaatggaacccgggcggcccggccctgcggctgcacatcggactggaatcgaccgacgatctgaaggcagatttggagcgcggcttcgccgccttcaacgccgcgcgctga

SEQ ID NO: 135958 - protein, 398 aa, Rhodopseudomonas palustris CGA009
MDASDSSGTPAPLSTQTRLVTAGRDTAAQKGFVNPPVVHGSTVLYPTAADLHAHRGEYSYGRHGTPTTKALQQALIALEGPQCAGVGITPSGVSAISTALLAVVKAGDHVLVCDNAYRPTRLFCDQMLNRLGVETSYFDPLIGAGIASHLRPNTVAVVVEAPGSQSFEMPDIPAIAAVAKQHGALVIDDNTWATPLYHRSLEQGVDISIQAATKYIGGHSDIMFGTVSANAAAWPKVSEAIRLLGVCAGPDDVFLALRGLRTLEVRLARHYQAGLDMARWLTARPEVQRVLHPGLDTDPGHAIWKRDFTGASGLFSIVLQPAPQAAVDALLDTVSLFGMGYSWGGFESLVIPFDCASYRTATQWNPGGPALRLHIGLESTDDLKADLERGFAAFNAAR

SEQ ID NO: 135959 - DNA, 1212 bp, Wolbachia endosymbiont of Drosophila melanogaster
  CDS (1)..(1212): transl_table=11
gtgaaggaagagtctatattagttaaagcaggaagaaaatttaatgactataaaggttccatgaacccgccagtttatcattcttctaccatattattccctacttacaaggactacttaaatgcagcaaatggagaaagtatatacgatgtaatcaacgatggtgttgcaagggattatagctacagtaatgttggtactcctactgttcattatctttcaaatgcactggctgaaattgaagggagtggacaagcgcttatttatccttccggactatttgcacttacttttgctattctaactttcgctaaagcaggctcgcacgttttaattcaagataatagttattataggcttaggaggtttgcagaaaatgagctaccaaaaagaggaacagaagtaactttttatgatccaacacaggatataactgatttaattcagagtaatacttcattgataatgatcgagactcctggttctgtaacgtttgagatttcgaatatagagcatatagtaaaagttgctaaggaacataaaattgtgaccgtttgtgacaattcatgggccactcctttgttatttaagccgcttgattatggagttgatgttgcactatatgcggtgacaaagtatctagccggtcactcagatttagtgatgggggctattattgctgaaggtgaaatttttaaattgctttatgagagctataaaaattatggggtaaccattcaatcgcacgactgctaccttgcacataggggacttagaacattgtacacacgtatgaaaaggcaccaaaatacagcaatggaagtggcaaagtggctagaaaaacattcaaaaatcaaaaaagttttgtatccagcacttcccttccatcctcaacacgaattatggaaaagttacttcaaaggagcaagcggcacattcagtatagcactagatagagaatattcatgtgaagaactaagctgcatggttgatcacatgaaaatttttggtatcggtgcttcttggggaggatgcgacagtttgatattaccaatagatcgtagatctatgtcaagatctgtaatgaattcagattatggtggaagttttatacggatattttgtggactggaagatcctgaagatttaatctctgatttaaatgctgcactagcaaggttgccatgtttgaacactaaaactggcagatga

SEQ ID NO: 135960 - protein, 403 aa, Wolbachia endosymbiont of Drosophila melanogaster
MKEESILVKAGRKFNDYKGSMNPPVYHSSTILFPTYKDYLNAANGESIYDVINDGVARDYSYSNVGTPTVHYLSNALAEIEGSGQALIYPSGLFALTFAILTFAKAGSHVLIQDNSYYRLRRFAENELPKRGTEVTFYDPTQDITDLIQSNTSLIMIETPGSVTFEISNIEHIVKVAKEHKIVTVCDNSWATPLLFKPLDYGVDVALYAVTKYLAGHSDLVMGAIIAEGEIFKLLYESYKNYGVTIQSHDCYLAHRGLRTLYTRMKRHQNTAMEVAKWLEKHSKIKKVLYPALPFHPQHELWKSYFKGASGTFSIALDREYSCEELSCMVDHMKIFGIGASWGGCDSLILPIDRRSMSRSVMNSDYGGSFIRIFCGLEDPEDLISDLNAALARLPCLNTKTGR

SEQ ID NO: 135961 - DNA, 1179 bp, Strongylocentrotus purpuratus; identical to SEQ ID NO: 125965
  CDS (1)..(1179)

SEQ ID NO: 135962 - protein, 392 aa, Strongylocentrotus purpuratus; identical to SEQ ID NO: 125966

SEQ ID NO: 135963 - DNA, 1167 bp, Nasonia vitripennis; identical to SEQ ID NO: 13616
  CDS (1)..(1167)

SEQ ID NO: 135964 - protein, 388 aa, Nasonia vitripennis; identical to SEQ ID NO: 13617

SEQ ID NO: 135965 - DNA, 1167 bp, Nasonia vitripennis; identical to SEQ ID NO: 13618
  CDS (1)..(1167)

SEQ ID NO: 135966 - protein, 388 aa, Nasonia vitripennis; identical to SEQ ID NO: 13619

SEQ ID NO: 135967 - DNA, 1188 bp, Anopheles gambiae str. PEST; identical to SEQ ID NO: 13620
  CDS (1)..(1188)

SEQ ID NO: 135968 - protein, 395 aa, Anopheles gambiae str. PEST; identical to SEQ ID NO: 13621

SEQ ID NO: 135969 - DNA, 1146 bp, Apis mellifera; identical to SEQ ID NO: 13638
  CDS (1)..(1146)

SEQ ID NO: 135970 - protein, 381 aa, Apis mellifera; identical to SEQ ID NO: 13639

SEQ ID NO: 135971 - DNA, 1173 bp, Tribolium castaneum; identical to SEQ ID NO: 13690
  CDS (1)..(1173)

SEQ ID NO: 135972 - protein, 390 aa, Tribolium castaneum; identical to SEQ ID NO: 13691

SEQ ID NO: 135973 - DNA, 1191 bp, Erwinia carotovora subsp. atroseptica SCRI1043
  CDS (1)..(1191): transl_table=11
atgacaagcaaaaaaacggcaacagcgttagtcgccgcaggacgcagcaagaaattcacccacggctccgtcaaccccgtaattcagcgtgcgtcctctctggtatttgatacggttcaggacaagaagcacgccactattaaccgggccaagggtgcgctgttctacgggcgccgtggcacattgacccatttctcgtttcaggaagcgatggtggaactggaaggcggcgtgggttgcgcgctgtacccttgtggtgcggctgccatttctaacgcgatcctctctttcgtcgcggcaggcgatcatattctggtaacggaatcagcctacgagcccacgcaggatttctgcacgaaagtactcaacaaactgaacgtcagcaccacctatttcgatccgctcatcggtgctgacattgccgaactgatccagcccaataccaaagtcgtctttcttgaatcgccgggctctatcaccatggaagtacacgatgtgccagctatcgtccaagctgtgcgccttatcaatcctgagatcgttatcatgattgataatacctgggcggcgggcattttattcaaggcgttcgacttcgatattgatatctcgattcaggccggtacgaaatatatcgtcggccattccgatgccatgatcggcacagcggtcgctaacgaacgctgctgggtacagctacgtgaacactcttacctgatggggcaaatggtggatgccgataccgcctatgtcgccagccgcggtctgcgcacactgggcgtcagactcaaacagcaccaggaaagtagtatccgcattgcaaaatggctggcagagcggccagaagtcgcggtcgttaatcaccccgcattgccgggatgtaaagggcatgaattctacgagcgtgattttaacggctgcaacgggttgttctcattcgtcctgaaagagaaattaagcaaagaaacgttggcgcactatctggaccattttgagcatttcagcatggcgtattcatggggtggttttgagtctctgattctggcgaatcagccagaagaactggcggcccttcgtcctgtgagcggcgtggattttaccggtacacttattcggttacatattggacttgaagacagtgacgatctgatcgacgatctggtcgcgggtttcggcagactcggcgcgtag

SEQ ID NO: 135974 - protein, 396 aa, Erwinia carotovora subsp. atroseptica SCRI1043
MTSKKTATALVAAGRSKKFTHGSVNPVIQRASSLVFDTVQDKKHATINRAKGALFYGRRGTLTHFSFQEAMVELEGGVGCALYPCGAAAISNAILSFVAAGDHILVTESAYEPTQDFCTKVLNKLNVSTTYFDPLIGADIAELIQPNTKVVFLESPGSITMEVHDVPAIVQAVRLINPEIVIMIDNTWAAGILFKAFDFDIDISIQAGTKYIVGHSDAMIGTAVANERCWVQLREHSYLMGQMVDADTAYVASRGLRTLGVRLKQHQESSIRIAKWLAERPEVAVVNHPALPGCKGHEFYERDFNGCNGLFSFVLKEKLSKETLAHYLDHFEHFSMAYSWGGFESLILANQPEELAALRPVSGVDFTGTLIRLHIGLEDSDDLIDDLVAGFGRLGA

SEQ ID NO: 135975 - DNA, 1161 bp, Desulfotalea psychrophila LSv54
  CDS (1)..(1161): transl_table=11
atgcaagaaataacacgacttatctgccagacaaaagattgccacagcgaaggggaaaaaagggtggagagcataaaccctccaatccacaaggcctccactctgctctttgcaagctatgccgacctggcacttgccaatgagggcaaatacccggggctgacctacggcacggaccgacttcctgcccaacgtgccttcgaggaggccctttgccaactagagggcggagagatctgtcgcgcctttcaatcggggatcaacgccatcgtccataccctgcaggccttcaccaaggcaggggatcatattgtagtctgtgacaatgtctactggcccaccagtaacttctgcaacaaggtgttgagcaagtttggagttgaaatcagctatgccccatctgcagttggagccgacatcgctgactacctgcgagacaacaccagcctgatctttatggaatctcccggttccaatacctttgagatccaggacatagaggccattacccagattgcccgggcaagagacattgtcaccatcctcgatggcacctggggaacccccctttatcacagggccctctccttcggcgttgatgtctccatccaatctgcaaccaagtatatctcaggccattctgatatcctcctaggcacagctacagtgaatcacaaatatgccgacatcctggctaggtactatcaaagccttgaactcttcgccccccctgccgattgctatgcagccctgcgaggcctgaagaccctccatgtccgcctcaagcaccatgaacaatcggccctgcagatcgcagattggctcgaatcacagccgcaaacaggtagaatcatccaccccgcccgcccggatcatccgcagcacagcaggtggaagaaatacttcaccggctcctgcggactctttgccttcaccttcaaaaaagaaccaagtgaaaaagagctcggcgaatttatcaatgccctgcagttatttggcattggctatagctggggaggctataagagcctgattaccgcaggcaaatatgtaagaaatggatctgatctgaatggtagtactgtcattcgtcttaatattggtcttgaggcagtggaagacctctgccacgacctggcccaggccctggcaaggctataa

SEQ ID NO: 135976 - protein, 386 aa, Desulfotalea psychrophila LSv54
MQEITRLICQTKDCHSEGEKRVESINPPIHKASTLLFASYADLALANEGKYPGLTYGTDRLPAQRAFEEALCQLEGGEICRAFQSGINAIVHTLQAFTKAGDHIVVCDNVYWPTSNFCNKVLSKFGVEISYAPSAVGADIADYLRDNTSLIFMESPGSNTFEIQDIEAITQIARARDIVTILDGTWGTPLYHRALSFGVDVSIQSATKYISGHSDILLGTATVNHKYADILARYYQSLELFAPPADCYAALRGLKTLHVRLKHHEQSALQIADWLESQPQTGRIIHPARPDHPQHSRWKKYFTGSCGLFAFTFKKEPSEKELGEFINALQLFGIGYSWGGYKSLITAGKYVRNGSDLNGSTVIRLNIGLEAVEDLCHDLAQALARL

SEQ ID NO: 135977 - DNA, 1188 bp, Symbiobacterium thermophilum IAM 14863
  CDS (1)..(1188): transl_table=11
atggagagacctgcacccgttcccagcgaccgcgcggagaccctggccgcacacgccggcgacgacccgttccgcttcctgggcgccgccgcgccgcccatcttcgagacgtcgacgttcgtgttccgcaccgtggccgacgcgctcgccgcctttgcagacgagcaggagcattacgtctacacgcggcggcggaaccccaccgtccgggtggtggaggagaaactggcggccctggagggcgcggcggaatgccggctgtttgcctcggggatggcggcgatctcggccgcgatcctctcctgcgtgggggccggcgaccacgtggtctgtgttgacaccgcgtacgggccggcgcgcgccttcatcaccggttacctgagccgcttcggcatatcggccacgctggtggacgggtgcgaccctgccgagtgggaggcggcggtgcgacccaacacgcgcctcttctacctggagtcgccctcctccgggctgatgaagctccaggacctcgcggccgtgaccgcgctggcccgcaggcacggcatcgccaccatctgcgataactcgtacgccaccatgctgcttcagcggccgctggagctgggcgtcgacctggtggtgtactcgtgcagcaagtacttcggcggccactcggacgtgctggccggggccgtcctgggccccgcagagcggatccggcgcatcggcgacgccgaacagccgctgctgggcggcgtggtcggccccttcgaggcgtggctgatcggccgcgggctgcgcaccctgcccctccggctgcggcagcaccagcagagcgcaggccgggttgccgagttcctggccggccacccgcgggtcgcccgggtccactaccccggccatccgtcgcacccgcagcacggactggccctccggcagatgcggggggcgtcgggcctgctctccttcgagctggacaccggggacctgaagcaggtcagccggttcgtcgacgccctgcggctcttccggctgggggtctcctgggggggctacgagtccctggtgtggctgccggtcatcggcgcgatgcaccgcgcgcccgaggagcagtggccgaacccggggctggtccgcatccacgtcgggctggaggatgtggacgatctcctcgaagacctcgaccgggccttgcgggcgctgtag

SEQ ID NO: 135978 - protein, 395 aa, Symbiobacterium thermophilum IAM 14863
MERPAPVPSDRAETLAAHAGDDPFRFLGAAAPPIFETSTFVFRTVADALAAFADEQEHYVYTRRRNPTVRVVEEKLAALEGAAECRLFASGMAAISAAILSCVGAGDHVVCVDTAYGPARAFITGYLSRFGISATLVDGCDPAEWEAAVRPNTRLFYLESPSSGLMKLQDLAAVTALARRHGIATICDNSYATMLLQRPLELGVDLVVYSCSKYFGGHSDVLAGAVLGPAERIRRIGDAEQPLLGGVVGPFEAWLIGRGLRTLPLRLRQHQQSAGRVAEFLAGHPRVARVHYPGHPSHPQHGLALRQMRGASGLLSFELDTGDLKQVSRFVDALRLFRLGVSWGGYESLVWLPVIGAMHRAPEEQWPNPGLVRIHVGLEDVDDLLEDLDRALRAL

SEQ ID NO: 135979 - DNA, 1191 bp, Mannheimia succiniciproducens MBEL55E
  CDS (1)..(1191): transl_table=11
atgtcaaacaaatattcacttgcaacgacgctggttcacgccggtcgtagcaaacgcgttagccagggtagtgtaaatccggtggtgcaacgcgcatcttcattggttttcgatagtatcgcagataaacgacaagcaaccgttaaccgtgccaagcaggcattattttacggtcgtcgcggcaccttaactcattttgccttgcaggatttaatgtgcgaaatggaaggcggcgcaggctgttatctttatccctgcggtgcggcggcggtgaccaatgcaattttagccttcgtccaatccggtgataatattctgatgacgggtgccgcctatgagccgacacaggatttttgtaacaaaattctgagtaaaatgaatgtgagcactacctattatgacccgatggacggcgagaaaatcgccgaactagttcagcctaacactaaagtcttatttttagaaagcccgagttcgctcacttttgaagtgcctgatgtgccgaatatcgttaaagcggtgcgtaagatcaatcctgaaatcgtaattatgattgataacacttgggcgggcggcattttatttaaagctctggaacatgacatcgacatttccattcaggcgggtactaaatatttggtaggacactccgatgtgatgattggcacagccgtatctaacgcccgttgttgggatcaactgcgggaaaattcctatttaatggggcaaatggtggacgcggataccgcttataccaccgcccgaggtattcgttcccttgccgtacgtttcaaacaacacaccgaaagtagtattaaggtggcacaatggcttgccgaacagccggaagttaaggcggtttttcatcccgctttgccgagttgcccgggacatgaattcttcaaacgggatttcaccggttccgccgggttattctcctttgaattaaaagaacaattgagtcgcgaaaaacttgaacgttttatggataatttcaaattattcagcatggcgtattcatggggcggttttgagtcgttaattctttataatcaaccggcggatatagccgctattcgcccgaatattaagcgtaaactgacaggaacattaatccgtattcatattggttttgaagatgtgaatgaattaattgaagatttaaaagccgggtttgaacgtttgaaatag

SEQ ID NO: 135980 - protein, 396 aa, Mannheimia succiniciproducens MBEL55E
MSNKYSLATTLVHAGRSKRVSQGSVNPVVQRASSLVFDSIADKRQATVNRAKQALFYGRRGTLTHFALQDLMCEMEGGAGCYLYPCGAAAVTNAILAFVQSGDNILMTGAAYEPTQDFCNKILSKMNVSTTYYDPMDGEKIAELVQPNTKVLFLESPSSLTFEVPDVPNIVKAVRKINPEIVIMIDNTWAGGILFKALEHDIDISIQAGTKYLVGHSDVMIGTAVSNARCWDQLRENSYLMGQMVDADTAYTTARGIRSLAVRFKQHTESSIKVAQWLAEQPEVKAVFHPALPSCPGHEFFKRDFTGSAGLFSFELKEQLSREKLERFMDNFKLFSMAYSWGGFESLILYNQPADIAAIRPNIKRKLTGTLIRIHIGFEDVNELIEDLKAGFERLK

SEQ ID NO: 135981 - DNA, 1164 bp, Campylobacter jejuni RM1221
  CDS (1)..(1164): transl_table=11
atgaactcaaaaactaaacttattcattgtggcagaggcgatcaaggcgctgaagtaagatcagtcaatcctacacttatgcgtgcatcaaccatactttttaaagatcacgcaacttggcaaaaatacagaggattaagaaaaacagatcgtgttttaagttatggagctagaggaacaacaaccaattttgaacttgaaaaacttatttgcactctagagggtggttatagagcacaacttttcccaacaggacttgcagcattagctatggtgcttttaaactatgcaagcaaagatgcacattttttaatcactgatgcaatttatgggcctgtaagaacgatttgcgaattatttttagacaaaatgggagttgaaattgattttttaaaagctgatgcaagtgatgtagaagaaaaaatcaaacctaataccaagcttatcctatgtgaaagtccaggttctatactttatgaaatcatagatctaccaaagctttgtaaaatcgcccactcttacaatatccctgtagcgattgacaatacttattctagtggatattttctaaatcctttagaacttggagtggatatttcagttatcgccgctacaaaatatcttagcggacactctgatgtaaccatgggtatagtagtaatcaacgaaaaagagtggaaaaattttgacaaacttccagaagctttaggctttacaacaagtcctgatgatgcttacttagtgcttcgtggcatgagaaccttagatgtgagaatgaaagctcacgaaaaaagtgctgatgaaattgtagagtttttacaaagcagaaaagaaattaaaacaattttctatccaaaactcaaatcccacccaaatcatgaaattttcatgcgtgatcataaaggtgcaaatggcatgattaccatagaatttgcagaagattacactaaagatgatgcgattaaatttgtagatttattgcaatttttctccataggtgctagttggggtggctatgaaagtttagccacagtaacaactccgccaagaactgcaacagacctaagtgcaagagggccatttgtaagatttcatataggtcttgaagatactaaagatttaattgctgatttaacacaagcttttgatagtattaaaaaataa

SEQ ID NO: 135982 - protein, 387 aa, Campylobacter jejuni RM1221
MNSKTKLIHCGRGDQGAEVRSVNPTLMRASTILFKDHATWQKYRGLRKTDRVLSYGARGTTTNFELEKLICTLEGGYRAQLFPTGLAALAMVLLNYASKDAHFLITDAIYGPVRTICELFLDKMGVEIDFLKADASDVEEKIKPNTKLILCESPGSILYEIIDLPKLCKIAHSYNIPVAIDNTYSSGYFLNPLELGVDISVIAATKYLSGHSDVTMGIVVINEKEWKNFDKLPEALGFTTSPDDAYLVLRGMRTLDVRMKAHEKSADEIVEFLQSRKEIKTIFYPKLKSHPNHEIFMRDHKGANGMITIEFAEDYTKDDAIKFVDLLQFFSIGASWGGYESLATVTTPPRTATDLSARGPFVRFHIGLEDTKDLIADLTQAFDSIKK

SEQ ID NO: 135983 - DNA, 1188 bp, Haemophilus influenzae 86-028NP
  CDS (1)..(1188): transl_table=11
atgcaacaacacaatctctcaacaacatttgtccatgcagggcgtcaaaaacgtttttcacaaggatcggtaaaccctgttttacagcgagcttcttcattactatttgacagtattgaagataaaaaacacgctactcaacgtagagcaaaaggcgaattattttatggcagaagagggacgctaacacattttgctttacaagatttaatgtgcgaaatggaggggggggcaggttgttatctttatccttgtggtacagcagcagtaactaattcgattctttcttttgttaaaactggcgaccatgtgttaatgagtggtgcagcttacgagccaacccaatatttctgtaatattgtgctgaaaaaaatgcagatcgatataacttattacgatcctcttattggtgcggatattgcaacgcttattcaaccgaatacaaaagtacttttcttagaagcaccgagttctattacaatggaaattcccgatattccgactattgtgaaggctgcaagaaaggtgaaccctaatattgtgattatgattgataatacttggtcggcaggtgttctatttaaagcgttagagcatgatattgatatttctattcaggcgggtacgaaatatttagtgggtcattcagatattatgattggtactgccgttgcgaatgcgcgaacttgggatcaacttagagaacattcctatttaatggggcaaatggttgatgcagattctgcttatacgactgctcgtggtatccgtacattgggggtacgattaaaacaacatcaggaaagcagtattaaagtggcaaaatggttgagtgagcaaccagaagtaaaaactgtgtaccatccagctttaccaagttgccctggtcatgaattctttttacgtgattttagtggaagcagtggtttattttcttttgaattaacccagcgattaacttcagagcaagtatcaaaatttatggatcattttcaactgttcgctatggcttattcatggggaggatttgagtctctaattctttgtaatcaaccagaagaaattgcacatattcgtccaaatattaaacgtaatcttacaggttcattaattcgtgtgcatattggttttgaaaatgtggatgaactaattgcagatttgaaagctggttttgagcgaattgcttaa

SEQ ID NO: 135984 - protein, 395 aa, Haemophilus influenzae 86-028NP
MQQHNLSTTFVHAGRQKRFSQGSVNPVLQRASSLLFDSIEDKKHATQRRAKGELFYGRRGTLTHFALQDLMCEMEGGAGCYLYPCGTAAVTNSILSFVKTGDHVLMSGAAYEPTQYFCNIVLKKMQIDITYYDPLIGADIATLIQPNTKVLFLEAPSSITMEIPDIPTIVKAARKVNPNIVIMIDNTWSAGVLFKALEHDIDISIQAGTKYLVGHSDIMIGTAVANARTWDQLREHSYLMGQMVDADSAYTTARGIRTLGVRLKQHQESSIKVAKWLSEQPEVKTVYHPALPSCPGHEFFLRDFSGSSGLFSFELTQRLTSEQVSKFMDHFQLFAMAYSWGGFESLILCNQPEEIAHIRPNIKRNLTGSLIRVHIGFENVDELIADLKAGFERIA

SEQ ID NO: 135985 - DNA, 1182 bp, Colwellia psychrerythraea 34H
  CDS (1)..(1182): transl_table=11
atgaaacaagatactaaaatagtaaatgctggacgtagtgctaaatggactaatggggttgttaaccctgcggtaacacgcgcatctaccgtggtatttaatactgtcgcagagatgaataatgctgtggccaaccgacataatcaaaccatggtgtatggtcgtcgaggtactacgacttcttttgcttttagcgatgctatgactgagttagaaggcggagcaggttgtgctttatatccttcaggtactgcagctattaccaatgctattttagctttcgttaagcaaggtgaccacatcttaatggttgatagtgcttatgagcctacgcgtgattattgcgataaaatattagctaaaatgggtgttagtaccacctattatgatcctatggttggtgctgatattgaagcattgattcaagataacacctgtctaattttcttagagtcaccaggctctattaccatggaagtacaagatgttcctactattagcgctatagcacataagcatgattgtatcgttatgcttgataatacttggggcgcaggtattaacttcaagccgtttgattatggtgttgatgtaagtatacaagcagcaaccaaatatattgttggtcattctgatgtaatgttaggcacagcgacagcggtagaaaaatattggcctcaactgagagattacagttatttgatgggacaatgtacctctcctgatgatctatacctagcacttcggggcattcgtactcttgggataagattaaaacagcaccaaaaaagtgcaactaaggtagctcaatggttacaagaacgtccagaggtcgctaaaatattacaccccgcgtttgagtcatgtccaggtcatgaatttttcaaacgagattttgaaggctctaatggtttattttcttttgtacttaactgcggtaataaagaagcattaacagcatttttagatggtttacatcattttaaaatgggttactcatggggaggttttgaaagtttaattttaggtatcactaatgtaaacgctattcgaagtgcgactacatttgattgtgagtttccgctaattagactacatatcggtttggaagatgtagacgatttaattgaagatttatcgaaaggatttgagcgttttaatcaagtacttgccaattcatag

SEQ ID NO: 135986 - protein, 393 aa, Colwellia psychrerythraea 34H
MKQDTKIVNAGRSAKWTNGVVNPAVTRASTVVFNTVAEMNNAVANRHNQTMVYGRRGTTTSFAFSDAMTELEGGAGCALYPSGTAAITNAILAFVKQGDHILMVDSAYEPTRDYCDKILAKMGVSTTYYDPMVGADIEALIQDNTCLIFLESPGSITMEVQDVPTISAIAHKHDCIVMLDNTWGAGINFKPFDYGVDVSIQAATKYIVGHSDVMLGTATAVEKYWPQLRDYSYLMGQCTSPDDLYLALRGIRTLGIRLKQHQKSATKVAQWLQERPEVAKILHPAFESCPGHEFFKRDFEGSNGLFSFVLNCGNKEALTAFLDGLHHFKMGYSWGGFESLILGITNVNAIRSATTFDCEFPLIRLHIGLEDVDDLIEDLSKGFERFNQVLANS

SEQ ID NO: 135987 - DNA, 1257 bp, Ralstonia eutropha JMP134
  CDS (1)..(1257): transl_table=11
atgccgcatcgtttaaccatgagaattgctatgaatgaaaacacccacctcgtttgtgccggccgccacccggagcgcttcggcggcgtcgtcaacacgccgatcttcagggcgtcgaccatcctcgcaggttcgatggccgaatgggaagagatgaagcgcgcgcgcgctgcggaagagcccggggcaacgacttatggccgctatggcacgcctactacgcaagcgctcgaagaagccgtagctggtcttgagggcggatatcgatcgctagtctttccttccggccttgccgcggtcagtactgcgctgacagctttactttcggcaggtgaccacgtcctcgtgaccgacagcgcttattccccgacacgcgcctttctggagcgggtcctggcgcgcttcggcgttgaagtcgagacctatgatccggtaggcggcacgccgatcgaggccctgttgcgggcgaatacgcgcgtggtctatgtagaatcgcccggttccgagaccttcgacatccaggacattcctgccattgctgcagcggcgcatcgacacggtgcctatgtcgtaatggacaacacctgggggacgccgctctacttcaagccgttcgcacatggggtcgacgtgtcggtccaggccgccacgaagtacatcgtgggtcattccgacgcaatgcttggcgtagtgacgtgcaatcgagagacctggcctctgatcaagcagaccactcatgacatgggtcaaacggcaggcccggatgatatctatctggctctgcgcggcctgcgtacattggccgtcagattgcagcgtcactggcaatctgggctgcgtgtcgcccaatggctggagctgcagccgcaggtcgaagcggtcctgcatcccgccttaccatcccatccgggacacgcactgtggaagcgcgactttaccggcgcatgcggcctcttttcggtggtgctgcgcacaaactctaaagcctcgctcgcggcgttcattgacgctctcgagcatttcggcctgggtgtttcgtggggcggctatgaaagcctcgtgatcccgttcacgccgggaatgggacgcaccggccatcggtggccgcaccagggacaagcagtacgtctgcatgtgggcctggaggacacggaggatctgatcgacgatctgcggcggggtttgctggccctttcggcgtgcgactccgaagcagagaacgagaagtctggctccggcgagatctgccatagctga

SEQ ID NO: 135988 - protein, 418 aa, Ralstonia eutropha JMP134
MPHRLTMRIAMNENTHLVCAGRHPERFGGVVNTPIFRASTILAGSMAEWEEMKRARAAEEPGATTYGRYGTPTTQALEEAVAGLEGGYRSLVFPSGLAAVSTALTALLSAGDHVLVTDSAYSPTRAFLERVLARFGVEVETYDPVGGTPIEALLRANTRVVYVESPGSETFDIQDIPAIAAAAHRHGAYVVMDNTWGTPLYFKPFAHGVDVSVQAATKYIVGHSDAMLGVVTCNRETWPLIKQTTHDMGQTAGPDDIYLALRGLRTLAVRLQRHWQSGLRVAQWLELQPQVEAVLHPALPSHPGHALWKRDFTGACGLFSVVLRTNSKASLAAFIDALEHFGLGVSWGGYESLVIPFTPGMGRTGHRWPHQGQAVRLHVGLEDTEDLIDDLRRGLLALSACDSEAENEKSGSGEICHS

SEQ ID NO: 135989 - DNA, 1182 bp, Burkholderia sp. 383
  CDS (1)..(1182): transl_table=11
ttgaaccacctgcattcgatcgacaccgttctcgcccatgaaggccgctcgcacggccagcccggttcgccggtcaacccgcctgtttatcgccagtcgacgctgctctttcacggcaccgacgcgctcgacgccgtacgcggcacgccgctcgcgtacgggcgtcatggcagcccgaccacgcgcgcgctcgagaaagcgctcgcgcggctcgaaggtgcgcacgccgcgttgctgacgccgagcggcctgagtgcgatcaccaccgcactgctcgcggtgctgaatccgggcgaccatctgctgatggccgactcggtgtacgacccgacccgttcgttctgcgacgaaacgctggcgcgcctcggcatcgaaacgacttacttcgatccgacgatcggcgcggacatcgcgtcgctgatgcggccgaacacgcgcgcggtattcgccgaatcgccgggctcactgaccttcgaggtgcaggatattccggccatcagccgcgttgcgcaccagcgcggcgcggtcgtgctgctcgacaacacctggggcacgccgctgaatttccgctcgttttcgcatggcgtcgacgtgtcgattcacgccgcgaccaaatacatcgcggggcactcggacgtgctgatgggcgcgattctgaccaccgaggcgctcgcaccgaaagtcacgcgcttctaccggcagctcggcatgaccgtcagcggcgacgacgcgtatctcgcactgcgcggcctgcggacgctgtcggtccggctcgagcggcatcagcgcaacgcgcacgtgctgaccgactggctgtcgcagcagccggaagtcgcgcggatcctgtatccggcacgcgccggcgacgccggtcatgcgctgtggcagcgcgatttcacgggcgcgtgcgggctgttcggcgtggtgctgcatccgcagggcgacgaagccgtgcgcgccctgctcgacggcatgacgtgctttggcatggggtatagctggggcggcttcgaaagcctgatcatcccgtccaatccggcgcgtaaccgcactgccacccaatgggcggcgaccggcccgctgctgaggattcatgcggggctcgagcatcccgacgacatgattgccgacctcgccgccggcttcgcgagaatgcgcgccgccgcgctcgcggaagcgtga

SEQ ID NO: 135990 - protein, 393 aa, Burkholderia sp. 383
MNHLHSIDTVLAHEGRSHGQPGSPVNPPVYRQSTLLFHGTDALDAVRGTPLAYGRHGSPTTRALEKALARLEGAHAALLTPSGLSAITTALLAVLNPGDHLLMADSVYDPTRSFCDETLARLGIETTYFDPTIGADIASLMRPNTRAVFAESPGSLTFEVQDIPAISRVAHQRGAVVLLDNTWGTPLNFRSFSHGVDVSIHAATKYIAGHSDVLMGAILTTEALAPKVTRFYRQLGMTVSGDDAYLALRGLRTLSVRLERHQRNAHVLTDWLSQQPEVARILYPARAGDAGHALWQRDFTGACGLFGVVLHPQGDEAVRALLDGMTCFGMGYSWGGFESLIIPSNPARNRTATQWAATGPLLRIHAGLEHPDDMIADLAAGFARMRAAALAEA

SEQ ID NO: 135991 - DNA, 1179 bp, Rhodospirillum rubrum ATCC 11170
  CDS (1)..(1179): transl_table=11
atgaaacaagataccaccgtcgtccatagcggccgcgacccccagcggttcgatggcgtcgtcaatgttccggcctatcgcgcctcgaccgtcaccttcccgaccgtggccgacctcaagcgcaagcacgccatccgtttcgagaccacctattacggccgctacggcacgccgacgacggccgcgctggaagaggccgtggccgccctcgaaggcgcgacccattgcgccgccacctcgtcgggcatgggcgcggtggccggagccctgctcaccttcctcaagcagggcgaccacctgttgatggtcgatacggtctattggccgacccgcaagttctgcgatgttttcctcaagaatttcggcgtcgagaccacctattacgatccgctgatcggcgcgggcatcgccgccttgatccggcccaacaccaagatcgtctattgcgaatcgccgggcagccataccttccaggtccaggatattcccgccatcgcgggcgaggcccacgccaagggcgccctggtgctgctcgataacacctgggcctcgccgcttttcttcgagcccttttccaagggcgtcgacgtgtcgatccaggcggcgacgaaatatatcgtcggccattccgacgccatgctcggcaccatttccgtgcgccagcgcgattggttcctggcgatcaaggacaccttgggctcctttggctatgccaccggatcggaggaggccttccttggcctgcgcggcctgcgcacgctctcggcccggctggagcgccatcagcgctcggccctggcggtcgccacttggctgcaaagccagcccgaggtcgagcgcgtgctttaccccgccctgcccgatgatcccggccatgccttgtggacgcgtgatttcaccggcgcctcggggctgtttggcgtgctgctgaaggcgggaacggaagagcaggtcgcccatatgctcgaccatatgacgctgttcgccatgggctattcctggggtggctatgaaagcttggtcatcccgacccgcggcgccatcgagcgcaccgccacccaatggacccatcagggcccgtcgctgcgcctgcatatcggcctggaagacccggccgatctgatcgccgatctgcgcgccggcctcgaccgcctgggtgaaaaggccctggatcaatga

SEQ ID NO: 135992 - protein, 392 aa, Rhodospirillum rubrum ATCC 11170
MKQDTTVVHSGRDPQRFDGVVNVPAYRASTVTFPTVADLKRKHAIRFETTYYGRYGTPTTAALEEAVAALEGATHCAATSSGMGAVAGALLTFLKQGDHLLMVDTVYWPTRKFCDVFLKNFGVETTYYDPLIGAGIAALIRPNTKIVYCESPGSHTFQVQDIPAIAGEAHAKGALVLLDNTWASPLFFEPFSKGVDVSIQAATKYIVGHSDAMLGTISVRQRDWFLAIKDTLGSFGYATGSEEAFLGLRGLRTLSARLERHQRSALAVATWLQSQPEVERVLYPALPDDPGHALWTRDFTGASGLFGVLLKAGTEEQVAHMLDHMTLFAMGYSWGGYESLVIPTRGAIERTATQWTHQGPSLRLHIGLEDPADLIADLRAGLDRLGEKALDQ

SEQ ID NO: 135993 - DNA, 1233 bp, Novosphingobium aromaticivorans DSM 12444
  CDS (1)..(1233): transl_table=11
atgagcagttccgacaacatgagcgatctggggcccggcacgcgcggcgtgcttgcggggcggcgggaagagtggacgggcacgcccgatcatcccggggccgtggtcaatcctgccgtatggcgcgcatcgacgcatctctacccggacatggcggcgctgcgggcgcatccggccaacgaggacgggcggttctattacggacggcgcggcgccccgacgcagtgggcgctggccgaggcgttgacgcagatcgaaccgggcgcggcagggaccgtgctctatccatcgggcgtcgcggcaatcgcgggcgtactgctgacaatgctgcgaccgggcgacgtgctgctgatgacggacaacgcctatgaaccgagccgcgtgatggcacgagggttgctcagggatttcggcgtggagacgcgctggttcgatccgacgagcattggcgccttcgaggccgcctgctgcgacaggacgaaggcggtgctgctggaaagccccggcagcctgaccatggaagtgcaggacgtgcccgcgctggcggctgcggcgaaggcgcgcgggatcgtcagcgtgctggacaacacgtgggcatcgccgctgggatttgcgggtctttcgcacggcgtcgacatcgtggcgatgagcctgaccaagcatgtgtccggccattccgattgcatgatgggcagcgccagcgcgggaccggactggtatcgcaagctgcgcctgcgctcgcagggactggggctggtggtttcgcccgacgatgcctcgctgatgctgcgcggcctcaggaccatgaagatgcggcttgaggcggagaccgcttcggcgctggccatcgccgggtggctggagggacggcccgaggtggcgcgggtgctgtgcccgatgctgccgggatcgcccggccacgagttgtgggcgcgcgactttgccggcggctgcgggctgttcagctttgtcctgaagggcggcagcagcgcggcgcgcgatgcgctgatcgatgcgcttgcgctgttcggcatcggctattcgtggggcgggttcgagagcctggcgacaccggtcgatccggcatcgatccgcacggcgagcgcgtggccgctggcgggcatggcgatggaggaccgcttcggcgtgcggctttcgatcgggctggaggacaccgccgacctcatcgcggacatcgagcaggcgcttggcgcgtggagggcggcgctgtga

SEQ ID NO: 135994 - protein, 410 aa, Novosphingobium aromaticivorans DSM 12444
MSSSDNMSDLGPGTRGVLAGRREEWTGTPDHPGAVVNPAVWRASTHLYPDMAALRAHPANEDGRFYYGRRGAPTQWALAEALTQIEPGAAGTVLYPSGVAAIAGVLLTMLRPGDVLLMTDNAYEPSRVMARGLLRDFGVETRWFDPTSIGAFEAACCDRTKAVLLESPGSLTMEVQDVPALAAAAKARGIVSVLDNTWASPLGFAGLSHGVDIVAMSLTKHVSGHSDCMMGSASAGPDWYRKLRLRSQGLGLVVSPDDASLMLRGLRTMKMRLEAETASALAIAGWLEGRPEVARVLCPMLPGSPGHELWARDFAGGCGLFSFVLKGGSSAARDALIDALALFGIGYSWGGFESLATPVDPASIRTASAWPLAGMAMEDRFGVRLSIGLEDTADLIADIEQALGAWRAAL

SEQ ID NO: 135995 - DNA, 1224 bp, Acidobacteria bacterium Ellin345
  CDS (1)..(1224): transl_table=11
gtgtccgtttggacaatgtccgcgttcgggaacctctcgccgcaagttctctatactgtcgccatgaagaagagttggaagacaaagctgatccacggcgatagccatgccccggagggattccgctcgctggtaactcctacctaccgcggatccaccgtgctcttccccgatgctgaatcggttacggaccagtgggaccagcatcgcgtgggctacacctacggcctctacggcacgccgacgacgttggaactcgcagcacgcgtctgcgagctcgaagacggcgaacacaccatcatcaccgccggaggccagggcgcgatttcgctcatccaactctcgctgctcaatgcgggtgaccacatcctgatccccgagaatatctatggccccaatcgcaagttggcatattccgttctcaagcgcttcggcgtggaggtcacggtttatccgcccttgatcggcgcgggaatcgcagagttgatcaaggacaacacgcgtctcgtctggtgcgaaagtcccggctcactgacgatggaagtgcaagatgttcctgcaatcgcgaaagcggcgcacgcccgcggcgcgctggtagtgctcgataacacctggtcgtctggaatctttttccgggccttcgaccacggcgttgacgtcgagatgcaggcgctcacgaaatatgtcgctggccacagcgatgttcttcttggcgcaattactattcgcgaccgcgcgatctacgaaaagctcggcaatacctaccaggtgctcggctgcgccccatcgcctgatgattgccagctcgcactacgcggcatgaagacgctcggggtgcgcctcgcgcagattggaagttccgccctgagggttgcgcaatggctcgcagcgcgaccggaaatcgaaaccgtgctacatcccgcgcttccctcctgtccgggccacgagttctgggagcgcgacttcactgggtcggcgggattgttttcgatcgtctttaagtccggccccacgaagcaacaggtgcaggcttttgtgaatgcactggagcttttcgagatcggatatagctggggtggagtcgcaagcctcgccgtcaattacgacctcagccacgcgaagggacgctcggagtatggccatcgcatcgtgcggctgtatatagggttggaggaaccggaagagcttattgcggatttggagcaggcactcggaaagatctag

SEQ ID NO: 135996 - protein, 407 aa, Acidobacteria bacterium Ellin345
MSVWTMSAFGNLSPQVLYTVAMKKSWKTKLIHGDSHAPEGFRSLVTPTYRGSTVLFPDAESVTDQWDQHRVGYTYGLYGTPTTLELAARVCELEDGEHTIITAGGQGAISLIQLSLLNAGDHILIPENIYGPNRKLAYSVLKRFGVEVTVYPPLIGAGIAELIKDNTRLVWCESPGSLTMEVQDVPAIAKAAHARGALVVLDNTWSSGIFFRAFDHGVDVEMQALTKYVAGHSDVLLGAITIRDRAIYEKLGNTYQVLGCAPSPDDCQLALRGMKTLGVRLAQIGSSALRVAQWLAARPEIETVLHPALPSCPGHEFWERDFTGSAGLFSIVFKSGPTKQQVQAFVNALELFEIGYSWGGVASLAVNYDLSHAKGRSEYGHRIVRLYIGLEEPEELIADLEQALGKI

SEQ ID NO: 135997 - DNA, 1167 bp, Mesorhizobium sp. BNC1
  CDS (1)..(1167): transl_table=11
atggcctcggataaaagcggcggcataaacaccaggcttgcccatatgggcaatgatcccttgtcgttccacggctttgtcaatccgcctgtagtgcacggctcgacggtgctttttcccgacagtgcgacaatggcttcgcggagccagaaatatacctacgggacgcgtgggacgcctacaacagatgcgctggcaaccgccatcaacgaactcgaaggctctgccggtacgatcattgtgccgtcggggctggcggcggtgacagtcccgctgctcgcttttttatcagccggcgaccacgtgctcatcgtcgattccgtctaccatccgacacgccgcttcgccgacacgatgctcaagggtttcggcgtggaggtggagtattacgatcctctcgtgggcggggagatcgaagccctgatgaagcccaatacgagggtggtcttcaccgaatccccgggttcaaacacaatggagattcaggatattccagccatagccgccgcggcgcgtgcacgcggcgccattgtgatgatggacaatacctgggcgacgccgctccttttccgcccgctggaccacggagtcgacgtatcgatccacgcagccaccaaatatcccggcgggcactcggacgttctcctcggcacggtctccgccaacgaaagctcctgggaacgattgcacgatgccttcattaccctcggcacctgcgctgggcccgacgatgtctaccaggtgctgagggggcttcgcacgatgggcatccggcttgagcgccatcaggaaagcgcgctcgaaatcgcgcgttggctggaaggcatgccaggcgtggcaagggtgctccatcccgccctcccctcgcatccgggacacgcaatctggaaacgagatttttcgggcgcgagcggccttttttccttcgttctctctggcggtggagagaaggaggcgcacgcatttctcgatacgctgaaaatttttgggctcggctattcctggggcggatttgaaagcctcgcggtccatgtttcgctggccgatcgcagggttgcaaagggcaattttccagggccggtgatccggcttcagattgggctggaagacgcggctgacctcaaggccgatatcgaaaatgggcttagagcaacgggattacgctag

SEQ ID NO: 135998 - protein, 388 aa, Mesorhizobium sp. BNC1
MASDKSGGINTRLAHMGNDPLSFHGFVNPPVVHGSTVLFPDSATMASRSQKYTYGTRGTPTTDALATAINELEGSAGTIIVPSGLAAVTVPLLAFLSAGDHVLIVDSVYHPTRRFADTMLKGFGVEVEYYDPLVGGEIEALMKPNTRVVFTESPGSNTMEIQDIPAIAAAARARGAIVMMDNTWATPLLFRPLDHGVDVSIHAATKYPGGHSDVLLGTVSANESSWERLHDAFITLGTCAGPDDVYQVLRGLRTMGIRLERHQESALEIARWLEGMPGVARVLHPALPSHPGHAIWKRDFSGASGLFSFVLSGGGEKEAHAFLDTLKIFGLGYSWGGFESLAVHVSLADRRVAKGNFPGPVIRLQIGLEDAADLKADIENGLRATGLR

SEQ ID NO: 135999 - DNA, 1200 bp, Shewanella sp. MR-4
  CDS (1)..(1200): transl_table=11
atgacagataaacatcagctagccacccaaatcgtcagcgtcggtcgagataaaaaatggaccaagggcgtgattaacccgcccgtatttcgcgcatcgactatcgtcttcgacacaatggaagacatgcgtcacgccgccaaaaacaaaaccaatggcgaaatgttctatggccgccgtggtaccccaacccattttgcgtttcaggcagcgatcagtgagctcgaaggtggcgtaggtacggcgctgtatccctcaggtgcagcggcgattagcgcggctttgttatcgtttttacaggcgggcgatcacctgctgatggtcgacagtgtgtacgagccaacccgcgatctctgtagccatattctggcgggctttaatattgagaccacctattacgatcccctgattggtgaaggtattcgcgcgcttattcgccccaatactaaggtgctgtttttagagtctcccggctccatcaccatggaagtgcaggacgtcccgaccctatgccgtatcgcccatgaacatggaatggtgaccattctcgacaacacttgggcctcaccaatcaatagcaagccctttgagatgggtgtcgatgtgtcgattcaagccgcgaccaaatatatcgtcggtcactctgatgtgatgattggcaccgcgactgccaacgaaaagcactggccgcagctgcgtgaacgcagttatttattggggcaaacgacttctcccgatgatgtgtatctcgctacgcgcggattacgcacccttggcgtgcgcatggcgcagcatgagaaaaatgcccttaaagtggctaactggttgaaaactcgccccgaggttgaccatttacgtcaccccgcctttgatacctgcccaggacatgagttctttaaacgcgactttagcgccgccaatggtctgttctccttcgtgttaaagcaaggggatcaggaggcagtgaccgcgctcgttgaaaatatgcagcattttaaaatgggcttttcttggggaggttatgagagtctgatcctagggattttcgggattgaaaaaatccgcagtgccactcagtgggatgcaagcaagccattgatccgtgtgcatattggcctcgaagatcccgatgatttaattgccgatctcagcgcaggcttcgatcgctttaatgccgtactcgccgccaaggccaaataa

SEQ ID NO: 136000 - protein, 399 aa, Shewanella sp. MR-4
MTDKHQLATQIVSVGRDKKWTKGVINPPVFRASTIVFDTMEDMRHAAKNKTNGEMFYGRRGTPTHFAFQAAISELEGGVGTALYPSGAAAISAALLSFLQAGDHLLMVDSVYEPTRDLCSHILAGFNIETTYYDPLIGEGIRALIRPNTKVLFLESPGSITMEVQDVPTLCRIAHEHGMVTILDNTWASPINSKPFEMGVDVSIQAATKYIVGHSDVMIGTATANEKHWPQLRERSYLLGQTTSPDDVYLATRGLRTLGVRMAQHEKNALKVANWLKTRPEVDHLRHPAFDTCPGHEFFKRDFSAANGLFSFVLKQGDQEAVTALVENMQHFKMGFSWGGYESLILGIFGIEKIRSATQWDASKPLIRVHIGLEDPDDLIADLSAGFDRFNAVLAAKAK

SEQ ID NO: 136001 - DNA, 1170 bp, Hyphomonas neptunium ATCC 15444
  CDS (1)..(1170): transl_table=11
atgagcgcacgggatgacgccgagccccagacccgcctgatccacacccgcgccgaacgccttggccgggtgaccgtgaacccgccggtggagcgtgcctcgaccgtgctattccgcaccgaggcgcagctttacgggcccaagcccacctatggccggatggggctgacggttcaccgcgaactggaagcagcgatgtgcattctggagggggcaaagcatacgcgccttgcctccaatggcctgcaagcctgcgcgctggcgattgcgagcgtggtggaggcaggcggacattttctgttcacggacagtgcctatggccccaccgcgcgcttctgcgagaagcggctgaaggcgatgggcgtggaggccgagcggttcgatccgcgcatgggcgcgggcattgagcggctgttccgcgacaatacgcaggcgatccttgtggaatcgcccggctctctgacgtttgagatttcagacctgcctgccatggcgcaagtggcaaaggcgcgcggcatacgcattgtgtgtgacaacacctggggcgcgggattgcattacaagccgctggcgctgggggcggacctttccgtgcaggcgctgacgaaatatgtggtgggccattccgacgcctttggcggcgcagtaatgaccaatgagctgagccttgccaacaaggtggccaactgttcggaggattggggcattggcctcgcgccggatgacgcctatctcgccgtgcgcggcattcgcagcctgaccacgcgcctgaaggcgcatgaggcggcggggctggagctggcgcagtggctggaagggcggcccgaagtggcaagcgtgatccatcctgccctgccctcccaccccgatcatgcgctttggaagcgggattttactggcgcctgcgggctgttttcctttgtgctgaaggattatccggcaggcgcactggagcggttcttcgaggcgctgagcttgttcggcatgggcttctcctggggcggcttcgagagcctgatcattccgtgcgatgaccagctgacccgcagcgaaacctgctggacgaaagacaagcccggccagctgatgcgcgtgcatgtagggctggaagcggtgagcgatctgaaagccgaccttgaggcaggctttgcggcattgtccgcaggctga

SEQ ID NO: 136002 - protein, 389 aa, Hyphomonas neptunium ATCC 15444
MSARDDAEPQTRLIHTRAERLGRVTVNPPVERASTVLFRTEAQLYGPKPTYGRMGLTVHRELEAAMCILEGAKHTRLASNGLQACALAIASVVEAGGHFLFTDSAYGPTARFCEKRLKAMGVEAERFDPRMGAGIERLFRDNTQAILVESPGSLTFEISDLPAMAQVAKARGIRIVCDNTWGAGLHYKPLALGADLSVQALTKYVVGHSDAFGGAVMTNELSLANKVANCSEDWGIGLAPDDAYLAVRGIRSLTTRLKAHEAAGLELAQWLEGRPEVASVIHPALPSHPDHALWKRDFTGACGLFSFVLKDYPAGALERFFEALSLFGMGFSWGGFESLIIPCDDQLTRSETCWTKDKPGQLMRVHVGLEAVSDLKADLEAGFAALSAG

SEQ ID NO: 136003 - DNA, 1173 bp, Magnetospirillum magnetotacticum MS-1
  CDS (1)..(1173): transl_table=11
atgaagaaatccacccgcatcctccatgccggtcgcaagccggaacagttccacggcgcggtcaatccgccggtctaccatgcctcgaccattctccacccatcggtggaggccatggagaaaagcggccgaaatccgttcgagggcgtgcgctacggccgctttggcacgccgaccaccttcgccctggaagaggcggtggccgagttggaaggcgggcaccgcaccgtcgccacctcgtcgggactggccgccatcaccggcgcgctgctggccttcctcaaggcgggcgaccatctgctgatggtcgataccgcctatttccccacgcggaagttctgcgacacggtcctcagcggtctgggcatcgagattacctattatgacccgctggcaggcgccggaatcaaggcgctgatgcggcccaacaccaaggtggtgttcaccgaaagccccggctcgctgaccttcgaggtccaggacatcccggccatcgccgaggccgcccacgcggctggcgccatcgtcatgatggacaacacctggggcgtgctgcatttccagcccttcaccaagggcgtggacgtctccattcaggccgccaccaagtatatcgtcggccatgccgacgccatgttgggcaccatcaccgccgccacgccggaactgtggctcaaggtcaagacctccctggccgccttcggcgcctcgccggggacggaggagatgtatctgggcctgcgcggcctgcgcaccctggccgtccgcctgcgccagcatgccgagacggcgctgcgcctgacccaatggctggagacccggcccgaggttgagagcattctgtatccgccgctggcctccgatcccggccatgccctgtggaagcgggacttcacaggcggctgcggcctgttcggggtgatcctcaaacccgcgtccaaggcggcggtggatgccatgctggacggctattcccatttcaagctgggcttttcctggggtggcttcgagagcctggtgatccctacttcgggccattccatcatccgcaccgctacctcctgggcgcccaaagggccctcgctccggttccatgcgggtctcgaggatgccgacgacctgatggaggatctggagcgcggcttcgggcggctggcatgcgccggttcctga

SEQ ID NO: 136004 - protein, 390 aa, Magnetospirillum magnetotacticum MS-1
MKKSTRILHAGRKPEQFHGAVNPPVYHASTILHPSVEAMEKSGRNPFEGVRYGRFGTPTTFALEEAVAELEGGHRTVATSSGLAAITGALLAFLKAGDHLLMVDTAYFPTRKFCDTVLSGLGIEITYYDPLAGAGIKALMRPNTKVVFTESPGSLTFEVQDIPAIAEAAHAAGAIVMMDNTWGVLHFQPFTKGVDVSIQAATKYIVGHADAMLGTITAATPELWLKVKTSLAAFGASPGTEEMYLGLRGLRTLAVRLRQHAETALRLTQWLETRPEVESILYPPLASDPGHALWKRDFTGGCGLFGVILKPASKAAVDAMLDGYSHFKLGFSWGGFESLVIPTSGHSIIRTATSWAPKGPSLRFHAGLEDADDLMEDLERGFGRLACAGS

SEQ ID NO: 136005 - DNA, 1203 bp, Haemophilus somnus 2336
  CDS (1)..(1203): transl_table=11
atggatatttctatgagtaatacaacttcttttaccacatcaacaattcatgcagggcgtaataaacgagtatgtaaaaatgcggtaaaccctgttattcagcgtgcatcttcattggtttttgatactttagcagataaaaaacaagcaactatcaatcgagcaaaaggtggattattttatggacgtcgaggaacgttgacacattttgctttgcaagaattaatgtgtgaattggaaggtggtgagggttgctatctctatccttgcggtgcggcggcggtaagtaatgctattttagcttttgtaaaaaccggtgatcacgtgttaatgagcggtgctgcttatgaaccaacgcaagaattttgtcatataattttaaagaaaatgtcaattacaaccacattttatgatcctttaattggtgaaaaaattgcggatttagttcaaccaaatacgacagtcttgtttttggaagcaccaagttcacttactatggagatgccggacattgtatcgattgtgcaagctgctcgccaaatcaatcctaaaatagtagttatgatcgataatacttggagtgcaggtgtattttttaaggctttggatttcggtattgatatttcaattcaagcagggacaaaatatctcattgggcattctgatgcgatgattggtacagcggtggctaatgcacgttgttgggaacaattacgtgaaaattcttatttaatggggcagatggttgatgctgataccgcttacatgacagcccgtggtattcgtactctactagttcgcttaaaacagcatcaagaaaatggaattaaagtagctaaatggttactggaacagcctgaagtaaaaactgtttatcatccggcattgccaagttgtccgggacatcaatattttaagcgatattttacaggttccagtggattattttcttttgaactaaataaaaaactttctcaacaggcgttagaaaattttatggatcattttaagatttttactatggcatattcgtgggggggatttgaatcgctgattttatgcaatcaaccggaagaaatcgctaggattagacctaatattgaacgcaaattaaccggtacattaattcgcctacatattggtttagaggacgttgatgaccttattgccgatcttaaagccggatttgagcgtttgaaataa

SEQ ID NO: 136006 - protein, 400 aa, Haemophilus somnus 2336
MDISMSNTTSFTTSTIHAGRNKRVCKNAVNPVIQRASSLVFDTLADKKQATINRAKGGLFYGRRGTLTHFALQELMCELEGGEGCYLYPCGAAAVSNAILAFVKTGDHVLMSGAAYEPTQEFCHIILKKMSITTTFYDPLIGEKIADLVQPNTTVLFLEAPSSLTMEMPDIVSIVQAARQINPKIVVMIDNTWSAGVFFKALDFGIDISIQAGTKYLIGHSDAMIGTAVANARCWEQLRENSYLMGQMVDADTAYMTARGIRTLLVRLKQHQENGIKVAKWLLEQPEVKTVYHPALPSCPGHQYFKRYFTGSSGLFSFELNKKLSQQALENFMDHFKIFTMAYSWGGFESLILCNQPEEIARIRPNIERKLTGTLIRLHIGLEDVDDLIADLKAGFERLK

SEQ ID NO: 136007 - DNA, 1161 bp, Roseovarius nubinhibens ISM; identical to SEQ ID NO: 13928
  CDS (1)..(1161): transl_table=11

SEQ ID NO: 136008 - protein, 386 aa, Roseovarius nubinhibens ISM; identical to SEQ ID NO: 13929

SEQ ID NO: 136009 - DNA, 1218 bp, Erythrobacter sp. NAP1
  CDS (1)..(1218): transl_table=11
atgagcggcgctggcgacgacaagcatctggggccaggctcgcgcgttacgcgcgccggtcgccgagaggaatggacagggcgcgttgtgaacacgccagtgtggcgagcctcgacgcatctctacgagagtgaagcgcagcgcaaggcagctacgggctccaacagtgatggcgaattcttctacgggcggcggggcgctccgacccagtgggcgctggccgaagccttgaccgagattgagcccggcgcttttggcactgtgctttatcccagcggagtagcagcgatcgcgggggcgcttctcgcagtgttgaagcccggcgacacgctgctgatgagcgacaattcctacgatccatcgcgcagcatggcgacaggtttactcaaacgcatgggcatcgcgcatgctttcttcgacccgctggaccttggcgcgttcgaaaacgcgctgggcgaacattcgccgcgggccgtgtggttcgaaagccccggcagcctgacgatggaagtgtgcgacgtgcccgctttcgcttcggctgcgcgcgaggcgggagcggtgacgctcatcgacaacacctgggcgagcgcgctcggtttcgccgcgctcaaccatggctgcgacatcacaatgcagagcctgtccaagcatgttggcggacattctgacctgatgatgggttcggccagcgccggggagcggtggtacaaggcgttgcgccgcacgtctcagcaattggggcaggtggtctcacccgatgatgcagcgctcgccgcgcgcgggctgcgcacgatggccgttcggctcaagcaatcgacagcgagcgcgctgcaaattgcgcagtggctcgcccagcaaccacagattgccgaggtcatgtgtccgatgctcgaaggatcgcagggccacgagctctggacgcgtgattttaccggcggctgcgggctgttcagcttcgtcctgaactccgatgaccccgatgcgagtggaagattggtggatgccctcgacctgttcgggatcggctacagctggggcggctttgagagccttgccctccctatattcccgcatcagcaccgcgacgtcatggcctcgcctacgttcatcagcgggggtggcacacggccagccgttcgcctatcgatagggcttgaagagtcaggggacctgattgcggaccttgaacgcgcgctctcgcaactggataactcatga

SEQ ID NO: 136010 - protein, 405 aa, Erythrobacter sp. NAP1
MSGAGDDKHLGPGSRVTRAGRREEWTGRVVNTPVWRASTHLYESEAQRKAATGSNSDGEFFYGRRGAPTQWALAEALTEIEPGAFGTVLYPSGVAAIAGALLAVLKPGDTLLMSDNSYDPSRSMATGLLKRMGIAHAFFDPLDLGAFENALGEHSPRAVWFESPGSLTMEVCDVPAFASAAREAGAVTLIDNTWASALGFAALNHGCDITMQSLSKHVGGHSDLMMGSASAGERWYKALRRTSQQLGQVVSPDDAALAARGLRTMAVRLKQSTASALQIAQWLAQQPQIAEVMCPMLEGSQGHELWTRDFTGGCGLFSFVLNSDDPDASGRLVDALDLFGIGYSWGGFESLALPIFPHQHRDVMASPTFISGGGTRPAVRLSIGLEESGDLIADLERALSQLDNS

SEQ ID NO: 136011 - DNA, 1170 bp, Pseudoalteromonas tunicata D2
  CDS (1)..(1170): transl_table=11
atgaaaaaagaaacacaaattgtcagtgcaggacgtaaaaaagcatttactcatggcgtggtaaatcccgtggtacaacgcgcctctacgattgtgtttgataccgtagccgatatgaaacacgcggtgattaatagagccaatcacactttattttatggtcgcagaggtaccactacacattttgcgctgcaagatgccattagtgagttagaaaacggtgccggatgtgctttgtatccatcaggtgctgctgcaatcagcaatgcgattttatcctttgttaaaactggcgatcatattttaatggtggataccgcctatgaaccgacacgtgatttctgccgagtaattttacaaaatatgggggttgaaacgacttattacgacccattaattggcgaagggattaaagcgttaattcgtcccaatacgcgtattttgtttttagaatcaccaggttcaatttcaatggaagtgcaagatgtgccattgcttgcaagtattgcacatgagcacaatatgctagtgatgcttgataatacttatggtaatggctttcattttagaccactggattttggggttgatattagtattcaagctgcgacaaaatacattgttggtcattcagatgtaatgatgggagtggctgtcgcaaatgataaacattggccacagttgcgcgaaaattcttatttaatggggcaatgtacgtctgcggatgatgcttatttagcacttcgtggcttacgtacgttggctgtgcgtttacaacaacacgaaaaaagtgcattgaaaattgccgattggctaagtgcgcatcctttagttgatcatgttcgtcatcctgcattgccaacttgccccgggcatgagttctttaaacgcgattttcagggcagtaatggcttattttcttttgtgatgaaagagggcactcaagatgctattaacgcctttcttgatgcattacatcattttaaaatgggttattcatggggtggatttgaaagcttagtaacggcaaatttaacattatcacatcttagaactgcaacgggttggcagcatgggccgcttattcgtatccatgttggcttagaagataccgatgatttgattgaagacttagcgcaagcactgaccatttatcaacaaaatatttaa

SEQ ID NO: 136012 - protein, 389 aa, Pseudoalteromonas tunicata D2
MKKETQIVSAGRKKAFTHGVVNPVVQRASTIVFDTVADMKHAVINRANHTLFYGRRGTTTHFALQDAISELENGAGCALYPSGAAAISNAILSFVKTGDHILMVDTAYEPTRDFCRVILQNMGVETTYYDPLIGEGIKALIRPNTRILFLESPGSISMEVQDVPLLASIAHEHNMLVMLDNTYGNGFHFRPLDFGVDISIQAATKYIVGHSDVMMGVAVANDKHWPQLRENSYLMGQCTSADDAYLALRGLRTLAVRLQQHEKSALKIADWLSAHPLVDHVRHPALPTCPGHEFFKRDFQGSNGLFSFVMKEGTQDAINAFLDALHHFKMGYSWGGFESLVTANLTLSHLRTATGWQHGPLIRIHVGLEDTDDLIEDLAQALTIYQQNI

SEQ ID NO: 136013 - DNA, 1188 bp, Photobacterium sp. SKA34
  CDS (1)..(1188): transl_table=11
atgtctagtaagaaaattgatactgcattagtgagtgcaggaagaaagaaaaaatatactcacggtgcggtgaacagtgttattcaacgtgcatcgtcattagttttcgatacggttgcagataaaaaacaggctattaagaaccgcgcgaaaggcgagttgttttacggacgtcgtggcacgttaacccactttgcgcttcaagatgcgatggtggaattagaaggcggtgctggttgttatttatatccatgcggtgcggctgcggtatctaacagtatcttagcatttgtcacttctggcgatcatgtattgatgacaggtgcagcctatgagcctacccaagagttttgtaatattgtccttaatggattaggggttagtactacttattacgatcccttgattggtgaggggattgcagaacttgtacagcaaaataccaaagttgttttcttagaatcaccaagctctatcacaatggaagtgcaagatattccagcaattgtgaaagcagtgcgtgctgttaaccctgatgctgtgattattttagataacacatgggcggcaggggtgctatttaaagcgctcgagcacggtgttgatatctctgttcaagccggtacgaaatacattgttggtcactctgatgcgatgataggtacggcagtaagtaatgagcgttgctgggatcaattacgtgaacgttcttatttaatggggcaaatggttgatgctgataccgcgtatgtggctgctcgtggattgcgcaccatgggcgttcgtttaaaacaacatcatgaaagcagtatcaaagtagcagaatggctggcagagcgtccagaagttgcaacggttaatcatccagcattaccaagttgtaaaggccatgaattctttgtgcgtgattttgcaggaagctgtggtttgttttcatttgtgcttaacaaacgtttatcgaatgaagaagtctctaatttcttagataactttgagcattttagtatggcgtattcttggggtggttatgagtctcttattttggccagtcagcctgaagagttaaatcgtattcgtcctgcgggcaaagtagattttgatggcacgcttattcgtgtacatattggtttagaagattgcgacgacttaattgaagatttagccaatggctttagccgcatcgcttaa

SEQ ID NO: 136014 - protein, 395 aa, Photobacterium sp. SKA34
MSSKKIDTALVSAGRKKKYTHGAVNSVIQRASSLVFDTVADKKQAIKNRAKGELFYGRRGTLTHFALQDAMVELEGGAGCYLYPCGAAAVSNSILAFVTSGDHVLMTGAAYEPTQEFCNIVLNGLGVSTTYYDPLIGEGIAELVQQNTKVVFLESPSSITMEVQDIPAIVKAVRAVNPDAVIILDNTWAAGVLFKALEHGVDISVQAGTKYIVGHSDAMIGTAVSNERCWDQLRERSYLMGQMVDADTAYVAARGLRTMGVRLKQHHESSIKVAEWLAERPEVATVNHPALPSCKGHEFFVRDFAGSCGLFSFVLNKRLSNEEVSNFLDNFEHFSMAYSWGGYESLILASQPEELNRIRPAGKVDFDGTLIRVHIGLEDCDDLIEDLANGFSRIA

SEQ ID NO: 136015 - DNA, 1182 bp, Alteromonadales bacterium TW-7
  CDS (1)..(1182): transl_table=11
atgtcgagtaacagtaataaaaatactcagcttgtgtcgtctgggcgcaaaaaagcttacacccatggtgtagtaaaccccgttgtgcagcgcgcatcaacggtggtatttgattcggttgcagaacttaaagaagcggcgaagaaacgtggcgataaaaccctcttttatgggcgtcgtggcactaccacccattttgcattacaagaagccattaccgatttagaaggcggtgaagggtgtgcgctttatccgtgtggggctgctgcaattagccaagcgttattgtcgtttttaaaaagtggcgaccatattttaatggttgataatgcgtatgagcctactcgcgatttttgcgataaaattttagcgggcctaggtattaccactacttattacccgccaacagttggtgcaggcataaaagattatattaagccaaacaccaaggtgttatttttagaatctcctggttctataactatggaaattcaagacgtaccagccatggtaaacgtagccaaagaacataacgttatgaccatgctggataatacttatggaaacggccttcattaccgaccgcttgagcatggcgtcgatattagtattcaagcggcaacaaagtacattgttggtcattcagatgtaatgatgggagttgcagtggcaaataaaaaatattggccaacgcttcgcgaacattcttacttactagggcagtgtacaagtgctgatgatgcatatttggcactgcgcggtttacgcacgatgagcgtgcgtttaaatcagcatgaaaaggcggcgatagaggtggcaaaatggcttgaacagcatgagttagttgatcatattcgccatccagcctttgaaacctgcccaggccatgcgttttttaagcgtgactttgacggcagtaatggcttgttttcaattgttatgaaaacaggaaatcaaaaagccatagatgcatttttagatagccttcagcattttaagatgggtttttcgtggggtggctttgaaagcttggtcaccgctaacttaacaatgaaaggactgcgttcaaccaccgggtgggatttgggaccggttattagattgcatattggccttgaagatatcgatgacttgttagccgatttaagtcaagcgcttgaggtatacaagcagcatttataa

SEQ ID NO: 136016 - protein, 393 aa, Alteromonadales bacterium TW-7
MSSNSNKNTQLVSSGRKKAYTHGVVNPVVQRASTVVFDSVAELKEAAKKRGDKTLFYGRRGTTTHFALQEAITDLEGGEGCALYPCGAAAISQALLSFLKSGDHILMVDNAYEPTRDFCDKILAGLGITTTYYPPTVGAGIKDYIKPNTKVLFLESPGSITMEIQDVPAMVNVAKEHNVMTMLDNTYGNGLHYRPLEHGVDISIQAATKYIVGHSDVMMGVAVANKKYWPTLREHSYLLGQCTSADDAYLALRGLRTMSVRLNQHEKAAIEVAKWLEQHELVDHIRHPAFETCPGHAFFKRDFDGSNGLFSIVMKTGNQKAIDAFLDSLQHFKMGFSWGGFESLVTANLTMKGLRSTTGWDLGPVIRLHIGLEDIDDLLADLSQALEVYKQHL

SEQ ID NO: 136017 - DNA, 1203 bp, Pseudomonas putida GB-1; identical to SEQ ID NO: 13968
  CDS (1)..(1203): transl_table=11

SEQ ID NO: 136018 - protein, 400 aa, Pseudomonas putida GB-1; identical to SEQ ID NO: 13969

SEQ ID NO: 136019 - DNA, 1197 bp, Pseudomonas putida GB-1; identical to SEQ ID NO: 13972
  CDS (1)..(1197): transl_table=11

SEQ ID NO: 136020 - protein, 398 aa, Pseudomonas putida GB-1; identical to SEQ ID NO: 13973

SEQ ID NO: 136021 - DNA, 1530 bp, Zea mays; identical to SEQ ID NO: 13996
  CDS (1)..(1530)

SEQ ID NO: 136022 - protein, 509 aa, Zea mays; identical to SEQ ID NO: 13997

SEQ ID NO: 136023 - DNA, 1530 bp, Zea mays; identical to SEQ ID NO: 13998
  CDS (1)..(1530)

SEQ ID NO: 136024 - protein, 509 aa, Zea mays; identical to SEQ ID NO: 13999

SEQ ID NO: 136025 - DNA, 1638 bp, Fragaria vesca; identical to SEQ ID NO: 14000
  CDS (1)..(1638)

SEQ ID NO: 136026 - protein, 545 aa, Fragaria vesca; identical to SEQ ID NO: 14001

SEQ ID NO: 136027 - DNA, 1176 bp, Xanthomonas maltophilia; identical to SEQ ID NO: 14002
  CDS (1)..(1176): transl_table=11
  misc_feature (105)..(105): y is t or c
  misc_feature (387)..(387): y is t or c
  misc_feature (447)..(447): y is t or c
  misc_feature (540)..(540): y is t or c

SEQ ID NO: 136028 - protein, 391 aa, Xanthomonas maltophilia; identical to SEQ ID NO: 14003

SEQ ID NO: 136029 - DNA, 1182 bp, Drosophila melanogaster; identical to SEQ ID NO: 14006
  CDS (1)..(1182)

SEQ ID NO: 136030 - protein, 393 aa, Drosophila melanogaster; identical to SEQ ID NO: 14007

SEQ ID NO: 136031 - DNA, 1188 bp, Klebsiella pneumoniae
  CDS (1)..(1188): transl_table=11
atggctgataaacatcttgataccgcgctggtcaacgccgggcggagcaaaaagtacacccagggctcagtgaacagcgttatccagcgcgcgtcatcgctggttttcgacaccgtcgaggccaaaaagcacgccacccgcaatcgggccaacggcgagctgttctacggtcgtcgcggcaccctgacccatttctcgctgcaggaagcgatgtgcgagctggaaggcggcgccggctgcgccctcttcccctgcggcgccgcggcggtggctaacactatcctggcgtttgtcgagcaaggcgaccatgtgctgatgaccaataccgcctatgagccaagccaggacttttgtaccaaaattctcgccaaactcggcgtcaccaccagctggttcgatcccttaatcggcgccgatatcgcccgtctggttcgccctgagacccgcgtggtgttcctcgaatcgcccggctcgatcaccatggaagtgcacgatgtgccggcgatagtcgccgccgtgcgtcaggtcgccccggaagcgattatcatgatcgataacacctgggcggcggggatcctgtttaaagccctggattttggcattgatatttccattcaggcaggcaccaaatacctgatcggccattccgacgccatggtgggcaccgcggtggcgaacgcgcgctgctggccgcagctgcgtgaaaatgcctacctgatggggcaaatgctggacgccgatactgcctatatgaccagccgcggcctgcgcaccctgggcgtgcgcctgcgtcagcatcatgaaagcagcctgcgcatcgccgagtggctggcgcagcacccgcaggtggcgcgggtaaaccaccccgccctgcccggcagtaaaggtcatgagttctggaaacgtgatttcaccggcagcagcgggctattctcgtttgtgctcagcaagcgcctcaatgatgccgaactggcggagtacctcgacaatttcagcctgttcagtatggcctattcgtggggcggctttgagtcgctgattctcgccaaccagccggagcaaatcgcccacattcgaccggatgctgaagtcgacttcagcggcacgctgatccgcctgcacattggtctcgaaaatgttgacgatctgcaggcggatttagcagcgggcttcgcgcgtatcgtgtaa

SEQ ID NO: 136032 - protein, 395 aa, Klebsiella pneumoniae
MADKHLDTALVNAGRSKKYTQGSVNSVIQRASSLVFDTVEAKKHATRNRANGELFYGRRGTLTHFSLQEAMCELEGGAGCALFPCGAAAVANTILAFVEQGDHVLMTNTAYEPSQDFCTKILAKLGVTTSWFDPLIGADIARLVRPETRVVFLESPGSITMEVHDVPAIVAAVRQVAPEAIIMIDNTWAAGILFKALDFGIDISIQAGTKYLIGHSDAMVGTAVANARCWPQLRENAYLMGQMLDADTAYMTSRGLRTLGVRLRQHHESSLRIAEWLAQHPQVARVNHPALPGSKGHEFWKRDFTGSSGLFSFVLSKRLNDAELAEYLDNFSLFSMAYSWGGFESLILANQPEQIAHIRPDAEVDFSGTLIRLHIGLENVDDLQADLAAGFARIV

SEQ ID NO: 136033 - DNA, 1215 bp, Aspergillus oryzae; identical to SEQ ID NO: 14026
  CDS (1)..(1215)

SEQ ID NO: 136034 - protein, 404 aa, Aspergillus oryzae; identical to SEQ ID NO: 14027

SEQ ID NO: 136035 - DNA, 1278 bp, Brevibacterium linens; identical to SEQ ID NO: 14042
  CDS (1)..(1278): transl_table=11

SEQ ID NO: 136036 - protein, 425 aa, Brevibacterium linens; identical to SEQ ID NO: 14043

SEQ ID NO: 136037 - DNA, 1623 bp, Solanum lycopersicum; identical to SEQ ID NO: 14046
  CDS (1)..(1623)

SEQ ID NO: 136038 - protein, 540 aa, Solanum lycopersicum; identical to SEQ ID NO: 14047

SEQ ID NO: 136039 - DNA, 1197 bp, Citrobacter freundii; identical to SEQ ID NO: 14052
  CDS (1)..(1197): transl_table=11

SEQ ID NO: 136040 - protein, 398 aa, Citrobacter freundii; identical to SEQ ID NO: 14053

SEQ ID NO: 136041 - DNA, 1173 bp, Rhodococcus erythropolis; identical to SEQ ID NO: 14062
  CDS (1)..(1173): transl_table=11

SEQ ID NO: 136042 - protein, 390 aa, Rhodococcus erythropolis; identical to SEQ ID NO: 14063

SEQ ID NO: 136043 - DNA, 1194 bp, Rhizobium leguminosarum bv; identical to SEQ ID NO: 14066
  CDS (1)..(1194): transl_table=11
  misc_feature (788)..(788): n is a, g, c or t

SEQ ID NO: 136044 - protein, 397 aa, Rhizobium leguminosarum bv; identical to SEQ ID NO: 14067
  misc_feature (263)..(263): The Xaa at location 263 stands for Arg, Gln, Leu, or Pro.

SEQ ID NO: 136045 - DNA, 1623 bp, Solanum tuberosum; identical to SEQ ID NO: 14082
  CDS (1)..(1623)

SEQ ID NO: 136046 - protein, 540 aa, Solanum tuberosum; identical to SEQ ID NO: 14083

SEQ ID NO: 136047 - DNA, 1620 bp, Solanum tuberosum; identical to SEQ ID NO: 14084
  CDS (1)..(1620)

SEQ ID NO: 136048 - protein, 539 aa, Solanum tuberosum; identical to SEQ ID NO: 14085

SEQ ID NO: 136049 - DNA, 2046 bp, Zymomonas mobilis
  CDS (1)..(2046): transl_table=11
atgaattgccttatgaagcttttggtaacgccagagtggctatatcggaacctcgctaacccaaggttacatgttattgatgcggggagctatccgccagacgtcgataccaaggcttatgatgaatattgtaaggcgcatattccgggggcgctttttcttgataaccatcttttaaaagatcaaaatgcacccttaccgcgcatggtgccaagcctcgaaaaagttgaatatgaattcgggcggttgggattagatcccgacgatatgatcgttatttacgataatttatctttaccttcggctgccagagcatggtggctgtttatgttgcatgaatatcgtcatgtgatgattttggatggcggccttcgccgttggaaagccgagcgtttgcccgttgaaagcggcgcggcgatcgcgccttctccgattatattgcagctttctcgcaatgaagcgctcattcgcacccgtaatcaggtaatgcataatatcgcttcagggcatgaagtggttgtcgatgcccgtgcgcccaaagtctttagtggcgaacgtttgccaatccagcacttgcccccggtcatatcccgcatagtcttaatttgccttatgaaggaatgctggatgccaatggttgctggaaaacgccgacggaaaatcgagaaggcttttgtcagcaatcggataaatcttgagcagcctttattattcacctgtggtgcagggcgaacggctccagccttgttatttgctgcccgtcttttgggaaaaagagatgtatccctttatgatgggtcatgggaagaatggggcagcgaacctgatacacccaaagaaacggggcctgccttccgtgaatcgacccgtctgataacagcgggtcgccgtcgtgaatgggtgcgcggaaaaggtgggtcagttgttaacccacctgtctggcgcgcttcgactattctgttcgattctgttgaagatttaagagaagcctcaagccatcctgatgaccagctctattatggtcgtcgtggcaccccgacccaatgggcattgagtgaggctttgacagaattgcatcccggcgcagaagcgacgatgctgtatccatcaggtgtggccgctttatccatggctttattaagtgctttggaagccggtgatgagttattgatggttgatagttgttatgaaccaacccgcgtcttttgtgataccgttttgaaagcgcagggaatcaatgtcacttattatgatccgttaatcgggcaagacattgaacagctatttaccccgcagacacgggctatttttatggaaagccctggaagtctgacctttgaagtgcaagacatccccggtatctgtgaagttgcccaccgctattctattacgaccattcttgataatacttggacgcctttattctttcctgcgattgagcggggcgttgctctatcagggatggcctgcaccaaatatattacgggtcactctgatacgatgatgggaccagtgacagctatccctagccatattgataaattaaagcggattagcaatctaatcgggcaatatgtcagcccagatgacgccaattctgcccttaaggggttaaggactttggaagtcaggctgaaagcgcatgacaaaaatgctctcaaagtcgccaaatggttgagcgaacagccggaagtagcttgggtattacacccagccttgtcttcttgtccggggcatgaattctggcatcgggattttaaaggttcatccggtttgtttagctttgtccttgaagggggcgatgacagcgacagcacggctttgattgatagccttgaacattttggtatcggtttttcatggggcggctatgaaagtttagctttgccggttgatccgcagccaatacggacggcggccagttggcaggcggctggccctgttgtccgtttacatatcggtttggaagatcccgatgacctgattgaagatctggcttttggattgaaacgctttaaggcttcgagagatcaatccggcttttag

SEQ ID NO: 136050 - protein, 681 aa, Zymomonas mobilis
MNCLMKLLVTPEWLYRNLANPRLHVIDAGSYPPDVDTKAYDEYCKAHIPGALFLDNHLLKDQNAPLPRMVPSLEKVEYEFGRLGLDPDDMIVIYDNLSLPSAARAWWLFMLHEYRHVMILDGGLRRWKAERLPVESGAAIAPSPIILQLSRNEALIRTRNQVMHNIASGHEVVVDARAPKVFSGERLPIQHLPPVISRIVLICLMKECWMPMVAGKRRRKIEKAFVSNRINLEQPLLFTCGAGRTAPALLFAARLLGKRDVSLYDGSWEEWGSEPDTPKETGPAFRESTRLITAGRRREWVRGKGGSVVNPPVWRASTILFDSVEDLREASSHPDDQLYYGRRGTPTQWALSEALTELHPGAEATMLYPSGVAALSMALLSALEAGDELLMVDSCYEPTRVFCDTVLKAQGINVTYYDPLIGQDIEQLFTPQTRAIFMESPGSLTFEVQDIPGICEVAHRYSITTILDNTWTPLFFPAIERGVALSGMACTKYITGHSDTMMGPVTAIPSHIDKLKRISNLIGQYVSPDDANSALKGLRTLEVRLKAHDKNALKVAKWLSEQPEVAWVLHPALSSCPGHEFWHRDFKGSSGLFSFVLEGGDDSDSTALIDSLEHFGIGFSWGGYESLALPVDPQPIRTAASWQAAGPVVRLHIGLEDPDDLIEDLAFGLKRFKASRDQSGF

SEQ ID NO: 136051 - DNA, 1611 bp, Glycine max; identical to SEQ ID NO: 14096
  CDS (1)..(1611)

SEQ ID NO: 136052 - protein, 536 aa, Glycine max; identical to SEQ ID NO: 14097

SEQ ID NO: 136053 - DNA, 1517 bp, Nicotiana tabacum; identical to SEQ ID NO: 126323
  CDS (9)..(1346)

SEQ ID NO: 136054 - protein, 445 aa, Nicotiana tabacum; identical to SEQ ID NO: 14101

SEQ ID NO: 136055 - DNA, 1185 bp, Saccharomyces cerevisiae; identical to SEQ ID NO: 13376
  CDS (1)..(1185)

SEQ ID NO: 136056 - protein, 394 aa, Saccharomyces cerevisiae; identical to SEQ ID NO: 13377

SEQ ID NO: 136057 - DNA, 1161 bp, Escherichia coli; identical to SEQ ID NO: 14114
  CDS (1)..(1161): transl_table=11

SEQ ID NO: 136058 - protein, 386 aa, Escherichia coli; identical to SEQ ID NO: 14115

SEQ ID NO: 136059 - DNA, 1522 bp, Bordetella avium
  CDS (154)..(1344): transl_table=11
caggggtagcatgggagcggggtcagagagtgatcaaaaccagcgctgccatcatagggcaaagccatattcctagcgccaggtaatatcgattcaactttgtgtaggcctgctgcctgttacgctttcattctttcgtctgccgcctctgccatgtctgacacctccgctaaacacatcgacaccctgttgcagcatctgggtagcgcgcccttcaatcccgacactggcgccgcgccggtcaatctgccatccgtgcgcgccagcactgtgcgttttcaaagtctggccaagctcgaggacgctcagcgccgcaaggcggcgggcgaacgcgcgtctacctatgggcgcatgggcatggatacccacgccgccctggagcaggtgtttgcagagctggagggtggcacgcattgctatctggcttcgtccgggctggcgggcatctcgatggtgtttctgtcgctgttgtcggccggcgaacatgccctggtggcggattgcgcctatgggcccgtgcatgagctccatgaggccgtgctgtcgcgcctgggcatcgacgtcaccttcttcgacgcaaaggccgatctggcaagcctcgtgcgtcccactacgcggctgatctttgccgaagcgcccggctccctgctgttcgagatgctggacatgccggcgctggcccgcttcgccaaacaacatgacctgattctcgccaccgacaatacctggggctcgggctatatctaccgcccgctcacgctgggcgcgcaggtctctgtcatcgccggcaccaagtatgtgggcggacactccgacctgatgttgggcgcggtggtcaccaatgatgaggccatcgccaagcgcttgaaccgcacgcaatatgcgctgggttattcggtcagcgccgatgatgcctggctcgccctgcgcggggtgcgcaccatgcctgtgcgcatggcccaacatgcgcgccatgccctcgaagtctgcgagttcctgcaaaaccgtcccgaggtcgtacgcctctatcacccggcatggccggccgatccaggccatgccctatggcagcgtgactgcagcggctcgaatggcatgttggcggtgcagttaggcctgtcgccgcaggccgcgcgggacttcgttaatgcgctgacgctgtttggcatcggtttttcctgggggggcttcgagtccctggtgcaattggtcacgccgggcgagttggcgcgccatcagtattggcaaggcggctcggacgcgctggtgcgtctgcatatcggtctggaatcgccggccgatcttattgccgacctggcccaggcgctggaccgcgccgcctgagcgctcagctgcggccttgccgcttgcgccgccacgtcgcgaactcggcaggcgtgagcggcggcgagtatagatagccttggccccattgcacgccgttgcgcgtcaggtgctcggcctgcgcggcggtttctatgccttctgccgtgagctccagcttaaggcgttgacctagcgc

SEQ ID NO: 136060 - protein, 396 aa, Bordetella avium
MSDTSAKHIDTLLQHLGSAPFNPDTGAAPVNLPSVRASTVRFQSLAKLEDAQRRKAAGERASTYGRMGMDTHAALEQVFAELEGGTHCYLASSGLAGISMVFLSLLSAGEHALVADCAYGPVHELHEAVLSRLGIDVTFFDAKADLASLVRPTTRLIFAEAPGSLLFEMLDMPALARFAKQHDLILATDNTWGSGYIYRPLTLGAQVSVIAGTKYVGGHSDLMLGAVVTNDEAIAKRLNRTQYALGYSVSADDAWLALRGVRTMPVRMAQHARHALEVCEFLQNRPEVVRLYHPAWPADPGHALWQRDCSGSNGMLAVQLGLSPQAARDFVNALTLFGIGFSWGGFESLVQLVTPGELARHQYWQGGSDALVRLHIGLESPADLIADLAQALDRAA

SEQ ID NO: 136061 - DNA, 1188 bp, Salmonella typhimurium; identical to SEQ ID NO: 14132
  CDS (1)..(1188): transl_table=11

SEQ ID NO: 136062 - protein, 395 aa, Salmonella typhimurium; identical to SEQ ID NO: 14133

SEQ ID NO: 136063 - DNA, 1611 bp, Glycine max; identical to SEQ ID NO: 14160
  CDS (1)..(1611)

SEQ ID NO: 136064 - protein, 536 aa, Glycine max; identical to SEQ ID NO: 14161

SEQ ID NO: 136065 - DNA, 1611 bp, Glycine max; identical to SEQ ID NO: 14162
  CDS (1)..(1611)

SEQ ID NO: 136066 - protein, 536 aa, Glycine max; identical to SEQ ID NO: 14163

SEQ ID NO: 136067 - DNA, 1407 bp, Glycine max; identical to SEQ ID NO: 126369
  CDS (1)..(1407)

SEQ ID NO: 136068 - protein, 468 aa, Glycine max; identical to SEQ ID NO: 13379

SEQ ID NO: 136069 - DNA, 1413 bp, Zea mays
  CDS (1)..(1413)
atggccgtcgccgtccccaacgctcccggccgcctcttccttctccaatccaccccgttcccgaaccctagcagctcggcatccgccgctcgagcccaatccttccgcgtaccacccctccgcctctcgctattccgacgcatggctgggcgctcgctgacggtgatcgcaggcgcctccggcggctccgaacgagatctcagcgcctccgcagtctccgtggaggccctggactccgtcgcctccgattctgacttagagacgaaggagcccagtgtgtcgacgatgctgacgagcttcgagaactcgttcgacaagtatggggctctgagcacaccgctgtaccagaccgccacctttaagcagccttcagctacagattatggaacttatgattacactagaagtggtaaccctactcgtgatgttctccagagcctcatggctaagcttgagaaagcagatcaagcattctgcttcaccagcgggatggcggcgttagctgcagtaacacacctccttcaggctggacaagaaatagttgctggtgaggacatatatggtggttctgatcgtctactctcgcaagttgtgccaagaaatggaatagttgtaaaacgagtagatacaacgaaaattagtgatgtggtgtctgcaattggaccctccactagactggtttggctcgaaagtcccacgaaccctcgtcagcaaattactgacattaagacaatctcagagatagcgcattctcatggtgctcttgttttggttgacaacagcatcatgtctccagtgctctcccgtcctatagaactgggagctgatatcgtgatgcactcggctaccaaatttatagcgggacatagtgatcttatggctggaattcttgcagtgaagggtgagagtttggctaaagaggtagggtttctgcaaaatgctgaagggtcgggtctggcaccttttgactgctggctttgcttgaggggaatcaaaaccatggctctgcgggtggagaaacaacaggctaatgcccagaagattgctgaattcctggcgtctcacccgagggtcaagcaagtaaactacgctgggcttcctgaccatcctgggcgagctttacactattcccaggcaaagggagcgggctctgttctcagttttctcaccggctcactggccctctcaaagcacgtcgtggagaccaccaagtacttcagcgtaacagtcagcttcgggagcgtgaagtccctcatcagcctgccgtgcttcatgtcccacgcatcaatccctgcctcggtccgcgaggagcgtggcctaaccgacgacctcgtccggatatcggtcggcatcgaggatgtcgaggacctcatcgccgatctggaccgcgcgctcagaactggcccggtgtag

SEQ ID NO: 136070 - protein, 470 aa, Zea mays; identical to SEQ ID NO: 14165

SEQ ID NO: 136071 - DNA, 23 bp, Artificial sequence
  primer
atggcggacaaaaagcttgatac

SEQ ID NO: 136072 - DNA, 23 bp, Artificial sequence
  primer
ttatacaattcgcgcaaaaccgg

SEQ ID NO: 136073 - protein, 482 aa, Artificial sequence
  consensus sequence
  Variant (2)..(6): Xaa in position 2 to 6 is any amino acid
  Variant (8)..(34): Xaa in position 8 to 34 is any amino acid
  Variant (35)..(119): Xaa in position 35 to 119 is any or no amino acid
  Variant (121)..(121): Xaa in position 121 is any amino acid
  Variant (123)..(123): Xaa in position 123 is any amino acid
  Variant (125)..(126): Xaa in position 125 to 126 is any amino acid
  Variant (128)..(137): Xaa in position 128 to 137 is any amino acid
  Variant (140)..(148): Xaa in position 140 to 148 is any amino acid
  Variant (149)..(151): Xaa in position 149 to 151 is any or no amino acid
  Variant (153)..(154): Xaa in position 153 to 154 is any amino acid
  Variant (156)..(165): Xaa in position 156 to 165 is any amino acid
  Variant (166)..(166): Xaa in position 166 is any or no amino acid
  Variant (168)..(168): Xaa in position 168 is any amino acid
  Variant (170)..(176): Xaa in position 170 to 176 is any amino acid
  Variant (178)..(215): Xaa in position 178 to 215 is any amino acid
  Variant (216)..(225): Xaa in position 216 to 225 is any or no amino acid
  Variant (227)..(227): Xaa in position 227 is any amino acid
  Variant (229)..(236): Xaa in position 229 to 236 is any amino acid
  Variant (238)..(252): Xaa in position 238 to 252 is any amino acid
  Variant (253)..(260): Xaa in position 253 to 260 is any or no amino acid
  Variant (264)..(274): Xaa in position 264 to 274 is any amino acid
  Variant (275)..(275): Xaa in position 275 is any or no amino acid
  Variant (277)..(277): Xaa in position 277 is any amino acid
  Variant (279)..(284): Xaa in position 279 to 284 is any amino acid
  Variant (288)..(289): Xaa in position 288 to 289 is any amino acid
  Variant (292)..(292): Xaa in position 292 is any amino acid
  Variant (294)..(296): Xaa in position 294 to 296 is any amino acid
  Variant (298)..(304): Xaa in position 298 to 304 is any amino acid
  Variant (305)..(324): Xaa in position 305 to 324 is any or no amino acid
  Variant (326)..(331): Xaa in position 326 to 331 is any amino acid
  Variant (332)..(337): Xaa in position 332 to 337 is any or no amino acid
  Variant (340)..(341): Xaa in position 340 to 341 is any amino acid
  Variant (344)..(345): Xaa in position 344 to 345 is any amino acid
  Variant (347)..(357): Xaa in position 347 to 357 is any amino acid
  Variant (359)..(360): Xaa in position 359 to 360 is any amino acid
  Variant (362)..(364): Xaa in position 362 to 364 is any amino acid
  Variant (365)..(367): Xaa in position 365 to 367 is any or no amino acid
  Variant (369)..(370): Xaa in position 369 to 370 is any amino acid
  Variant (372)..(373): Xaa in position 372 to 373 is any amino acid
  Variant (375)..(375): Xaa in position 375 is any amino acid
  Variant (377)..(377): Xaa in position 377 is any amino acid
  Variant (378)..(383): Xaa in position 378 to 383 is any or no amino acid
  Variant (385)..(388): Xaa in position 385 to 388 is any amino acid
  Variant (389)..(392): Xaa in position 389 to 392 is any or no amino acid
  Variant (394)..(394): Xaa in position 394 is any amino acid
  Variant (395)..(395): Xaa in position 395 is any or no amino acid
  Variant (397)..(398): Xaa in position 397 to 398 is any amino acid
  Variant (399)..(400): Xaa in position 399 to 400 is any or no amino acid
  Variant (402)..(422): Xaa in position 402 to 422 is any amino acid
  Variant (423)..(429): Xaa in position 423 to 429 is any or no amino acid
  Variant (431)..(431): Xaa in position 431 is any amino acid
  Variant (434)..(434): Xaa in position 434 is any amino acid
  Variant (438)..(456): Xaa in position 438 to 456 is any amino acid
  Variant (457)..(466): Xaa in position 457 to 466 is any or no amino acid
  Variant (468)..(470): Xaa in position 468 to 470 is any amino acid
  Variant (472)..(472): Xaa in position 472 is any amino acid
  Variant (474)..(476): Xaa in position 474 to 476 is any amino acid
  Variant (479)..(480): Xaa in position 479 to 480 is any amino acid
TXXXXXGXXXXXXXXXXXXXXXXXXXXXXXXXXXXXXXXXXXXXXXXXXXXXXXXXXXXXXXXXXXXXXXXXXXXXXXXXXXXXXXXXXXXXXXXXXXXXXXXXXXXXXXXXXXXXXXXYXRXGXXTXXXXXXXXXXLEXXXXXXXXXXXXGXXAXXXXXXXXXXXGXHXXXXXXXYXXXXXXXXXXXXXXXXXXXXXXXXXXXXXXXXXXXXXXXXXXXXXXXXEXPXXXXXXXXDXXXXXXXXXXXXXXXXXXXXXXXDNTXXXXXXXXXXXXGXDXXXXXXTKYXXGHXDXXXGXXXXXXXXXXXXXXXXXXXXXXXXXXXGXXXXXXXXXXXXRGXXTLXXRXXXXXXXXXXXAXXLXXXXXXVXXVXXPXLXXXXXXXHXXXXXXXXGXXGXXXXSXXXXXXXXXXXXXXXXXXXXXXXXXXXXSXGGXESLXXXXXXXXXXXXXXXXXXXXXXXXXXXXXRXXXGXEXXXDLXXDL

SEQ ID NO: 136074 - protein, 20 aa, Artificial sequence
  protein pattern
  Variant (2)..(2): Xaa in position 2 is Ile, Leu or Val
  Variant (3)..(3): Xaa in position 3 is Ala, Ser or Val
  Variant (4)..(5): Xaa in position 4 to 5 is any amino acid
  Variant (6)..(6): Xaa in position 6 is Ala or Ser
  Variant (7)..(7): Xaa in position 7 is any amino acid
  Variant (10)..(12): Xaa in position 10 to 12 is any amino acid
  Variant (15)..(15): Xaa in position 15 is Ala, Gly, Asn, Ser or Thr
  Variant (17)..(19): Xaa in position 17 to 19 is any amino acid
DXXXXXXTKXXXGHXDXXXG

SEQ ID NO: 136075 - protein, 20 aa, Artificial sequence
  protein pattern
  Variant (2)..(2): Xaa in position 2 is Leu or Met
  Variant (3)..(3): Xaa in position 3 is any amino acid
  Variant (4)..(4): Xaa in position 4 is Ile, Leu, Pro or Val
  Variant (6)..(12): Xaa in position 6 to 12 is any amino acid
  Variant (13)..(13): Xaa in position 13 is Ala, Gly or Ser
  Variant (14)..(15): Xaa in position 14 to 15 is any amino acid
  Variant (16)..(16): Xaa in position 16 is Ile, Leu, Met or Val
  Variant (18)..(19): Xaa in position 18 to 19 is any amino acid
TXXXRXXXXXXXXXXXAXXL

SEQ ID NO: 136076 - protein, 20 aa, Artificial sequence
  protein pattern
  Variant (2)..(2): Xaa in position 2 is Phe, Ile, Leu or Val
  Variant (3)..(4): Xaa in position 3 to 4 is any amino acid
  Variant (6)..(6): Xaa in position 6 is Ile, Leu or Val
  Variant (8)..(8): Xaa in position 8 is Ala, Asp, Glu, Gly, Asn, Ser or Thr
  Variant (9)..(10): Xaa in position 9 to 10 is any amino acid
  Variant (13)..(14): Xaa in position 13 to 14 is any amino acid
  Variant (16)..(19): Xaa in position 16 to 19 is any or no amino acid
RXXXGXEXXXDLXXDXXXXL

SEQ ID NO: 136077 - DNA, 852 bp, Escherichia coli
  CDS (1)..(852): transl_table=11
atgaagaatattagatacattgacaaaaaagatgttgaaaacctgattgaaaataaaatatctgatgatgttattatttttctttcgggccctacatcgcaaaaaacacctttgtcagtattacgaacaaaggatattattgctgtcaatggttctgcgcaatatctgttaagtaataatatcgttccttttatatatgtacttacagatgtccgatttttacatcagcgtcgtgatgatttttataaatttagccagagaagtcgttataccatagtaaacgttgacgtttatgaacacgcttccaaagaagataaactttatatcctccagaactgcctcgtattacggtccttttaccgtcgggaaaaaggtggttttataaagaagattaaatttaatattttgagacagattcacaaagaactgctgatctctgtaccgttgtctaaaaaaggtcgtctggttggattttgcaaggacattagtcttggttattgctcatgccatactattgcctttgctgcaattcaaatcgcatattcacttaagtatgcgcggattatttgttctggtcttgatttaacgggtagctgttctcgtttctatgatgagaataaaaatcccatgccctcggaattaagtagggatttattcaaaatattgccattttttcgttttatgcatgataatgtaaaagatattaatatttataatttatcagatgatacagctatttcttacgatgtaattccatttattaaacttcaagacatcagtgcagaagaatcaaaagatatgacaagaaaaaaaatgcaatatagaacttcaaccgattcttatgctaattaa

SEQ ID NO: 136078 - protein, 283 aa, Escherichia coli
MKNIRYIDKKDVENLIENKISDDVIIFLSGPTSQKTPLSVLRTKDIIAVNGSAQYLLSNNIVPFIYVLTDVRFLHQRRDDFYKFSQRSRYTIVNVDVYEHASKEDKLYILQNCLVLRSFYRREKGGFIKKIKFNILRQIHKELLISVPLSKKGRLVGFCKDISLGYCSCHTIAFAAIQIAYSLKYARIICSGLDLTGSCSRFYDENKNPMPSELSRDLFKILPFFRFMHDNVKDINIYNLSDDTAISYDVIPFIKLQDISAEESKDMTRKKMQYRTSTDSYAN

SEQ ID NO: 136079 - DNA, 810 bp, Salmonella enterica subsp. enterica serovar Typhi Ty2
  CDS (1)..(810): transl_table=11
atgggcagcgttaacttcataactcacgccgatgttctgcaacttattgcgaaaagaacggctgaagattgtattatttttctttctggccctacgtccagaaagacgccgctgtccttgttacgaatgaaagatgtcattgcagtcaatggttctgttcaatatttgctaaacaataacgtcaagccatttttgtaccttctgacggatgttcgcttcctccatcgccggcgcgaagatttttataactttagccgtaacagtcagtttactatcgtcaatcttgatgtgtacgaacaggcttcagtggatgatcaaaaatatattgaagaaaactgtttaattattcgctccttttatcgccgagaaaaagggggctttttaaagaaaattaaatttaatatcctcaagcgggttcataaagcattacttatttcagttcctctttcgaaaagaggacgactggctggattttgtaaggatatcagcatcgggtattgctcttaccatactattgcttataccgctattcaggttgcctattccctcaagtatggccgtattatatgttctgggcttgacttaacagggagttgcccacgtttctatgacgaatctaccagccctatgccatctgagcttagtaaagacctgtttaaaatactgccattttttacttttatgagaaaaaatgtgagtgatttaaatatctttaatttatcagatgatactgcaattcattacgatattattccatatattacagcctcggaacttgaagatgaaatatattacgataaaattgtctag

SEQ ID NO: 136080 - protein, 269 aa, Salmonella enterica subsp. enterica serovar Typhi Ty2
MGSVNFITHADVLQLIAKRTAEDCIIFLSGPTSRKTPLSLLRMKDVIAVNGSVQYLLNNNVKPFLYLLTDVRFLHRRREDFYNFSRNSQFTIVNLDVYEQASVDDQKYIEENCLIIRSFYRREKGGFLKKIKFNILKRVHKALLISVPLSKRGRLAGFCKDISIGYCSYHTIAYTAIQVAYSLKYGRIICSGLDLTGSCPRFYDESTSPMPSELSKDLFKILPFFTFMRKNVSDLNIFNLSDDTAIHYDIIPYITASELEDEIYYDKIV

SEQ ID NO: 136081 - DNA, 909 bp, Photorhabdus luminescens subsp. laumondii TTO1
  CDS (1)..(909): transl_table=11
atgtttttaaaatataaatatcttttaaaactaggtatgctctgtaagcagaatataacaaaatcaatatacagaaatgtatccagtaaaaaaatgaaacacaatatgaacttttggcctcacataaagatctcaagaaacattaatggcaaaatcgacgccgtttcattcaataagaaaagtataaacatcaatgaattcccaaaaaaatcagaaaaacccttaatcattattgcatctggaccgtcggtatctaccatcaaaacagatttttttgatgataccaaatttgatattatgggtgttaacggctcgtatgaattatcaccagaggtaaaattcaaatatcatgttataattgaccgaacattcattctaaataggaagaatatcgttttaaatatattaaaagataatgaattgatactcttcacaacaatggattgtctcaatgatatcttaattcattacggttatcttgaattaaaatgtaaagtcattattattgagaacattgaccagccagtttatcaacaggaaaaagaactttttgaaataaagagtgatgaaataataatacagaacagtgtcgccttctcattgaacttaaatctcggattctacaacggaacaacagtggcatattctgctttgcaaatagcattttttttggggtataaagaaatatatttcgcaggtctagacatgaacaatttttcaaaaccaaggttttatgaaacccaaaatgacaagctagataccaaattaaataataacttacatgatttcatcattccttgtttcaacctggctcatgaaatagccataagaaaaggagttaaaatttataatctatcgaaaaatagcgctataaattcatttgaaaagttagattatagaaaaatttaa

SEQ ID NO: 136082 - protein, 302 aa, Photorhabdus luminescens subsp. laumondii TTO1
MFLKYKYLLKLGMLCKQNITKSIYRNVSSKKMKHNMNFWPHIKISRNINGKIDAVSFNKKSININEFPKKSEKPLIIIASGPSVSTIKTDFFDDTKFDIMGVNGSYELSPEVKFKYHVIIDRTFILNRKNIVLNILKDNELILFTTMDCLNDILIHYGYLELKCKVIIIENIDQPVYQQEKELFEIKSDEIIIQNSVAFSLNLNLGFYNGTTVAYSALQIAFFLGYKEIYFAGLDMNNFSKPRFYETQNDKLDTKLNNNLHDFIIPCFNLAHEIAIRKGVKIYNLSKNSAINSFEKLDYRKI

SEQ ID NO: 136083 - DNA, 810 bp, Escherichia coli
  CDS (1)..(810): transl_table=11
atgaagaatattagatacattgacaaaaaagatgttgaaaacctgatagaaagtaaaacgtctgatgatgttattatttttctttccggccccacatcgcaaaaaacaccattgtcagtgctgcagacaagggatgttattgctgtcaatggttctgcacaatatctattaagtcataatattattccctatatttatgtacttaccgatgttcgctttttacatcaacggcgtgatgatttttataaatttagccagagaagtcgttataccatcgtaaatgttgacgtttatgaacatgcttctgaagaagataagcggtacatccttcaaaactgcctggtactacgttcattttaccgcagagaaaaaggtggattgatcaagaagatcaagtttaatattttgagccgaattcataaagagctcctgatctctgtacctttttctaaaaaaggtcgtctggttggcttttgcaaggatattaacctcggttattgttcatgccataccgttgcttttgctgcaatccaaatagcctattcgctgaagtatgctcgtattatctgttcaggccttgatttaacgggtagctgttcgcgtttctatgatgaagataagaatcctatgccctcagagttgactcgggatttattcaaaattttaccatttttccgttttatgcgtgaaaatatagaagatatcaatatttataatttatccgacgatactgcaattcaatatgatattattccctatatgaaaatatccgaaattgaagagccgtgtgtttatgaaaaaataagctaa

SEQ ID NO: 136084 - protein, 269 aa, Escherichia coli
MKNIRYIDKKDVENLIESKTSDDVIIFLSGPTSQKTPLSVLQTRDVIAVNGSAQYLLSHNIIPYIYVLTDVRFLHQRRDDFYKFSQRSRYTIVNVDVYEHASEEDKRYILQNCLVLRSFYRREKGGLIKKIKFNILSRIHKELLISVPFSKKGRLVGFCKDINLGYCSCHTVAFAAIQIAYSLKYARIICSGLDLTGSCSRFYDEDKNPMPSELTRDLFKILPFFRFMRENIEDINIYNLSDDTAIQYDIIPYMKISEIEEPCVYEKIS

SEQ ID NO: 136085 - DNA, 810 bp, Salmonella typhimurium
  CDS (1)..(810): transl_table=11
atgggcagcgttaacttcataactcacgccgatgttctgcaacttattgcgaaaagaacggctgaagattgtattatttttctttctggtcctacgtccagaaagacgccgctgtccttgttacgaatgaaagatgtcattgcagtcaatggttctgttcaatatttgctaaacaataacgtcaagccatttttgtaccttctgacggatattcgcttcctccatcgtcggcgcgaagatttttataactttagccgtaacagtcagtttactatcgtcaatcttgatgtgtacgaacaggcttcagtggatgatcaaaaatatattgaagaaaactgtttaattattcgctccttttatcgccgagaaaaagggggctttttaaagaaaattaaatttaatatcctcaagcgggttcataaagcattacttatttcagttcctctttcgaaaagagggcgactggctggattttgcaaggatatcagcatcgggtattgctcttgccatactattgcttataccgctattcaggttgcctattccctcaagtatggccgtattatatgttctgggcttgacttaacagggagttgcccacgtttctatgacgaatctaccagccctatgccatctgagcttagtaaagatctgtttaaaatactgccattttttacttttatgagaaaaaatgtgagtgatttaaatatctttaatttatcagatgatactgcaattcattacgatattattccatatattacagcctcggagcttgaggatgaaatatattacgataaaattgtctag

SEQ ID NO: 136086 - protein, 269 aa, Salmonella typhimurium
MGSVNFITHADVLQLIAKRTAEDCIIFLSGPTSRKTPLSLLRMKDVIAVNGSVQYLLNNNVKPFLYLLTDIRFLHRRREDFYNFSRNSQFTIVNLDVYEQASVDDQKYIEENCLIIRSFYRREKGGFLKKIKFNILKRVHKALLISVPLSKRGRLAGFCKDISIGYCSCHTIAYTAIQVAYSLKYGRIICSGLDLTGSCPRFYDESTSPMPSELSKDLFKILPFFTFMRKNVSDLNIFNLSDDTAIHYDIIPYITASELEDEIYYDKIV

SEQ ID NO: 136087 - DNA, 26 bp, Artificial sequence
  primer
atgaagaatattagatacattgacaa

SEQ ID NO: 136088 - DNA, 26 bp, Artificial sequence
  primer
ttaattagcataagaatcggttgaag

SEQ ID NO: 136089 - protein, 276 aa, Artificial sequence
  consensus sequence
  Variant (2)..(6): Xaa in position 2 to 6 is any amino acid
  Variant (8)..(10): Xaa in position 8 to 10 is any amino acid
  Variant (13)..(14): Xaa in position 13 to 14 is any amino acid
  Variant (17)..(22): Xaa in position 17 to 22 is any amino acid
  Variant (24)..(24): Xaa in position 24 is any amino acid
  Variant (34)..(34): Xaa in position 34 is any amino acid
  Variant (40)..(40): Xaa in position 40 is any amino acid
  Variant (42)..(44): Xaa in position 42 to 44 is any amino acid
  Variant (46)..(46): Xaa in position 46 is any amino acid
  Variant (53)..(53): Xaa in position 53 is any amino acid
  Variant (58)..(59): Xaa in position 58 to 59 is any amino acid
  Variant (61)..(62): Xaa in position 61 to 62 is any amino acid
  Variant (64)..(65): Xaa in position 64 to 65 is any amino acid
  Variant (67)..(67): Xaa in position 67 is any amino acid
  Variant (71)..(71): Xaa in position 71 is any amino acid
  Variant (76)..(76): Xaa in position 76 is any amino acid
  Variant (79)..(79): Xaa in position 79 is any amino acid
  Variant (83)..(83): Xaa in position 83 is any amino acid
  Variant (86)..(87): Xaa in position 86 to 87 is any amino acid
  Variant (89)..(90): Xaa in position 89 to 90 is any amino acid
  Variant (95)..(95): Xaa in position 95 is any amino acid
  Variant (100)..(100): Xaa in position 100 is any amino acid
  Variant (103)..(104): Xaa in position 103 to 104 is any amino acid
  Variant (106)..(107): Xaa in position 106 to 107 is any amino acid
  Variant (110)..(111): Xaa in position 110 to 111 is any amino acid
  Variant (115)..(116): Xaa in position 115 to 116 is any amino acid
  Variant (127)..(128): Xaa in position 127 to 128 is any amino acid
  Variant (137)..(139): Xaa in position 137 to 139 is any amino acid
  Variant (142)..(142): Xaa in position 142 is any amino acid
  Variant (149)..(149): Xaa in position 149 is any amino acid
  Variant (152)..(152): Xaa in position 152 is any amino acid
  Variant (156)..(156): Xaa in position 156 is any amino acid
  Variant (163)..(164): Xaa in position 163 to 164 is any amino acid
  Variant (169)..(169): Xaa in position 169 is any amino acid
  Variant (172)..(172): Xaa in position 172 is any amino acid
  Variant (174)..(175): Xaa in position 174 to 175 is any amino acid
  Variant (179)..(179): Xaa in position 179 is any amino acid
  Variant (186)..(186): Xaa in position 186 is any amino acid
  Variant (198)..(198): Xaa in position 198 is any amino acid
  Variant (201)..(201): Xaa in position 201 is any amino acid
  Variant (207)..(209): Xaa in position 207 to 209 is any amino acid
  Variant (216)..(217): Xaa in position 216 to 217 is any amino acid
  Variant (222)..(222): Xaa in position 222 is any amino acid
  Variant (228)..(228): Xaa in position 228 is any amino acid
  Variant (231)..(232): Xaa in position 231 to 232 is any amino acid
  Variant (234)..(235): Xaa in position 234 to 235 is any amino acid
  Variant (236)..(237): Xaa in position 236 to 237 is any or no amino acid
  Variant (239)..(239): Xaa in position 239 is any amino acid
  Variant (242)..(242): Xaa in position 242 is any amino acid
  Variant (251)..(251): Xaa in position 251 is any amino acid
  Variant (252)..(252): Xaa in position 252 is any or no amino acid
  Variant (255)..(255): Xaa in position 255 is any amino acid
  Variant (259)..(271): Xaa in position 259 to 271 is any amino acid
  Variant (272)..(275): Xaa in position 272 to 275 is any or no amino acid
MXXXXXIXXXDVXXLIXXXXXXDXIIFLSGPTSXKTPLSXLXXXDXIAVNGSXQYLLXXNXXPXXYXLTDXRFLHXRRXDFYXFSXXSXXTIVNXDVYEXASXXDXXYIXXNCLXXRSFYRREKGGXXKKIKFNILXXXHKXLLISVPXSKXGRLXGFCKDIXXGYCSXHTXAXXAIQXAYSLKYXRIICSGLDLTGXSCXRFYDEXXXPMPSELXXDLFKXILPFFXFMXXNXXXXDXNIXNLSDDTAIXXYDXIPYXXXXXXXXXXXXXXXXXK

SEQ ID NO: 136090 - protein, 48 aa, Artificial sequence
  protein pattern
  Variant (4)..(4): Xaa in position 4 is Ala or Val
  Variant (11)..(11): Xaa in position 11 is Asn or Ser
  Variant (12)..(12): Xaa in position 12 is Ile or Leu
  Variant (17)..(17): Xaa in position 17 is any amino acid
  Variant (20)..(20): Xaa in position 20 is Ile or Val
  Variant (22)..(22): Xaa in position 22 is any amino acid
  Variant (23)..(23): Xaa in position 23 is any or no amino acid
  Variant (25)..(25): Xaa in position 25 is any or no amino acid
  Variant (28)..(28): Xaa in position 28 is Ile or Val
  Variant (35)..(35): Xaa in position 35 is Ala or Gly
GRLXGFCKDIXXGYCSXHTXAXXAXIQXAYSLKYXRIICSGLDLTGSC

SEQ ID NO: 136091 - protein, 31 aa, Artificial sequence
  protein pattern
  Variant (8)..(8): Xaa in position 8 is Gln or Arg
  Variant (14)..(14): Xaa in position 14 is Leu or Val
  Variant (16)..(17): Xaa in position 16 to 17 is any or no amino acid
  Variant (19)..(20): Xaa in position 19 to 20 is any or no amino acid
  Variant (22)..(22): Xaa in position 22 is Ile or Val
  Variant (29)..(29): Xaa in position 29 is Ala or Val
FLSGPTSXKTPLSXLXXRXXDXIAVNGSXQY

SEQ ID NO: 136092 - protein, 21 aa, Artificial sequence
  protein pattern
  Variant (7)..(7): Xaa in position 7 is Ser or Thr
  Variant (8)..(8): Xaa in position 8 is Lys or Arg
  Variant (18)..(18): Xaa in position 18 is any amino acid
  Variant (21)..(21): Xaa in position 21 is His or Arg
PMPSELXXDLFKILPFFXFMX

SEQ ID NO: 136093 - protein, 42 aa, Artificial sequence
  protein pattern
  Variant (3)..(3): Xaa in position 3 is any or no amino acid
  Variant (6)..(6): Xaa in position 6 is any amino acid
  Variant (7)..(7): Xaa in position 7 is any or no amino acid
  Variant (11)..(11): Xaa in position 11 is any amino acid
  Variant (14)..(14): Xaa in position 14 is Gln or Arg
  Variant (15)..(15): Xaa in position 15 is Asn or Arg
  Variant (17)..(17): Xaa in position 17 is Gln or Arg
  Variant (18)..(18): Xaa in position 18 is Phe or Tyr
  Variant (23)..(23): Xaa in position 23 is Leu or Val
  Variant (28)..(28): Xaa in position 28 is any amino acid
  Variant (31)..(31): Xaa in position 31 is any amino acid
  Variant (32)..(32): Xaa in position 32 is Asp or Glu
  Variant (34)..(35): Xaa in position 34 to 35 is any amino acid
  Variant (38)..(38): Xaa in position 38 is any amino acid
  Variant (39)..(39): Xaa in position 39 is Glu or Gln
LHXRRXXDFYXFSXXSXXTIVNXDVYEXASXXDXXYIXXNCL

SEQ ID NO: 136094 - protein, 29 aa, Artificial sequence
  protein pattern
  Variant (9)..(9): Xaa in position 9 is Phe or Leu
  Variant (10)..(10): Xaa in position 10 is Ile or Leu
  Variant (19)..(22): Xaa in position 19 to 22 is any or no amino acid
  Variant (24)..(24): Xaa in position 24 is Ala or Glu
FYRREKGGXXKKIKFNILXXXXKXLLISV

SEQ ID NO: 136095 - protein, 15 aa, Artificial sequence
  protein pattern
  Variant (9)..(9): Xaa in position 9 is any amino acid
  Variant (12)..(12): Xaa in position 12 is any or no amino acid
  Variant (14)..(14): Xaa in position 14 is any or no amino acid
NLSDDTAIXYDXIXP

SEQ ID NO: 136096 - protein, 14 aa, Artificial sequence
  protein pattern
  Variant (2)..(2): Xaa in position 2 is Ile or Val
  Variant (3)..(3): Xaa in position 3 is any amino acid
  Variant (5)..(5): Xaa in position 5 is Phe or Tyr
  Variant (6)..(6): Xaa in position 6 is Ile or Leu
  Variant (8)..(8): Xaa in position 8 is Leu or Val
  Variant (12)..(12): Xaa in position 12 is Ile or Val
NXXPXXYXLTDXRF

SEQ ID NO: 136097 - protein, 22 aa, Artificial sequence
  protein pattern
  Variant (2)..(2): Xaa in position 2 is Asp or Thr
  Variant (3)..(3): Xaa in position 3 is His or Lys
  Variant (4)..(4): Xaa in position 4 is any amino acid
  Variant (7)..(8): Xaa in position 7 to 8 is any or no amino acid
  Variant (10)..(11): Xaa in position 10 to 11 is any or no amino acid
  Variant (13)..(13): Xaa in position 13 is Ala or Glu
  Variant (14)..(14): Xaa in position 14 is any amino acid
  Variant (15)..(15): Xaa in position 15 is Lys or Arg
  Variant (16)..(16): Xaa in position 16 is any amino acid
  Variant (17)..(17): Xaa in position 17 is Ala or Ser
  Variant (18)..(18): Xaa in position 18 is Asp or Glu
  Variant (20)..(20): Xaa in position 20 is Cys or Val
IXXXDVXXLXXIXXXXXXDXII

SEQ ID NO: 136098 - DNA, 261 bp, Escherichia coli
  CDS (1)..(261): transl_table=11
atgttattactttttcagagtttactaaggagaggtttactcgtggcgattaatttcagccctaaggttggtgaaatactggaatgcaactttggtaactatcctgttagccaaaatggaccgttcagcacgacgtattacgatggccgcattcctcctgaaatgataaaaaacaggttagttgtcgtgctcaacggaaaaattaatggcaacgcatgcatcgtcgttccattatcaaccactcgcgaccagacaagttaa

SEQ ID NO: 136099 - protein, 86 aa, Escherichia coli
MLLLFQSLLRRGLLVAINFSPKVGEILECNFGNYPVSQNGPFSTTYYDGRIPPEMIKNRLVVVLNGKINGNACIVVPLSTTRDQTS

SEQ ID NO: 136100 - DNA, 492 bp, Escherichia coli O157:H7 EDL933
  CDS (1)..(492): transl_table=11
gtgttattactttttcagagtttactaaggagaggtttactcgtggcgattaatttcagccctaaggttggtgaaatactggaatgcaactttggtaactatcctgttagccaaaatggaccgttcagcacgacgtattacgatggccgcattcctcctgaaatgataaaaaacaggttagttgtcgtgctcaacggaaaaattaatggcaacgcattcatcgtcgttccattatcaaccactcgcgaccatgacaagttaaaacgtggaatgcatgttgaaatagccagtaatgttatcaatgacctgcaattctttgatcagcagattcgttgggccaaaaccgacctggtacaacaagtcagtcgaaacagattaaacagagcaagaacttacagagggtatcttaatcaatgtttgccacatgagttggttgcagacatacagagggcggtcatcaagtcaatcaatgccatatcgctcataaattga

SEQ ID NO: 136101 - protein, 163 aa, Escherichia coli O157:H7 EDL933
MLLLFQSLLRRGLLVAINFSPKVGEILECNFGNYPVSQNGPFSTTYYDGRIPPEMIKNRLVVVLNGKINGNAFIVVPLSTTRDHDKLKRGMHVEIASNVINDLQFFDQQIRWAKTDLVQQVSRNRLNRARTYRGYLNQCLPHELVADIQRAVIKSINAISLIN

SEQ ID NO: 136102 - DNA, 450 bp, Pseudomonas resinovorans
  CDS (1)..(450): transl_table=11
atggctattaattttgaacccaagatagggcagatcttggaatgcaattacggcgattatcagtacgatgaaaacggcgtcatagttttcaagaactatgactatcgcttgaagcccgaaatgataaaaaaccgcttggttgttgtgctcaacgcgcgcatcgacccaaatgcctgcattgtcgtgccgctatcgacaacaaaggacatgggcaaactcagccgcgggctacacgtcgagctggggagcgacctgattgacgagctaccgtacttcaagcaacagaccaggtgggccaaagcggacctcgttgagcaggtcagcaaacagcgcctattcaagcccagggcgatgcgtggtcatcttgagcaggtgctatcgcgagaggtcgttaccctgattcagacagcagtgattaaggccgttaacgccggtggattgctgaaatag

SEQ ID NO: 136103 - protein, 149 aa, Pseudomonas resinovorans
MAINFEPKIGQILECNYGDYQYDENGVIVFKNYDYRLKPEMIKNRLVVVLNARIDPNACIVVPLSTTKDMGKLSRGLHVELGSDLIDELPYFKQQTRWAKADLVEQVSKQRLFKPRAMRGHLEQVLSREVVTLIQTAVIKAVNAGGLLK

SEQ ID NO: 136104 - DNA, 450 bp, Pseudomonas sp. ND6
  CDS (1)..(450): transl_table=11
atggctattaactttgaacccaagatagggcagatcttggagtgtaattacggcgactatcagtacgatgaaaacggtgccatcgttttcaagaactatgactatcggctgaagcctgaaatgatcaagaatcgtttggtagtcgtgctgaatgcgcggatcgacccaaacgcttgcatcgtcgtaccgttatctacaacgaaggacatcgggaagctcggtcgcgggctgcatgtggaactgggcaaagacttgatagatgagctgccttacttcaaacagcaaaccagatgggcgaaagccgacctcgtggaacaggtgagcaagcagcgtctcttcaagcccagggcaatgcgtggccacctggaacaggtgctttcgcgtgaggtagtaaccctcatccagacagccgtaatacgagcagtaaacgctgccgcattgctcaagtag

SEQ ID NO: 136105 - protein, 149 aa, Pseudomonas sp. ND6
MAINFEPKIGQILECNYGDYQYDENGAIVFKNYDYRLKPEMIKNRLVVVLNARIDPNACIVVPLSTTKDIGKLGRGLHVELGKDLIDELPYFKQQTRWAKADLVEQVSKQRLFKPRAMRGHLEQVLSREVVTLIQTAVIRAVNAAALLK

SEQ ID NO: 136106 - DNA, 219 bp, Escherichia coli K12
  CDS (1)..(219): transl_table=11
gtggcgattaatttcagccctaaggttggtgaaatactggaatgcaactttggtaactatcctgttagccaaaatggaccgttcagcacgacgtattacgatggccgcattcctcctgaaatgataaaaaacaggttagttgtcgtgctcaacggaaaaattaatggcaacgcatgcatcgtcgttccattatcaaccactcgcgaccagacaagttaa

SEQ ID NO: 136107 - protein, 72 aa, Escherichia coli K12
MAINFSPKVGEILECNFGNYPVSQNGPFSTTYYDGRIPPEMIKNRLVVVLNGKINGNACIVVPLSTTRDQTS

SEQ ID NO: 136108 - DNA, 432 bp, Haemophilus influenzae 86-028NP
  CDS (1)..(432): transl_table=11
atgagcataaaacaacatcgccctaaagttggagaaattctagaatgtgattatggtcaattttcgcatacctgtcacgttgatggacatattccacctgaaatggttaaaaaacgtttagttgttgttttgaatgcgaaactgaacgggcttattttagttgcaccaatttcatctacaattaatttagatggtataaaaaatggctatcatattgaaatagattcagaattaataaaagcaacaagcttttatgataaaaggactcgctggattaaatctgaattaattcaatcagtaagtcgtctccgtctgtatcatatttatgataaaggaactaaaattactcaatatttgccaagggatgttgtaacaaaagttcaaagagctatcataaaagcaatcaatgcaagctcattacttgacaagtag

SEQ ID NO: 136109 - protein, 143 aa, Haemophilus influenzae 86-028NP
MSIKQHRPKVGEILECDYGQFSHTCHVDGHIPPEMVKKRLVVVLNAKLNGLILVAPISSTINLDGIKNGYHIEIDSELIKATSFYDKRTRWIKSELIQSVSRLRLYHIYDKGTKITQYLPRDVVTKVQRAIIKAINASSLLDK

SEQ ID NO: 136110 - DNA, 450 bp, Pseudomonas syringae pv. phaseolicola 1448A
  CDS (1)..(450): transl_table=11
atggctattaattttgagcccaagattgggcaggtgctggaatgcaactacggggattatcagtacgatgaggcaggagaaatcctattcagaagctatgactttcgcctcaagcccgaaatgataaagaaccgactggtggtcgtgctgaacgcacggattgactccagtgcttgcatagtcgtgccgctatccaccacaaaggatttcggaaagctaggcagagggctacacgtcgagctggacagcgatttgatagacgaactcccctacttcaagcagaaaatcagatgggccaaggcggatcttgtggagcaggtcagcaagcaacgcctcttcaagcctagggcgatgcgcgggcatcttgaacaggtgctgtcgcgggaggtcgtgacgcttattcaaatagcggtcataaagtccgtaaacgctggggcattgctcaaataa

SEQ ID NO: 136111 - protein, 149 aa, Pseudomonas syringae pv. phaseolicola 1448A
MAINFEPKIGQVLECNYGDYQYDEAGEILFRSYDFRLKPEMIKNRLVVVLNARIDSSACIVVPLSTTKDFGKLGRGLHVELDSDLIDELPYFKQKIRWAKADLVEQVSKQRLFKPRAMRGHLEQVLSREVVTLIQIAVIKSVNAGALLK

SEQ ID NO: 136112 - DNA, 432 bp, Haemophilus influenzae
  CDS (1)..(432): transl_table=11
atgagcataaaacaacatcgccctaaagttggagaaattctagaatgtgattatggtcaattttcgcatacctgtcacgttgatggacatattccacctgaaatggttaaaaaacgtttggttgttgttttgaatgctaaactgaatgggcttattttagttgcaccaatttcatctaaaattaatttagatggtataaaaaatggctatcatattgaaatagattcagaattaataaaagcaacaggcttttatgataaaaggactcgctggattaaatctgaattaattcaatcagtaagtcgtctccgtctgtatcatatttatgataaaggaactaaaattactcaatatttgccaagggatgttgtaacaaaagttcaaagagctatcataaaagcaatcaatgcaagctcattacttgacaagtag

SEQ ID NO: 136113 - protein, 143 aa, Haemophilus influenzae
MSIKQHRPKVGEILECDYGQFSHTCHVDGHIPPEMVKKRLVVVLNAKLNGLILVAPISSKINLDGIKNGYHIEIDSELIKATGFYDKRTRWIKSELIQSVSRLRLYHIYDKGTKITQYLPRDVVTKVQRAIIKAINASSLLDK

SEQ ID NO: 136114 - DNA, 28 bp, Artificial sequence
  primer
atgttattactttttcagagtttactaa

SEQ ID NO: 136115 - DNA, 23 bp, Artificial sequence
  primer
ttaacttgtctggtcgcgagtgg

SEQ ID NO: 136116 - protein, 66 aa, Artificial sequence
  consensus sequence
  Variant (2)..(4): Xaa in position 2 to 4 is any amino acid
  Variant (5)..(5): Xaa in position 5 is any or no amino acid
  Variant (8)..(8): Xaa in position 8 is any amino acid
  Variant (10)..(10): Xaa in position 10 is any amino acid
  Variant (15)..(16): Xaa in position 15 to 16 is any amino acid
  Variant (18)..(25): Xaa in position 18 to 25 is any amino acid
  Variant (26)..(32): Xaa in position 26 to 32 is any or no amino acid
  Variant (34)..(37): Xaa in position 34 to 37 is any amino acid
  Variant (41)..(41): Xaa in position 41 is any amino acid
  Variant (43)..(43): Xaa in position 43 is any amino acid
  Variant (51)..(58): Xaa in position 51 to 58 is any amino acid
  Variant (59)..(59): Xaa in position 59 is any or no amino acid
  Variant (61)..(61): Xaa in position 61 is any amino acid
  Variant (63)..(63): Xaa in position 63 is any amino acid
  Variant (65)..(65): Xaa in position 65 is any amino acid
IXXXXPKXGXILECXXGXXXXXXXXXXXXXXXDXXXXPEMXKXRLVVVLNXXXXXXXXXVXPXSXT

SEQ ID NO: 136117 - protein, 23 aa, Artificial sequence
  protein pattern
  Variant (2)..(4): Xaa in position 2 to 4 is any amino acid
  Variant (5)..(5): Xaa in position 5 is any or no amino acid
  Variant (7)..(7): Xaa in position 7 is any or no amino acid
  Variant (10)..(10): Xaa in position 10 is Ile or Val
  Variant (12)..(12): Xaa in position 12 is any amino acid
  Variant (20)..(20): Xaa in position 20 is Ala or Gly
  Variant (21)..(21): Xaa in position 21 is Lys or Arg
  Variant (22)..(22): Xaa in position 22 is Ile or Leu
  Variant (23)..(23): Xaa in position 23 is Asp or Asn
DXXXXPXEMXKXRLVVVLNXXXX

SEQ ID NO: 136118 - protein, 15 aa, Artificial sequence
  protein pattern
  Variant (3)..(3): Xaa in position 3 is Ile or Val
  Variant (5)..(5): Xaa in position 5 is Glu or Gln
  Variant (10)..(10): Xaa in position 10 is Asp or Asn
  Variant (11)..(11): Xaa in position 11 is Phe or Tyr
  Variant (13)..(13): Xaa in position 13 is Asp, Asn or Gln
  Variant (14)..(14): Xaa in position 14 is Phe or Tyr
  Variant (15)..(15): Xaa in position 15 is Pro, Gln or Ser
PKXGXILECXXGXXX

SEQ ID NO: 136119 - protein, 13 aa, Artificial sequence
  protein pattern
  Variant (2)..(2): Xaa in position 2 is any or no amino acid
  Variant (4)..(4): Xaa in position 4 is Ala or Val
  Variant (6)..(6): Xaa in position 6 is Ile or Leu
  Variant (8)..(8): Xaa in position 8 is any or no amino acid
  Variant (10)..(11): Xaa in position 10 to 11 is any amino acid
  Variant (12)..(12): Xaa in position 12 is any or no amino acid
IXVXPXSXTXXXD

SEQ ID NO: 136120 - DNA, 1500 bp, Arabidopsis thaliana; identical to SEQ ID NO: 45264
  CDS (1)..(1500)

SEQ ID NO: 136121 - protein, 499 aa, Arabidopsis thaliana; identical to SEQ ID NO: 45265

SEQ ID NO: 136122 - DNA, 2008 bp, Sorghum bicolor; identical to SEQ ID NO: 45024
  CDS (111)..(1607)
  misc_feature (5)..(5): n is a, g, c or t

SEQ ID NO: 136123 - protein, 498 aa, Sorghum bicolor; identical to SEQ ID NO: 45025

SEQ ID NO: 136124 - DNA, 1764 bp, Glycine max; identical to SEQ ID NO: 45030
  CDS (34)..(1521)

SEQ ID NO: 136125 - protein, 495 aa, Glycine max; identical to SEQ ID NO: 45031

SEQ ID NO: 136126 - DNA, 2014 bp, Zea mays; identical to SEQ ID NO: 45032
  CDS (30)..(1526)

SEQ ID NO: 136127 - protein, 498 aa, Zea mays; identical to SEQ ID NO: 45033

SEQ ID NO: 136128 - DNA, 1726 bp, Brassica napus; identical to SEQ ID NO: 45034
  CDS (76)..(1554)

SEQ ID NO: 136129 - protein, 492 aa, Brassica napus; identical to SEQ ID NO: 45035

SEQ ID NO: 136130 - DNA, 1401 bp, Klebsiella pneumoniae subsp. pneumoniae MGH 78578; identical to SEQ ID NO: 133721
  CDS (1)..(1401): transl_table=11

SEQ ID NO: 136131 - protein, 466 aa, Klebsiella pneumoniae subsp. pneumoniae MGH 78578; identical to SEQ ID NO: 133722

SEQ ID NO: 136132 - DNA, 1437 bp, Klebsiella pneumoniae subsp. pneumoniae MGH 78578
  CDS (1)..(1437): transl_table=11
atgttaaacaacattcgtatcgaagaagatctgttgggcaccagggaagttcccgcggacgcttactacggcgttcatactctgcgagcgattgaaaacttctacattagcaacagcaaaatcagcgacataccagaattcgtgcgcggcatggtcatggtgaagaaagccgccgcgctggcgaacaaggagctgcagaccattcccaaaagcgcggcaaatgcgattatcgccgcctgtgacgaagtcctgaataacggcaaatgcatggaccagttcccggtcgatgtcttccagggcggggccggtacctccgtaaacatgaacaccaacgaagtcctggcgaacattggccttgagctgatgggccaccagaaaggcgaataccagtacctgaacccaaacgatcacgtcaacaaatgccagtccaccaacgatgcttaccccaccgggttccgcattgcggtgtatgcttccatccttaagttaatcgatgcgattaaacagctgggcgaaggcttccaggcgaaagccgaggagttccaggacatcctcaaaatgggccgcacccagctgcaggacgcggtgccgatgaccctcggccaggagttccatgccttcaatgtgctgcttaatgaagagaccaaaagcattttgcgcactgcggagctgctgctggaggtgaacctcggcgccaccgccattggtactcgcctcaacaccccggacggctatcaacagctggcggtgcagaagctggctgaagtaagcaacttaccggtcgtcccggcggaagatctgattgaagccacttcggactgcggggcgtacgttatggttcacagttcgctgaaacgcctggcggtgaaactgtccaagatctgtaacgacctgcgcctgctctcttccggtccgcgcgcgggcctcaacgaaatcaacctgcctgagctgcaggctggctcttcaatcatgccggcgaaggttaacccggtggtgccggaggtggtcaaccaggtctgcttcaaagttatcggcaacgataccactgtgaccatggcctccgaagccggtcagctgcagttgaacgtgatggagccggtgatcggccaggcgatgttcgagtcgattcatatcctgaccaacgcctgctacaacctgctggagaaatgcgttaacggcatcaccgccaataaagcggtatgtgaaggctacgtctacaactccatcggcatcgtcacctacctcaacccgtttatcggccaccacaatggcgatatcgtcggcaagatctgtgccgaaaccggcaagagcgtacgggaagtggtgctggagcgcggactgctgacggcggcggagttggatgatattttctctgcgcaaaacctgatgcatcccgcttataaagcaaagcgttataccgatgaaagcgaacagtaa

SEQ ID NO: 136133 - protein, 478 aa, Klebsiella pneumoniae subsp. pneumoniae MGH 78578
MLNNIRIEEDLLGTREVPADAYYGVHTLRAIENFYISNSKISDIPEFVRGMVMVKKAAALANKELQTIPKSAANAIIAACDEVLNNGKCMDQFPVDVFQGGAGTSVNMNTNEVLANIGLELMGHQKGEYQYLNPNDHVNKCQSTNDAYPTGFRIAVYASILKLIDAIKQLGEGFQAKAEEFQDILKMGRTQLQDAVPMTLGQEFHAFNVLLNEETKSILRTAELLLEVNLGATAIGTRLNTPDGYQQLAVQKLAEVSNLPVVPAEDLIEATSDCGAYVMVHSSLKRLAVKLSKICNDLRLLSSGPRAGLNEINLPELQAGSSIMPAKVNPVVPEVVNQVCFKVIGNDTTVTMASEAGQLQLNVMEPVIGQAMFESIHILTNACYNLLEKCVNGITANKAVCEGYVYNSIGIVTYLNPFIGHHNGDIVGKICAETGKSVREVVLERGLLTAAELDDIFSAQNLMHPAYKAKRYTDESEQ

SEQ ID NO: 136134 - DNA, 1416 bp, Kineococcus radiotolerans SRS30216; identical to SEQ ID NO: 115382
  CDS (1)..(1416): transl_table=11

SEQ ID NO: 136135 - protein, 471 aa, Kineococcus radiotolerans SRS30216; identical to SEQ ID NO: 115383

SEQ ID NO: 136136 - DNA, 1389 bp, Xanthobacter autotrophicus Py2; identical to SEQ ID NO: 115408
  CDS (1)..(1389): transl_table=11

SEQ ID NO: 136137 - protein, 462 aa, Xanthobacter autotrophicus Py2; identical to SEQ ID NO: 115409

SEQ ID NO: 136138 - DNA, 1410 bp, Oryza sativa (japonica cultivar-group); identical to SEQ ID NO: 45040
  CDS (1)..(1410)

SEQ ID NO: 136139 - protein, 469 aa, Oryza sativa (japonica cultivar-group); identical to SEQ ID NO: 45041

SEQ ID NO: 136140 - DNA, 1419 bp, Pasteurella multocida subsp. multocida str. Pm70; identical to SEQ ID NO: 45042
  CDS (1)..(1419): transl_table=11

SEQ ID NO: 136141 - protein, 472 aa, Pasteurella multocida subsp. multocida str. Pm70; identical to SEQ ID NO: 45043

SEQ ID NO: 136142 - DNA, 1398 bp, Clostridium acetobutylicum ATCC 824; identical to SEQ ID NO: 133733
  CDS (1)..(1398): transl_table=11

SEQ ID NO: 136143 - protein, 465 aa, Clostridium acetobutylicum ATCC 824; identical to SEQ ID NO: 133734

SEQ ID NO: 136144 - DNA, 1446 bp, Agrobacterium tumefaciens str. C58; identical to SEQ ID NO: 45050
  CDS (1)..(1446): transl_table=11

SEQ ID NO: 136145 - protein, 481 aa, Agrobacterium tumefaciens str. C58; identical to SEQ ID NO: 45051

SEQ ID NO: 136146 - DNA, 1494 bp, Sinorhizobium meliloti 1021; identical to SEQ ID NO: 45288
  CDS (1)..(1494): transl_table=11

SEQ ID NO: 136147 - protein, 497 aa, Sinorhizobium meliloti 1021; identical to SEQ ID NO: 115099

SEQ ID NO: 136148 - DNA, 1374 bp, Thermoplasma acidophilum DSM 1728; identical to SEQ ID NO: 45052
  CDS (1)..(1374): transl_table=11

SEQ ID NO: 136149 - protein, 457 aa, Thermoplasma acidophilum DSM 1728; identical to SEQ ID NO: 45053

SEQ ID NO: 136150 - DNA, 1437 bp, Salmonella typhimurium LT2; identical to SEQ ID NO: 133739
  CDS (1)..(1437): transl_table=11

SEQ ID NO: 136151 - protein, 478 aa, Salmonella typhimurium LT2; identical to SEQ ID NO: 45027

SEQ ID NO: 136152 - DNA, 1416 bp, Nostoc sp. PCC 7120; identical to SEQ ID NO: 115100
  CDS (1)..(1416): transl_table=11

SEQ ID NO: 136153 - protein, 471 aa, Nostoc sp. PCC 7120; identical to SEQ ID NO: 115101

SEQ ID NO: 136154 - DNA, 1494 bp, Agrobacterium tumefaciens str. C58; identical to SEQ ID NO: 45048
  CDS (1)..(1494): transl_table=11

SEQ ID NO: 136155 - protein, 497 aa, Agrobacterium tumefaciens str. C58; identical to SEQ ID NO: 45049

SEQ ID NO: 136156 - DNA, 1437 bp, Brucella melitensis 16M; identical to SEQ ID NO: 115102
  CDS (1)..(1437): transl_table=11

SEQ ID NO: 136157 - protein, 478 aa, Brucella melitensis 16M; identical to SEQ ID NO: 115103

SEQ ID NO: 136158 - DNA, 1488 bp, Drosophila melanogaster; identical to SEQ ID NO: 45056
  CDS (1)..(1488)

SEQ ID NO: 136159 - protein, 495 aa, Drosophila melanogaster; identical to SEQ ID NO: 45057

SEQ ID NO: 136160 - DNA, 1410 bp, Corynebacterium glutamicum ATCC 13032; identical to SEQ ID NO: 45058
  CDS (1)..(1410): transl_table=11

SEQ ID NO: 136161 - protein, 469 aa, Corynebacterium glutamicum ATCC 13032; identical to SEQ ID NO: 45059

SEQ ID NO: 136162 - DNA, 1386 bp, Thermoanaerobacter tengcongensis MB4; identical to SEQ ID NO: 45060
  CDS (1)..(1386): transl_table=11

SEQ ID NO: 136163 - protein, 461 aa, Thermoanaerobacter tengcongensis MB4; identical to SEQ ID NO: 45061

SEQ ID NO: 136164 - DNA, 1404 bp, Xanthomonas axonopodis pv. citri str. 306; identical to SEQ ID NO: 115112
  CDS (1)..(1404): transl_table=11

SEQ ID NO: 136165 - protein, 467 aa, Xanthomonas axonopodis pv. citri str. 306; identical to SEQ ID NO: 115113

SEQ ID NO: 136166 - DNA, 1413 bp, Drosophila melanogaster; identical to SEQ ID NO: 45062
  CDS (1)..(1413)

SEQ ID NO: 136167 - protein, 470 aa, Drosophila melanogaster; identical to SEQ ID NO: 45063

SEQ ID NO: 136168 - DNA, 1437 bp, Yersinia pestis KIM; identical to SEQ ID NO: 45064
  CDS (1)..(1437): transl_table=11

SEQ ID NO: 136169 - protein, 478 aa, Yersinia pestis KIM; identical to SEQ ID NO: 45065

SEQ ID NO: 136170 - DNA, 1473 bp, Bifidobacterium longum NCC2705
  CDS (1)..(1473): transl_table=11
atgctggcgtttccaacccacgcacaggaagatggaagcatgagcgaaacatcgaacaagacccgtctggaacatgactgcatcggccagatggaggtgccggcgaacgtctactggggtattcacacccagcgcgctatcggcaacttcccggtctccggcatcaccgatagccaacatcccgagctgattcgcgcctatgccacggtcaagcgcgcctgcgccatcgccaatgaggaattaggcctgatcgacccagccaaggccgaggccattcgcgccgcctgcctagaaattgaggccggcaaactggccgatcagttcccggtcgatgtgatgcagggcggtgccggcacctcgtcgaacatgaacatgaacgaggtgatcgccaaccgtgcgttggaaatcgccggccgccagcgcggcgattacacatacatccatccgaacgacgacgtcaacaagtcgcagtccacgaacgacacctacccggccgcctgcaaactcgcgcttatcgacgcgatcgggccgctcgccgagtccaccaagaaactcgccaaggccttccacgatctggccgacaaacatatcaatgacgtgacgattggccgcacgcagctgcaggacgccgtaccaatgacctatggtcaggaatttcatgcgtttgccacgctgttgaagtctgatttggctgcattcgatcgcgtggtgccgctgctggcccagctcaacctcggtgccaccgccatcggtaccggcatttgcgcggatctgcgattccgcaagtccgctatcaagcatctggcgcaaatcaccgggctgccggtcaccgccgcgcccgatccggtggccgccatgacggatatgggcgcgtacgtggccacgtcggctgccatcaagagcctcgccgtgcacctgaagaaggccgccgacgatttgcgactgctcaattccgggccgcgctgcggtttcaacgatctcaacgtgccggctcgccaggccggatcgtcgatcatgccggccaaagtgaaccctgtgatccccgaatgcgtcaaccagtgctgcttcacgattttcggcatggacgtgactgtgaactgggctgtggccgagggacagttgcagctgaacgccttcgacccggtgatggtgcatgagctgctgaccggcatggcgttgctgacgcacgccatggagacgttccgcgtcaactgcgtggaaggcatcgaaatcaatgctgacctggggcgttcatacgctcagtcctcaccgtcgatttccgccgcgctcaaccactacatcggctacgagcacgcggccgacatcgccgccgaagccgtacataccggccgtaccgtgcgcgaggtggccggcgaacgcaccgacctgcccgccgagcagttggacgagattctcgatccgattcgactggcccgaggcctcggccagacctgccgcgagcaccaggagtag

SEQ ID NO: 136171 - protein, 490 aa, Bifidobacterium longum NCC2705
MLAFPTHAQEDGSMSETSNKTRLEHDCIGQMEVPANVYWGIHTQRAIGNFPVSGITDSQHPELIRAYATVKRACAIANEELGLIDPAKAEAIRAACLEIEAGKLADQFPVDVMQGGAGTSSNMNMNEVIANRALEIAGRQRGDYTYIHPNDDVNKSQSTNDTYPAACKLALIDAIGPLAESTKKLAKAFHDLADKHINDVTIGRTQLQDAVPMTYGQEFHAFATLLKSDLAAFDRVVPLLAQLNLGATAIGTGICADLRFRKSAIKHLAQITGLPVTAAPDPVAAMTDMGAYVATSAAIKSLAVHLKKAADDLRLLNSGPRCGFNDLNVPARQAGSSIMPAKVNPVIPECVNQCCFTIFGMDVTVNWAVAEGQLQLNAFDPVMVHELLTGMALLTHAMETFRVNCVEGIEINADLGRSYAQSSPSISAALNHYIGYEHAADIAAEAVHTGRTVREVAGERTDLPAEQLDEILDPIRLARGLGQTCREHQE

SEQ ID NO: 136172 - DNA, 1455 bp, Drosophila melanogaster; identical to SEQ ID NO: 45068
  CDS (1)..(1455)

SEQ ID NO: 136173 - protein, 484 aa, Drosophila melanogaster; identical to SEQ ID NO: 45069

SEQ ID NO: 136174 - DNA, 1404 bp, Drosophila melanogaster; identical to SEQ ID NO: 45070
  CDS (1)..(1404)

SEQ ID NO: 136175 - protein, 467 aa, Drosophila melanogaster; identical to SEQ ID NO: 45071

SEQ ID NO: 136176 - DNA, 1512 bp, Drosophila melanogaster; identical to SEQ ID NO: 45072
  CDS (1)..(1512)

SEQ ID NO: 136177 - protein, 503 aa, Drosophila melanogaster; identical to SEQ ID NO: 45073

SEQ ID NO: 136178 - DNA, 1380 bp, Pseudomonas putida KT2440; identical to SEQ ID NO: 45076
  CDS (1)..(1380): transl_table=11

SEQ ID NO: 136179 - protein, 459 aa, Pseudomonas putida KT2440; identical to SEQ ID NO: 45077

SEQ ID NO: 136180 - DNA, 1437 bp, Pseudomonas putida KT2440; identical to SEQ ID NO: 45078
  CDS (1)..(1437): transl_table=11

SEQ ID NO: 136181 - protein, 478 aa, Pseudomonas putida KT2440; identical to SEQ ID NO: 45079

SEQ ID NO: 136182 - DNA, 1467 bp, Bradyrhizobium japonicum USDA 110; identical to SEQ ID NO: 45266
  CDS (1)..(1467): transl_table=11

SEQ ID NO: 136183 - protein, 488 aa, Bradyrhizobium japonicum USDA 110; identical to SEQ ID NO: 115131

SEQ ID NO: 136184 - DNA, 1386 bp, Vibrio parahaemolyticus RIMD 2210633; identical to SEQ ID NO: 115136
  CDS (1)..(1386): transl_table=11

SEQ ID NO: 136185 - protein, 461 aa, Vibrio parahaemolyticus RIMD 2210633; identical to SEQ ID NO: 115137

SEQ ID NO: 136186 - DNA, 1359 bp, Coxiella burnetii RSA 493
  CDS (1)..(1359): transl_table=11
atgggtacgattgaagtgcccagtgaaaagtattatggcgcgcaatcacagcgctcattaattaattttgccattgggcgtgaaacgatgccgcctgagctcattcgcgcttttggcgttttgaaaaaagcggctgtgctcaccaatgttgaattgggcaaggtgtctcaagaaaaagctaactttattcttaaagcctgcgaagagctgatcgctggaaaactaaacgatcattttcccttgaaaatttggcaaaccggcagcggcacgcagaccaacatgaatgtgaacgaggttatcagtaatcgcgcgattgagttagctggtggaaagttaggaagcaaagaaccggttcatccgaacgatcacgttaatatgtcgcaatcttcaaatgatacttttccaacggccatgcacattactgctgccgaaatgataacgcatcagcttattcctaatctcactgtcttacgcgataccttggaaaaaaaatccaaggaattttccgaaatcattaaaatcggtcgaacgcatttgcaagacgctgtgccattaacgttgggtcaagaattttcaggttatgtcgctcaactcaaccataacttggaagccattaatgatgtacttccaacgctctatcgtcttgcgctcggcgggacggcggtaggcacggggctaaatacccacccgcaatttgccaaaaaagcggctgaccacattgccgaactgacgggaatacccttttactcggcgtctaataaatttgccgctctggctgccaacgacgaaattgttttagtcagcggcgttctcaaaacccttgcctgttcgttgatgaaaattgcaaacgatattcgttggttggcttccggcccgcgttgcggcatcggggaaattgttatcccagaaaacgagccaggttcttcgattatgccgggtaaagtaaatccaacgcaatccgaagcgatgacgatggtgtgtgttcaggtgataggaaacgatacgaccattaccatcgcgggatcgcaagggaattttgaattgaatgtttacaagcccgtgatggcttataatttaattcaatctatttatttattgtccgatgcttgtcgctcctttaatgatcattgcgccgttggcatcaaacccaatcaagaaaaaattaatgactatctgaataattctctaatgctggtcactgcattaaaccaaatcatcggttacgacaaagcctcagaaattgctaaaaaagcttacaaagaaggcacgacgcttaaagaagcggctcttcaattaggttatttaaccgcaagcgaattcgataaagccgtagaccccaaaaaaatggtcgctatttga

SEQ ID NO: 136187 - protein, 452 aa, Coxiella burnetii RSA 493
MGTIEVPSEKYYGAQSQRSLINFAIGRETMPPELIRAFGVLKKAAVLTNVELGKVSQEKANFILKACEELIAGKLNDHFPLKIWQTGSGTQTNMNVNEVISNRAIELAGGKLGSKEPVHPNDHVNMSQSSNDTFPTAMHITAAEMITHQLIPNLTVLRDTLEKKSKEFSEIIKIGRTHLQDAVPLTLGQEFSGYVAQLNHNLEAINDVLPTLYRLALGGTAVGTGLNTHPQFAKKAADHIAELTGIPFYSASNKFAALAANDEIVLVSGVLKTLACSLMKIANDIRWLASGPRCGIGEIVIPENEPGSSIMPGKVNPTQSEAMTMVCVQVIGNDTTITIAGSQGNFELNVYKPVMAYNLIQSIYLLSDACRSFNDHCAVGIKPNQEKINDYLNNSLMLVTALNQIIGYDKASEIAKKAYKEGTTLKEAALQLGYLTASEFDKAVDPKKMVAI

SEQ ID NO: 136188 - DNA, 1533 bp, Arabidopsis thaliana; identical to SEQ ID NO: 45096
  CDS (1)..(1533)

SEQ ID NO: 136189 - protein, 510 aa, Arabidopsis thaliana; identical to SEQ ID NO: 45097

SEQ ID NO: 136190 - DNA, 1404 bp, Chromobacterium violaceum ATCC 12472; identical to SEQ ID NO: 45102
  CDS (1)..(1404): transl_table=11

SEQ ID NO: 136191 - protein, 467 aa, Chromobacterium violaceum ATCC 12472; identical to SEQ ID NO: 45103

SEQ ID NO: 136192 - DNA, 1410 bp, Gloeobacter violaceus PCC 7421; identical to SEQ ID NO: 45106
  CDS (1)..(1410): transl_table=11

SEQ ID NO: 136193 - protein, 469 aa, Gloeobacter violaceus PCC 7421; identical to SEQ ID NO: 45107

SEQ ID NO: 136194 - DNA, 1404 bp, Corynebacterium diphtheriae NCTC 13129; identical to SEQ ID NO: 115142
  CDS (1)..(1404): transl_table=11

SEQ ID NO: 136195 - protein, 467 aa, Corynebacterium diphtheriae NCTC 13129; identical to SEQ ID NO: 115143

SEQ ID NO: 136196 - DNA, 1434 bp, Rhodopseudomonas palustris CGA009; identical to SEQ ID NO: 115146
  CDS (1)..(1434): transl_table=11

SEQ ID NO: 136197 - protein, 477 aa, Rhodopseudomonas palustris CGA009; identical to SEQ ID NO: 115147

SEQ ID NO: 136198 - DNA, 1395 bp, Wolbachia endosymbiont of Drosophila melanogaster; identical to SEQ ID NO: 45116
  CDS (1)..(1395): transl_table=11

SEQ ID NO: 136199 - protein, 464 aa, Wolbachia endosymbiont of Drosophila melanogaster; identical to SEQ ID NO: 45117

SEQ ID NO: 136200 - DNA, 1401 bp, Bdellovibrio bacteriovorus HD100; identical to SEQ ID NO: 115154
  CDS (1)..(1401): transl_table=11

SEQ ID NO: 136201 - protein, 466 aa, Bdellovibrio bacteriovorus HD100; identical to SEQ ID NO: 115155

SEQ ID NO: 136202 - DNA, 1341 bp, Apis mellifera; identical to SEQ ID NO: 133797
  CDS (1)..(1341)

SEQ ID NO: 136203 - protein, 446 aa, Apis mellifera; identical to SEQ ID NO: 133798

SEQ ID NO: 136204 - DNA, 1332 bp, Magnaporthe grisea 70-15; identical to SEQ ID NO: 133799
  CDS (1)..(1332)

SEQ ID NO: 136205 - protein, 443 aa, Magnaporthe grisea 70-15; identical to SEQ ID NO: 133800

SEQ ID NO: 136206 - DNA, 1422 bp, Nasonia vitripennis; identical to SEQ ID NO: 45124
  CDS (1)..(1422)

SEQ ID NO: 136207 - protein, 473 aa, Nasonia vitripennis; identical to SEQ ID NO: 45125

SEQ ID NO: 136208 - DNA, 1638 bp, Magnaporthe grisea 70-15; identical to SEQ ID NO: 45126
  CDS (1)..(1638)

SEQ ID NO: 136209 - protein, 545 aa, Magnaporthe grisea 70-15; identical to SEQ ID NO: 45127

SEQ ID NO: 136210 - DNA, 1590 bp, Gibberella zeae PH-1; identical to SEQ ID NO: 45128
  CDS (1)..(1590)

SEQ ID NO: 136211 - protein, 529 aa, Gibberella zeae PH-1; identical to SEQ ID NO: 45129

SEQ ID NO: 136212 - DNA, 1452 bp, Candida glabrata CBS 138; identical to SEQ ID NO: 45130
  CDS (1)..(1452)

SEQ ID NO: 136213 - protein, 483 aa, Candida glabrata CBS 138; identical to SEQ ID NO: 45131

SEQ ID NO: 136214 - DNA, 1479 bp, Kluyveromyces lactis NRRL Y-1140; identical to SEQ ID NO: 45132
  CDS (1)..(1479)

SEQ ID NO: 136215 - protein, 492 aa, Kluyveromyces lactis NRRL Y-1140; identical to SEQ ID NO: 45133

SEQ ID NO: 136216 - DNA, 1479 bp, Debaryomyces hansenii CBS767; identical to SEQ ID NO: 45134
  CDS (1)..(1479)

SEQ ID NO: 136217 - protein, 492 aa, Debaryomyces hansenii CBS767; identical to SEQ ID NO: 45135

SEQ ID NO: 136218 - DNA, 1404 bp, Debaryomyces hansenii CBS767; identical to SEQ ID NO: 45136
  CDS (1)..(1404)

SEQ ID NO: 136219 - protein, 467 aa, Debaryomyces hansenii CBS767; identical to SEQ ID NO: 45137

SEQ ID NO: 136220 - DNA, 1470 bp, Yarrowia lipolytica CLIB122; identical to SEQ ID NO: 45138
  CDS (1)..(1470)

SEQ ID NO: 136221 - protein, 489 aa, Yarrowia lipolytica CLIB122; identical to SEQ ID NO: 45139

SEQ ID NO: 136222 - DNA, 1635 bp, Aspergillus nidulans FGSC A4; identical to SEQ ID NO: 45140
  CDS (1)..(1635)

SEQ ID NO: 136223 - protein, 544 aa, Aspergillus nidulans FGSC A4; identical to SEQ ID NO: 45141

SEQ ID NO: 136224 - DNA, 1389 bp, Candida albicans SC5314; identical to SEQ ID NO: 45142
  CDS (1)..(1389): transl_table=12

SEQ ID NO: 136225 - protein, 462 aa, Candida albicans SC5314; identical to SEQ ID NO: 45143

SEQ ID NO: 136226 - DNA, 1419 bp, Ustilago maydis 521; identical to SEQ ID NO: 45144
  CDS (1)..(1419)

SEQ ID NO: 136227 - protein, 472 aa, Ustilago maydis 521; identical to SEQ ID NO: 45145

SEQ ID NO: 136228 - DNA, 1533 bp, Cryptococcus neoformans var. neoformans B-3501A; identical to SEQ ID NO: 45146
  CDS (1)..(1533)

SEQ ID NO: 136229 - protein, 510 aa, Cryptococcus neoformans var. neoformans B-3501A; identical to SEQ ID NO: 45147

SEQ ID NO: 136230 - DNA, 1494 bp, Tribolium castaneum; identical to SEQ ID NO: 45148
  CDS (1)..(1494)

SEQ ID NO: 136231 - protein, 497 aa, Tribolium castaneum; identical to SEQ ID NO: 45149

SEQ ID NO: 136232 - DNA, 1398 bp, Prochlorococcus marinus str. MIT 9303; identical to SEQ ID NO: 115186
  CDS (1)..(1398): transl_table=11

SEQ ID NO: 136233 - protein, 465 aa, Prochlorococcus marinus str. MIT 9303; identical to SEQ ID NO: 115187

SEQ ID NO: 136234 - DNA, 1389 bp, Herminiimonas arsenicoxydans; identical to SEQ ID NO: 115192
  CDS (1)..(1389): transl_table=11

SEQ ID NO: 136235 - protein, 462 aa, Herminiimonas arsenicoxydans; identical to SEQ ID NO: 115193

SEQ ID NO: 136236 - DNA, 1386 bp, Dichelobacter nodosus VCS1703A; identical to SEQ ID NO: 115086
  CDS (1)..(1386): transl_table=11

SEQ ID NO: 136237 - protein, 461 aa, Dichelobacter nodosus VCS1703A; identical to SEQ ID NO: 115087

SEQ ID NO: 136238 - DNA, 1407 bp, Desulfovibrio vulgaris subsp. vulgaris str. Hildenborough; identical to SEQ ID NO: 115200
  CDS (1)..(1407): transl_table=11

SEQ ID NO: 136239 - protein, 468 aa, Desulfovibrio vulgaris subsp. vulgaris str. Hildenborough; identical to SEQ ID NO: 115201

SEQ ID NO: 136240 - DNA, 1368 bp, Picrophilus torridus DSM 9790
  CDS (1)..(1368): transl_table=11
atgagaacagagcacgatgttataggcagtgttgagcttgatgattctgtttactatggcataaatacatacagggccatgaacaattttaaaatatcaggaataaaggaggatgatgaccatataaaggcaatagcaatggtcaagaaggcagctgcctatggaaaccatagagccgggaagcttaacgatgagctttacagtgcaatagaccaggcgtgtgacctggttatatcaggaaaatacaatgaccagtttgttatagatgtttaccaggcaggtgcaggaacctcatttaacatgaacgcaaacgaggttattgccaatatagcactggaaaaacttggccataaaaagggcgattataagataatacatccaaatgacactgtaaatatgagccagtcaacaaatgatatatacccaacaatgatgcgtgttgcaataatgataaaggctcctgaccttctggaatcaatgaaccagctgataatgtctctgaacaggaagggcgaggaattctcaaagatatacaaaacaggaagaacacacctgcaggacgccgttcgtgttacacttggcgatgagttccgtgcctgggcctatgcccttgcaaaggatatgaaggaaataaaaaatgccctggattacatattagaattaaacataggcggaacggctgttggaaacggcgccaatacacctgatggatacagggattacgccgttgaggcactttcaaatatgttaaaggtgaactttagaacctctggaaacatgatgggtgttatgcagtttatgactgatttttccaggttcatgaactctcttgcgaacactgcaatagaccttggcaagatctctgatgatttaaggcttctatactcgggacctggagccggaatccgtgagatactgttgccggcagtgcagcaggggtcatcaataatgcctggaaagataaatccatcaataccggaggcaatgaacatgatatgcaattccgtacttggtgcccagcaggcggtaaacatgtcggcaaaggcagggcagcttgaattaaacgtctttatgccaaatatagattatgagataacaagatcaataacaatacttaaaaatggcatggacatgctcagggaaagggccatagatggtataaaaccggatttaaagcactgcaggatgcatctgcagaacagctttggatctgccgcattgcttaatccataccttggctatgataccgttgctgcaatagttgaaagggcccttgaaaccggcgagaatatcagggatcttgtcctgcaaacaggaaaaataactgaggagcagtacgataaaatattctcgttcatgaatgaatga

SEQ ID NO: 136241 - protein, 455 aa, Picrophilus torridus DSM 9790
MRTEHDVIGSVELDDSVYYGINTYRAMNNFKISGIKEDDDHIKAIAMVKKAAAYGNHRAGKLNDELYSAIDQACDLVISGKYNDQFVIDVYQAGAGTSFNMNANEVIANIALEKLGHKKGDYKIIHPNDTVNMSQSTNDIYPTMMRVAIMIKAPDLLESMNQLIMSLNRKGEEFSKIYKTGRTHLQDAVRVTLGDEFRAWAYALAKDMKEIKNALDYILELNIGGTAVGNGANTPDGYRDYAVEALSNMLKVNFRTSGNMMGVMQFMTDFSRFMNSLANTAIDLGKISDDLRLLYSGPGAGIREILLPAVQQGSSIMPGKINPSIPEAMNMICNSVLGAQQAVNMSAKAGQLELNVFMPNIDYEITRSITILKNGMDMLRERAIDGIKPDLKHCRMHLQNSFGSAALLNPYLGYDTVAAIVERALETGENIRDLVLQTGKITEEQYDKIFSFMNE

SEQ ID NO: 136242 - DNA, 1389 bp, Bartonella quintana str. Toulouse; identical to SEQ ID NO: 115202
  CDS (1)..(1389): transl_table=11

SEQ ID NO: 136243 - protein, 462 aa, Bartonella quintana str. Toulouse; identical to SEQ ID NO: 115203

SEQ ID NO: 136244 - DNA, 1419 bp, Acinetobacter sp. ADP1; identical to SEQ ID NO: 45158
  CDS (1)..(1419): transl_table=11

SEQ ID NO: 136245 - protein, 472 aa, Acinetobacter sp. ADP1; identical to SEQ ID NO: 45159

SEQ ID NO: 136246 - DNA, 1395 bp, Acinetobacter sp. ADP1; identical to SEQ ID NO: 115206
  CDS (1)..(1395): transl_table=11

SEQ ID NO: 136247 - protein, 464 aa, Acinetobacter sp. ADP1; identical to SEQ ID NO: 115207

SEQ ID NO: 136248 - DNA, 1398 bp, Erwinia carotovora subsp. atroseptica SCRI1043; identical to SEQ ID NO: 115208
  CDS (1)..(1398): transl_table=11

SEQ ID NO: 136249 - protein, 465 aa, Erwinia carotovora subsp. atroseptica SCRI1043; identical to SEQ ID NO: 115209

SEQ ID NO: 136250 - DNA, 1407 bp, Propionibacterium acnes KPA171202; identical to SEQ ID NO: 115210
  CDS (1)..(1407): transl_table=11

SEQ ID NO: 136251 - protein, 468 aa, Propionibacterium acnes KPA171202; identical to SEQ ID NO: 115211

SEQ ID NO: 136252 - DNA, 1407 bp, Leifsonia xyli subsp. xyli str. CTCB07; identical to SEQ ID NO: 115212
  CDS (1)..(1407): transl_table=11

SEQ ID NO: 136253 - protein, 468 aa, Leifsonia xyli subsp. xyli str. CTCB07; identical to SEQ ID NO: 115213

SEQ ID NO: 136254 - DNA, 1395 bp, Desulfotalea psychrophila LSv54; identical to SEQ ID NO: 115214
  CDS (1)..(1395): transl_table=11

SEQ ID NO: 136255 - protein, 464 aa, Desulfotalea psychrophila LSv54; identical to SEQ ID NO: 115215

SEQ ID NO: 136256 - DNA, 1398 bp, Mannheimia succiniciproducens MBEL55E; identical to SEQ ID NO: 115220
  CDS (1)..(1398): transl_table=11

SEQ ID NO: 136257 - protein, 465 aa, Mannheimia succiniciproducens MBEL55E; identical to SEQ ID NO: 115221

SEQ ID NO: 136258 - DNA, 1389 bp, Bacillus licheniformis ATCC 14580; identical to SEQ ID NO: 115222
  CDS (1)..(1389): transl_table=11

SEQ ID NO: 136259 - protein, 462 aa, Bacillus licheniformis ATCC 14580; identical to SEQ ID NO: 115223

SEQ ID NO: 136260 - DNA, 1428 bp, Bacillus licheniformis ATCC 14580; identical to SEQ ID NO: 115224
  CDS (1)..(1428): transl_table=11

SEQ ID NO: 136261 - protein, 475 aa, Bacillus licheniformis ATCC 14580; identical to SEQ ID NO: 115225

SEQ ID NO: 136262 - DNA, 1395 bp, Burkholderia mallei ATCC 23344; identical to SEQ ID NO: 133857
  CDS (1)..(1395): transl_table=11

SEQ ID NO: 136263 - protein, 464 aa, Burkholderia mallei ATCC 23344; identical to SEQ ID NO: 133858

SEQ ID NO: 136264 - DNA, 1395 bp, Burkholderia pseudomallei K96243; identical to SEQ ID NO: 115228
  CDS (1)..(1395): transl_table=11

SEQ ID NO: 136265 - protein, 464 aa, Burkholderia pseudomallei K96243; identical to SEQ ID NO: 115229

SEQ ID NO: 136266 - DNA, 1410 bp, Methylococcus capsulatus str. Bath; identical to SEQ ID NO: 115230
  CDS (1)..(1410): transl_table=11

SEQ ID NO: 136267 - protein, 469 aa, Methylococcus capsulatus str. Bath; identical to SEQ ID NO: 115231

SEQ ID NO: 136268 - DNA, 1389 bp, Anaplasma marginale str. St. Maries; identical to SEQ ID NO: 45176
  CDS (1)..(1389): transl_table=11

SEQ ID NO: 136269 - protein, 462 aa, Anaplasma marginale str. St. Maries; identical to SEQ ID NO: 45177

SEQ ID NO: 136270 - DNA, 1392 bp, Campylobacter jejuni RM1221; identical to SEQ ID NO: 115240
  CDS (1)..(1392): transl_table=11

SEQ ID NO: 136271 - protein, 463 aa, Campylobacter jejuni RM1221; identical to SEQ ID NO: 115241

SEQ ID NO: 136272 - DNA, 1395 bp, Pseudomonas syringae pv. syringae B728a; identical to SEQ ID NO: 115246
  CDS (1)..(1395): transl_table=11

SEQ ID NO: 136273 - protein, 464 aa, Pseudomonas syringae pv. syringae B728a; identical to SEQ ID NO: 115247

SEQ ID NO: 136274 - DNA, 1386 bp, Pseudomonas fluorescens Pf-5; identical to SEQ ID NO: 115252
  CDS (1)..(1386): transl_table=11

SEQ ID NO: 136275 - protein, 461 aa, Pseudomonas fluorescens Pf-5; identical to SEQ ID NO: 115253

SEQ ID NO: 136276 - DNA, 1404 bp, Psychrobacter arcticus 273-4; identical to SEQ ID NO: 115256
  CDS (1)..(1404): transl_table=11

SEQ ID NO: 136277 - protein, 467 aa, Psychrobacter arcticus 273-4; identical to SEQ ID NO: 115257

SEQ ID NO: 136278 - DNA, 1458 bp, Colwellia psychrerythraea 34H; identical to SEQ ID NO: 45184
  CDS (1)..(1458): transl_table=11

SEQ ID NO: 136279 - protein, 485 aa, Colwellia psychrerythraea 34H; identical to SEQ ID NO: 45185

SEQ ID NO: 136280 - DNA, 1407 bp, Dechloromonas aromatica RCB; identical to SEQ ID NO: 115264
  CDS (1)..(1407): transl_table=11

SEQ ID NO: 136281 - protein, 468 aa, Dechloromonas aromatica RCB; identical to SEQ ID NO: 115265

SEQ ID NO: 136282 - DNA, 1392 bp, Thermobifida fusca YX; identical to SEQ ID NO: 115266
  CDS (1)..(1392): transl_table=11

SEQ ID NO: 136283 - protein, 463 aa, Thermobifida fusca YX; identical to SEQ ID NO: 115267

SEQ ID NO: 136284 - DNA, 1497 bp, Methanosarcina barkeri str. Fusaro; identical to SEQ ID NO: 115274
  CDS (1)..(1497): transl_table=11

SEQ ID NO: 136285 - protein, 498 aa, Methanosarcina barkeri str. Fusaro; identical to SEQ ID NO: 115275

SEQ ID NO: 136286 - DNA, 1401 bp, Thiobacillus denitrificans ATCC 25259; identical to SEQ ID NO: 45190
  CDS (1)..(1401): transl_table=11

SEQ ID NO: 136287 - protein, 466 aa, Thiobacillus denitrificans ATCC 25259; identical to SEQ ID NO: 45191

SEQ ID NO: 136288 - DNA, 1416 bp, Anabaena variabilis ATCC 29413; identical to SEQ ID NO: 45192
  CDS (1)..(1416): transl_table=11

SEQ ID NO: 136289 - protein, 471 aa, Anabaena variabilis ATCC 29413; identical to SEQ ID NO: 45193

SEQ ID NO: 136290 - DNA, 1395 bp, Pseudomonas fluorescens PfO-1; identical to SEQ ID NO: 115278
  CDS (1)..(1395): transl_table=11

SEQ ID NO: 136291 - protein, 464 aa, Pseudomonas fluorescens PfO-1; identical to SEQ ID NO: 115279

SEQ ID NO: 136292 - DNA, 1395 bp, Rhodobacter sphaeroides 2.4.1; identical to SEQ ID NO: 115280
  CDS (1)..(1395): transl_table=11

SEQ ID NO: 136293 - protein, 464 aa, Rhodobacter sphaeroides 2.4.1; identical to SEQ ID NO: 115281

SEQ ID NO: 136294 - DNA, 1479 bp, Desulfovibrio desulfuricans G20; identical to SEQ ID NO: 115288
  CDS (1)..(1479): transl_table=11

SEQ ID NO: 136295 - protein, 492 aa, Desulfovibrio desulfuricans G20; identical to SEQ ID NO: 115289

SEQ ID NO: 136296 - DNA, 1392 bp, Synechococcus elongatus PCC 7942; identical to SEQ ID NO: 115292
  CDS (1)..(1392): transl_table=11

SEQ ID NO: 136297 - protein, 463 aa, Synechococcus elongatus PCC 7942; identical to SEQ ID NO: 115293

SEQ ID NO: 136298 - DNA, 1464 bp, Rhodospirillum rubrum ATCC 11170; identical to SEQ ID NO: 115294
  CDS (1)..(1464): transl_table=11

SEQ ID NO: 136299 - protein, 487 aa, Rhodospirillum rubrum ATCC 11170; identical to SEQ ID NO: 115295

SEQ ID NO: 136300 - DNA, 1431 bp, Moorella thermoacetica ATCC 39073; identical to SEQ ID NO: 45196
  CDS (1)..(1431): transl_table=11

SEQ ID NO: 136301 - protein, 476 aa, Moorella thermoacetica ATCC 39073; identical to SEQ ID NO: 45197

SEQ ID NO: 136302 - DNA, 1392 bp, Frankia sp. CcI3; identical to SEQ ID NO: 115300
  CDS (1)..(1392): transl_table=11

SEQ ID NO: 136303 - protein, 463 aa, Frankia sp. CcI3; identical to SEQ ID NO: 115301

SEQ ID NO: 136304 - DNA, 1377 bp, Novosphingobium aromaticivorans DSM 12444; identical to SEQ ID NO: 115302
  CDS (1)..(1377): transl_table=11

SEQ ID NO: 136305 - protein, 458 aa, Novosphingobium aromaticivorans DSM 12444; identical to SEQ ID NO: 115303

SEQ ID NO: 136306 - DNA, 1548 bp, Neorickettsia sennetsu str. Miyayama; identical to SEQ ID NO: 115306
  CDS (1)..(1548): transl_table=11

SEQ ID NO: 136307 - protein, 515 aa, Neorickettsia sennetsu str. Miyayama; identical to SEQ ID NO: 115307

SEQ ID NO: 136308 - DNA, 1386 bp, Ehrlichia chaffeensis str. Arkansas; identical to SEQ ID NO: 115308
  CDS (1)..(1386): transl_table=11

SEQ ID NO: 136309 - protein, 461 aa, Ehrlichia chaffeensis str. Arkansas; identical to SEQ ID NO: 115309

SEQ ID NO: 136310 - DNA, 1392 bp, Francisella tularensis subsp. holarctica; identical to SEQ ID NO: 115310
  CDS (1)..(1392): transl_table=11

SEQ ID NO: 136311 - protein, 463 aa, Francisella tularensis subsp. holarctica; identical to SEQ ID NO: 115311

SEQ ID NO: 136312 - DNA, 1383 bp, Saccharophagus degradans 2-40; identical to SEQ ID NO: 115314
  CDS (1)..(1383): transl_table=11

SEQ ID NO: 136313 - protein, 460 aa, Saccharophagus degradans 2-40; identical to SEQ ID NO: 115315

SEQ ID NO: 136314 - DNA, 1431 bp, Acidobacteria bacterium Ellin345; identical to SEQ ID NO: 45200
  CDS (1)..(1431): transl_table=11

SEQ ID NO: 136315 - protein, 476 aa, Acidobacteria bacterium Ellin345; identical to SEQ ID NO: 45201

SEQ ID NO: 136316 - DNA, 1398 bp, Silicibacter sp. TM1040; identical to SEQ ID NO: 115318
  CDS (1)..(1398): transl_table=11

SEQ ID NO: 136317 - protein, 465 aa, Silicibacter sp. TM1040; identical to SEQ ID NO: 115319

SEQ ID NO: 136318 - DNA, 1392 bp, Mesorhizobium sp. BNC1; identical to SEQ ID NO: 115322
  CDS (1)..(1392): transl_table=11

SEQ ID NO: 136319 - protein, 463 aa, Mesorhizobium sp. BNC1; identical to SEQ ID NO: 115323

SEQ ID NO: 136320 - DNA, 1395 bp, Haemophilus somnus 129PT; identical to SEQ ID NO: 133923
  CDS (1)..(1395): transl_table=11

SEQ ID NO: 136321 - protein, 464 aa, Haemophilus somnus 129PT; identical to SEQ ID NO: 133924

SEQ ID NO: 136322 - DNA, 1410 bp, Trichodesmium erythraeum IMS101; identical to SEQ ID NO: 115330
  CDS (1)..(1410): transl_table=11

SEQ ID NO: 136323 - protein, 469 aa, Trichodesmium erythraeum IMS101; identical to SEQ ID NO: 115331

SEQ ID NO: 136324 - DNA, 1389 bp, Alkalilimnicola ehrlichei MLHE-1; identical to SEQ ID NO: 115334
  CDS (1)..(1389): transl_table=11

SEQ ID NO: 136325 - protein, 462 aa, Alkalilimnicola ehrlichei MLHE-1; identical to SEQ ID NO: 115335

SEQ ID NO: 136326 - DNA, 1401 bp, Hyphomonas neptunium ATCC 15444; identical to SEQ ID NO: 45206
  CDS (1)..(1401): transl_table=11

SEQ ID NO: 136327 - protein, 466 aa, Hyphomonas neptunium ATCC 15444; identical to SEQ ID NO: 45207

SEQ ID NO: 136328 - DNA, 1392 bp, Rhizobium leguminosarum bv. viciae 3841; identical to SEQ ID NO: 115338
  CDS (1)..(1392): transl_table=11

SEQ ID NO: 136329 - protein, 463 aa, Rhizobium leguminosarum bv. viciae 3841; identical to SEQ ID NO: 115339

SEQ ID NO: 136330 - DNA, 1395 bp, Pseudomonas aeruginosa UCBPP-PA14; identical to SEQ ID NO: 115340
  CDS (1)..(1395): transl_table=11

SEQ ID NO: 136331 - protein, 464 aa, Pseudomonas aeruginosa UCBPP-PA14; identical to SEQ ID NO: 115341

SEQ ID NO: 136332 - DNA, 1383 bp, Pediococcus pentosaceus ATCC 25745; identical to SEQ ID NO: 115344
  CDS (1)..(1383): transl_table=11

SEQ ID NO: 136333 - protein, 460 aa, Pediococcus pentosaceus ATCC 25745; identical to SEQ ID NO: 115345

SEQ ID NO: 136334 - DNA, 1377 bp, Oenococcus oeni PSU-1; identical to SEQ ID NO: 115346
  CDS (1)..(1377): transl_table=11

SEQ ID NO: 136335 - protein, 458 aa, Oenococcus oeni PSU-1; identical to SEQ ID NO: 115347

SEQ ID NO: 136336 - DNA, 1431 bp, Leuconostoc mesenteroides subsp. mesenteroides ATCC 8293; identical to SEQ ID NO: 45208
  CDS (1)..(1431): transl_table=11

SEQ ID NO: 136337 - protein, 476 aa, Leuconostoc mesenteroides subsp. mesenteroides ATCC 8293; identical to SEQ ID NO: 45209

SEQ ID NO: 136338 - DNA, 1386 bp, Solibacter usitatus Ellin6076; identical to SEQ ID NO: 115348
  CDS (1)..(1386): transl_table=11

SEQ ID NO: 136339 - protein, 461 aa, Solibacter usitatus Ellin6076; identical to SEQ ID NO: 115349

SEQ ID NO: 136340 - DNA, 1380 bp, Azoarcus sp. BH72; identical to SEQ ID NO: 115356
  CDS (1)..(1380): transl_table=11

SEQ ID NO: 136341 - protein, 459 aa, Azoarcus sp. BH72; identical to SEQ ID NO: 115357

SEQ ID NO: 136342 - DNA, 1392 bp, Acidovorax sp. JS42; identical to SEQ ID NO: 115360
  CDS (1)..(1392): transl_table=11

SEQ ID NO: 136343 - protein, 463 aa, Acidovorax sp. JS42; identical to SEQ ID NO: 115361

SEQ ID NO: 136344 - DNA, 1392 bp, Rickettsia rickettsii; identical to SEQ ID NO: 115366
  CDS (1)..(1392): transl_table=11

SEQ ID NO: 136345 - protein, 463 aa, Rickettsia rickettsii; identical to SEQ ID NO: 115367

SEQ ID NO: 136346 - DNA, 1395 bp, Haemophilus influenzae R2846; identical to SEQ ID NO: 115368
  CDS (1)..(1395): transl_table=11

SEQ ID NO: 136347 - protein, 464 aa, Haemophilus influenzae R2846; identical to SEQ ID NO: 115369

SEQ ID NO: 136348 - DNA, 1374 bp, Crocosphaera watsonii WH 8501; identical to SEQ ID NO: 115376
  CDS (1)..(1374): transl_table=11

SEQ ID NO: 136349 - protein, 457 aa, Crocosphaera watsonii WH 8501; identical to SEQ ID NO: 115377

SEQ ID NO: 136350 - DNA, 1395 bp, Exiguobacterium sibiricum 255-15; identical to SEQ ID NO: 115378
  CDS (1)..(1395): transl_table=11

SEQ ID NO: 136351 - protein, 464 aa, Exiguobacterium sibiricum 255-15; identical to SEQ ID NO: 115379

SEQ ID NO: 136352 - DNA, 1410 bp, Xylella fastidiosa Dixon; identical to SEQ ID NO: 115384
  CDS (1)..(1410): transl_table=11

SEQ ID NO: 136353 - protein, 469 aa, Xylella fastidiosa Dixon; identical to SEQ ID NO: 115385

SEQ ID NO: 136354 - DNA, 1395 bp, Sulfitobacter sp. EE-36; identical to SEQ ID NO: 115390
  CDS (1)..(1395): transl_table=11

SEQ ID NO: 136355 - protein, 464 aa, Sulfitobacter sp. EE-36; identical to SEQ ID NO: 115391

SEQ ID NO: 136356 - DNA, 1395 bp, Oceanicola batsensis HTCC2597; identical to SEQ ID NO: 115394
  CDS (1)..(1395): transl_table=11

SEQ ID NO: 136357 - protein, 464 aa, Oceanicola batsensis HTCC2597; identical to SEQ ID NO: 115395

SEQ ID NO: 136358 - DNA, 1401 bp, Prochlorococcus marinus str. MIT 9211; identical to SEQ ID NO: 115396
  CDS (1)..(1401): transl_table=11

SEQ ID NO: 136359 - protein, 466 aa, Prochlorococcus marinus str. MIT 9211; identical to SEQ ID NO: 115397

SEQ ID NO: 136360 - DNA, 1452 bp, Erythrobacter sp. NAP1; identical to SEQ ID NO: 115398
  CDS (1)..(1452): transl_table=11

SEQ ID NO: 136361 - protein, 483 aa, Erythrobacter sp. NAP1; identical to SEQ ID NO: 115399

SEQ ID NO: 136362 - DNA, 1395 bp, Synechococcus sp. WH 5701; identical to SEQ ID NO: 115400
  CDS (1)..(1395): transl_table=11

SEQ ID NO: 136363 - protein, 464 aa, Synechococcus sp. WH 5701; identical to SEQ ID NO: 115401

SEQ ID NO: 136364 - DNA, 1392 bp, Synechococcus sp. WH 7805; identical to SEQ ID NO: 115402
  CDS (1)..(1392): transl_table=11

SEQ ID NO: 136365 - protein, 463 aa, Synechococcus sp. WH 7805; identical to SEQ ID NO: 115403

SEQ ID NO: 136366 - DNA, 1383 bp, Photobacterium sp. SKA34; identical to SEQ ID NO: 115404
  CDS (1)..(1383): transl_table=11

SEQ ID NO: 136367 - protein, 460 aa, Photobacterium sp. SKA34; identical to SEQ ID NO: 115405

SEQ ID NO: 136368 - DNA, 1380 bp, Oceanospirillum sp. MED92; identical to SEQ ID NO: 115406
  CDS (1)..(1380): transl_table=11

SEQ ID NO: 136369 - protein, 459 aa, Oceanospirillum sp. MED92; identical to SEQ ID NO: 115407

SEQ ID NO: 136370 - DNA, 1410 bp, Rickettsiella grylli; identical to SEQ ID NO: 115412
  CDS (1)..(1410): transl_table=11

SEQ ID NO: 136371 - protein, 469 aa, Rickettsiella grylli; identical to SEQ ID NO: 115413

SEQ ID NO: 136372 - DNA, 1350 bp, Oceanobacter sp. RED65; identical to SEQ ID NO: 133977
  CDS (1)..(1350): transl_table=11

SEQ ID NO: 136373 - protein, 449 aa, Oceanobacter sp. RED65; identical to SEQ ID NO: 133978

SEQ ID NO: 136374 - DNA, 1425 bp, Desulfitobacterium hafniense DCB-2; identical to SEQ ID NO: 133979
  CDS (1)..(1425): transl_table=11

SEQ ID NO: 136375 - protein, 474 aa, Desulfitobacterium hafniense DCB-2; identical to SEQ ID NO: 133980

SEQ ID NO: 136376 - DNA, 1374 bp, Alteromonadales bacterium TW-7; identical to SEQ ID NO: 115418
  CDS (1)..(1374): transl_table=11

SEQ ID NO: 136377 - protein, 457 aa, Alteromonadales bacterium TW-7; identical to SEQ ID NO: 115419

SEQ ID NO: 136378 - DNA, 1437 bp, Pseudomonas putida GB-1; identical to SEQ ID NO: 45228
  CDS (1)..(1437): transl_table=11

SEQ ID NO: 136379 - protein, 478 aa, Pseudomonas putida GB-1; identical to SEQ ID NO: 45229

SEQ ID NO: 136380 - DNA, 1395 bp, Pseudomonas putida GB-1; identical to SEQ ID NO: 45230
  CDS (1)..(1395): transl_table=11

SEQ ID NO: 136381 - protein, 464 aa, Pseudomonas putida GB-1; identical to SEQ ID NO: 45231

SEQ ID NO: 136382 - DNA, 1380 bp, Pseudomonas putida GB-1; identical to SEQ ID NO: 45232
  CDS (1)..(1380): transl_table=11

SEQ ID NO: 136383 - protein, 459 aa, Pseudomonas putida GB-1; identical to SEQ ID NO: 45233

SEQ ID NO: 136384 - DNA, 1380 bp, Marinobacter sp. ELB17; identical to SEQ ID NO: 45234
  CDS (1)..(1380): transl_table=11

SEQ ID NO: 136385 - protein, 459 aa, Marinobacter sp. ELB17; identical to SEQ ID NO: 45235

SEQ ID NO: 136386 - DNA, 1350 bp, Moritella sp. PE36; identical to SEQ ID NO: 133999
  CDS (1)..(1350): transl_table=11

SEQ ID NO: 136387 - protein, 449 aa, Moritella sp. PE36; identical to SEQ ID NO: 134000

SEQ ID NO: 136388 - DNA, 1389 bp, Lactobacillus reuteri
  CDS (1)..(1389): transl_table=11
atgtcagaataccgtactgaagaagatacgttaggtcctgttaaaatccctgctgaagcattatggggaccacaaacagaacggagtcggaataacttcccaaccggtcaatacatgccattagcaattatccgtgctttattgaacattaaaaaggcagcggctcaagctaatatggaaactaaagctatctctgaagaaaagggtaatttaatcgttaaggcgattgatgaattactcgcattaagtgatgaagaattgcggaaggacttcccattaaaggtttaccaaactggttctggtacccaaaccaacatgaatactaatgaagttgttgcgcacaaggctcatgaaattaaccctgacattgaaatcttaccaaatgatgatgttaacaagggtcaaagttcaaacgatacattcccaactgctatgaatgtagttgctttagaagcgcttgataagttgaagccagctgttcaacatttaattgatgaattaaaggttaaggaagagaagtacatgaagactgttaaagttggacgtactcacttgcaagatgctgttccattgacatttggtcaagaactttctggttatattgcttccttagaacatgaccttgattacattaagactttggaatcaacattagatgaattggcaattggtggtactgctgttggtactggtttgaatgctgcagaaggaatgcctgaaaagattgctgaaaagcttagcgaagtttacggcttaaacttgactgctgattcaaacaagttctacggtttagctaaccactctggtttagatgttgttcacggtgctttgaagacattagcagctgacatgttcaagcttgctcaagatattcgtttcttagcttctggtccgcgtgctggttacggcgaattaaatatcccagctaacgaaccaggttcatcaatcatgccaggtaaggttaacccaactcaagcagaagctgtaacaatggctgctttacgggtattcggtaacgatactgtagtaacaatggcttcatcacaaggtaacttcgaaatgaatgtttacaagccagtattaatcgatgcattcctcgaatcagctgacttattaactggaacaattactggatttgctgacaagatgatccacggaatgacagttaatgaaaagcggatggaagaattagttgataattcattgatgactgttactgctttgtcaccacacattggttaccatgacagtgctaagattgctcaagctgctgataaagctggtagcacattaaaagaagctgctttgaagtctggtaagcttacggaagaacaatacgatgaatggatggacatgcttaagatgaccaacgttgatcgtgataaataa

SEQ ID NO: 136389 - protein, 462 aa, Lactobacillus reuteri
MSEYRTEEDTLGPVKIPAEALWGPQTERSRNNFPTGQYMPLAIIRALLNIKKAAAQANMETKAISEEKGNLIVKAIDELLALSDEELRKDFPLKVYQTGSGTQTNMNTNEVVAHKAHEINPDIEILPNDDVNKGQSSNDTFPTAMNVVALEALDKLKPAVQHLIDELKVKEEKYMKTVKVGRTHLQDAVPLTFGQELSGYIASLEHDLDYIKTLESTLDELAIGGTAVGTGLNAAEGMPEKIAEKLSEVYGLNLTADSNKFYGLANHSGLDVVHGALKTLAADMFKLAQDIRFLASGPRAGYGELNIPANEPGSSIMPGKVNPTQAEAVTMAALRVFGNDTVVTMASSQGNFEMNVYKPVLIDAFLESADLLTGTITGFADKMIHGMTVNEKRMEELVDNSLMTVTALSPHIGYHDSAKIAQAADKAGSTLKEAALKSGKLTEEQYDEWMDMLKMTNVDRDK

SEQ ID NO: 136390 - DNA, 1386 bp, Streptomyces thermovulgaris; identical to SEQ ID NO: 134003
  CDS (1)..(1386): transl_table=11

SEQ ID NO: 136391 - protein, 461 aa, Streptomyces thermovulgaris; identical to SEQ ID NO: 134004

SEQ ID NO: 136392 - DNA, 1437 bp, Bacillus cereus; identical to SEQ ID NO: 45236
  CDS (1)..(1437): transl_table=11

SEQ ID NO: 136393 - protein, 478 aa, Bacillus cereus; identical to SEQ ID NO: 45237

SEQ ID NO: 136394 - DNA, 1416 bp, Wolinella succinogenes; identical to SEQ ID NO: 45238
  CDS (1)..(1416): transl_table=11

SEQ ID NO: 136395 - protein, 471 aa, Wolinella succinogenes; identical to SEQ ID NO: 45239

SEQ ID NO: 136396 - DNA, 1680 bp, Ostreococcus tauri; identical to SEQ ID NO: 134007
  CDS (1)..(1680)

SEQ ID NO: 136397 - protein, 559 aa, Ostreococcus tauri; identical to SEQ ID NO: 134008

SEQ ID NO: 136398 - DNA, 1575 bp, Ostreococcus tauri; identical to SEQ ID NO: 134009
  CDS (1)..(1575)

SEQ ID NO: 136399 - protein, 524 aa, Ostreococcus tauri; identical to SEQ ID NO: 134010

SEQ ID NO: 136400 - DNA, 1650 bp, Aspergillus oryzae; identical to SEQ ID NO: 45240
  CDS (1)..(1650)

SEQ ID NO: 136401 - protein, 549 aa, Aspergillus oryzae; identical to SEQ ID NO: 45241

SEQ ID NO: 136402 - DNA, 1482 bp, Solanum tuberosum; identical to SEQ ID NO: 134013
  CDS (1)..(1482)

SEQ ID NO: 136403 - protein, 493 aa, Solanum tuberosum; identical to SEQ ID NO: 45243

SEQ ID NO: 136404 - DNA, 1434 bp, Escherichia coli; identical to SEQ ID NO: 45244
  CDS (1)..(1434): transl_table=11

SEQ ID NO: 136405 - protein, 477 aa, Escherichia coli; identical to SEQ ID NO: 45245

SEQ ID NO: 136406 - DNA, 1389 bp, Neisseria subflava; identical to SEQ ID NO: 115434
  CDS (1)..(1389): transl_table=11

SEQ ID NO: 136407 - protein, 462 aa, Neisseria subflava; identical to SEQ ID NO: 115435

SEQ ID NO: 136408 - DNA, 1389 bp, Neisseria gonorrhoeae; identical to SEQ ID NO: 115436
  CDS (1)..(1389): transl_table=11

SEQ ID NO: 136409 - protein, 462 aa, Neisseria gonorrhoeae; identical to SEQ ID NO: 115437

SEQ ID NO: 136410 - DNA, 1389 bp, Neisseria meningitidis; identical to SEQ ID NO: 45246
  CDS (1)..(1389): transl_table=11

SEQ ID NO: 136411 - protein, 462 aa, Neisseria meningitidis; identical to SEQ ID NO: 45247

SEQ ID NO: 136412 - DNA, 1395 bp, Eikenella corrodens; identical to SEQ ID NO: 45248
  CDS (1)..(1395): transl_table=11

SEQ ID NO: 136413 - protein, 464 aa, Eikenella corrodens; identical to SEQ ID NO: 45249

SEQ ID NO: 136414 - DNA, 1488 bp, Drosophila melanogaster; identical to SEQ ID NO: 115440
  CDS (1)..(1488)

SEQ ID NO: 136415 - protein, 495 aa, Drosophila melanogaster; identical to SEQ ID NO: 115441

SEQ ID NO: 136416 - DNA, 1380 bp, Pseudomonas putida; identical to SEQ ID NO: 45250
  CDS (1)..(1380): transl_table=11

SEQ ID NO: 136417 - protein, 459 aa, Pseudomonas putida; identical to SEQ ID NO: 45251

SEQ ID NO: 136418 - DNA, 1428 bp, Bacillus subtilis; identical to SEQ ID NO: 45252
  CDS (1)..(1428): transl_table=11

SEQ ID NO: 136419 - protein, 475 aa, Bacillus subtilis; identical to SEQ ID NO: 45253

SEQ ID NO: 136420 - DNA, 1437 bp, Pseudomonas fluorescens
  CDS (1)..(1437): transl_table=11
atgatctccgtcatgtcctctgctgcatctttccgtaccgaaaaagacctgcttggcgtactcgaagtaccggctcaagcgtattacggcatccagaccctgcgagcggtgaataacttccgcctctcgggcgttccgatttcgcattacccgaaattggtggtcggtctggcaatggtcaagcaagcagcggctgacgccaaccgcgagttgggccagctcagcgaacgcaagcacgctgccatcagcgaagcctgcgctcgtctgatccgcggcgatttccacgaagagttcgtggtggacatgattcaaggcggcgctggcacttcaaccaacatgaatgccaacgaagtcatcgccaacatcgcgctggaggccatgggtcaccagaagggcgaataccagtacctgcaccccaacaacgacgtgaacatggcgcagtcgaccaacgacgcctacccgaccgcgatccgcctgggtctgctgctgggccatgacgcgctgctggccagcctcgacagcctgatccaggcgttcgccgccaaaggcgccgagttcagccatgtgctgaaaatgggccgcacacaattgcaagacgccgtgccgatgaccctcggccaggaattccgcgcgttcgccaccaccctgggtgaagacctggcccgcctgaaaaccctggcgccagagctgctgaccgaagtgaacctgggcggaaccgcgatcggtaccggcatcaacgccgacccgcgctaccaggccctcgccgtacaacgcctggccaccatcagcggtcagccgctggtaccggcggccgacctgatcgaagccacctccgacatgggcgctttcgtactgttctccggcatgctcaagcgtactgccgtgaagctgtccaagatctgcaacgacctgcgcctgctgtccagcggcccacgcaccggcatcaacgagatcaacctgccggctcgccagccaggcagctcgatcatgcccggcaaggtcaacccggtcatcccggaagcggtcaaccaggtagcgttccaagtcatcggtaacgacctggccctgaccatggcagccgaaggcggccaactgcagttgaacgtgatggagccgctgatcgccttcaagatcttcgactcgatccgcctgctgcaacgcgccatggacatgctgcgcgagcactgcatcgtcggcatcaccgccaacgaagcccgctgccgcgaactggtggaacattccatcggcctggtcaccgcgctgaacccatacatcggctatgaaaacgccacccgcattgcgcgtatcgcgcttgaaagcgggcgcggcgtgctggaactggtgcgtgaagaaggcttgctcgacgacgccatgctcgacgacatcctgcgccccgaaaacatgattgccccacgcttggtcccgctgaaggcctaa

SEQ ID NO: 136421 - protein, 478 aa, Pseudomonas fluorescens; identical to SEQ ID NO: 45259

SEQ ID NO: 136422 - DNA, 1437 bp, Serratia marcescens; identical to SEQ ID NO: 115448
  CDS (1)..(1437): transl_table=11

SEQ ID NO: 136423 - protein, 478 aa, Serratia marcescens; identical to SEQ ID NO: 45261

SEQ ID NO: 136424 - DNA, 1479 bp, Arabidopsis thaliana; identical to SEQ ID NO: 45262
  CDS (1)..(1479)

SEQ ID NO: 136425 - protein, 492 aa, Arabidopsis thaliana; identical to SEQ ID NO: 45263

SEQ ID NO: 136426 - DNA, 1467 bp, Bradyrhizobium japonicum; identical to SEQ ID NO: 45266
  CDS (46)..(1467): transl_table=11

SEQ ID NO: 136427 - protein, 473 aa, Bradyrhizobium japonicum; identical to SEQ ID NO: 45267

SEQ ID NO: 136428 - DNA, 1665 bp, Bradyrhizobium japonicum; identical to SEQ ID NO: 45268
  CDS (229)..(1665): transl_table=11

SEQ ID NO: 136429 - protein, 478 aa, Bradyrhizobium japonicum; identical to SEQ ID NO: 45269

SEQ ID NO: 136430 - DNA, 1395 bp, Pseudomonas aeruginosa; identical to SEQ ID NO: 115070
  CDS (1)..(1395): transl_table=11

SEQ ID NO: 136431 - protein, 464 aa, Pseudomonas aeruginosa; identical to SEQ ID NO: 115071

SEQ ID NO: 136432 - DNA, 1494 bp, Agrobacterium tumefaciens; identical to SEQ ID NO: 45048
  CDS (103)..(1494): transl_table=11

SEQ ID NO: 136433 - protein, 463 aa, Agrobacterium tumefaciens; identical to SEQ ID NO: 45271

SEQ ID NO: 136434 - DNA, 1389 bp, Bacillus anthracis; identical to SEQ ID NO: 45272
  CDS (1)..(1389): transl_table=11

SEQ ID NO: 136435 - protein, 462 aa, Bacillus anthracis; identical to SEQ ID NO: 45273

SEQ ID NO: 136436 - DNA, 1389 bp, Bacillus subtilis; identical to SEQ ID NO: 45274
  CDS (1)..(1389): transl_table=11

SEQ ID NO: 136437 - protein, 462 aa, Bacillus subtilis; identical to SEQ ID NO: 45275

SEQ ID NO: 136438 - DNA, 1347 bp, Blochmannia floridanus; identical to SEQ ID NO: 115468
  CDS (1)..(1347): transl_table=11

SEQ ID NO: 136439 - protein, 448 aa, Blochmannia floridanus; identical to SEQ ID NO: 115469

SEQ ID NO: 136440 - DNA, 1392 bp, Bordetella pertussis; identical to SEQ ID NO: 45276
  CDS (1)..(1392): transl_table=11

SEQ ID NO: 136441 - protein, 463 aa, Bordetella pertussis; identical to SEQ ID NO: 45277

SEQ ID NO: 136442 - DNA, 1392 bp, Brucella melitensis; identical to SEQ ID NO: 115472
  CDS (1)..(1392): transl_table=11

SEQ ID NO: 136443 - protein, 463 aa, Brucella melitensis; identical to SEQ ID NO: 115473

SEQ ID NO: 136444 - DNA, 1392 bp, Campylobacter jejuni; identical to SEQ ID NO: 115474
  CDS (1)..(1392): transl_table=11

SEQ ID NO: 136445 - protein, 463 aa, Campylobacter jejuni; identical to SEQ ID NO: 115475

SEQ ID NO: 136446 - DNA, 1392 bp, Caulobacter crescentus; identical to SEQ ID NO: 115476
  CDS (1)..(1392): transl_table=11

SEQ ID NO: 136447 - protein, 463 aa, Caulobacter crescentus; identical to SEQ ID NO: 115477

SEQ ID NO: 136448 - DNA, 1383 bp, Chlamydophila caviae; identical to SEQ ID NO: 115478
  CDS (1)..(1383): transl_table=11

SEQ ID NO: 136449 - protein, 460 aa, Chlamydophila caviae; identical to SEQ ID NO: 115479

SEQ ID NO: 136450 - DNA, 1422 bp, Corynebacterium glutamicum; identical to SEQ ID NO: 45278
  CDS (1)..(1422): transl_table=11

SEQ ID NO: 136451 - protein, 473 aa, Corynebacterium glutamicum; identical to SEQ ID NO: 45279

SEQ ID NO: 136452 - DNA, 1404 bp, Escherichia coli O157; identical to SEQ ID NO: 115496
  CDS (1)..(1404): transl_table=11

SEQ ID NO: 136453 - protein, 467 aa, Escherichia coli O157; identical to SEQ ID NO: 115497

SEQ ID NO: 136454 - DNA, 1404 bp, Escherichia coli; identical to SEQ ID NO: 45280
  CDS (1)..(1404): transl_table=11

SEQ ID NO: 136455 - protein, 467 aa, Escherichia coli; identical to SEQ ID NO: 45281

SEQ ID NO: 136456 - DNA, 1413 bp, Halobacterium salinarium; identical to SEQ ID NO: 45282
  CDS (1)..(1413): transl_table=11

SEQ ID NO: 136457 - protein, 470 aa, Halobacterium salinarium; identical to SEQ ID NO: 45283

SEQ ID NO: 136458 - DNA, 1392 bp, Helicobacter pylori; identical to SEQ ID NO: 115508
  CDS (1)..(1392): transl_table=11

SEQ ID NO: 136459 - protein, 463 aa, Helicobacter pylori; identical to SEQ ID NO: 115509

SEQ ID NO: 136460 - DNA, 1368 bp, Listeria innocua; identical to SEQ ID NO: 115510
  CDS (1)..(1368): transl_table=11

SEQ ID NO: 136461 - protein, 455 aa, Listeria innocua; identical to SEQ ID NO: 115511

SEQ ID NO: 136462 - DNA, 1368 bp, Listeria monocytogenes; identical to SEQ ID NO: 115514
  CDS (1)..(1368): transl_table=11

SEQ ID NO: 136463 - protein, 455 aa, Listeria monocytogenes; identical to SEQ ID NO: 115515

SEQ ID NO: 136464 - DNA, 1419 bp, Methylobacterium extorquens; identical to SEQ ID NO: 45284
  CDS (1)..(1419): transl_table=11

SEQ ID NO: 136465 - protein, 472 aa, Methylobacterium extorquens; identical to SEQ ID NO: 45285

SEQ ID NO: 136466 - DNA, 1401 bp, Myxococcus xanthus; identical to SEQ ID NO: 134091
  CDS (1)..(1401): transl_table=11

SEQ ID NO: 136467 - protein, 466 aa, Myxococcus xanthus; identical to SEQ ID NO: 134092

SEQ ID NO: 136468 - DNA, 1389 bp, Nitrosomonas europaea; identical to SEQ ID NO: 115520
  CDS (1)..(1389): transl_table=11

SEQ ID NO: 136469 - protein, 462 aa, Nitrosomonas europaea; identical to SEQ ID NO: 115521

SEQ ID NO: 136470 - DNA, 1386 bp, Oceanobacillus iheyensis; identical to SEQ ID NO: 115522
  CDS (1)..(1386): transl_table=11

SEQ ID NO: 136471 - protein, 461 aa, Oceanobacillus iheyensis; identical to SEQ ID NO: 115523

SEQ ID NO: 136472 - DNA, 1395 bp, Pasteurella multocida; identical to SEQ ID NO: 115524
  CDS (1)..(1395): transl_table=11

SEQ ID NO: 136473 - protein, 464 aa, Pasteurella multocida; identical to SEQ ID NO: 115525

SEQ ID NO: 136474 - DNA, 1395 bp, Pseudomonas putida; identical to SEQ ID NO: 45286
  CDS (1)..(1395): transl_table=11

SEQ ID NO: 136475 - protein, 464 aa, Pseudomonas putida; identical to SEQ ID NO: 45287

SEQ ID NO: 136476 - DNA, 1386 bp, Ralstonia solanacearum; identical to SEQ ID NO: 115534
  CDS (1)..(1386): transl_table=11

SEQ ID NO: 136477 - protein, 461 aa, Ralstonia solanacearum; identical to SEQ ID NO: 115535

SEQ ID NO: 136478 - DNA, 1398 bp, Rhizobium loti; identical to SEQ ID NO: 115536
  CDS (1)..(1398): transl_table=11

SEQ ID NO: 136479 - protein, 465 aa, Rhizobium loti; identical to SEQ ID NO: 115537

SEQ ID NO: 136480 - DNA, 1494 bp, Rhizobium meliloti; identical to SEQ ID NO: 45288
  CDS (103)..(1494): transl_table=11

SEQ ID NO: 136481 - protein, 463 aa, Rhizobium meliloti; identical to SEQ ID NO: 45289

SEQ ID NO: 136482 - DNA, 1386 bp, Rickettsia felis; identical to SEQ ID NO: 115542
  CDS (1)..(1386): transl_table=11

SEQ ID NO: 136483 - protein, 461 aa, Rickettsia felis; identical to SEQ ID NO: 115543

SEQ ID NO: 136484 - DNA, 1386 bp, Rickettsia prowazekii
  CDS (1)..(1386): transl_table=11
atgaaaaattacagaatcgaaagtgactcttttggagaaattcaaatagaagaaaaattttattggggtgctcaaactcaaagatctttaaacaattttaaaataagcaagcaaaaaatgccaaaaattttaattcgtgctcttgctattttaaaaaaatgtgctgcacaggttaattacgagtttggtgatttagaatataaaatagctacaagtatagataaagcaattgatagaatcctagcaggcgaatttgaagataattttcctttagtagtttggcaaacagggtcaggtacacaaacaaacatgaatatgaacgaggttattgcatctattgctaatgaagaattaactggtaagaaaggtggtaaattcccagtacatcctaacgatcatgttaataaagggcaatcatccaacgactcttttccaacagctatgcatatagcaactgtacttgcaactaaacagcagcttataccagctttgaataatttacttacatatttgcaagacaagtcaaaagattgggataaaatcataaaaataggacgcactcacttgcaggatgcaactcctttaacacttaaacaggaattctcaggatatattacacaaatagagtatgctttagaacgcatagaagatgcactaaaaaaagtttatctacttgctcaaggcggaacagcagtcggtacaggtattaattcaaaaataggctttgatataaaatttgctcaaaaagttgcagagtttactcaacaaccatttaaaactgctcctaataaatttgaaagtttagcagcacatgatgcactagtagaattttctggaactcttaatactatagcagttagcttaatgaaaatagcaaatgatataagattgctcggctccggtccaagatgcggtcttggtgaactgcatttaccagaaaacgaacctggttcttctattatgccaggtaaagtaaaccctacacaagttgaagcattaacaatggtgtgcactcaggtgatgggtaatcatgtgactgtgactattgctggctcaaatgggcatcttgaacttaacgtatttaaaccagtgataatatacaatatcctacaatctatagagctattatctgatagcgtaaatagttttgttacacactgtgttaaaggattagagcccaatatagcacgcattaatactttacgtgataaatctctaatgcttgttacagttcttaatccacatataggctatgataatgctgcaaaaattgctaaagaagcacataagtatgggatcactttaaaagaagcagctaaaaaactcaattttttatcagaagaagaatttgataaaatagtagtacctgaaaaaatgatttcctaa

SEQ ID NO: 136485 - protein, 461 aa, Rickettsia prowazekii
MKNYRIESDSFGEIQIEEKFYWGAQTQRSLNNFKISKQKMPKILIRALAILKKCAAQVNYEFGDLEYKIATSIDKAIDRILAGEFEDNFPLVVWQTGSGTQTNMNMNEVIASIANEELTGKKGGKFPVHPNDHVNKGQSSNDSFPTAMHIATVLATKQQLIPALNNLLTYLQDKSKDWDKIIKIGRTHLQDATPLTLKQEFSGYITQIEYALERIEDALKKVYLLAQGGTAVGTGINSKIGFDIKFAQKVAEFTQQPFKTAPNKFESLAAHDALVEFSGTLNTIAVSLMKIANDIRLLGSGPRCGLGELHLPENEPGSSIMPGKVNPTQVEALTMVCTQVMGNHVTVTIAGSNGHLELNVFKPVIIYNILQSIELLSDSVNSFVTHCVKGLEPNIARINTLRDKSLMLVTVLNPHIGYDNAAKIAKEAHKYGITLKEAAKKLNFLSEEEFDKIVVPEKMIS

SEQ ID NO: 136486 - DNA, 1404 bp, Salmonella typhi; identical to SEQ ID NO: 134113
  CDS (1)..(1404): transl_table=11

SEQ ID NO: 136487 - protein, 467 aa, Salmonella typhi; identical to SEQ ID NO: 134114

SEQ ID NO: 136488 - DNA, 1404 bp, Salmonella typhimurium; identical to SEQ ID NO: 45290
  CDS (1)..(1404): transl_table=11

SEQ ID NO: 136489 - protein, 467 aa, Salmonella typhimurium; identical to SEQ ID NO: 45291

SEQ ID NO: 136490 - DNA, 1404 bp, Shigella flexneri; identical to SEQ ID NO: 115548
  CDS (1)..(1404): transl_table=11

SEQ ID NO: 136491 - protein, 467 aa, Shigella flexneri; identical to SEQ ID NO: 115549

SEQ ID NO: 136492 - DNA, 1386 bp, Staphylococcus aureus; identical to SEQ ID NO: 115552
  CDS (1)..(1386): transl_table=11

SEQ ID NO: 136493 - protein, 461 aa, Staphylococcus aureus; identical to SEQ ID NO: 115553

SEQ ID NO: 136494 - DNA, 1404 bp, Streptomyces avermitilis; identical to SEQ ID NO: 45292
  CDS (1)..(1404): transl_table=11

SEQ ID NO: 136495 - protein, 467 aa, Streptomyces avermitilis; identical to SEQ ID NO: 45293

SEQ ID NO: 136496 - DNA, 1386 bp, Streptomyces coelicolor; identical to SEQ ID NO: 45294
  CDS (1)..(1386): transl_table=11

SEQ ID NO: 136497 - protein, 461 aa, Streptomyces coelicolor; identical to SEQ ID NO: 45295

SEQ ID NO: 136498 - DNA, 1404 bp, Synechococcus elongatus; identical to SEQ ID NO: 134125
  CDS (1)..(1404): transl_table=11

SEQ ID NO: 136499 - protein, 467 aa, Synechococcus elongatus; identical to SEQ ID NO: 134126

SEQ ID NO: 136500 - DNA, 1401 bp, Synechocystis sp
  CDS (1)..(1401): transl_table=11
atggtaaattcccaccgccttgaaaccgacagtatggggtccctggaagtccaagccgatcgcctgtggggagcgcaaacccaacgttccctgatgttttttgacattggtagcgatgtgatgccgccggatttaattcgggcctttgccatactcaaaaaggcagccgccattaccaatcaggatttgggtaaattaccagcggacaaggcagagttaatcattacggcagcggacgaaatcattgccgggcagtggttagaccatttccctctaaggatttggcaaacgggcagtggcactcaaaccaacatgaacgtgaacgaagtgattgccaatcgggcgatcgccatttgtgggggagaattgggcagtaaaaatcccatccatcccaatgaccacgtcaacatgtcccagtcgtctaacgatacttttcctacggcgatgcacattgcggcggtggcaggtttacaaaccaagttgattcccagtttgcaagctctgagagatagcctgaatgaaaaagcggaatgttttgcaggcatcactaaaattggccgcacccatttgatggacgcagtgcccctaacgttagggcaggaattttccggttacgtggcccagttagaccaagggctgacccaaattaattattgtttacccggtcttttggaattggccctggggggaacggcggtgggtacagggttaaatagtcatccccaatttgctaaaaaagtggccgaagaaattgcccagttaactggttataccttcatttctgcccccaacaaattcgccgccctagctggccacgaggcgatcgcctttgccagtggcgtgctgaaaagtattgccgcttccctgatgaaaattgccaatgatttgcgctggatggggtctgggccccgctgcggcttgggggaattagccttaccagccaatgaaccaggttcttcgatcatgcccgggaaagtaaaccccacccaatgcgaagccatgaccatggtttgtgtgcaggtaatggggaacgatgccaccattggttttgcggccagccaaggtaattttgagctcaatgtttttaagccagtgattattcataatttcctccattcgttacatttactcagcgatgcttgtgctagttttcgccaacatttagtggtgggattacaagtaaacgaaagcaaggttaaagactttttggacacctctttaatgttagtcaccgccctcaatccccacattggctacgacaatgcggccctcgtggctaaaactgcctttgcccaaggcattaccctcaaacaagccgcggtggatttaggtttactcaccccagcccagttcgacgcttgggtcgttccagagcagatgattgccccgattgctgactag

SEQ ID NO: 136501 - protein, 466 aa, Synechocystis sp
MVNSHRLETDSMGSLEVQADRLWGAQTQRSLMFFDIGSDVMPPDLIRAFAILKKAAAITNQDLGKLPADKAELIITAADEIIAGQWLDHFPLRIWQTGSGTQTNMNVNEVIANRAIAICGGELGSKNPIHPNDHVNMSQSSNDTFPTAMHIAAVAGLQTKLIPSLQALRDSLNEKAECFAGITKIGRTHLMDAVPLTLGQEFSGYVAQLDQGLTQINYCLPGLLELALGGTAVGTGLNSHPQFAKKVAEEIAQLTGYTFISAPNKFAALAGHEAIAFASGVLKSIAASLMKIANDLRWMGSGPRCGLGELALPANEPGSSIMPGKVNPTQCEAMTMVCVQVMGNDATIGFAASQGNFELNVFKPVIIHNFLHSLHLLSDACASFRQHLVVGLQVNESKVKDFLDTSLMLVTALNPHIGYDNAALVAKTAFAQGITLKQAAVDLGLLTPAQFDAWVVPEQMIAPIAD

SEQ ID NO: 136502 - DNA, 1395 bp, Wigglesworthia glossinidia brevipalpis; identical to SEQ ID NO: 115562
  CDS (1)..(1395): transl_table=11

SEQ ID NO: 136503 - protein, 464 aa, Wigglesworthia glossinidia brevipalpis; identical to SEQ ID NO: 115563

SEQ ID NO: 136504 - DNA, 1398 bp, Yersinia pestis; identical to SEQ ID NO: 115568
  CDS (1)..(1398): transl_table=11

SEQ ID NO: 136505 - protein, 465 aa, Yersinia pestis; identical to SEQ ID NO: 115569

SEQ ID NO: 136506 - DNA, 1485 bp, Rhizopus oryzae; identical to SEQ ID NO: 45296
  CDS (1)..(1485)

SEQ ID NO: 136507 - protein, 494 aa, Rhizopus oryzae [sequence omitted]

SEQ ID NO: 136508 - DNA, 1449 bp, Schizosaccharomyces pombe; identical to SEQ ID NO: 45298
  CDS (1)..(1449)

SEQ ID NO: 136509 - protein, 482 aa, Schizosaccharomyces pombe; identical to SEQ ID NO: 45299

SEQ ID NO: 136510 - DNA, 1467 bp, Saccharomyces cerevisiae; identical to SEQ ID NO: 134141
  CDS (1)..(1467)

SEQ ID NO: 136511 - protein, 488 aa, Saccharomyces cerevisiae; identical to SEQ ID NO: 45301

SEQ ID NO: 136512 - DNA, 1509 bp, Oryza sativa; identical to SEQ ID NO: 134143
  CDS (1)..(1509)

SEQ ID NO: 136513 - protein, 502 aa, Oryza sativa; identical to SEQ ID NO: 134144

SEQ ID NO: 136514 - DNA, 1488 bp, Glycine max; identical to SEQ ID NO: 134147
  CDS (1)..(1488)

SEQ ID NO: 136515 - protein, 495 aa, Glycine max; identical to SEQ ID NO: 45037

SEQ ID NO: 136516 - DNA, 1488 bp, Glycine max; identical to SEQ ID NO: 45302
  CDS (1)..(1488)

SEQ ID NO: 136517 - protein, 495 aa, Glycine max; identical to SEQ ID NO: 45303

SEQ ID NO: 136518 - DNA, 1485 bp, Hordeum vulgare; identical to SEQ ID NO: 45304
  CDS (1)..(1485)

SEQ ID NO: 136519 - protein, 494 aa, Hordeum vulgare; identical to SEQ ID NO: 45305

SEQ ID NO: 136520 - DNA, 1485 bp, Triticum aestivum; identical to SEQ ID NO: 45306
  CDS (1)..(1485)

SEQ ID NO: 136521 - protein, 494 aa, Triticum aestivum; identical to SEQ ID NO: 45307

SEQ ID NO: 136522 - DNA, 1497 bp, Zea mays; identical to SEQ ID NO: 45308
  CDS (1)..(1497)

SEQ ID NO: 136523 - protein, 498 aa, Zea mays; identical to SEQ ID NO: 45309

SEQ ID NO: 136524 - DNA, 21 bp, Artificial sequence
  primer
atggccgctttgacaatgcag

SEQ ID NO: 136525 - DNA, 22 bp, Artificial sequence
  primer
ttaatcagatggaccaatcatc

SEQ ID NO: 136526 - protein, 470 aa, Artificial sequence
  consensus sequence
  Variant (2)..(2): Xaa in position 2 is any amino acid
  Variant (4)..(4): Xaa in position 4 is any amino acid
  Variant (6)..(6): Xaa in position 6 is any amino acid
  Variant (7)..(7): Xaa in position 7 is any or no amino acid
  Variant (9)..(11): Xaa in position 9 to 11 is any amino acid
  Variant (14)..(15): Xaa in position 14 to 15 is any amino acid
  Variant (16)..(18): Xaa in position 16 to 18 is any or no amino acid
  Variant (23)..(23): Xaa in position 23 is any amino acid
  Variant (25)..(27): Xaa in position 25 to 27 is any amino acid
  Variant (30)..(30): Xaa in position 30 is any amino acid
  Variant (32)..(41): Xaa in position 32 to 41 is any amino acid
  Variant (42)..(44): Xaa in position 42 to 44 is any or no amino acid
  Variant (46)..(49): Xaa in position 46 to 49 is any amino acid
  Variant (51)..(52): Xaa in position 51 to 52 is any amino acid
  Variant (55)..(56): Xaa in position 55 to 56 is any amino acid
  Variant (58)..(59): Xaa in position 58 to 59 is any amino acid
  Variant (60)..(60): Xaa in position 60 is any or no amino acid
  Variant (62)..(62): Xaa in position 62 is any amino acid
  Variant (64)..(70): Xaa in position 64 to 70 is any amino acid
  Variant (72)..(72): Xaa in position 72 is any amino acid
  Variant (73)..(73): Xaa in position 73 is any or no amino acid
  Variant (75)..(85): Xaa in position 75 to 85 is any amino acid
  Variant (86)..(89): Xaa in position 86 to 89 is any or no amino acid
  Variant (92)..(95): Xaa in position 92 to 95 is any amino acid
  Variant (102)..(103): Xaa in position 102 to 103 is any amino acid
  Variant (107)..(107): Xaa in position 107 is any amino acid
  Variant (111)..(113): Xaa in position 111 to 113 is any amino acid
  Variant (114)..(114): Xaa in position 114 is any or no amino acid
  Variant (116)..(118): Xaa in position 116 to 118 is any amino acid
  Variant (119)..(119): Xaa in position 119 is any or no amino acid
  Variant (121)..(123): Xaa in position 121 to 123 is any amino acid
  Variant (124)..(129): Xaa in position 124 to 129 is any or no amino acid
  Variant (134)..(134): Xaa in position 134 is any amino acid
  Variant (137)..(138): Xaa in position 137 to 138 is any amino acid
  Variant (141)..(141): Xaa in position 141 is any amino acid
  Variant (144)..(145): Xaa in position 144 to 145 is any amino acid
  Variant (148)..(151): Xaa in position 148 to 151 is any amino acid
  Variant (152)..(160): Xaa in position 152 to 160 is any or no amino acid
  Variant (162)..(162): Xaa in position 162 is any amino acid
  Variant (164)..(167): Xaa in position 164 to 167 is any amino acid
  Variant (169)..(174): Xaa in position 169 to 174 is any amino acid
  Variant (176)..(183): Xaa in position 176 to 183 is any amino acid
  Variant (184)..(185): Xaa in position 184 to 185 is any or no amino acid
  Variant (187)..(187): Xaa in position 187 is any amino acid
  Variant (192)..(193): Xaa in position 192 to 193 is any amino acid
  Variant (196)..(196): Xaa in position 196 is any amino acid
  Variant (198)..(198): Xaa in position 198 is any amino acid
  Variant (204)..(220): Xaa in position 204 to 220 is any amino acid
  Variant (221)..(228): Xaa in position 221 to 228 is any or no amino acid
  Variant (230)..(231): Xaa in position 230 to 231 is any amino acid
  Variant (240)..(240): Xaa in position 240 is any amino acid
  Variant (242)..(263): Xaa in position 242 to 263 is any amino acid
  Variant (264)..(265): Xaa in position 264 to 265 is any or no amino acid
  Variant (267)..(267): Xaa in position 267 is any amino acid
  Variant (269)..(269): Xaa in position 269 is any amino acid
  Variant (271)..(279): Xaa in position 271 to 279 is any amino acid
  Variant (281)..(283): Xaa in position 281 to 283 is any amino acid
  Variant (285)..(285): Xaa in position 285 is any amino acid
  Variant (287)..(289): Xaa in position 287 to 289 is any amino acid
  Variant (291)..(292): Xaa in position 291 to 292 is any amino acid
  Variant (294)..(294): Xaa in position 294 is any amino acid
  Variant (300)..(300): Xaa in position 300 is any amino acid
  Variant (302)..(302): Xaa in position 302 is any amino acid
  Variant (304)..(304): Xaa in position 304 is any amino acid
  Variant (309)..(309): Xaa in position 309 is any amino acid
  Variant (311)..(312): Xaa in position 311 to 312 is any amino acid
  Variant (314)..(316): Xaa in position 314 to 316 is any amino acid
  Variant (318)..(320): Xaa in position 318 to 320 is any amino acid
  Variant (333)..(335): Xaa in position 333 to 335 is any amino acid
  Variant (337)..(343): Xaa in position 337 to 343 is any amino acid
  Variant (346)..(346): Xaa in position 346 is any amino acid
  Variant (349)..(358): Xaa in position 349 to 358 is any amino acid
  Variant (359)..(359): Xaa in position 359 is any or no amino acid
  Variant (361)..(363): Xaa in position 361 to 363 is any amino acid
  Variant (367)..(368): Xaa in position 367 to 368 is any amino acid
  Variant (370)..(375): Xaa in position 370 to 375 is any amino acid
  Variant (377)..(377): Xaa in position 377 is any amino acid
  Variant (379)..(380): Xaa in position 379 to 380 is any amino acid
  Variant (383)..(390): Xaa in position 383 to 390 is any amino acid
  Variant (391)..(395): Xaa in position 391 to 395 is any or no amino acid
  Variant (397)..(410): Xaa in position 397 to 410 is any amino acid
  Variant (412)..(413): Xaa in position 412 to 413 is any amino acid
  Variant (417)..(417): Xaa in position 417 is any amino acid
  Variant (419)..(421): Xaa in position 419 to 421 is any amino acid
  Variant (425)..(426): Xaa in position 425 to 426 is any amino acid
  Variant (428)..(430): Xaa in position 428 to 430 is any amino acid
  Variant (433)..(433): Xaa in position 433 is any amino acid
  Variant (435)..(441): Xaa in position 435 to 441 is any amino acid
  Variant (442)..(466): Xaa in position 442 to 466 is any or no amino acid
  Variant (468)..(469): Xaa in position 468 to 469 is any amino acid
RXEXDXXGXXXVPXXXXXGAQTXRXXXNFXIXXXXXXXXXXXXXAXXXXKXXAAXXNXXXGXLXXXXXXXIXXAXXXXXXXXXXXXXXXFPXXXXQTGSGTXXNMNXNEVXXXXAXXXXGXXXXXXXXXHPNDXVNXXQSXNDXXPTXXXXXXXXXXXXXLXPXXXXLXXXXXXKXXXXXXXXXXKXGRTHXXDAXPXTLGQEXXXXXXXXXXXXXXXXXXXXXXXXXLXXGGTAVGTGXNXXXXXXXXXXXXXXXXXXXXXXXXAXNXFXXXXXXXXXVXXXGXLXXXAXXLXKIANDXRXLXSGPRXGXXEXXXPXXXPGSSIMPGKVNPXXXEXXXXXXXQVXGNXXXXXXXXXXXGXXXLNVXXPXXXXXXLXSXXLLXXXXXXXXXXXXXGXXXXXXXXXXXXXXSXXLVTXLXXXIGYXXAXXXAKXAXXXXXXXXXXXXXXXXXXXXXXXXXXXXXXXXPXXM

SEQ ID NO: 136527 - protein, 58 aa, Artificial sequence
  protein pattern
  Variant (2)..(4): Xaa in position 2 to 4 is any amino acid
  Variant (5)..(5): Xaa in position 5 is any or no amino acid
  Variant (8)..(8): Xaa in position 8 is Ala, Cys or Gly
  Variant (11)..(11): Xaa in position 11 is Ile, Leu, Met or Val
  Variant (13)..(14): Xaa in position 13 to 14 is any amino acid
  Variant (15)..(15): Xaa in position 15 is Ala, Gly, Asn or Ser
  Variant (16)..(16): Xaa in position 16 is Ala, Cys or Ser
  Variant (19)..(19): Xaa in position 19 is any amino acid
  Variant (20)..(20): Xaa in position 20 is Ala, Cys, Asn, Ser or Thr
  Variant (22)..(23): Xaa in position 22 to 23 is any amino acid
  Variant (25)..(25): Xaa in position 25 is Ile, Leu or Val
  Variant (26)..(27): Xaa in position 26 to 27 is any amino acid
  Variant (28)..(28): Xaa in position 28 is Glu, Pro or Gln
  Variant (29)..(30): Xaa in position 29 to 30 is any amino acid
  Variant (31)..(31): Xaa in position 31 is Ala, Glu or Gln
  Variant (32)..(32): Xaa in position 32 is Ala, Asn or Pro
  Variant (39)..(39): Xaa in position 39 is Ala, Gly or Ser
  Variant (41)..(41): Xaa in position 41 is Ile or Val
  Variant (44)..(44): Xaa in position 44 is Thr or Val
  Variant (45)..(46): Xaa in position 45 to 46 is any amino acid
  Variant (48)..(55): Xaa in position 48 to 55 is any amino acid
  Variant (56)..(56): Xaa in position 56 is Ile or Val
  Variant (57)..(57): Xaa in position 57 is any amino acid
  Variant (58)..(58): Xaa in position 58 is Ala, Gly or Ser
AXXXXKIXNDXRXXXXGPXXGXXEXXXXXXXXGSSIMPXKXNPXXXEXXXXXXXXXXX

SEQ ID NO: 136528 - protein, 26 aa, Artificial sequence
  protein pattern
  Variant (3)..(3): Xaa in position 3 is Ile, Leu or Val
  Variant (4)..(5): Xaa in position 4 to 5 is any amino acid
  Variant (6)..(6): Xaa in position 6 is Phe, Trp or Tyr
  Variant (7)..(7): Xaa in position 7 is any amino acid
  Variant (13)..(13): Xaa in position 13 is any amino acid
  Variant (14)..(14): Xaa in position 14 is Ala, Cys, Ser or Thr
  Variant (18)..(18): Xaa in position 18 is any amino acid
  Variant (22)..(22): Xaa in position 22 is any amino acid
  Variant (23)..(25): Xaa in position 23 to 25 is any or no amino acid
FPXXXXXTGSGTXXNMNXNEVXXXXA

SEQ ID NO: 136529 - protein, 25 aa, Artificial sequence
  protein pattern
  Variant (2)..(2): Xaa in position 2 is any amino acid
  Variant (3)..(5): Xaa in position 3 to 5 is any or no amino acid
  Variant (10)..(11): Xaa in position 10 to 11 is any amino acid
  Variant (14)..(14): Xaa in position 14 is any amino acid
  Variant (16)..(16): Xaa in position 16 is Ile, Leu, Met or Val
  Variant (17)..(17): Xaa in position 17 is any amino acid
  Variant (18)..(18): Xaa in position 18 is Phe or Leu
  Variant (19)..(19): Xaa in position 19 is any amino acid
  Variant (22)..(23): Xaa in position 22 to 23 is any amino acid
  Variant (24)..(24): Xaa in position 24 is Ala, Cys, Gly or Thr
  Variant (25)..(25): Xaa in position 25 is Phe, Trp or Tyr
KXXXXGRTHXXDAXPXXXXQEXXXX

SEQ ID NO: 136530 - protein, 18 aa, Artificial sequence
  protein pattern
  Variant (4)..(4): Xaa in position 4 is Asp or His
  Variant (5)..(5): Xaa in position 5 is Cys or Val
  Variant (7)..(7): Xaa in position 7 is any amino acid
  Variant (8)..(8): Xaa in position 8 is Ala, Cys, Gly or Ser
  Variant (11)..(11): Xaa in position 11 is Ser or Thr
  Variant (14)..(14): Xaa in position 14 is Ala, Cys, Ser, Thr or Val
  Variant (15)..(15): Xaa in position 15 is any amino acid
  Variant (17)..(17): Xaa in position 17 is Ala, Ser or Thr
  Variant (18)..(18): Xaa in position 18 is Ala, Cys, Gly, Ser or Val
PNDXXNXXQSXNDXXPXX

SEQ ID NO: 136531 - protein, 22 aa, Artificial sequence
  protein pattern
  Variant (2)..(2): Xaa in position 2 is Ala, Ile or Val
  Variant (4)..(4): Xaa in position 4 is any amino acid
  Variant (6)..(6): Xaa in position 6 is Ala, Asn, Ser, Thr or Val
  Variant (7)..(8): Xaa in position 7 to 8 is any amino acid
  Variant (9)..(9): Xaa in position 9 is Ile, Leu or Val
  Variant (12)..(13): Xaa in position 12 to 13 is any amino acid
  Variant (14)..(14): Xaa in position 14 is any or no amino acid
  Variant (16)..(18): Xaa in position 16 to 18 is any or no amino acid
  Variant (20)..(21): Xaa in position 20 to 21 is any amino acid
  Variant (22)..(22): Xaa in position 22 is Ala, Asn, Gln or Ser
LXTXLXXXXGYXXXAXXXAXXX

SEQ ID NO: 136532 - protein, 14 aa, Artificial sequence
  protein pattern
  Variant (2)..(3): Xaa in position 2 to 3 is any or no amino acid
  Variant (8)..(8): Xaa in position 8 is Ile or Val
  Variant (12)..(12): Xaa in position 12 is Ile or Leu
  Variant (14)..(14): Xaa in position 14 is Ala, Ser, Thr or Val
LXXGGTAXGTGXNX

SEQ ID NO: 136533 - DNA, 1401 bp, Synechocystis sp.
  CDS (1)..(1401): transl_table=11
atggtaaattcccaccgccttgaaaccgacagtatggggtccctggaagtccaagccgatcgcctgtggggagcgcaaacccaacgttccctgatgttttttgacattggtagcgatgtgatgccgccggatttaattcgggcctttgccatactcaaaaaggcagccgccattaccaatcaggatttgggtaaattaccagcggacaaggcagagttaatcattacggcagcggacgaaatcattgccgggcagtggttagaccatttccctctaaggatttggcaaacgggcagtggcactcaaaccaacatgaacgtgaacgaagtgattgccaatcgggcgatcgccatttgtgggggagaattgggcagtaaaaatcccatccatcccaatgaccacgtcaacatgtcccagtcgtctaacgatacttttcctacggcgatgcacattgcggcggtggcaggtttacaaaccaagttgattcccagtttgcaagctctgagagatagcctgaatgaaaaagcggaatgttttgcaggcatcactaaaattggccgcacccatttgatggacgcagtgcccctaacgttagggcaggaattttccggttacgtggcccagttagaccaagggctgacccaaattaattattgtttacccggtcttttggaattggccctggggggaacggcggtgggtacagggttaaatagtcatccccaatttgctaaaaaagtggccgaagaaattgcccagttaactggttataccttcatttctgcccccaacaaattcgccgccctagctggccacgaggcgatcgcctttgccagtggcgtgctgaaaagtattgccgcttccctgatgaaaattgccaatgatttgcgctggatggggtctgggccccgctgcggcttgggggaattagccttaccagccaatgaaccaggttcttcgatcatgcccgggaaagtaaaccccacccaatgcgaagccatgaccatggtttgtgtgcaggtaatggggaacgatgccaccattggttttgcggccagccaaggtaattttgagctcaatgtttttaagccagtgattattcataatttcctccattcgttacatttactcagcgatgcttgtgctagttttcgccaacatttagtggtgggattacaagtaaacgaaagcaaggttaaagactttttggacacctctttaatgttagtcaccgccctcaatccccacattggctacgacaatgcggccctcgtggctaaaactgcctttgcccaaggcattaccctcaaacaagccgcggtggatttaggtttactcaccccagcccagttcgacgcttgggtcgttccagagcagatgattgccccgattgctgactaa

SEQ ID NO: 136534 - protein, 466 aa, Synechocystis sp.; identical to SEQ ID NO: 136501

SEQ ID NO: 136535 - DNA, 1764 bp, Glycine max; identical to SEQ ID NO: 45030
  CDS (34)..(1521)

SEQ ID NO: 136536 - protein, 495 aa, Glycine max; identical to SEQ ID NO: 45031

SEQ ID NO: 136537 - DNA, 2014 bp, Zea mays; identical to SEQ ID NO: 45032
  CDS (30)..(1526)

SEQ ID NO: 136538 - protein, 498 aa, Zea mays; identical to SEQ ID NO: 45033

SEQ ID NO: 136539 - DNA, 1726 bp, Brassica napus; identical to SEQ ID NO: 45034
  CDS (76)..(1554)

SEQ ID NO: 136540 - protein, 492 aa, Brassica napus; identical to SEQ ID NO: 45035

SEQ ID NO: 136541 - DNA, 1860 bp, Glycine max; identical to SEQ ID NO: 45036
  CDS (135)..(1622)

SEQ ID NO: 136542 - protein, 495 aa, Glycine max; identical to SEQ ID NO: 45037

SEQ ID NO: 136543 - DNA, 1410 bp, Oryza sativa (japonica cultivar-group); identical to SEQ ID NO: 45040
  CDS (1)..(1410)

SEQ ID NO: 136544 - protein, 469 aa, Oryza sativa (japonica cultivar-group); identical to SEQ ID NO: 45041

SEQ ID NO: 136545 - DNA, 1389 bp, Neisseria meningitidis MC58; identical to SEQ ID NO: 115090
  CDS (1)..(1389): transl_table=11

SEQ ID NO: 136546 - protein, 462 aa, Neisseria meningitidis MC58; identical to SEQ ID NO: 115091

SEQ ID NO: 136547 - DNA, 1398 bp, Clostridium acetobutylicum ATCC 824; identical to SEQ ID NO: 133733
  CDS (1)..(1398): transl_table=11

SEQ ID NO: 136548 - protein, 465 aa, Clostridium acetobutylicum ATCC 824; identical to SEQ ID NO: 133734

SEQ ID NO: 136549 - DNA, 1446 bp, Agrobacterium tumefaciens str. C58; identical to SEQ ID NO: 45050
  CDS (1)..(1446): transl_table=11

SEQ ID NO: 136550 - protein, 481 aa, Agrobacterium tumefaciens str. C58; identical to SEQ ID NO: 45051

SEQ ID NO: 136551 - DNA, 1374 bp, Thermoplasma acidophilum DSM 1728; identical to SEQ ID NO: 45052
  CDS (1)..(1374): transl_table=11

SEQ ID NO: 136552 - protein, 457 aa, Thermoplasma acidophilum DSM 1728; identical to SEQ ID NO: 45053

SEQ ID NO: 136553 - DNA, 1416 bp, Nostoc sp. PCC 7120; identical to SEQ ID NO: 115100
  CDS (1)..(1416): transl_table=11

SEQ ID NO: 136554 - protein, 471 aa, Nostoc sp. PCC 7120; identical to SEQ ID NO: 115101

SEQ ID NO: 136555 - DNA, 1494 bp, Agrobacterium tumefaciens str. C58; identical to SEQ ID NO: 45048
  CDS (1)..(1494): transl_table=11

SEQ ID NO: 136556 - protein, 497 aa, Agrobacterium tumefaciens str. C58; identical to SEQ ID NO: 45049

SEQ ID NO: 136557 - DNA, 1488 bp, Drosophila melanogaster; identical to SEQ ID NO: 45056
  CDS (1)..(1488)

SEQ ID NO: 136558 - protein, 495 aa, Drosophila melanogaster; identical to SEQ ID NO: 45057

SEQ ID NO: 136559 - DNA, 1497 bp, Methanosarcina acetivorans C2A; identical to SEQ ID NO: 115108
  CDS (1)..(1497): transl_table=11

SEQ ID NO: 136560 - protein, 498 aa, Methanosarcina acetivorans C2A; identical to SEQ ID NO: 115109

SEQ ID NO: 136561 - DNA, 1386 bp, Thermoanaerobacter tengcongensis MB4; identical to SEQ ID NO: 45060
  CDS (1)..(1386): transl_table=11

SEQ ID NO: 136562 - protein, 461 aa, Thermoanaerobacter tengcongensis MB4; identical to SEQ ID NO: 45061

SEQ ID NO: 136563 - DNA, 1404 bp, Xanthomonas axonopodis pv. citri str. 306; identical to SEQ ID NO: 115112
  CDS (1)..(1404): transl_table=11

SEQ ID NO: 136564 - protein, 467 aa, Xanthomonas axonopodis pv. citri str. 306; identical to SEQ ID NO: 115113

SEQ ID NO: 136565 - DNA, 1413 bp, Drosophila melanogaster; identical to SEQ ID NO: 45062
  CDS (1)..(1413)

SEQ ID NO: 136566 - protein, 470 aa, Drosophila melanogaster; identical to SEQ ID NO: 45063

SEQ ID NO: 136567 - DNA, 1455 bp, Drosophila melanogaster; identical to SEQ ID NO: 45068
  CDS (1)..(1455)

SEQ ID NO: 136568 - protein, 484 aa, Drosophila melanogaster; identical to SEQ ID NO: 45069

SEQ ID NO: 136569 - DNA, 1404 bp, Drosophila melanogaster; identical to SEQ ID NO: 45070
  CDS (1)..(1404)

SEQ ID NO: 136570 - protein, 467 aa, Drosophila melanogaster; identical to SEQ ID NO: 45071

SEQ ID NO: 136571 - DNA, 1512 bp, Drosophila melanogaster; identical to SEQ ID NO: 45072
  CDS (1)..(1512)

SEQ ID NO: 136572 - protein, 503 aa, Drosophila melanogaster; identical to SEQ ID NO: 45073

SEQ ID NO: 136573 - DNA, 1455 bp, Corynebacterium efficiens YS-314; identical to SEQ ID NO: 115122
  CDS (1)..(1455): transl_table=11

SEQ ID NO: 136574 - protein, 484 aa, Corynebacterium efficiens YS-314; identical to SEQ ID NO: 115123

SEQ ID NO: 136575 - DNA, 1386 bp, Vibrio parahaemolyticus RIMD 2210633; identical to SEQ ID NO: 115136
  CDS (1)..(1386): transl_table=11

SEQ ID NO: 136576 - protein, 461 aa, Vibrio parahaemolyticus RIMD 2210633; identical to SEQ ID NO: 115137

SEQ ID NO: 136577 - DNA, 1359 bp, Coxiella burnetii RSA 493; identical to SEQ ID NO: 136186
  CDS (1)..(1359): transl_table=11

SEQ ID NO: 136578 - protein, 452 aa, Coxiella burnetii RSA 493; identical to SEQ ID NO: 136187

SEQ ID NO: 136579 - DNA, 1533 bp, Arabidopsis thaliana; identical to SEQ ID NO: 45096
  CDS (1)..(1533)

SEQ ID NO: 136580 - protein, 510 aa, Arabidopsis thaliana; identical to SEQ ID NO: 45097

SEQ ID NO: 136581 - DNA, 1632 bp, Rhodopirellula baltica SH 1; identical to SEQ ID NO: 133779
  CDS (1)..(1632): transl_table=11

SEQ ID NO: 136582 - protein, 543 aa, Rhodopirellula baltica SH 1; identical to SEQ ID NO: 133780

SEQ ID NO: 136583 - DNA, 1410 bp, Gloeobacter violaceus PCC 7421; identical to SEQ ID NO: 45106
  CDS (1)..(1410): transl_table=11

SEQ ID NO: 136584 - protein, 469 aa, Gloeobacter violaceus PCC 7421; identical to SEQ ID NO: 45107

SEQ ID NO: 136585 - DNA, 1434 bp, Rhodopseudomonas palustris CGA009; identical to SEQ ID NO: 115146
  CDS (1)..(1434): transl_table=11

SEQ ID NO: 136586 - protein, 477 aa, Rhodopseudomonas palustris CGA009; identical to SEQ ID NO: 115147

SEQ ID NO: 136587 - DNA, 1407 bp, Lactobacillus johnsonii NCC 533; identical to SEQ ID NO: 115150
  CDS (1)..(1407): transl_table=11

SEQ ID NO: 136588 - protein, 468 aa, Lactobacillus johnsonii NCC 533; identical to SEQ ID NO: 115151

SEQ ID NO: 136589 - DNA, 1395 bp, Wolbachia endosymbiont of Drosophila melanogaster; identical to SEQ ID NO: 45116
  CDS (1)..(1395): transl_table=11

SEQ ID NO: 136590 - protein, 464 aa, Wolbachia endosymbiont of Drosophila melanogaster; identical to SEQ ID NO: 45117

SEQ ID NO: 136591 - DNA, 1401 bp, Bdellovibrio bacteriovorus HD100; identical to SEQ ID NO: 115154
  CDS (1)..(1401): transl_table=11

SEQ ID NO: 136592 - protein, 466 aa, Bdellovibrio bacteriovorus HD100; identical to SEQ ID NO: 115155

SEQ ID NO: 136593 - DNA, 1389 bp, Bacillus cereus ATCC 10987; identical to SEQ ID NO: 115074
  CDS (1)..(1389): transl_table=11

SEQ ID NO: 136594 - protein, 462 aa, Bacillus cereus ATCC 10987; identical to SEQ ID NO: 115075

SEQ ID NO: 136595 - DNA, 1341 bp, Apis mellifera; identical to SEQ ID NO: 133797
  CDS (1)..(1341)

SEQ ID NO: 136596 - protein, 446 aa, Apis mellifera; identical to SEQ ID NO: 133798

SEQ ID NO: 136597 - DNA, 1422 bp, Nasonia vitripennis; identical to SEQ ID NO: 45124
  CDS (1)..(1422)

SEQ ID NO: 136598 - protein, 473 aa, Nasonia vitripennis; identical to SEQ ID NO: 45125

SEQ ID NO: 136599 - DNA, 1590 bp, Gibberella zeae PH-1; identical to SEQ ID NO: 45128
  CDS (1)..(1590)

SEQ ID NO: 136600 - protein, 529 aa, Gibberella zeae PH-1; identical to SEQ ID NO: 45129

SEQ ID NO: 136601 - DNA, 1452 bp, Candida glabrata CBS 138; identical to SEQ ID NO: 45130
  CDS (1)..(1452)

SEQ ID NO: 136602 - protein, 483 aa, Candida glabrata CBS 138; identical to SEQ ID NO: 45131

SEQ ID NO: 136603 - DNA, 1479 bp, Kluyveromyces lactis NRRL Y-1140; identical to SEQ ID NO: 45132
  CDS (1)..(1479)

SEQ ID NO: 136604 - protein, 492 aa, Kluyveromyces lactis NRRL Y-1140; identical to SEQ ID NO: 45133

SEQ ID NO: 136605 - DNA, 1479 bp, Debaryomyces hansenii CBS767; identical to SEQ ID NO: 45134
  CDS (1)..(1479)

SEQ ID NO: 136606 - protein, 492 aa, Debaryomyces hansenii CBS767; identical to SEQ ID NO: 45135

SEQ ID NO: 136607 - DNA, 1404 bp, Debaryomyces hansenii CBS767; identical to SEQ ID NO: 45136
  CDS (1)..(1404)

SEQ ID NO: 136608 - protein, 467 aa, Debaryomyces hansenii CBS767; identical to SEQ ID NO: 45137

SEQ ID NO: 136609 - DNA, 1470 bp, Yarrowia lipolytica CLIB122; identical to SEQ ID NO: 45138
  CDS (1)..(1470)

SEQ ID NO: 136610 - protein, 489 aa, Yarrowia lipolytica CLIB122; identical to SEQ ID NO: 45139

SEQ ID NO: 136611 - DNA, 1635 bp, Aspergillus nidulans FGSC A4; identical to SEQ ID NO: 45140
  CDS (1)..(1635)

SEQ ID NO: 136612 - protein, 544 aa, Aspergillus nidulans FGSC A4; identical to SEQ ID NO: 45141

SEQ ID NO: 136613 - DNA, 1389 bp, Candida albicans SC5314; identical to SEQ ID NO: 45142
  CDS (1)..(1389): transl_table=12

SEQ ID NO: 136614 - protein, 462 aa, Candida albicans SC5314; identical to SEQ ID NO: 45143

SEQ ID NO: 136615 - DNA, 1419 bp, Ustilago maydis 521; identical to SEQ ID NO: 45144
  CDS (1)..(1419)

SEQ ID NO: 136616 - protein, 472 aa, Ustilago maydis 521; identical to SEQ ID NO: 45145

SEQ ID NO: 136617 - DNA, 1494 bp, Tribolium castaneum; identical to SEQ ID NO: 45148
  CDS (1)..(1494)

SEQ ID NO: 136618 - protein, 497 aa, Tribolium castaneum; identical to SEQ ID NO: 45149

SEQ ID NO: 136619 - DNA, 1395 bp, Prochlorococcus marinus str. NATL1A; identical to SEQ ID NO: 115184
  CDS (1)..(1395): transl_table=11

SEQ ID NO: 136620 - protein, 464 aa, Prochlorococcus marinus str. NATL1A; identical to SEQ ID NO: 115185

SEQ ID NO: 136621 - DNA, 1392 bp, Candidatus Protochlamydia amoebophila UWE25; identical to SEQ ID NO: 45154
  CDS (1)..(1392): transl_table=11

SEQ ID NO: 136622 - protein, 463 aa, Candidatus Protochlamydia amoebophila UWE25; identical to SEQ ID NO: 45155

SEQ ID NO: 136623 - DNA, 1389 bp, Bartonella quintana str. Toulouse; identical to SEQ ID NO: 115202
  CDS (1)..(1389): transl_table=11

SEQ ID NO: 136624 - protein, 462 aa, Bartonella quintana str. Toulouse; identical to SEQ ID NO: 115203

SEQ ID NO: 136625 - DNA, 1389 bp, Bacillus thuringiensis serovar konkukian str. 97-27; identical to SEQ ID NO: 115072
  CDS (1)..(1389): transl_table=11

SEQ ID NO: 136626 - protein, 462 aa, Bacillus thuringiensis serovar konkukian str. 97-27; identical to SEQ ID NO: 115073

SEQ ID NO: 136627 - DNA, 1395 bp, Acinetobacter sp. ADP1; identical to SEQ ID NO: 115206
  CDS (1)..(1395): transl_table=11

SEQ ID NO: 136628 - protein, 464 aa, Acinetobacter sp. ADP1; identical to SEQ ID NO: 115207

SEQ ID NO: 136629 - DNA, 1398 bp, Erwinia carotovora subsp. atroseptica SCRI1043; identical to SEQ ID NO: 115208
  CDS (1)..(1398): transl_table=11

SEQ ID NO: 136630 - protein, 465 aa, Erwinia carotovora subsp. atroseptica SCRI1043; identical to SEQ ID NO: 115209

SEQ ID NO: 136631 - DNA, 1407 bp, Propionibacterium acnes KPA171202; identical to SEQ ID NO: 115210
  CDS (1)..(1407): transl_table=11

SEQ ID NO: 136632 - protein, 468 aa, Propionibacterium acnes KPA171202; identical to SEQ ID NO: 115211

SEQ ID NO: 136633 - DNA, 1407 bp, Leifsonia xyli subsp. xyli str. CTCB07; identical to SEQ ID NO: 115212
  CDS (1)..(1407): transl_table=11

SEQ ID NO: 136634 - protein, 468 aa, Leifsonia xyli subsp. xyli str. CTCB07; identical to SEQ ID NO: 115213

SEQ ID NO: 136635 - DNA, 1395 bp, Desulfotalea psychrophila LSv54; identical to SEQ ID NO: 115214
  CDS (1)..(1395): transl_table=11

SEQ ID NO: 136636 - protein, 464 aa, Desulfotalea psychrophila LSv54; identical to SEQ ID NO: 115215

SEQ ID NO: 136637 - DNA, 1389 bp, Bacillus licheniformis ATCC 14580; identical to SEQ ID NO: 115222
  CDS (1)..(1389): transl_table=11

SEQ ID NO: 136638 - protein, 462 aa, Bacillus licheniformis ATCC 14580; identical to SEQ ID NO: 115223

SEQ ID NO: 136639 - DNA, 1389 bp, Bacillus cereus E33L; identical to SEQ ID NO: 115218
  CDS (1)..(1389): transl_table=11

SEQ ID NO: 136640 - protein, 462 aa, Bacillus cereus E33L; identical to SEQ ID NO: 115219

SEQ ID NO: 136641 - DNA, 1398 bp, Mannheimia succiniciproducens MBEL55E; identical to SEQ ID NO: 115220
  CDS (1)..(1398): transl_table=11

SEQ ID NO: 136642 - protein, 465 aa, Mannheimia succiniciproducens MBEL55E; identical to SEQ ID NO: 115221

SEQ ID NO: 136643 - DNA, 1395 bp, Legionella pneumophila subsp. pneumophila str. Philadelphia 1; identical to SEQ ID NO: 115226
  CDS (1)..(1395): transl_table=11

SEQ ID NO: 136644 - protein, 464 aa, Legionella pneumophila subsp. pneumophila str. Philadelphia 1; identical to SEQ ID NO: 115227

SEQ ID NO: 136645 - DNA, 1395 bp, Burkholderia mallei ATCC 23344; identical to SEQ ID NO: 133857
  CDS (1)..(1395): transl_table=11

SEQ ID NO: 136646 - protein, 464 aa, Burkholderia mallei ATCC 23344; identical to SEQ ID NO: 133858

SEQ ID NO: 136647 - DNA, 1395 bp, Burkholderia pseudomallei K96243; identical to SEQ ID NO: 115228
  CDS (1)..(1395): transl_table=11

SEQ ID NO: 136648 - protein, 464 aa, Burkholderia pseudomallei K96243; identical to SEQ ID NO: 115229

SEQ ID NO: 136649 - DNA, 1410 bp, Methylococcus capsulatus str. Bath; identical to SEQ ID NO: 115230
  CDS (1)..(1410): transl_table=11

SEQ ID NO: 136650 - protein, 469 aa, Methylococcus capsulatus str. Bath; identical to SEQ ID NO: 115231

SEQ ID NO: 136651 - DNA, 1392 bp, Campylobacter jejuni RM1221; identical to SEQ ID NO: 115240
  CDS (1)..(1392): transl_table=11

SEQ ID NO: 136652 - protein, 463 aa, Campylobacter jejuni RM1221; identical to SEQ ID NO: 115241

SEQ ID NO: 136653 - DNA, 1404 bp, Psychrobacter arcticus 273-4; identical to SEQ ID NO: 115256
  CDS (1)..(1404): transl_table=11

SEQ ID NO: 136654 - protein, 467 aa, Psychrobacter arcticus 273-4; identical to SEQ ID NO: 115257

SEQ ID NO: 136655 - DNA, 1458 bp, Colwellia psychrerythraea 34H; identical to SEQ ID NO: 45184
  CDS (1)..(1458): transl_table=11

SEQ ID NO: 136656 - protein, 485 aa, Colwellia psychrerythraea 34H; identical to SEQ ID NO: 45185

SEQ ID NO: 136657 - DNA, 1392 bp, Thermobifida fusca YX; identical to SEQ ID NO: 115266
  CDS (1)..(1392): transl_table=11

SEQ ID NO: 136658 - protein, 463 aa, Thermobifida fusca YX; identical to SEQ ID NO: 115267

SEQ ID NO: 136659 - DNA, 1386 bp, Ehrlichia canis str. Jake; identical to SEQ ID NO: 115272
  CDS (1)..(1386): transl_table=11

SEQ ID NO: 136660 - protein, 461 aa, Ehrlichia canis str. Jake; identical to SEQ ID NO: 115273

SEQ ID NO: 136661 - DNA, 1401 bp, Thiobacillus denitrificans ATCC 25259; identical to SEQ ID NO: 45190
  CDS (1)..(1401): transl_table=11

SEQ ID NO: 136662 - protein, 466 aa, Thiobacillus denitrificans ATCC 25259; identical to SEQ ID NO: 45191

SEQ ID NO: 136663 - DNA, 1416 bp, Anabaena variabilis ATCC 29413; identical to SEQ ID NO: 45192
  CDS (1)..(1416): transl_table=11

SEQ ID NO: 136664 - protein, 471 aa, Anabaena variabilis ATCC 29413; identical to SEQ ID NO: 45193

SEQ ID NO: 136665 - DNA, 1395 bp, Rhodobacter sphaeroides 2.4.1; identical to SEQ ID NO: 115280
  CDS (1)..(1395): transl_table=11

SEQ ID NO: 136666 - protein, 464 aa, Rhodobacter sphaeroides 2.4.1; identical to SEQ ID NO: 115281

SEQ ID NO: 136667 - DNA, 1395 bp, Burkholderia sp. 383; identical to SEQ ID NO: 115282
  CDS (1)..(1395): transl_table=11

SEQ ID NO: 136668 - protein, 464 aa, Burkholderia sp. 383; identical to SEQ ID NO: 115283

SEQ ID NO: 136669 - DNA, 1479 bp, Desulfovibrio desulfuricans G20; identical to SEQ ID NO: 115288
  CDS (1)..(1479): transl_table=11

SEQ ID NO: 136670 - protein, 492 aa, Desulfovibrio desulfuricans G20; identical to SEQ ID NO: 115289

SEQ ID NO: 136671 - DNA, 1464 bp, Rhodospirillum rubrum ATCC 11170; identical to SEQ ID NO: 115294
  CDS (1)..(1464): transl_table=11

SEQ ID NO: 136672 - protein, 487 aa, Rhodospirillum rubrum ATCC 11170; identical to SEQ ID NO: 115295

SEQ ID NO: 136673 - DNA, 1431 bp, Moorella thermoacetica ATCC 39073; identical to SEQ ID NO: 45196
  CDS (1)..(1431): transl_table=11

SEQ ID NO: 136674 - protein, 476 aa, Moorella thermoacetica ATCC 39073; identical to SEQ ID NO: 45197

SEQ ID NO: 136675 - DNA, 1863 bp, Burkholderia thailandensis E264; identical to SEQ ID NO: 115298
  CDS (1)..(1863): transl_table=11

SEQ ID NO: 136676 - protein, 620 aa, Burkholderia thailandensis E264; identical to SEQ ID NO: 115299

SEQ ID NO: 136677 - DNA, 1392 bp, Frankia sp. CcI3; identical to SEQ ID NO: 115300
  CDS (1)..(1392): transl_table=11

SEQ ID NO: 136678 - protein, 463 aa, Frankia sp. CcI3; identical to SEQ ID NO: 115301

SEQ ID NO: 136679 - DNA, 1389 bp, Anaplasma phagocytophilum HZ; identical to SEQ ID NO: 115304
  CDS (1)..(1389): transl_table=11

SEQ ID NO: 136680 - protein, 462 aa, Anaplasma phagocytophilum HZ; identical to SEQ ID NO: 115305

SEQ ID NO: 136681 - DNA, 1383 bp, Saccharophagus degradans 2-40; identical to SEQ ID NO: 115314
  CDS (1)..(1383): transl_table=11

SEQ ID NO: 136682 - protein, 460 aa, Saccharophagus degradans 2-40; identical to SEQ ID NO: 115315

SEQ ID NO: 136683 - DNA, 1401 bp, Burkholderia xenovorans LB400; identical to SEQ ID NO: 115316
  CDS (1)..(1401): transl_table=11

SEQ ID NO: 136684 - protein, 466 aa, Burkholderia xenovorans LB400; identical to SEQ ID NO: 115317

SEQ ID NO: 136685 - DNA, 1398 bp, Silicibacter sp. TM1040; identical to SEQ ID NO: 115318
  CDS (1)..(1398): transl_table=11

SEQ ID NO: 136686 - protein, 465 aa, Silicibacter sp. TM1040; identical to SEQ ID NO: 115319

SEQ ID NO: 136687 - DNA, 1392 bp, Rubrobacter xylanophilus DSM 9941; identical to SEQ ID NO: 115320
  CDS (1)..(1392): transl_table=11

SEQ ID NO: 136688 - protein, 463 aa, Rubrobacter xylanophilus DSM 9941; identical to SEQ ID NO: 115321

SEQ ID NO: 136689 - DNA, 1389 bp, Cytophaga hutchinsonii ATCC 33406; identical to SEQ ID NO: 45202
  CDS (1)..(1389): transl_table=11

SEQ ID NO: 136690 - protein, 462 aa, Cytophaga hutchinsonii ATCC 33406; identical to SEQ ID NO: 45203

SEQ ID NO: 136691 - DNA, 1404 bp, Rhodococcus sp. RHA1; identical to SEQ ID NO: 115328
  CDS (1)..(1404): transl_table=11

SEQ ID NO: 136692 - protein, 467 aa, Rhodococcus sp. RHA1; identical to SEQ ID NO: 115329

SEQ ID NO: 136693 - DNA, 1395 bp, Haemophilus somnus 129PT; identical to SEQ ID NO: 133923
  CDS (1)..(1395): transl_table=11

SEQ ID NO: 136694 - protein, 464 aa, Haemophilus somnus 129PT; identical to SEQ ID NO: 133924

SEQ ID NO: 136695 - DNA, 1410 bp, Trichodesmium erythraeum IMS101; identical to SEQ ID NO: 115330
  CDS (1)..(1410): transl_table=11

SEQ ID NO: 136696 - protein, 469 aa, Trichodesmium erythraeum IMS101; identical to SEQ ID NO: 115331

SEQ ID NO: 136697 - DNA, 1389 bp, Alkalilimnicola ehrlichei MLHE-1; identical to SEQ ID NO: 115334
  CDS (1)..(1389): transl_table=11

SEQ ID NO: 136698 - protein, 462 aa, Alkalilimnicola ehrlichei MLHE-1; identical to SEQ ID NO: 115335

SEQ ID NO: 136699 - DNA, 1401 bp, Hyphomonas neptunium ATCC 15444; identical to SEQ ID NO: 45206
  CDS (1)..(1401): transl_table=11

SEQ ID NO: 136700 - protein, 466 aa, Hyphomonas neptunium ATCC 15444; identical to SEQ ID NO: 45207

SEQ ID NO: 136701 - DNA, 1392 bp, Rhizobium leguminosarum bv. viciae 3841; identical to SEQ ID NO: 115338
  CDS (1)..(1392): transl_table=11

SEQ ID NO: 136702 - protein, 463 aa, Rhizobium leguminosarum bv. viciae 3841; identical to SEQ ID NO: 115339

SEQ ID NO: 136703 - DNA, 1395 bp, Pseudomonas aeruginosa UCBPP-PA14; identical to SEQ ID NO: 115340
  CDS (1)..(1395): transl_table=11

SEQ ID NO: 136704 - protein, 464 aa, Pseudomonas aeruginosa UCBPP-PA14; identical to SEQ ID NO: 115341

SEQ ID NO: 136705 - DNA, 1383 bp, Pediococcus pentosaceus ATCC 25745; identical to SEQ ID NO: 115344
  CDS (1)..(1383): transl_table=11

SEQ ID NO: 136706 - protein, 460 aa, Pediococcus pentosaceus ATCC 25745; identical to SEQ ID NO: 115345

SEQ ID NO: 136707 - DNA, 1377 bp, Oenococcus oeni PSU-1; identical to SEQ ID NO: 115346
  CDS (1)..(1377): transl_table=11

SEQ ID NO: 136708 - protein, 458 aa, Oenococcus oeni PSU-1; identical to SEQ ID NO: 115347

SEQ ID NO: 136709 - DNA, 1431 bp, Leuconostoc mesenteroides subsp. mesenteroides ATCC 8293; identical to SEQ ID NO: 45208
  CDS (1)..(1431): transl_table=11

SEQ ID NO: 136710 - protein, 476 aa, Leuconostoc mesenteroides subsp. mesenteroides ATCC 8293; identical to SEQ ID NO: 45209

SEQ ID NO: 136711 - DNA, 1386 bp, Solibacter usitatus Ellin6076; identical to SEQ ID NO: 115348
  CDS (1)..(1386): transl_table=11

SEQ ID NO: 136712 - protein, 461 aa, Solibacter usitatus Ellin6076; identical to SEQ ID NO: 115349

SEQ ID NO: 136713 - DNA, 1389 bp, Neisseria meningitidis FAM18; identical to SEQ ID NO: 115358
  CDS (1)..(1389): transl_table=11

SEQ ID NO: 136714 - protein, 462 aa, Neisseria meningitidis FAM18; identical to SEQ ID NO: 115359

SEQ ID NO: 136715 - DNA, 1434 bp, Bifidobacterium longum DJO10A; identical to SEQ ID NO: 45214
  CDS (1)..(1434): transl_table=11

SEQ ID NO: 136716 - protein, 477 aa, Bifidobacterium longum DJO10A; identical to SEQ ID NO: 45215

SEQ ID NO: 136717 - DNA, 1395 bp, Burkholderia vietnamiensis G4; identical to SEQ ID NO: 115194
  CDS (1)..(1395): transl_table=11

SEQ ID NO: 136718 - protein, 464 aa, Burkholderia vietnamiensis G4; identical to SEQ ID NO: 115195

SEQ ID NO: 136719 - DNA, 1374 bp, Crocosphaera watsonii WH 8501; identical to SEQ ID NO: 115376
  CDS (1)..(1374): transl_table=11

SEQ ID NO: 136720 - protein, 457 aa, Crocosphaera watsonii WH 8501; identical to SEQ ID NO: 115377

SEQ ID NO: 136721 - DNA, 1395 bp, Exiguobacterium sibiricum 255-15; identical to SEQ ID NO: 115378
  CDS (1)..(1395): transl_table=11

SEQ ID NO: 136722 - protein, 464 aa, Exiguobacterium sibiricum 255-15; identical to SEQ ID NO: 115379

SEQ ID NO: 136723 - DNA, 1398 bp, Prosthecochloris aestuarii DSM 271; identical to SEQ ID NO: 115380
  CDS (1)..(1398): transl_table=11

SEQ ID NO: 136724 - protein, 465 aa, Prosthecochloris aestuarii DSM 271; identical to SEQ ID NO: 115381

SEQ ID NO: 136725 - DNA, 1416 bp, Kineococcus radiotolerans SRS30216; identical to SEQ ID NO: 115382
  CDS (1)..(1416): transl_table=11

SEQ ID NO: 136726 - protein, 471 aa, Kineococcus radiotolerans SRS30216; identical to SEQ ID NO: 115383

SEQ ID NO: 136727 - DNA, 1410 bp, Xylella fastidiosa Dixon; identical to SEQ ID NO: 115384
  CDS (1)..(1410): transl_table=11

SEQ ID NO: 136728 - protein, 469 aa, Xylella fastidiosa Dixon; identical to SEQ ID NO: 115385

SEQ ID NO: 136729 - DNA, 1395 bp, Sulfitobacter sp. EE-36; identical to SEQ ID NO: 115390
  CDS (1)..(1395): transl_table=11

SEQ ID NO: 136730 - protein, 464 aa, Sulfitobacter sp. EE-36; identical to SEQ ID NO: 115391

SEQ ID NO: 136731 - DNA, 1392 bp, Roseovarius nubinhibens ISM; identical to SEQ ID NO: 115392
  CDS (1)..(1392): transl_table=11

SEQ ID NO: 136732 - protein, 463 aa, Roseovarius nubinhibens ISM; identical to SEQ ID NO: 115393

SEQ ID NO: 136733 - DNA, 1395 bp, Oceanicola batsensis HTCC2597; identical to SEQ ID NO: 115394
  CDS (1)..(1395): transl_table=11

SEQ ID NO: 136734 - protein, 464 aa, Oceanicola batsensis HTCC2597; identical to SEQ ID NO: 115395

SEQ ID NO: 136735 - DNA, 1401 bp, Prochlorococcus marinus str. MIT 9211; identical to SEQ ID NO: 115396
  CDS (1)..(1401): transl_table=11

SEQ ID NO: 136736 - protein, 466 aa, Prochlorococcus marinus str. MIT 9211; identical to SEQ ID NO: 115397

SEQ ID NO: 136737 - DNA, 1452 bp, Erythrobacter sp. NAP1; identical to SEQ ID NO: 115398
  CDS (1)..(1452): transl_table=11

SEQ ID NO: 136738 - protein, 483 aa, Erythrobacter sp. NAP1; identical to SEQ ID NO: 115399

SEQ ID NO: 136739 - DNA, 1395 bp, Synechococcus sp. WH 5701; identical to SEQ ID NO: 115400
  CDS (1)..(1395): transl_table=11

SEQ ID NO: 136740 - protein, 464 aa, Synechococcus sp. WH 5701; identical to SEQ ID NO: 115401

SEQ ID NO: 136741 - DNA, 1383 bp, Photobacterium sp. SKA34; identical to SEQ ID NO: 115404
  CDS (1)..(1383): transl_table=11

SEQ ID NO: 136742 - protein, 460 aa, Photobacterium sp. SKA34; identical to SEQ ID NO: 115405

SEQ ID NO: 136743 - DNA, 1380 bp, Oceanospirillum sp. MED92; identical to SEQ ID NO: 115406
  CDS (1)..(1380): transl_table=11

SEQ ID NO: 136744 - protein, 459 aa, Oceanospirillum sp. MED92; identical to SEQ ID NO: 115407

SEQ ID NO: 136745 - DNA, 1395 bp, Flavobacteria bacterium BBFL7; identical to SEQ ID NO: 115410
  CDS (1)..(1395): transl_table=11

SEQ ID NO: 136746 - protein, 464 aa, Flavobacteria bacterium BBFL7; identical to SEQ ID NO: 115411

SEQ ID NO: 136747 - DNA, 1410 bp, Rickettsiella grylli; identical to SEQ ID NO: 115412
  CDS (1)..(1410): transl_table=11

SEQ ID NO: 136748 - protein, 469 aa, Rickettsiella grylli; identical to SEQ ID NO: 115413

SEQ ID NO: 136749 - DNA, 1350 bp, Oceanobacter sp. RED65; identical to SEQ ID NO: 133977
  CDS (1)..(1350): transl_table=11

SEQ ID NO: 136750 - protein, 449 aa, Oceanobacter sp. RED65; identical to SEQ ID NO: 133978

SEQ ID NO: 136751 - DNA, 1425 bp, Desulfitobacterium hafniense DCB-2; identical to SEQ ID NO: 133979
  CDS (1)..(1425): transl_table=11

SEQ ID NO: 136752 - protein, 474 aa, Desulfitobacterium hafniense DCB-2; identical to SEQ ID NO: 133980

SEQ ID NO: 136753 - DNA, 1602 bp, Aspergillus niger
  CDS (1)..(1602)
atggcctccttgacacatgctgcatctcgagcttcggcttcccccgcagttgcccgcactgccgtcgctttcacccccgcctcgttcagttgccgtcgtcttctgagctccaatagccgacctgttcaacacttcccccgtcttcagaccttgacttccacctccagcaagagagcctttggcaccaccgtcaagatgtcttcggctacccgcattgagaccgatgccttcggtgagatcgaggtccccgccgacaagtactggggtgcccagacccagcgctccctgggcaacttcgacatcaaccagccccaggaccgcatgcctgagcccgttgtcaaggctttcggtatcctcaagggtgctgctgctgaagtgaacatgaagttcggccttgaccccaagatcggcgaggccatcaagcaggctgccgccgaggttgcggagggcaagctgatggaccacttccccctcgtcgtctggcagaccggttccggtacccagtccaacatgaactcgaacgaggtcatctccaaccgcgccattgagatcctgggcggcgagaagggctccaagaagcccgtccaccccaacgaccacgtcaacatgtccgcctcctccaatgactccttcccgaccgctatgcacattgctgccgttgtggagctggagaacaccctcctgccttccctgaggagcctgcgcgatgctctccaggtcaaggttgagaagttcgacaagatcatcaagatcggtcgtactcacctgcaggacgccacccctctcaccctcggtcaggagttctccggctacgtcgctcagctcgaccgcaacattgagcgtgtcgagactagcatcccccacctccgctacctggctcagggtggtaccgccgtcggtactggtctgaacaccttcaagggcttcgacgaggctatcgctgctgaggtcaccaagttgaccggcaccgagttcaagactgcccccaacaagttcgaggttctggccgcccacgactcgattgtcgaggcttccggtgccctgaacaccctggcctgctctctgttcaagattgcccaggacatccgttaccttggatccggtccccgctgcggtcttggtgaactggtcctccccgagaacgagcctggctcttccatcatgcccggcaaggttaaccccactcagtgcgagtcccttaccatggtctgctcccaggtcatgggtaaccacgtcgctgccactgtcggcggcatgaacggtcagttcgagctcaacgtgttcaagcccctcatgatccgcaacctgctgcacagcgtgcgcatcctggccgatggcatggccagcttcgagaagaacctggtgcacggtctggaggccaacgagccccgcatcaactctctcctccacgagagtctgatgttggtcacctgcctgaaccccgtcattggctacgacatggcctccaaggtcgccaagaacgcccacaagaagggcctcactctgaagcagagtgctatggagctgaaggctctgagcgaggaggactttgacaagtacgtccgcccggagctgatgctgagccccaaggagaagaaataa

SEQ ID NO: 136754 - protein, 533 aa, Aspergillus niger
MASLTHAASRASASPAVARTAVAFTPASFSCRRLLSSNSRPVQHFPRLQTLTSTSSKRAFGTTVKMSSATRIETDAFGEIEVPADKYWGAQTQRSLGNFDINQPQDRMPEPVVKAFGILKGAAAEVNMKFGLDPKIGEAIKQAAAEVAEGKLMDHFPLVVWQTGSGTQSNMNSNEVISNRAIEILGGEKGSKKPVHPNDHVNMSASSNDSFPTAMHIAAVVELENTLLPSLRSLRDALQVKVEKFDKIIKIGRTHLQDATPLTLGQEFSGYVAQLDRNIERVETSIPHLRYLAQGGTAVGTGLNTFKGFDEAIAAEVTKLTGTEFKTAPNKFEVLAAHDSIVEASGALNTLACSLFKIAQDIRYLGSGPRCGLGELVLPENEPGSSIMPGKVNPTQCESLTMVCSQVMGNHVAATVGGMNGQFELNVFKPLMIRNLLHSVRILADGMASFEKNLVHGLEANEPRINSLLHESLMLVTCLNPVIGYDMASKVAKNAHKKGLTLKQSAMELKALSEEDFDKYVRPELMLSPKEKK

SEQ ID NO: 136755 - DNA, 1976 bp, Oryza sativa
  CDS (131)..(1639)
gctccgtcgtccaccaacctgcctgcctttctctctctgacttctctccccacattcgccagccgccgcttccctcgccgccgtacgacacctcctagtaggagggagagagagagaggcggcgcacgagatggcgatggtcctgcggcgcctcgcgggcgcgtccgccggtggcgccccgtcgccggcggcggcagcggccgcggccgcgctgctgctccgcccggcgctggctcgcccgatctccaccggcttccgcgaggagcgcgacaccttcggccccatccgagtccccaacgacaagctgtggggcgcgcagacgcagaggtcgctgcagaacttcgacatcggcggcgagcgcgagcggatgccggtgcccatcatccgcgcctttggggtgctcaaaaagtgcgccgctaaggtgaatatggagtatggccttgatccaacaatcgggaaggcaataatgcaggctgctcaggaggttgctgaaggacagttagatgaccactttccacttgttatctggcaaactgggagtggcacacaaagcaacatgaacgccaatgaggttattgcaaatagggccgctgagattcttggacataagcgtggcgagaagtttgtacaccctaatgatcatgtgaacagatcacagtcctcaaatgatacatttcccactgtcatgcacatagcagcagccacagagatcaattcaaggtttgtcccaagcttgcaacagttgcataagtcacttgattcaaagtctgttgaatttcaagacataattaaaattgggcgtacacatacccaagatgccaccccattgacccttggccaagagttcagcggttacgccacacaagtgaaatatggaattgatagaattgtttgtaccttaccacggatgtatcagcttgctcaaggtggaactgcagttggaacgggcttgaacactaagaaaggatttgatgtcaaaattgctgctgcagtagctgaggaaacggaactacctttcgtgacagctgagaacaagttcgaagctttggcagcgcatgatgcttttgttgagagcagtggtgctgtaaacacaatttctgcatctcttatgaagatagcaaatgacatacgcttgttaggaagcggcccccgatgtggacttggtgaacttatcctacctgaaaatgagcctgggagcagcattatgcctggaaaagttaaccctacccagtgtgaggccttgaccatggtttgtgctcaggttatgggtaatcatgttggtgtcacagtaggtggttcgaatggacattttgagttgaatgtctttaagccaatgattgcagctggattacttagatcactgagattgctaggggatgcctctgtgtcctttgagaaaaactgtgtcaggggaattcaagcaaaccataagagaatttcacaattattgcacgagtctttgatgttggtgacatctttgaaccctaaaattggctatgacaatgctgcagctgttgctaagaaagcacacaaagaaggaagcacattgaaggaagctgctctagacctcggagtattgacagaatcagaattccatgagcttgttgttccagagaaaatgattggtccttctgattgatagcgactaatgtattcctgtcctgtggatttcctagctctagctcacccgtaaataaagcaagccagacatttacatcttcagttccttatcgtattgaagagtttgtttttgcactgcaaatggtgccggagaaaacaagattccattcctgttactgaaatagtaaacagtatattttgattcattgaagtagatgctttttatttctagggcatgccatccttttcccaatggcgaatctgcatgtaataagttaatgtagcaaccatgcccgtggaaatattatcacatttgacttgagaacaaatgaatgaaatatatttggattatgttt

SEQ ID NO: 136756 - protein, 502 aa, Oryza sativa; identical to SEQ ID NO: 134144

SEQ ID NO: 136757 - DNA, 1476 bp, Medicago truncatula
  CDS (1)..(1476)
atggcgctctacgttctatcacgccgtttatcaaccaaatcaacctcaccaacactcttcacctttcgttacttctcatcaaccactaccttcagagaagaacgcgacacattcggacccattcaagttccctccgataaactatggggagcacagactcaacgatctttgcagaatttcgatatcggtggtccccgtgaacgtatgcctgaacctatcattcgctctttcggcatcttgaaaaaatgcgctgctaaggttaatatggagtatggtcttgatcctactattggaaaagcgattatgaaggccgcgcaagaagttgctgatggaaagcataatgatcattttcctcttgttgtttggcaaactggaagtggtactcaaagtaacatgaatgctaacgaggttattgcaaacagagcctcagagattcttggccataagcgcggtgagaagtttgtgcacccaaatgaccatgtcaatatgtcacaatcttctaatgatacatttccaactgtgatgcacattgccgctggaactgaaataaactcaagactaatccccagcttgaagacattacatgctacacttgacgcaaagtcgattgaatttaaagatatagtcaagattgggcgcactcatactcaagatgctacacctttgactctcggacaggagtttagtgggtatactacacaactgaagtatagtcttgatcgtgtgattaccattttgccgcgtatgtatcagcttgcccagggtggtaccgctgtagggactggattgaatacaaagaaggggtttgatgttaaggtgtcactagcagtagctacggaaacaaatctgccctttgtaacagcagaaaataagtttgaggctttggctgcccacgattcttttgttgaaactagtggagccctcaacacaatttcggcttctttaatgaagatagctaatgatatacggttattaggaagtggtccccgttgcggtcttggtgaactcattcttcctgaaaacgaaccgggaagcagtattatgcctgggaaggttaaccctacccagtgtgaggctttgactatggtctgtgcacaggtcatgggaaaccatgttgcaatcactgtgggaggatcaaatggtcattttgagctcaatgtattcaagccagtgattgccagtaatctcctgcaatcggtgagactgcttggagattcatgtgcttcctttgaaaagaattgtgtaagaggtattcaagctaatagagaaagaatttcaaagctattgcatgagtcactcatgctggtcacatccttgaacccgaaaattggttatgacaaggcagctgcagttgccaagaaagcccacaaagaggggtctacacttaaggaagctgcattaaagcttggagtgctgacttctgaagagtttgacagtcttgtggttcccgagaaaatgcttggcccaagtgattga

SEQ ID NO: 136758 - protein, 491 aa, Medicago truncatula
MALYVLSRRLSTKSTSPTLFTFRYFSSTTTFREERDTFGPIQVPSDKLWGAQTQRSLQNFDIGGPRERMPEPIIRSFGILKKCAAKVNMEYGLDPTIGKAIMKAAQEVADGKHNDHFPLVVWQTGSGTQSNMNANEVIANRASEILGHKRGEKFVHPNDHVNMSQSSNDTFPTVMHIAAGTEINSRLIPSLKTLHATLDAKSIEFKDIVKIGRTHTQDATPLTLGQEFSGYTTQLKYSLDRVITILPRMYQLAQGGTAVGTGLNTKKGFDVKVSLAVATETNLPFVTAENKFEALAAHDSFVETSGALNTISASLMKIANDIRLLGSGPRCGLGELILPENEPGSSIMPGKVNPTQCEALTMVCAQVMGNHVAITVGGSNGHFELNVFKPVIASNLLQSVRLLGDSCASFEKNCVRGIQANRERISKLLHESLMLVTSLNPKIGYDKAAAVAKKAHKEGSTLKEAALKLGVLTSEEFDSLVVPEKMLGPSD

SEQ ID NO: 136759 - DNA, 1650 bp, Aspergillus oryzae; identical to SEQ ID NO: 45240
  CDS (1)..(1650)

SEQ ID NO: 136760 - protein, 549 aa, Aspergillus oryzae; identical to SEQ ID NO: 45241

SEQ ID NO: 136761 - DNA, 1865 bp, Solanum tuberosum; identical to SEQ ID NO: 45242
  CDS (66)..(1547)

SEQ ID NO: 136762 - protein, 493 aa, Solanum tuberosum; identical to SEQ ID NO: 45243

SEQ ID NO: 136763 - DNA, 1389 bp, Neisseria subflava; identical to SEQ ID NO: 115434
  CDS (1)..(1389): transl_table=11

SEQ ID NO: 136764 - protein, 462 aa, Neisseria subflava; identical to SEQ ID NO: 115435

SEQ ID NO: 136765 - DNA, 1389 bp, Neisseria meningitidis; identical to SEQ ID NO: 45246
  CDS (1)..(1389): transl_table=11

SEQ ID NO: 136766 - protein, 462 aa, Neisseria meningitidis; identical to SEQ ID NO: 45247

SEQ ID NO: 136767 - DNA, 1395 bp, Eikenella corrodens; identical to SEQ ID NO: 45248
  CDS (1)..(1395): transl_table=11

SEQ ID NO: 136768 - protein, 464 aa, Eikenella corrodens; identical to SEQ ID NO: 45249

SEQ ID NO: 136769 - DNA, 1488 bp, Drosophila melanogaster; identical to SEQ ID NO: 115440
  CDS (1)..(1488)

SEQ ID NO: 136770 - protein, 495 aa, Drosophila melanogaster; identical to SEQ ID NO: 115441

SEQ ID NO: 136771 - DNA, 2112 bp, Helicobacter pylori; identical to SEQ ID NO: 115442
  CDS (658)..(2049): transl_table=11

SEQ ID NO: 136772 - protein, 463 aa, Helicobacter pylori; identical to SEQ ID NO: 115443

SEQ ID NO: 136773 - DNA, 1380 bp, Pseudomonas putida; identical to SEQ ID NO: 45250
  CDS (1)..(1380): transl_table=11

SEQ ID NO: 136774 - protein, 459 aa, Pseudomonas putida; identical to SEQ ID NO: 45251

SEQ ID NO: 136775 - DNA, 1479 bp, Arabidopsis thaliana; identical to SEQ ID NO: 115450
  CDS (1)..(1479)

SEQ ID NO: 136776 - protein, 492 aa, Arabidopsis thaliana; identical to SEQ ID NO: 45263

SEQ ID NO: 136777 - DNA, 1500 bp, Arabidopsis thaliana; identical to SEQ ID NO: 45264
  CDS (1)..(1500)

SEQ ID NO: 136778 - protein, 499 aa, Arabidopsis thaliana; identical to SEQ ID NO: 45265

SEQ ID NO: 136779 - DNA, 1422 bp, Bradyrhizobium japonicum
  CDS (1)..(1422): transl_table=11
atggccaaatctgcacgcacgaagaccgctcgccccgcgacccgcaccgagaccgacagtttcggtcccatcgaggtcccctccgatcgctattggggcgcgcagaccgaacgttcgcggcagaatttccgcatcggcacggatcgcatgccgatctcgctcgtgcatgcgctcggcatcgtcaagctcgccgcggcgcagtccaaccgcgagctcggcctgctcgaccagcgccgcgccagtgccatcatccgcgccgcgcgcgaggtgatcgacggcagcctcgacgatcatttcccgctcgtcgtgtggcagaccggctcgggcacgcagaccaacatgaacctcaacgaggtgatcgccaaccgcgccaatgagctgctcggcggcgagctcggcgccaagaagccggtgcatccgaacgatcacgtcaacatgagccagtcgtcgaacgactcttttcccaccgcaatgcatatcgcggcggcgagccgcatcaccgccgatctcgttcctgcccttggcgaactgctccgcgcgctgcgcaagaaggagaaggagttcgccaagatcgtcaagatcggccgcacccacacccaggacgcgacgccgctgacgctcggccaggaattctccggctatgccgcgcaggtcgaaagcgggatcgcgcgactgaaggtcgcggtgaaggagctctatccgctggcgcagggcggcaccgccgtcggcaccggcctcaacgcgaagccgcgctttgcaagactgttcgcaaagcacgttgccggaatcaccaaactgcccttcaccagcgccgccaacaaattcgaggcgctggcctcgaacgatgcttatgtgctggcgcacggcgccatcagttcggtcgcgacaggcctgttcaagatcgccaacgacatccgcctgctcggatcgggtccgcgctcagggctcggcgagctgatcctgccggagaacgaaccgggctcgtcgatcatgccgggcaaggtcaatccgacgcagtgcgaggcgatgaccatggtgtgctgccaggtgttcggcaatcacaccgcgatcacggtcgccggcagccagggccatttcgagctcaacgtctacaagcccgtgctggcctacaacatgctgcactcgatccgcctgatggccgatgccgcgcgctccttcaccgaacattgcgtcagcggcatccgcgccgacgaaaagcgcataagtgagctgatgcagcgctcgctgatgctggtgaccgcgctcgcaccgaagatcggctacgacaacgccgccaaggtcgcgaagacggcgcatgccaacggcaccacgctgaaggaggaagcgctgcggctcggcttcgtcacagcggacgagttcgaccgtttggtgcagccggagaagatgacgaaaccggggtaa

SEQ ID NO: 136780 - protein, 473 aa, Bradyrhizobium japonicum; identical to SEQ ID NO: 45267

SEQ ID NO: 136781 - DNA, 1392 bp, Agrobacterium tumefaciens
  CDS (1)..(1392): transl_table=11
atgacagccacacggacagaaaccgatacatttggccctattgaagttcaggccgatcgctactggggcgcgcaggcgcagcgctcgctcggcaacttcaagatcggctgggaaaagcagcccgcctctgtcgttcgtgcgctcggcatcgtcaagcaggccgctgcccgcgccaacatggcgcttgcaggtctcgaccccaaggtgggagatgccatcatcgccgccgcgcaggaagtcatcgacggcaagctgaccgagcatttcccgctcgtcgtctggcagaccggctccggcacccagtccaacatgaatgccaacgaggtgatttccaaccgcgcgatcgaaatgctcggcggcgaaatgggcaccaagaagcctgttcacccgaatgaccacgtcaatatgagccagtcctcgaacgacacctacccgacggcgatgcacatcgcctgcgtggaagagatcgttcaccacctgttgccggccctcaagcacctgcacacggcgctggaagccaaggtcaagcagttcgaaaagatcatcaagatcggccgtacccacacgcaggacgcgaccccgctgacgctcggccaggaattctccggttacgccgctcaggtcgcctcggcgatcgccaatatcgaactcacactgcccgcactgtcgaagctcgcccagggcggtacggcggttggcacgggcctcaatgcccctgttggttttgccgaaaaggtcgccgaggaaatctctgagattaccggcctttccttcgtcaccgcgccgaacaagttcgaagcgcttgcctcgcatgattccatggtcttctcgcacggcgcgatcaacgccgctgccgctgcactcttcaagatcgccaacgacatccgcttcctcggttccggcccgcgcgccggtctcggcgaattgtcgctgccggaaaacgagcccggctcgtcgatcatgccgggcaaggtcaacccgacgcagtcggaggcactgacgcaggtttgcgcccatatcttcggcaacaatgcagcgctttccttcgcaggctcgcagggccacttcgaactcaacgtctataatccgatgatggcctacaactttctgcagtcggtccagcttctgggcgatgcggccgtgtccttcaccgacaactgcgtcgtcggcatcgaggcgcgcgaagacaatatccggaagggcgtcgagaactcgctgatgctcgtcacggcgctcaacggcaagctcggctacgacatctgcgccaagatcgccaagaccgcccacaagaacggcacgacgctgcgcgaagaagccgttggtggtggatacctcaccaacgaggaattcgaccagtatgtgcgccccgaaaacatgatcggcccgaagtaa

SEQ ID NO: 136782 - protein, 463 aa, Agrobacterium tumefaciens; identical to SEQ ID NO: 45271

SEQ ID NO: 136783 - DNA, 1389 bp, Bacillus anthracis; identical to SEQ ID NO: 45272
  CDS (1)..(1389): transl_table=11

SEQ ID NO: 136784 - protein, 462 aa, Bacillus anthracis; identical to SEQ ID NO: 45273

SEQ ID NO: 136785 - DNA, 1389 bp, Bacillus cereus; identical to SEQ ID NO: 115464
  CDS (1)..(1389): transl_table=11

SEQ ID NO: 136786 - protein, 462 aa, Bacillus cereus; identical to SEQ ID NO: 115465

SEQ ID NO: 136787 - DNA, 1389 bp, Bacillus subtilis; identical to SEQ ID NO: 45274
  CDS (1)..(1389): transl_table=11

SEQ ID NO: 136788 - protein, 462 aa, Bacillus subtilis; identical to SEQ ID NO: 45275

SEQ ID NO: 136789 - DNA, 1347 bp, Blochmannia floridanus; identical to SEQ ID NO: 115468
  CDS (1)..(1347): transl_table=11

SEQ ID NO: 136790 - protein, 448 aa, Blochmannia floridanus; identical to SEQ ID NO: 115469

SEQ ID NO: 136791 - DNA, 1392 bp, Bordetella pertussis; identical to SEQ ID NO: 45276
  CDS (1)..(1392): transl_table=11

SEQ ID NO: 136792 - protein, 463 aa, Bordetella pertussis; identical to SEQ ID NO: 45277

SEQ ID NO: 136793 - DNA, 1392 bp, Brucella melitensis
  CDS (1)..(1392): transl_table=11
atggccgccacgcgtaccgaaacagacactttcggaccgatcgatgttcccgcagaccgttattggggcgcacagacacagcgttccctgcaaaatttcaggatcggcggcgagcgcatgcccctgcccctggttcacgcgctgggcgtggtaaagcgcgcggcggcggaaaccaatatcgcgctcggcaagcttgatcccgtcctgggtcaggtgattgcggttgccgcttccgaagtcattgagggcaagctcgacgaccatttcccgctcgtagtctggcagacaggctccggcacgcaatcgaacatgaatgccaatgaagtgatctcgaaccgggctatcgagttgctcggcggggaaatgggctccaaaaagccgatccacccgaacgaccatgtcaatatgagccagtcttccaatgacagtttcccgacggcgatccacatcgccacggcggtcgaaaccgtcaaccggctctatcccgcgctcgaacacctcaccaaagccctgaaggtcaaggaagaagcattcaaggacatcatcaagattggccgcacccacacgcaggacgcaacacctgtgacgctggggcaggaattttcgggctaccgcgcggcacttgaatatgcccgccatcggctcgaacaatcgcttgccgacgtcttcctgctggcgcagggcggcacggctgtcggcaccggtctcaacgcacctgtcggtttcgacaagggctttgccgaagcggtgagcgagattaccgggctttccttcaagaccgcgccaaacaagttcgaggcgctggcaagccacggcgccgttctcaacttccacggcagcctgaatgcgcttgcagccgatctcttcaagatcgccaacgatatccggtttctcggttccggcccgcgttccggccttggcgagctttctctgccggaaaacgaacccggctcctccatcatgccgggcaaggtcaaccccacacaggccgaagccatgaccatggtggcaacccaggttttcggcaaccagaccgccgtaaccgtcgccgccagccaggggcatttcgagctgaacgtcttcaaaccggtcattgcctataatgtgctgcaatcgatccggcttttgagcgacaccatggtttcctttgccgatcattgcgtcgaggggattgaacccaatacggcccgcatcaaggaattgctggaacgctcgctcatgctcgtcacggcgcttgcgcctgccatcggctatgacaatgcggccaggatcgccaaaaccgcccataagaacggcaccacgcttcgcgaggaagcattggcaagcggcctcgtatcggaagaagattatgaccggctggtgcgcgccgagcggatgatcgccccacaatga

SEQ ID NO: 136794 - protein, 463 aa, Brucella melitensis; identical to SEQ ID NO: 115473

SEQ ID NO: 136795 - DNA, 1392 bp, Campylobacter jejuni; identical to SEQ ID NO: 115474
  CDS (1)..(1392): transl_table=11

SEQ ID NO: 136796 - protein, 463 aa, Campylobacter jejuni; identical to SEQ ID NO: 115475

SEQ ID NO: 136797 - DNA, 1383 bp, Chlamydia pneumoniae; identical to SEQ ID NO: 115482
  CDS (1)..(1383): transl_table=11

SEQ ID NO: 136798 - protein, 460 aa, Chlamydia pneumoniae; identical to SEQ ID NO: 115483

SEQ ID NO: 136799 - DNA, 1386 bp, Chromobacterium violaceum; identical to SEQ ID NO: 115486
  CDS (1)..(1386): transl_table=11

SEQ ID NO: 136800 - protein, 461 aa, Chromobacterium violaceum; identical to SEQ ID NO: 115487

SEQ ID NO: 136801 - DNA, 1380 bp, Coxiella burnetii; identical to SEQ ID NO: 115492
  CDS (1)..(1380): transl_table=11

SEQ ID NO: 136802 - protein, 459 aa, Coxiella burnetii; identical to SEQ ID NO: 115493

SEQ ID NO: 136803 - DNA, 1395 bp, Deinococcus radiodurans; identical to SEQ ID NO: 115494
  CDS (1)..(1395): transl_table=11

SEQ ID NO: 136804 - protein, 464 aa, Deinococcus radiodurans; identical to SEQ ID NO: 115495

SEQ ID NO: 136805 - DNA, 1404 bp, Escherichia coli O6
  CDS (1)..(1404): transl_table=11
atgaatacagtacgcagcgaaaaagattcgatgggagcgattgatgtcccggcagataagctgtggggcgcacaaactcagcgctcgctggagcatttccgcatttcgacggagaaaatgcccacctcactgattcatgcgctggcgctaaccaagcgcgcagcggcaaaagttaatgaagatttaggcttgttgtctgaagagaaagcgagcgccattcggcaggcggcggatgaagtactggcaggacagcatgacgacgaattcccgctggctatctggcagaccggctccggcacgcaaagtaacatgaacatgaatgaagtgctggctaaccgggccagtgaattactcggcggcgtgcgcgggatggaacgtaaagttcaccctaacgacgacgtgaacaaaagccaaagttccaacgatgtctttccgacggcgatgcacgttgcggcactactggcgctgcgcaagcaactcattccacaacttaaaaccctgacccagacgctgagtgaaaaatcccgcgcatttgccgatatcgtcaaaatcggtcgtacccacttgcaggacgcgacgccgttaacgctggggcaggagatttccggctgggtagcgatgctggagcataatctcaaacatatcgaatacagcctgcctcacgtagcggaactggctctgggcggtacagcggtgggtactggactaaatacccatccggaatatgcgcgtcgcgtagcagatgaactggcagtcattacctgtgcaccgtttgttaccgcaccgaacaaatttgaagcgctggcgacctgtgatgccctggttcaggcgcacggcgcattgaaagggttggctgcgtcactgatgaaaattgccaatgatgtccgctggctggcctctggcccgcgctgcggaattggtgaaatctcaatcccggaaaatgagccgggcagctcaatcatgccggggaaagtgaacccgacacagtgtgaagcattaaccatgctctgctgtcaggtgatggggaacgacgtggcgatcaacatgggtggcgcttccggtaactttgaactgaacgtcttccgtccgatggtgatccataacttcctgcaatcggtgcgcttgctggcagatggcatggaaagtttcaacaaacactgcgcagtgggcattgaaccgaatcgtgagcgaatcaatcaattactcaatgaatcgctgatgctggtgactgcgcttaacacccacattggttatgacaaagccgccgagatcgccaaaaaagcgcataaagaagggctgaccttaaaagctgcggcccttgcgctggggtatcttagcgaagccgagtttgaccgctgggtacggccagaacagatggtcggcagtatgaaagccgggggttaa

SEQ ID NO: 136806 - protein, 467 aa, Escherichia coli O6; identical to SEQ ID NO: 115499

SEQ ID NO: 136807 - DNA, 2250 bp, Escherichia coli
  CDS (163)..(1566): transl_table=11
aatgcacccgctgtgtgaaataaacagagcgccttcggggcgtttttttacatggcacgaaagaccaaacatttgttatcaaatggtaaataataagtgagctaaaagttgcttaacgaaagcaaaacagaaagaaaaaattaatcaggtgaggagcaggtcatgaatacagtacgcagcgaaaaagattcgatgggggcgattgatgtcccggcagataagctgtggggcgcacaaactcaacgctcgctggagcatttccgcatttcgacggagaaaatgcccacctcactgattcatgcgctggcgctaaccaagcgtgcagcggcaaaagttaatgaagatttaggcttgttgtctgaagagaaagcgagcgccattcgtcaggcggcggatgaagtactggcaggacagcatgacgacgaattcccgctggctatctggcagaccggctccggcacgcaaagtaacatgaacatgaacgaagtgctggctaaccgggccagtgaattactcggcggtgtgcgcgggatggaacgtaaagttcaccctaacgacgacgtgaacaaaagccaaagttccaacgatgtctttccgacggcgatgcacgttgcggcgctgctggcgctgcgcaagcaactcattcctcagcttaaaaccctgacacagacactgaatgagaaatcccgtgcttttgccgatatcgtcaaaattggtcgtactcacttgcaggatgccacgccgttaacgctggggcaggagatttccggctgggtagcgatgctcgagcataatctcaaacatatcgaatacagcctgcctcacgtagcggaactggctcttggcggtacagcggtgggtactggactaaatacccatccggagtatgcgcgtcgcgtagcagatgaactggcagtcattacctgtgcaccgtttgttaccgcgccgaacaaatttgaagcgctggcgacctgtgatgccctggttcaggcgcacggcgcgttgaaagggttggctgcgtcactgatgaaaatcgccaatgatgtccgctggctggcctctggcccgcgctgcggaattggtgaaatctcaatcccggaaaatgagccgggcagctcaatcatgccggggaaagtgaacccaacacagtgtgaggcattaaccatgctctgctgtcaggtgatggggaacgacgtggcgatcaacatggggggcgcttccggtaactttgaactgaacgtcttccgtccaatggtgatccacaatttcctgcaatcggtgcgcttgctggcagatggcatggaaagttttaacaaacactgcgcagtgggtattgaaccgaatcgtgagcgaatcaatcaattactcaatgaatcgctgatgctggtgactgcgcttaacacccacattggttatgacaaagccgccgagatcgccaaaaaagcgcataaagaagggctgaccttaaaagctgcggcccttgcgctggggtatcttagcgaagccgagtttgacagctgggtacggccagaacagatggtcggcagtatgaaagccgggcgttaatctgcaacatacaggtgcagccgtggaatgatcaaacgaagcggctgcgcctgaggtttataacggtgctgcacattgtcggcatcgtaatttaacaactcaccaacgtccggcacgcccgcgccattatcccgattaatcagtgcaatcagtggtgtagggcaggcgtgttggacttgtttttgatctcctttgtaccagacgcgggcaatcggctgcaccttcaccggacgtttgatttttaacttcgcgttctgtggcagggcagcgatatcctgatactctcgctccagttttctttgccactcctcgcgcgtccacggtgcgacactgcgtggtgatttcaggcttttttccagctgtgccaggacttcatcacgatgtaaattcttaatgatatgtttattagcccaaccaaagcgtaaagtggcggggtcgtgcagaacggtgagcgtgcggtaagcattaagggtgatcacgcccggcaaatgacgatgcacccattcaaaacgtgccgcggtggggatttctgattcaaccgtgacgatatgctcgaacgtggcttcgagtttattgatgtgctgaatatgactgaccaacgctgcttgcgaaaggttatccgaaccggaacacaacagccaggcagacggacagtggccttgctgctgcgattcggactgttgt

SEQ ID NO: 136808 - protein, 467 aa, Escherichia coli; identical to SEQ ID NO: 45281

SEQ ID NO: 136809 - DNA, 1395 bp, Haemophilus ducreyi; identical to SEQ ID NO: 115500
  CDS (1)..(1395): transl_table=11

SEQ ID NO: 136810 - protein, 464 aa, Haemophilus ducreyi; identical to SEQ ID NO: 115501

SEQ ID NO: 136811 - DNA, 1413 bp, Halobacterium salinarium; identical to SEQ ID NO: 45282
  CDS (1)..(1413): transl_table=11

SEQ ID NO: 136812 - protein, 470 aa, Halobacterium salinarium; identical to SEQ ID NO: 45283

SEQ ID NO: 136813 - DNA, 1392 bp, Helicobacter pylori J99; identical to SEQ ID NO: 115506
  CDS (1)..(1392): transl_table=11

SEQ ID NO: 136814 - protein, 463 aa, Helicobacter pylori J99; identical to SEQ ID NO: 115507

SEQ ID NO: 136815 - DNA, 1392 bp, Helicobacter pylori; identical to SEQ ID NO: 115508
  CDS (1)..(1392): transl_table=11

SEQ ID NO: 136816 - protein, 463 aa, Helicobacter pylori; identical to SEQ ID NO: 115509

SEQ ID NO: 136817 - DNA, 1419 bp, Methylobacterium extorquens; identical to SEQ ID NO: 45284
  CDS (1)..(1419): transl_table=11

SEQ ID NO: 136818 - protein, 472 aa, Methylobacterium extorquens; identical to SEQ ID NO: 45285

SEQ ID NO: 136819 - DNA, 1425 bp, Mycobacterium bovis; identical to SEQ ID NO: 115518
  CDS (1)..(1425): transl_table=11

SEQ ID NO: 136820 - protein, 474 aa, Mycobacterium bovis; identical to SEQ ID NO: 115519

SEQ ID NO: 136821 - DNA, 1389 bp, Neisseria meningitidis serogroup A
  CDS (1)..(1389): transl_table=11
atgaacactcgcaccgaacacgacaccatgggcaatgtcgaagtcccgtccgaagcctattggggcgcgcagacccagcgcagccgcaacaatttcaaaatcggcggcgaaaccctgccgcagccgctgatttatgctttggcgttggtgaaaaaagccgctgccgcgaccaatgtttccctcggcaggattaagccggaacaggcggatttgattacgcaggcggcggatgatgtgttgaacggcaagctcgacggacagtttcctttagtggtttggcagaccggctccggcacgcagtccaatatgaacatgaacgaagtgctggcgaaccgcgccaacgaaatcgccggtacgggtttggcggcgtatcagcccgtccatcccaacgaccatgtgaaccacgcgcaatcgaccaacgacgcattcccgaccgctatccacgttgccgccgcgattgaaatcaaccgccacctcatccccgccgtaaaagccctgcgcgacaccttggacaaaaaagcccaagccttcgcccctatcgtcaaaatcggccgcacccacttgcaggacgcgacgccgctgactttaggccaagaattttccggctacgtttcccagctcgaccacggcttaggccgtctgaacgacgcgcttaaagacttgtatgaacttgctttgggcggtacggcggtcggcacgggtttgaacagccatcccgaatacgccgaaaaagccgccgccaaactcgccgaattgtccggcttgccgtttgtcagcgcgccgaacaaatttgaagccttgggcggacgcgatgccgccgttgccgcttcgggcgcattgaaaacgctggcggcaagcctgaataaaatcgccaacgacatccgctggctggcaagcggcccgcgctgcggtttgggcgaaatcaaaatccccgaaaacgagccgggttcgtccatcatgccgggcaaagtcaacccgacccaatgcgaagcgatgaccatggtgtgctgccaagtgttcggcaacgacgttaccatcggtatggcgggcgcgtcgggcaatttcgagctgaacgtctatatgcccgtcatcgcctacaacctcttgcaatccatccgcctgttgggcgacgcgtgcaacagcttcaacgaacactgcgccgtcggcattgaacccgtaccggaaaaaatcgactatttcctgcaccattccctgatgctcgttaccgcgttaaaccgcaaaatcggttacgaaaacgccgccaaagtcgccaaaaccgcctacaaaaacaacaaatcgttgcgcgaaaccgccgttgagttgggcttgctgacgggcgaagaatttgacgaactggtcgttcctgccgatatggttcatccgcgctaa

SEQ ID NO: 136822 - protein, 462 aa, Neisseria meningitidis serogroup A
MNTRTEHDTMGNVEVPSEAYWGAQTQRSRNNFKIGGETLPQPLIYALALVKKAAAATNVSLGRIKPEQADLITQAADDVLNGKLDGQFPLVVWQTGSGTQSNMNMNEVLANRANEIAGTGLAAYQPVHPNDHVNHAQSTNDAFPTAIHVAAAIEINRHLIPAVKALRDTLDKKAQAFAPIVKIGRTHLQDATPLTLGQEFSGYVSQLDHGLGRLNDALKDLYELALGGTAVGTGLNSHPEYAEKAAAKLAELSGLPFVSAPNKFEALGGRDAAVAASGALKTLAASLNKIANDIRWLASGPRCGLGEIKIPENEPGSSIMPGKVNPTQCEAMTMVCCQVFGNDVTIGMAGASGNFELNVYMPVIAYNLLQSIRLLGDACNSFNEHCAVGIEPVPEKIDYFLHHSLMLVTALNRKIGYENAAKVAKTAYKNNKSLRETAVELGLLTGEEFDELVVPADMVHPR

SEQ ID NO: 136823 - DNA, 1389 bp, Nitrosomonas europaea; identical to SEQ ID NO: 115520
  CDS (1)..(1389): transl_table=11

SEQ ID NO: 136824 - protein, 462 aa, Nitrosomonas europaea; identical to SEQ ID NO: 115521

SEQ ID NO: 136825 - DNA, 1386 bp, Oceanobacillus iheyensis; identical to SEQ ID NO: 115522
  CDS (1)..(1386): transl_table=11

SEQ ID NO: 136826 - protein, 461 aa, Oceanobacillus iheyensis; identical to SEQ ID NO: 115523

SEQ ID NO: 136827 - DNA, 1395 bp, Pasteurella multocida; identical to SEQ ID NO: 115524
  CDS (1)..(1395): transl_table=11

SEQ ID NO: 136828 - protein, 464 aa, Pasteurella multocida; identical to SEQ ID NO: 115525

SEQ ID NO: 136829 - DNA, 1386 bp, Ralstonia solanacearum; identical to SEQ ID NO: 115534
  CDS (1)..(1386): transl_table=11

SEQ ID NO: 136830 - protein, 461 aa, Ralstonia solanacearum; identical to SEQ ID NO: 115535

SEQ ID NO: 136831 - DNA, 1392 bp, Rhizobium meliloti; identical to SEQ ID NO: 115538
  CDS (1)..(1392): transl_table=11

SEQ ID NO: 136832 - protein, 463 aa, Rhizobium meliloti; identical to SEQ ID NO: 45289

SEQ ID NO: 136833 - DNA, 1392 bp, Rickettsia conorii; identical to SEQ ID NO: 115540
  CDS (1)..(1392): transl_table=11

SEQ ID NO: 136834 - protein, 463 aa, Rickettsia conorii; identical to SEQ ID NO: 115541

SEQ ID NO: 136835 - DNA, 1404 bp, Salmonella typhimurium; identical to SEQ ID NO: 45290
  CDS (1)..(1404): transl_table=11

SEQ ID NO: 136836 - protein, 467 aa, Salmonella typhimurium; identical to SEQ ID NO: 45291

SEQ ID NO: 136837 - DNA, 1404 bp, Shigella flexneri; identical to SEQ ID NO: 115548
  CDS (1)..(1404): transl_table=11

SEQ ID NO: 136838 - protein, 467 aa, Shigella flexneri; identical to SEQ ID NO: 115549

SEQ ID NO: 136839 - DNA, 1404 bp, Streptomyces avermitilis; identical to SEQ ID NO: 45292
  CDS (1)..(1404): transl_table=11

SEQ ID NO: 136840 - protein, 467 aa, Streptomyces avermitilis; identical to SEQ ID NO: 45293

SEQ ID NO: 136841 - DNA, 1386 bp, Streptomyces coelicolor; identical to SEQ ID NO: 45294
  CDS (1)..(1386): transl_table=11

SEQ ID NO: 136842 - protein, 461 aa, Streptomyces coelicolor; identical to SEQ ID NO: 45295

SEQ ID NO: 136843 - DNA, 1398 bp, Yersinia pestis; identical to SEQ ID NO: 115568
  CDS (1)..(1398): transl_table=11

SEQ ID NO: 136844 - protein, 465 aa, Yersinia pestis; identical to SEQ ID NO: 115569

SEQ ID NO: 136845 - DNA, 1485 bp, Rhizopus oryzae; identical to SEQ ID NO: 45296
  CDS (1)..(1485)

SEQ ID NO: 136846 - protein, 494 aa, Rhizopus oryzae [sequence omitted]

SEQ ID NO: 136847 - DNA, 1449 bp, Schizosaccharomyces pombe; identical to SEQ ID NO: 45298
  CDS (1)..(1449)

SEQ ID NO: 136848 - protein, 482 aa, Schizosaccharomyces pombe; identical to SEQ ID NO: 45299

SEQ ID NO: 136849 - DNA, 2489 bp, Saccharomyces cerevisiae; identical to SEQ ID NO: 45300
  CDS (830)..(2296)

SEQ ID NO: 136850 - protein, 488 aa, Saccharomyces cerevisiae; identical to SEQ ID NO: 45301

SEQ ID NO: 136851 - DNA, 1488 bp, Glycine max; identical to SEQ ID NO: 45302
  CDS (1)..(1488)

SEQ ID NO: 136852 - protein, 495 aa, Glycine max; identical to SEQ ID NO: 45303

SEQ ID NO: 136853 - DNA, 1485 bp, Hordeum vulgare; identical to SEQ ID NO: 45304
  CDS (1)..(1485)

SEQ ID NO: 136854 - protein, 494 aa, Hordeum vulgare; identical to SEQ ID NO: 45305

SEQ ID NO: 136855 - DNA, 1485 bp, Triticum aestivum; identical to SEQ ID NO: 45306
  CDS (1)..(1485)

SEQ ID NO: 136856 - protein, 494 aa, Triticum aestivum; identical to SEQ ID NO: 45307

SEQ ID NO: 136857 - DNA, 1497 bp, Zea mays; identical to SEQ ID NO: 45308
  CDS (1)..(1497)

SEQ ID NO: 136858 - protein, 498 aa, Zea mays; identical to SEQ ID NO: 45309

SEQ ID NO: 136859 - DNA, 22 bp, Artificial sequence
  primer
atggtaaattcccaccgccttg

SEQ ID NO: 136860 - DNA, 22 bp, Artificial sequence
  primer
ttagtcagcaatcggggcaatc

SEQ ID NO: 136861 - protein, 479 aa, Artificial sequence
  consensus sequence
  Variant (2)..(2): Xaa in position 2 is any amino acid
  Variant (4)..(4): Xaa in position 4 is any amino acid
  Variant (6)..(6): Xaa in position 6 is any amino acid
  Variant (7)..(7): Xaa in position 7 is any or no amino acid
  Variant (9)..(11): Xaa in position 9 to 11 is any amino acid
  Variant (14)..(18): Xaa in position 14 to 18 is any amino acid
  Variant (23)..(23): Xaa in position 23 is any amino acid
  Variant (25)..(27): Xaa in position 25 to 27 is any amino acid
  Variant (30)..(30): Xaa in position 30 is any amino acid
  Variant (32)..(41): Xaa in position 32 to 41 is any amino acid
  Variant (42)..(44): Xaa in position 42 to 44 is any or no amino acid
  Variant (46)..(49): Xaa in position 46 to 49 is any amino acid
  Variant (51)..(52): Xaa in position 51 to 52 is any amino acid
  Variant (55)..(56): Xaa in position 55 to 56 is any amino acid
  Variant (58)..(60): Xaa in position 58 to 60 is any amino acid
  Variant (62)..(62): Xaa in position 62 is any amino acid
  Variant (63)..(70): Xaa in position 63 to 70 is any or no amino acid
  Variant (72)..(78): Xaa in position 72 to 78 is any amino acid
  Variant (80)..(80): Xaa in position 80 is any amino acid
  Variant (81)..(81): Xaa in position 81 is any or no amino acid
  Variant (83)..(84): Xaa in position 83 to 84 is any amino acid
  Variant (86)..(88): Xaa in position 86 to 88 is any amino acid
  Variant (89)..(89): Xaa in position 89 is any or no amino acid
  Variant (91)..(94): Xaa in position 91 to 94 is any amino acid
  Variant (95)..(98): Xaa in position 95 to 98 is any or no amino acid
  Variant (101)..(104): Xaa in position 101 to 104 is any amino acid
  Variant (111)..(112): Xaa in position 111 to 112 is any amino acid
  Variant (116)..(116): Xaa in position 116 is any amino acid
  Variant (120)..(121): Xaa in position 120 to 121 is any amino acid
  Variant (123)..(123): Xaa in position 123 is any amino acid
  Variant (125)..(127): Xaa in position 125 to 127 is any amino acid
  Variant (128)..(128): Xaa in position 128 is any or no amino acid
  Variant (130)..(132): Xaa in position 130 to 132 is any amino acid
  Variant (133)..(139): Xaa in position 133 to 139 is any or no amino acid
  Variant (144)..(144): Xaa in position 144 is any amino acid
  Variant (147)..(148): Xaa in position 147 to 148 is any amino acid
  Variant (154)..(155): Xaa in position 154 to 155 is any amino acid
  Variant (158)..(159): Xaa in position 158 to 159 is any amino acid
  Variant (161)..(169): Xaa in position 161 to 169 is any amino acid
  Variant (170)..(170): Xaa in position 170 is any or no amino acid
  Variant (172)..(172): Xaa in position 172 is any amino acid
  Variant (174)..(177): Xaa in position 174 to 177 is any amino acid
  Variant (179)..(181): Xaa in position 179 to 181 is any amino acid
  Variant (183)..(184): Xaa in position 183 to 184 is any amino acid
  Variant (186)..(193): Xaa in position 186 to 193 is any amino acid
  Variant (194)..(195): Xaa in position 194 to 195 is any or no amino acid
  Variant (197)..(197): Xaa in position 197 is any amino acid
  Variant (202)..(203): Xaa in position 202 to 203 is any amino acid
  Variant (206)..(206): Xaa in position 206 is any amino acid
  Variant (208)..(208): Xaa in position 208 is any amino acid
  Variant (214)..(215): Xaa in position 214 to 215 is any amino acid
  Variant (217)..(233): Xaa in position 217 to 233 is any amino acid
  Variant (234)..(237): Xaa in position 234 to 237 is any or no amino acid
  Variant (239)..(240): Xaa in position 239 to 240 is any amino acid
  Variant (249)..(249): Xaa in position 249 is any amino acid
  Variant (251)..(266): Xaa in position 251 to 266 is any amino acid
  Variant (268)..(270): Xaa in position 268 to 270 is any amino acid
  Variant (271)..(271): Xaa in position 271 is any or no amino acid
  Variant (273)..(273): Xaa in position 273 is any amino acid
  Variant (274)..(274): Xaa in position 274 is any or no amino acid
  Variant (276)..(276): Xaa in position 276 is any amino acid
  Variant (278)..(278): Xaa in position 278 is any amino acid
  Variant (280)..(285): Xaa in position 280 to 285 is any amino acid
  Variant (287)..(288): Xaa in position 287 to 288 is any amino acid
  Variant (290)..(292): Xaa in position 290 to 292 is any amino acid
  Variant (294)..(294): Xaa in position 294 is any amino acid
  Variant (296)..(298): Xaa in position 296 to 298 is any amino acid
  Variant (300)..(301): Xaa in position 300 to 301 is any amino acid
  Variant (303)..(303): Xaa in position 303 is any amino acid
  Variant (309)..(309): Xaa in position 309 is any amino acid
  Variant (311)..(311): Xaa in position 311 is any amino acid
  Variant (313)..(313): Xaa in position 313 is any amino acid
  Variant (318)..(318): Xaa in position 318 is any amino acid
  Variant (320)..(320): Xaa in position 320 is any amino acid
  Variant (323)..(325): Xaa in position 323 to 325 is any amino acid
  Variant (327)..(329): Xaa in position 327 to 329 is any amino acid
  Variant (342)..(344): Xaa in position 342 to 344 is any amino acid
  Variant (347)..(348): Xaa in position 347 to 348 is any amino acid
  Variant (350)..(352): Xaa in position 350 to 352 is any amino acid
  Variant (355)..(355): Xaa in position 355 is any amino acid
  Variant (358)..(367): Xaa in position 358 to 367 is any amino acid
  Variant (368)..(368): Xaa in position 368 is any or no amino acid
  Variant (370)..(370): Xaa in position 370 is any amino acid
  Variant (376)..(377): Xaa in position 376 to 377 is any amino acid
  Variant (379)..(384): Xaa in position 379 to 384 is any amino acid
  Variant (386)..(386): Xaa in position 386 is any amino acid
  Variant (388)..(389): Xaa in position 388 to 389 is any amino acid
  Variant (392)..(397): Xaa in position 392 to 397 is any amino acid
  Variant (399)..(399): Xaa in position 399 is any amino acid
  Variant (400)..(404): Xaa in position 400 to 404 is any or no amino acid
  Variant (406)..(418): Xaa in position 406 to 418 is any amino acid
  Variant (419)..(419): Xaa in position 419 is any or no amino acid
  Variant (421)..(422): Xaa in position 421 to 422 is any amino acid
  Variant (426)..(426): Xaa in position 426 is any amino acid
  Variant (428)..(430): Xaa in position 428 to 430 is any amino acid
  Variant (434)..(435): Xaa in position 434 to 435 is any amino acid
  Variant (437)..(439): Xaa in position 437 to 439 is any amino acid
  Variant (442)..(442): Xaa in position 442 is any amino acid
  Variant (444)..(449): Xaa in position 444 to 449 is any amino acid
  Variant (451)..(457): Xaa in position 451 to 457 is any amino acid
  Variant (458)..(475): Xaa in position 458 to 475 is any or no amino acid
  Variant (477)..(477): Xaa in position 477 is any amino acid
  Variant (478)..(478): Xaa in position 478 is any or no amino acid
RXEXDXXGXXXVPXXXXXGAQTXRXXXNFXIXXXXXXXXXXXXXAXXXXKXXAAXXNXXXGXXXXXXXXXLXXXXXXXIXXAXXEXXXXGXXXXXXXXFPXXXXQTGSGTXXNMNXNEVXXNXAXXXXGXXXXXXXXXXHPNDXVNXXQSSNDXXPTXXHXXXXXXXXXXLXPXXXXLXXXLXXKXXXXXXXXXXKXGRTHXXDAXPXTLGQEXXGXXXXXXXXXXXXXXXXXXXXXLXXGGTAVGTGXNXXXXXXXXXXXXXXXXTXXXXFXXAXNXFXXXXXXDXXVXXXGXLXXXAXXLXKIANDXRXLXSGPRXGXGEXXXPXXXPGSSIMPGKVNPXXXEAXXMXXXQVXGNXXXXXXXXXXXGXFELNVXXPXXXXXXLXSXXLLXXXXXXFXXXXXXGXXXXXXXXXXXXXXSXXLVTXLXXXIGYXXAXXXAKXAXXXXXXLXXXXXXXXXXXXXXXXXXXXXXXXXPXXM

SEQ ID NO: 136862 - protein, 53 aa, Artificial sequence
  protein pattern
  Variant (2)..(2): Xaa in position 2 is Ile, Leu, Met or Val
  Variant (3)..(3): Xaa in position 3 is Ala, Cys, Gly, Ser or Thr
  Variant (4)..(4): Xaa in position 4 is any amino acid
  Variant (6)..(6): Xaa in position 6 is Ile, Leu, Met or Val
  Variant (7)..(7): Xaa in position 7 is Gln, Arg or Ser
  Variant (8)..(9): Xaa in position 8 to 9 is any amino acid
  Variant (10)..(10): Xaa in position 10 is Ala, Gly or Ser
  Variant (15)..(15): Xaa in position 15 is Ala, Cys, Asn, Ser or Thr
  Variant (17)..(18): Xaa in position 17 to 18 is any amino acid
  Variant (20)..(20): Xaa in position 20 is Ile, Leu or Val
  Variant (21)..(22): Xaa in position 21 to 22 is any amino acid
  Variant (24)..(25): Xaa in position 24 to 25 is any amino acid
  Variant (26)..(26): Xaa in position 26 is Glu or Gln
  Variant (36)..(36): Xaa in position 36 is Ile or Val
  Variant (39)..(39): Xaa in position 39 is Thr or Val
  Variant (40)..(41): Xaa in position 40 to 41 is any amino acid
  Variant (43)..(43): Xaa in position 43 is Ala, Ser or Val
  Variant (44)..(46): Xaa in position 44 to 46 is any amino acid
  Variant (47)..(47): Xaa in position 47 is Ala, Ile, Leu or Val
  Variant (48)..(50): Xaa in position 48 to 50 is any amino acid
  Variant (51)..(51): Xaa in position 51 is Ile or Val
  Variant (52)..(52): Xaa in position 52 is any amino acid
  Variant (53)..(53): Xaa in position 53 is Ala or Gly
KXXXDXXXXXSGPRXGXXEXXXPXXXPGSSIMPGKXNPXXXEXXXXXXXXXXX

SEQ ID NO: 136863 - protein, 26 aa, Artificial sequence
  protein pattern
  Variant (3)..(3): Xaa in position 3 is Ile, Leu or Val
  Variant (4)..(4): Xaa in position 4 is any amino acid
  Variant (5)..(5): Xaa in position 5 is Ile or Val
  Variant (6)..(6): Xaa in position 6 is Phe, Trp or Tyr
  Variant (13)..(13): Xaa in position 13 is Gln or Ser
  Variant (14)..(14): Xaa in position 14 is Ser or Thr
  Variant (18)..(18): Xaa in position 18 is any amino acid
  Variant (22)..(22): Xaa in position 22 is Ile, Leu or Val
  Variant (23)..(23): Xaa in position 23 is Ala or Ser
  Variant (24)..(25): Xaa in position 24 to 25 is any amino acid
FPXXXXQTGSGTXXNMNXNEVXXXXA

SEQ ID NO: 136864 - protein, 24 aa, Artificial sequence
  protein pattern
  Variant (2)..(2): Xaa in position 2 is any amino acid
  Variant (7)..(8): Xaa in position 7 to 8 is any amino acid
  Variant (11)..(11): Xaa in position 11 is any amino acid
  Variant (13)..(14): Xaa in position 13 to 14 is any or no amino acid
  Variant (16)..(17): Xaa in position 16 to 17 is any or no amino acid
  Variant (21)..(21): Xaa in position 21 is Phe, Ile, Leu or Val
  Variant (22)..(22): Xaa in position 22 is Ala, Asp, Gly or Ser
  Variant (23)..(23): Xaa in position 23 is Ala or Gly
  Variant (24)..(24): Xaa in position 24 is Phe, Trp or Tyr
KXGRTHXXDAXPXXLXXGQEXXXX

SEQ ID NO: 136865 - protein, 25 aa, Artificial sequence
  protein pattern
  Variant (2)..(2): Xaa in position 2 is any amino acid
  Variant (3)..(5): Xaa in position 3 to 5 is any or no amino acid
  Variant (7)..(7): Xaa in position 7 is Asp or His
  Variant (10)..(10): Xaa in position 10 is any amino acid
  Variant (11)..(11): Xaa in position 11 is Ala, Gly or Ser
  Variant (14)..(14): Xaa in position 14 is Ser or Thr
  Variant (17)..(17): Xaa in position 17 is Ala, Ser, Thr or Val
  Variant (18)..(18): Xaa in position 18 is any amino acid
  Variant (20)..(20): Xaa in position 20 is Ala, Ser or Thr
  Variant (21)..(21): Xaa in position 21 is Ala, Cys, Ser or Val
  Variant (22)..(23): Xaa in position 22 to 23 is any amino acid
  Variant (24)..(24): Xaa in position 24 is Ile, Leu, Met or Val
  Variant (25)..(25): Xaa in position 25 is Ala, Gly, Ser, Thr or Val
PXXXXDXVNXXQSXNDXXPXXXXXX

SEQ ID NO: 136866 - protein, 20 aa, Artificial sequence
  protein pattern
  Variant (2)..(3): Xaa in position 2 to 3 is any or no amino acid
  Variant (6)..(6): Xaa in position 6 is Ala, Cys or Ser
  Variant (8)..(8): Xaa in position 8 is Ala, Asn, Ser or Thr
  Variant (9)..(10): Xaa in position 9 to 10 is any amino acid
  Variant (11)..(11): Xaa in position 11 is Ile, Leu or Val
  Variant (14)..(15): Xaa in position 14 to 15 is any amino acid
  Variant (16)..(16): Xaa in position 16 is any or no amino acid
  Variant (18)..(19): Xaa in position 18 to 19 is any amino acid
  Variant (20)..(20): Xaa in position 20 is Ala, Ile or Val
LXXVTXLXXXXGYXXXAXXX

SEQ ID NO: 136867 - protein, 20 aa, Artificial sequence
  protein pattern
  Variant (2)..(2): Xaa in position 2 is any amino acid
  Variant (3)..(3): Xaa in position 3 is Phe or Leu
  Variant (4)..(4): Xaa in position 4 is Glu or Gln
  Variant (8)..(9): Xaa in position 8 to 9 is any amino acid
  Variant (11)..(15): Xaa in position 11 to 15 is any amino acid
  Variant (16)..(16): Xaa in position 16 is any or no amino acid
  Variant (18)..(18): Xaa in position 18 is any amino acid
  Variant (19)..(19): Xaa in position 19 is any or no amino acid
GXXXLNVXXPXXXXXXLXXS

SEQ ID NO: 136868 - protein, 14 aa, Artificial sequence
  protein pattern
  Variant (2)..(2): Xaa in position 2 is Ala or Pro
  Variant (3)..(3): Xaa in position 3 is any amino acid
  Variant (12)..(12): Xaa in position 12 is Ile or Leu
  Variant (14)..(14): Xaa in position 14 is Ala, Ser or Thr
LXXGGTAVGTGXNX

SEQ ID NO: 136869 - DNA, 354 bp, Synechocystis sp.
  CDS (1)..(354): transl_table=11
atgtccccaccattgccgctgttacttccgtccagtcaaaccgccgtgagccaagatctacccgcctctcccaattattttcgcccggtattcttttctacctttttgaccatttttttggcggaaatgggtgataaaacccaattgagtaccttactaattagcgctgagtcccaatctccctgggtggtgtttgccggctcagccctagccctaatttccactagtctgttgggggtttccctggggtattggattgcccgccgtcttgatccgcaaatcctcgatttctctgtggctctgttattgctcctcattgctgggttgctgatgggggacgtggtcagcgcctag

SEQ ID NO: 136870 - protein, 117 aa, Synechocystis sp.
MSPPLPLLLPSSQTAVSQDLPASPNYFRPVFFSTFLTIFLAEMGDKTQLSTLLISAESQSPWVVFAGSALALISTSLLGVSLGYWIARRLDPQILDFSVALLLLLIAGLLMGDVVSA

SEQ ID NO: 136871 - DNA, 417 bp, Nostoc sp. PCC 7120
  CDS (1)..(417): transl_table=11
gtgaaactcgactctgcacctgttacccttgctggcttaaatccgactatcagccagccagaaatacaagaaagcactcaagcccatctggctactgcaattattgagccagttgaggatagtcataaaaagcaggaaccagctttggctgtatttgcaactacatttgtgactatttttctggcagaaattggtgataaaacccagttatcaactttattaatgagtgcagagtctcatttaccttgggtagtttttctcggttcgggagcagcattagttactacaagtttgttaggtgtactactagggagttgggtttctaaacgcttcagccccaaaactttggataaatcagccggaatcatgttgttgttcatctccctcactttgttttgggatatattccacggataa

SEQ ID NO: 136872 - protein, 138 aa, Nostoc sp. PCC 7120
MKLDSAPVTLAGLNPTISQPEIQESTQAHLATAIIEPVEDSHKKQEPALAVFATTFVTIFLAEIGDKTQLSTLLMSAESHLPWVVFLGSGAALVTTSLLGVLLGSWVSKRFSPKTLDKSAGIMLLFISLTLFWDIFHG

SEQ ID NO: 136873 - DNA, 300 bp, Prochlorococcus marinus str. MIT 9313
  CDS (1)..(300): transl_table=11
atgggtttcacaacggtgttgttaacgacattcaccacagtctttttggctgaacttggcgataaaacccagctagcaaccctattgctatcagctcagtcaggccaaccatgggttgtgtttctcggggctgccctagctctcatctcctccagtttggtgggcgtcttggtgggtcgctggctggctggaatcctgccaccagaacgcctgcaaaaaatggccggggtgctgatggtgggcttggggttatggcttggactacaagcaacacagtctctgctaatcgcaagccaataa

SEQ ID NO: 136874 - protein, 99 aa, Prochlorococcus marinus str. MIT 9313
MGFTTVLLTTFTTVFLAELGDKTQLATLLLSAQSGQPWVVFLGAALALISSSLVGVLVGRWLAGILPPERLQKMAGVLMVGLGLWLGLQATQSLLIASQ

SEQ ID NO: 136875 - DNA, 333 bp, Synechococcus sp. WH 8102
  CDS (1)..(333): transl_table=11
atggctgagatcaaggaatccagccgccctggttttgcggccgtggtgttcagcaccttcagcacggtgttcatcgccgaactgggggacaagacccagttagcgacactgctcctctcggctcagtccggatcgccctggcttgtgtttctcggagccgccctggccctgatctgctcaagcctggtcggcgtgcttctgggtcagtggctggctcgcacgcttccaccagagcgactggaaaccatggccggccttctcatggtggccctggggctttggctgggagcacaggcaattcagacgttgatgttggatacaaccggagcctga

SEQ ID NO: 136876 - protein, 110 aa, Synechococcus sp. WH 8102
MAEIKESSRPGFAAVVFSTFSTVFIAELGDKTQLATLLLSAQSGSPWLVFLGAALALICSSLVGVLLGQWLARTLPPERLETMAGLLMVALGLWLGAQAIQTLMLDTTGA

SEQ ID NO: 136877 - DNA, 282 bp, Gloeobacter violaceus PCC 7421
  CDS (1)..(282): transl_table=11
atggactggaaactggtgggcgtcacttttggggccattttcctggcggagttgggggataagacgcagctcgccacatttttgatgaccgccaagtcgggctcgccctgggcggtgttcttgggctcttcgctggcgctggtattggcgagcctgttgggggtgctggcgggcgcgtggctgagcaagcttattcctcccacctacttgcaattgggcgcagcggcgggatttgtaatcatcggctgcttgatgttctaccaggtctggcgcggcggctag

SEQ ID NO: 136878 - protein, 93 aa, Gloeobacter violaceus PCC 7421
MDWKLVGVTFGAIFLAELGDKTQLATFLMTAKSGSPWAVFLGSSLALVLASLLGVLAGAWLSKLIPPTYLQLGAAAGFVIIGCLMFYQVWRGG

SEQ ID NO: 136879 - DNA, 285 bp, Prochlorococcus marinus str. MIT 9303
  CDS (1)..(285): transl_table=11
gtgttgttaacgacattcaccacagtctttttggctgaacttggcgataaaacccagctagcaaccctattgctatcagctcagtcaggccaaccatgggttgtgtttctcggggctgccctagctctcatctcctccagtttggtgggcgtcttggtgggtcgttggcttgctggaatcctgccaccagaacgcctgcaaaaaatggccggggtgctgatggtgggcttggggttatggcttggattacaagccacacagtctctgctaatcgcaagccaataa

SEQ ID NO: 136880 - protein, 94 aa, Prochlorococcus marinus str. MIT 9303
MLLTTFTTVFLAELGDKTQLATLLLSAQSGQPWVVFLGAALALISSSLVGVLVGRWLAGILPPERLQKMAGVLMVGLGLWLGLQATQSLLIASQ

SEQ ID NO: 136881 - DNA, 417 bp, Anabaena variabilis ATCC 29413
  CDS (1)..(417): transl_table=11
gtgaaaatcgactctgcacctgtcacccttgccggcgtaaatccgactatcagccagccagaaatagaagaaagtactcagtcccatctggctactgcaattattgagccagttgaggatagtcctaaaaagcaggaaccagctttggctgtatttgctactacctttgtgactatttttctggcagaaattggcgataaaacccagttatcgactctattgatgagtgcagagtctcattcaccttgggtagtatttctcggttcgggagcagcattaattaccacaagtttgttaggtgtcctcctgggtagttgggtttctaaacgcttcagccctaaaaccttggataaatcagccggaatcatgctgctatttatctccctcactttgttttgggatatctttcacggataa

SEQ ID NO: 136882 - protein, 138 aa, Anabaena variabilis ATCC 29413
MKIDSAPVTLAGVNPTISQPEIEESTQSHLATAIIEPVEDSPKKQEPALAVFATTFVTIFLAEIGDKTQLSTLLMSAESHSPWVVFLGSGAALITTSLLGVLLGSWVSKRFSPKTLDKSAGIMLLFISLTLFWDIFHG

SEQ ID NO: 136883 - DNA, 348 bp, Synechococcus elongatus PCC 7942
  CDS (1)..(348): transl_table=11
gtggctgctccttcttctgacctagagacgccaacgctcaccgaagccagtccgggtcggtcttcagcttggggtgtgtttgtctcgacttttctgaccatttttctggccgaactcggcgacaaaacccaggtcaccacgttgctgatgacagtggagtcccatcggccttggattgtgtttaccggtgcagcgacagccttgatcagcacgagtttgctgggcgttctggtaggtcgttggctggcgcaacatattgccccacgcaccctggatgttgcagctggcgtgacgctgctagcgatcgcagcagtcctgagttgggatctctggcagcactggagctaa

SEQ ID NO: 136884 - protein, 115 aa, Synechococcus elongatus PCC 7942
MAAPSSDLETPTLTEASPGRSSAWGVFVSTFLTIFLAELGDKTQVTTLLMTVESHRPWIVFTGAATALISTSLLGVLVGRWLAQHIAPRTLDVAAGVTLLAIAAVLSWDLWQHWS

SEQ ID NO: 136885 - DNA, 456 bp, Trichodesmium erythraeum IMS101
  CDS (1)..(456): transl_table=11
gtgaaatttttccagattagcgaaaatactgataaaaaccaagtagatttagaagaaaaaaaggtttctcagaggttacctttggaagttagttcagaaaagggagaagttttaattcctactaattctcaatcagaagaagaagaaagaaaggtacaaaaagcaggggcatgggcagtatttgcttcaacgtttgtgacaatattcttagcagaaattggtgataaaactcaacttactactttgctaatgactgctgagtctcaagctccttggatagtatttgcaggtgcaggtagtgccttagtaattacaagtttattgggggttttgttaggtcaatggttagctagtcacctttctccaaaaactatagaaaggtcggcaggagctattttattgctaatatctttgactttgatatttgaagttttttatgaaaattttcatggttaa

SEQ ID NO: 136886 - protein, 151 aa, Trichodesmium erythraeum IMS101
MKFFQISENTDKNQVDLEEKKVSQRLPLEVSSEKGEVLIPTNSQSEEEERKVQKAGAWAVFASTFVTIFLAEIGDKTQLTTLLMTAESQAPWIVFAGAGSALVITSLLGVLLGQWLASHLSPKTIERSAGAILLLISLTLIFEVFYENFHG

SEQ ID NO: 136887 - DNA, 330 bp, Synechococcus sp. CC9311
  CDS (1)..(330): transl_table=11
atgactgaagcaggtagcgacaacaagcttggattcaacaccattctgctgagcaccttcaccaccgtttttctagctgaattgggtgataaaacccaattagccaccctccttctatccgcccaatccggcgaaccatggttggtgtttatcggggccgcgctggcattgatctgttcaagcctggtaggagttctggtgggacgctggctctccacaatccttcccccagaacgtctggaacaaatggcaggtttgctgatggtgggactgggtttgtggctgggcagtcaggccttgaagtcactgatggagacccaatcactctga

SEQ ID NO: 136888 - protein, 109 aa, Synechococcus sp. CC9311
MTEAGSDNKLGFNTILLSTFTTVFLAELGDKTQLATLLLSAQSGEPWLVFIGAALALICSSLVGVLVGRWLSTILPPERLEQMAGLLMVGLGLWLGSQALKSLMETQSL

SEQ ID NO: 136889 - DNA, 597 bp, Shewanella sp. MR-7
  CDS (1)..(597): transl_table=11
ttgtgcttatgtcaaaaaccacccctaaaaggatcacacttggaagcgttactcgcctcaacctttacggttgccatcgccgagattggcgataaaacccaactgcttgccctattactcgcagcaagatttaaaaataaaaccgcgattatcttgggtattttactctcgactctgtttaaccattttgccgccgcttggcttggccaatgggcgattaactgggtgagcccagatgtagcacgctacttggttgccgcctccttctttgcgattgcactctgggtactgatccccgataaagtggacgccgaagagagccgtttctataagatgggaccctttgttgcgacctttattctattctttatcgccgaaatgggcgacaaaacccaaatcgcgactgtcgtgttagccgctaaatacgatgccttagccatggtggttgcaggtactactttgggtatgttgctggcgaacgtccctgtggttattgcaggacattttagtgccgaaagattaccaatgaagtggatccacaggggctgcgcaattttgtttgccctgctcggcgtggcaaccttaatggttaactga

SEQ ID NO: 136890 - protein, 198 aa, Shewanella sp. MR-7
MCLCQKPPLKGSHLEALLASTFTVAIAEIGDKTQLLALLLAARFKNKTAIILGILLSTLFNHFAAAWLGQWAINWVSPDVARYLVAASFFAIALWVLIPDKVDAEESRFYKMGPFVATFILFFIAEMGDKTQIATVVLAAKYDALAMVVAGTTLGMLLANVPVVIAGHFSAERLPMKWIHRGCAILFALLGVATLMVN

SEQ ID NO: 136891 - DNA, 360 bp, Crocosphaera watsonii WH 8501
  CDS (1)..(360): transl_table=11
atgaatgcttctcaaacaactgaaactgaaaatcagcaaaattctctctctgaggagagttcaaaagaacaaagaacgtggagtttttggactgtttttagttcaactttcttgacaatatttttagcagagatgggtgataaaacccaactggcaaccctattaatcagtgcagaatctcaatccccttggatagtatttgctgggtcagcgatcgctttaattgcgaccagtttattaggggtgttaattggttattggttagcccgtcgtttatctccgaaaactttagatatagcggtagctttattgttactaataattacagggttattggtaggagatatattaagtagttaa

SEQ ID NO: 136892 - protein, 119 aa, Crocosphaera watsonii WH 8501
MNASQTTETENQQNSLSEESSKEQRTWSFWTVFSSTFLTIFLAEMGDKTQLATLLISAESQSPWIVFAGSAIALIATSLLGVLIGYWLARRLSPKTLDIAVALLLLIITGLLVGDILSS

SEQ ID NO: 136893 - DNA, 345 bp, Synechococcus sp. RS9917
  CDS (1)..(345): transl_table=11
atgagtgagccctccgtgtccgccggcgacgaggggctgtcgctgagcttcaccgctgtgatgctcagcaccttcaccaccgtctttctggcggaactgggtgacaagacccagctcgccaccctgttgctgtcggcccaatccggacagccctggctcgtgttcgtcggagcggccctcgccctgatcagttccagcctggtgggggtgctggtgggccgttggctctcacgcatcctgccgccggagcggcttgagcagatggccggtctgttgatggtgggtctcggtctgtggctgggcgtgcaggcggtgcaatcgttgctgcaggcggagggcctctga

SEQ ID NO: 136894 - protein, 114 aa, Synechococcus sp. RS9917
MSEPSVSAGDEGLSLSFTAVMLSTFTTVFLAELGDKTQLATLLLSAQSGQPWLVFVGAALALISSSLVGVLVGRWLSRILPPERLEQMAGLLMVGLGLWLGVQAVQSLLQAEGL

SEQ ID NO: 136895 - DNA, 429 bp, Synechococcus sp. WH 5701
  CDS (1)..(429): transl_table=11
atgagcgacctcgtcgatccggatctcagcgctggccaggaggccagcgccatcactgaagccagcttgagccctgaggccagtgccagctccgagccagaaaccccggagtcgtcggattttgtggcggtggccgccaccaccttcaccacggtgtttcttgccgagctgggcgataagacccagctggccgctctgctgctctccgctgaatccggacggcccggcgtggtgttcgccggggccgccctggccctgatctgctccagcctggtgggcgtgctgctggggcgctggctggcggcggtgctgccggcccagcgcctggagcggatctccggcgtcctgatggtgtccctcggcctctggctgggggggcaggccagcctcggcctgctccagcccgtcctcgacttccccaacccctga

SEQ ID NO: 136896 - protein, 142 aa, Synechococcus sp. WH 5701
MSDLVDPDLSAGQEASAITEASLSPEASASSEPETPESSDFVAVAATTFTTVFLAELGDKTQLAALLLSAESGRPGVVFAGAALALICSSLVGVLLGRWLAAVLPAQRLERISGVLMVSLGLWLGGQASLGLLQPVLDFPNP

SEQ ID NO: 136897 - DNA, 330 bp, Synechococcus sp. WH 7805
  CDS (1)..(330): transl_table=11
atgaccgacgccggaagctctcagcgtccaggattcacaaccgttctggtcagtaccttctccaccgtgttcctggcggaacttggggacaagacgcagttggcgacgttgctgctctctgcagaatccggacaaccgtggctggtttttggtggtgccgctctggctctgatctgctcaagcctggtcggcgtgctggtgggacgctggctttcctcagttctgcaacccgaacgcctggaacaaatggcagggctgctgatggtggggctcggactatggctcggatcccaggcgctgcgatcagtcctaggggaccatctcctctga

SEQ ID NO: 136898 - protein, 109 aa, Synechococcus sp. WH 7805
MTDAGSSQRPGFTTVLVSTFSTVFLAELGDKTQLATLLLSAESGQPWLVFGGAALALICSSLVGVLVGRWLSSVLQPERLEQMAGLLMVGLGLWLGSQALRSVLGDHLL

SEQ ID NO: 136899 - DNA, 375 bp, Synechococcus sp. RS9916
  CDS (1)..(375): transl_table=11
atgcctgaggtcgagaccaccaacagagcatccctgtcgccagacaccgttgcgtcaaaagagcaaagccaggggcttggtttcacagccgtgatgctgagcaccttcacaacggtgtttgttgctgagctcggggataaaacccaactggcaacgctgttgctgtcggctcaatccggccaacccttgctggtgttcatcggggcagcctttgccctgatctgctcgagcctggtgggggtgcttgtgggccaatggctgtccaagatcctgccgcccgaacgcttggagcaaatggcaggagtgctgatggtcggattagggctttggctgggatttcaggccctgcagtcgctgatccaacactcgatttga

SEQ ID NO: 136900 - protein, 124 aa, Synechococcus sp. RS9916
MPEVETTNRASLSPDTVASKEQSQGLGFTAVMLSTFTTVFVAELGDKTQLATLLLSAQSGQPLLVFIGAAFALICSSLVGVLVGQWLSKILPPERLEQMAGVLMVGLGLWLGFQALQSLIQHSI

SEQ ID NO: 136901 - DNA, 864 bp, Schizosaccharomyces pombe
  CDS (1)..(864)
atgaaaaatccaataaaatgggcgattatagcggttttgctgtcaaccgtcgtggctaaaaaaatcgttggcgaaggtatggcagacgtgtcagctatcaaacatccagaggaagtgcacccaacaaaccgtgactttcttaggagtttgatcttctctatatctatgatttttggttgtgaaataggagacaagactttcatcgtagctgctcttttggcctttgaaaactctcgattaactgtttttgctgggtcatactcagctctattcatcatgacattattaggagtacttcttgggcacgccgctccattactttttcctagaaagttaacggacattctgggaggtgtcctttttgtgatttttggaattaaaatgcttatggaagcgaaggaagttatggattctaaagaatccatgtctgacgaatttcagaacgtccgcaacgaaatagctgctaatggccccatcgaccaattgttggaggaaggggcagcaccttcccactacactggtcacaggtctcgctctggacatactttaatgtcgcaattaaaatcaaagggacggaacgttatggctaccctgttttctcctttatttataaaggcgtttgcacttacctttgttagtgaatggggagatcgctcccaaatcgctactattgcaatggctgctagtgataatgtttacggtgtattcatgggggctaatgttggtcatgcttgctgtacagctttggcagttatttctggaaaatatatttctaccaagataaaggttcataaagtcatgttcattggaggaatactctttattgcatttggattggtttatttttatcaaggctttttttaa

SEQ ID NO: 136902 - protein, 287 aa, Schizosaccharomyces pombe
MKNPIKWAIIAVLLSTVVAKKIVGEGMADVSAIKHPEEVHPTNRDFLRSLIFSISMIFGCEIGDKTFIVAALLAFENSRLTVFAGSYSALFIMTLLGVLLGHAAPLLFPRKLTDILGGVLFVIFGIKMLMEAKEVMDSKESMSDEFQNVRNEIAANGPIDQLLEEGAAPSHYTGHRSRSGHTLMSQLKSKGRNVMATLFSPLFIKAFALTFVSEWGDRSQIATIAMAASDNVYGVFMGANVGHACCTALAVISGKYISTKIKVHKVMFIGGILFIAFGLVYFYQGFF

SEQ ID NO: 136903 - DNA, 21 bp, Artificial sequence
  primer
atgtccccaccattgccgctg

SEQ ID NO: 136904 - DNA, 20 bp, Artificial sequence
  primer
ctaggcgctgaccacgtccc

SEQ ID NO: 136905 - protein, 77 aa, Artificial sequence
  consensus sequence
  Variant (3)..(3): Xaa in position 3 is any amino acid
  Variant (5)..(5): Xaa in position 5 is any amino acid
  Variant (7)..(7): Xaa in position 7 is any amino acid
  Variant (10)..(10): Xaa in position 10 is any amino acid
  Variant (17)..(17): Xaa in position 17 is any amino acid
  Variant (21)..(22): Xaa in position 21 to 22 is any amino acid
  Variant (24)..(24): Xaa in position 24 is any amino acid
  Variant (26)..(26): Xaa in position 26 is any amino acid
  Variant (27)..(27): Xaa in position 27 is any or no amino acid
  Variant (29)..(30): Xaa in position 29 to 30 is any amino acid
  Variant (33)..(33): Xaa in position 33 is any amino acid
  Variant (35)..(37): Xaa in position 35 to 37 is any amino acid
  Variant (40)..(42): Xaa in position 40 to 42 is any amino acid
  Variant (45)..(45): Xaa in position 45 is any amino acid
  Variant (49)..(49): Xaa in position 49 is any amino acid
  Variant (51)..(51): Xaa in position 51 is any amino acid
  Variant (53)..(58): Xaa in position 53 to 58 is any amino acid
  Variant (60)..(61): Xaa in position 60 to 61 is any amino acid
  Variant (63)..(76): Xaa in position 63 to 76 is any amino acid
TFXTXFXAEXGDKTQLXTLLXXAXSXXPXXVFXGXXXALXXXSLXGVLXGXWXXXXXXPXXLXXXXXXXXXXXXXXL

SEQ ID NO: 136906 - protein, 29 aa, Artificial sequence
  protein pattern
  Variant (3)..(3): Xaa in position 3 is any or no amino acid
  Variant (5)..(5): Xaa in position 5 is any amino acid
  Variant (6)..(6): Xaa in position 6 is any or no amino acid
  Variant (8)..(8): Xaa in position 8 is Ile, Leu or Val
  Variant (11)..(11): Xaa in position 11 is Ile, Leu or Met
  Variant (17)..(17): Xaa in position 17 is Leu or Val
  Variant (18)..(18): Xaa in position 18 is Ala, Ser or Thr
  Variant (19)..(19): Xaa in position 19 is Ala or Thr
  Variant (22)..(22): Xaa in position 22 is Ile, Leu or Met
  Variant (23)..(23): Xaa in position 23 is Ser or Thr
  Variant (24)..(24): Xaa in position 24 is Ala or Val
  Variant (25)..(25): Xaa in position 25 is Glu or Gln
  Variant (27)..(28): Xaa in position 27 to 28 is any amino acid
TFXTXXFXAEXGDKTQXXXLLXXXXSXXP

SEQ ID NO: 136907 - DNA, 123 bp, Synechocystis sp.
  CDS (1)..(123): transl_table=11
atggacggttcctacgctgcatcttacctgccttggattttgattcctatggtgggttggttatttcccgctgtgaccatggggttgcttttcattcacattgagagtgaaggcgaaggttaa

SEQ ID NO: 136908 - protein, 40 aa, Synechocystis sp.
MDGSYAASYLPWILIPMVGWLFPAVTMGLLFIHIESEGEG

SEQ ID NO: 136909 - DNA, 111 bp, Physcomitrella patens subsp. patens
  CDS (1)..(111): transl_table=11
atgacagcttcttatttaccttcgatttttgtgcctttaataggtttagtttttccagcaattacaatggcttctttatttatctatattgaacaagacgaaataatataa

SEQ ID NO: 136910 - protein, 36 aa, Physcomitrella patens subsp. patens
MTASYLPSIFVPLIGLVFPAITMASLFIYIEQDEII

SEQ ID NO: 136911 - DNA, 111 bp, Chlorokybus atmophyticus
  CDS (1)..(111): transl_table=11
atgatcgcttcttatttaccccctatattagtacccttaattggtttagtttttcctgctattactatggcttccatttttttatatattgaacaagacgaaattagttag

SEQ ID NO: 136912 - protein, 36 aa, Chlorokybus atmophyticus
MIASYLPPILVPLIGLVFPAITMASIFLYIEQDEIS

SEQ ID NO: 136913 - DNA, 117 bp, Synechococcus elongatus PCC 7942
  CDS (1)..(117): transl_table=11
atgtctggtgactttgctgctgccttcttgccgaccatttttgtgccgctcgtgggtttgggtttacctgcagtcctcatgagcttgctcttcacttacattgagtcggaagcctag

SEQ ID NO: 136914 - protein, 38 aa, Synechococcus elongatus PCC 7942
MSGDFAAAFLPTIFVPLVGLGLPAVLMSLLFTYIESEA

SEQ ID NO: 136915 - DNA, 117 bp, Trichodesmium erythraeum IMS101
  CDS (1)..(117): transl_table=11
atgactggttcttatgcagcatcttacttaccttggattttaattcctgtagttacttggttaatgccaattatagttatgggtttattgtttgtctatattgagagcgatgcctag

SEQ ID NO: 136916 - protein, 38 aa, Trichodesmium erythraeum IMS101
MTGSYAASYLPWILIPVVTWLMPIIVMGLLFVYIESDA

SEQ ID NO: 136917 - DNA, 111 bp, Angiopteris lygodiifolia
  CDS (1)..(111)
atgacagcttcttacttaccttccatttttgtacctttagtaggtttagtgtttccagcaattacaatggcttctttgtctatatatattgaacaagatgaaatagtataa

SEQ ID NO: 136918 - protein, 36 aa, Angiopteris lygodiifolia
MTASYLPSIFVPLVGLVFPAITMASLSIYIEQDEIV

SEQ ID NO: 136919 - DNA, 175 bp, Anthoceros formosae
  CDS (46)..(156)
gacttttacttattaaaaaataaaattctttaaggttactcttttatgacagcctcttacttaccttccattcttgtgcctctagtagggttagtttttccagcaattacactggcttctttgttcatatatatcgaacaagacgaaattgtatagaatttaattaataagtttt

SEQ ID NO: 136920 - protein, 36 aa, Anthoceros formosae
MTASYLPSILVPLVGLVFPAITLASLFIYIEQDEIV

SEQ ID NO: 136921 - DNA, 111 bp, Chaetosphaeridium globosum
  CDS (1)..(111)
atggctgcatcttttttaccttcaatcttagtacctttagtagggttagtttttcctgcaattgcaattgcttcattgtttatttatattgaacaagatgaaattatttaa

SEQ ID NO: 136922 - protein, 36 aa, Chaetosphaeridium globosum
MAASFLPSILVPLVGLVFPAIAIASLFIYIEQDEII

SEQ ID NO: 136923 - DNA, 111 bp, Marchantia polymorpha
  CDS (1)..(111)
atgacagcttcttatttaccttctatttttgttcctttagttggattaatttttcctgctattactatggcttcattatttatatatattgaacaagatgaaattttataa

SEQ ID NO: 136924 - protein, 36 aa, Marchantia polymorpha
MTASYLPSIFVPLVGLIFPAITMASLFIYIEQDEIL

SEQ ID NO: 136925 - DNA, 111 bp, Mesostigma viride
  CDS (1)..(111)
atgatcgcttcctatttaccttctattttagtacctttagtaggtttagtgtttccagcaattgcaatggcttcactgtttttatatattgaacaagaagaaattagttaa

SEQ ID NO: 136926 - protein, 36 aa, Mesostigma viride
MIASYLPSILVPLVGLVFPAIAMASLFLYIEQEEIS

SEQ ID NO: 136927 - DNA, 111 bp, Oltmannsiellopsis viridis
  CDS (1)..(111)
atgacagctgcttatttaccatcaattttagtgccattagtaggtctagttttccctgcaattgccatggcatctcttttcctatatattgaagaacaacaaattagttaa

SEQ ID NO: 136928 - protein, 36 aa, Oltmannsiellopsis viridis
MTAAYLPSILVPLVGLVFPAIAMASLFLYIEEQQIS

SEQ ID NO: 136929 - DNA, 111 bp, Ostreococcus tauri
  CDS (1)..(111)
atggctgcatcattattaccttcaatctttgtacctcttgtaggattagttttcccggctgttgcaatggcatctctttttctttacatcgagaaagaacaggtgagctaa

SEQ ID NO: 136930 - protein, 36 aa, Ostreococcus tauri
MAASLLPSIFVPLVGLVFPAVAMASLFLYIEKEQVS

SEQ ID NO: 136931 - DNA, 111 bp, Pseudendoclonium akinetum
  CDS (1)..(111)
atggcagcttcatttttaccttcgattcttgtacctttagttggtttaattttcccagctattgcgatgacatccctttttatttatattgaaaaacaagaagtaaattaa

SEQ ID NO: 136932 - protein, 36 aa, Pseudendoclonium akinetum
MAASFLPSILVPLVGLIFPAIAMTSLFIYIEKQEVN

SEQ ID NO: 136933 - DNA, 111 bp, Psilotum nudum
  CDS (1)..(111)
atgacagcttcttacctaccttccatttttgtgcctttagtaggcttagtttttccagcaattacaatggcttctttgtttatatatattgaacaagatgaaattgtctga

SEQ ID NO: 136934 - protein, 36 aa, Psilotum nudum
MTASYLPSIFVPLVGLVFPAITMASLFIYIEQDEIV

SEQ ID NO: 136935 - DNA, 111 bp, Staurastrum punctulatum
  CDS (1)..(111)
atgagtgcttcctatctaccatctattttagttcccctagtaggattagtatttccagctgtaactatggcttctttgttcttatatattgaacaagatgaaattgtttaa

SEQ ID NO: 136936 - protein, 36 aa, Staurastrum punctulatum
MSASYLPSILVPLVGLVFPAVTMASLFLYIEQDEIV

SEQ ID NO: 136937 - DNA, 111 bp, Zygnema circumcarinatum
  CDS (1)..(111)
atgagtgcttcttatctaccttcaattttggttcctttggtcggtttggtatttccagctataactatggtttctctatttttgtacattgagcaagatgagattgtataa

SEQ ID NO: 136938 - protein, 36 aa, Zygnema circumcarinatum
MSASYLPSILVPLVGLVFPAITMVSLFLYIEQDEIV

SEQ ID NO: 136939 - DNA, 20 bp, Artificial sequence
  primer
atggacggttcctacgctgc

SEQ ID NO: 136940 - DNA, 21 bp, Artificial sequence
  primer
ttaaccttcgccttcactctc

SEQ ID NO: 136941 - protein, 31 aa, Artificial sequence
  consensus sequence
  Variant (2)..(2): Xaa in position 2 is any amino acid
  Variant (5)..(5): Xaa in position 5 is any amino acid
  Variant (8)..(8): Xaa in position 8 is any amino acid
  Variant (10)..(10): Xaa in position 10 is any amino acid
  Variant (17)..(17): Xaa in position 17 is any amino acid
  Variant (21)..(22): Xaa in position 21 to 22 is any amino acid
  Variant (24)..(24): Xaa in position 24 is any amino acid
  Variant (28)..(28): Xaa in position 28 is any amino acid
MXASXLPXIXVPLVGLXFPAXXMXSLFXYIE

SEQ ID NO: 136942 - protein, 32 aa, Artificial sequence
  protein pattern
  Variant (2)..(2): Xaa in position 2 is any amino acid
  Variant (5)..(5): Xaa in position 5 is any amino acid
  Variant (7)..(7): Xaa in position 7 is Phe or Leu
  Variant (8)..(8): Xaa in position 8 is Ile or Val
  Variant (10)..(10): Xaa in position 10 is Leu or Met
  Variant (11)..(11): Xaa in position 11 is Ile or Val
  Variant (13)..(13): Xaa in position 13 is any or no amino acid
  Variant (15)..(15): Xaa in position 15 is any or no amino acid
  Variant (19)..(19): Xaa in position 19 is Ile or Val
  Variant (20)..(20): Xaa in position 20 is Ala or Thr
  Variant (21)..(21): Xaa in position 21 is Ile, Leu or Met
  Variant (22)..(22): Xaa in position 22 is Ala, Gly, Thr or Val
  Variant (23)..(23): Xaa in position 23 is any amino acid
  Variant (24)..(24): Xaa in position 24 is Ile or Leu
  Variant (25)..(25): Xaa in position 25 is any amino acid
  Variant (26)..(26): Xaa in position 26 is Ile or Leu
  Variant (27)..(27): Xaa in position 27 is His or Tyr
  Variant (30)..(30): Xaa in position 30 is any amino acid
  Variant (31)..(31): Xaa in position 31 is any or no amino acid
SXLPXIXXPXXGXLXFPAXXXXXXXXXIEXXE

SEQ ID NO: 136943 - DNA, 1374 bp, Saccharomyces cerevisiae; identical to SEQ ID NO: 57186
  CDS (1)..(1374)

SEQ ID NO: 136944 - protein, 457 aa, Saccharomyces cerevisiae; identical to SEQ ID NO: 57187

SEQ ID NO: 136945 - DNA, 1600 bp, Oryza sativa
  CDS (90)..(1445)
attgttcagtcttcttcttcaaaccctcacccatcccctcacacccattgcacctctacaaacgtcctccttaccaccacacatatacaatggccgagcccgagtttgagcaagcctacaaggagctcgcctccacactcgagtcgtccacccttttcgaaaagaaccccgagtacaggaaggccctcgaggttgtttccgtacccgagcgtgttatccagttccgcgttgtctgggaggacgactcgggcaagtgccaggtgaacaagggctaccgcgtgcagttcaactctgccctcggtccctacaagggcggtctccgtctgcaccccactgtaaacctctccatcttgaagttcctcggcttcgagcagatattcaagaatgcccttactggcctcaacatgggcggtggaaagggtggtgccgacttcgaccccaagggcaagtcagacaatgagatccgcaagttttgcgttgccttcatgactgagctttccaagcacatcggtgccgataccgatgttcctgccggtgatatcaacgtgggaggccgcgaaatcggctacatgttcggtcaatatcgccgtctgcgcaaccagtgggagggtgtcttgactggcaagggcctcaactggggtggaagcttgatccgtcccgaagctactggatacggtcttgtctactacgttgaccatatgatcaactatgcctctggaggcaaggagtccttcaagggcaagaaggtggccatctccggctccggcaacgtggctcaatacgccgcccttaaggtcattgaacttggcggtactgtcgtctccctctctgacagcaagggctctctgattgccaccgagggcaagggcttcacacccgaggacatcagccagattgccgccttgaagctgaagcgtcaagccctgactgcgctcgagggccactcttacaactacatcgagggtgcccgaccctggaagcacgttggcaacgtcgatgttgcccttccctcggcgacgcagaacgaggtctcccaggatgaagctgaggctctcattgccgcgggctgcaaattcatcgctgagggttccaacatgggctgcacgcaggaggccatcgatgccttcgaaaaccaccgcaagtcgaacaagggctcctccatctggtacgctccgggcaaggctgctaatgctggtggcgtcgccgtttctgggcttgagatggcccagaactcccagcgactatcctggaccaacgaggaggtcgatgctaagctcgctaagatcatgaaggactgcttcgagaactgcctcgccaccgccaaggaatacatcacacctgccgagggcgagttcccgtcactcgttgccggtgccaacgttgcaggcttcaagaaggtcgccgctgccatgcacgaccaaggcgactggtggggtactgcttagaggataggctggcggcgattgttttatagcatattggggggtagacatggcgaatcggtcatgcgcctgggataccacctttgcattcagcgcaagagctgaaggtttttgtacatactagataccatcatgaatttacggcacgatacacacct

SEQ ID NO: 136946 - protein, 451 aa, Oryza sativa
MAEPEFEQAYKELASTLESSTLFEKNPEYRKALEVVSVPERVIQFRVVWEDDSGKCQVNKGYRVQFNSALGPYKGGLRLHPTVNLSILKFLGFEQIFKNALTGLNMGGGKGGADFDPKGKSDNEIRKFCVAFMTELSKHIGADTDVPAGDINVGGREIGYMFGQYRRLRNQWEGVLTGKGLNWGGSLIRPEATGYGLVYYVDHMINYASGGKESFKGKKVAISGSGNVAQYAALKVIELGGTVVSLSDSKGSLIATEGKGFTPEDISQIAALKLKRQALTALEGHSYNYIEGARPWKHVGNVDVALPSATQNEVSQDEAEALIAAGCKFIAEGSNMGCTQEAIDAFENHRKSNKGSSIWYAPGKAANAGGVAVSGLEMAQNSQRLSWTNEEVDAKLAKIMKDCFENCLATAKEYITPAEGEFPSLVAGANVAGFKKVAAAMHDQGDWWGTA

SEQ ID NO: 136947 - DNA, 1464 bp, Corynebacterium glutamicum
  CDS (101)..(1444): transl_table=11
tacatggtgccctcaatgggaaccaccaacatcactaaatggcccaggtacacactttaaaatcgtgcgcgcatgcagccgagatgggaacgaggaaatcatgacagttgatgagcaggtctctaactattacgacatgcttctgaagcgcaatgctggcgagcctgaatttcaccaggcagtggcagaggttttggaatctttgaagatcgtcctggaaaaggaccctcattacgctgattacggtctcatccagcgcctgtgcgagcctgagcgtcagctcatcttccgtgtgccttgggttgatgaccagggccaggtccacgtcaaccgtggtttccgcgtgcagttcaactctgcacttggaccatacaagggcggcctgcgcttccacccatctgtaaacctgggcattgtgaagttcctgggctttgagcagatctttaaaaactccctaaccggcctgccaatcggtggtggcaagggtggatccgacttcgaccctaagggcaagtccgatctggaaatcatgcgtttctgccagtccttcatgaccgagctgcaccgccacatcggtgagtaccgcgacgttcctgcaggtaacatcggagttggtggccacgagatcggttacctgtttggccactaccgtcgcatggctaaccagcacgagtccggcgttttgaccggtaagggcctgacctggggtggatccctggtccgcaccgaggcaactggctacggctgcgtttacttcgtgagtgaaatgatcaaggctaagggcgagagcatcagcggccagaagatcatcgtttccggttccggcaacgtagcaacctacgcgattgaaaaggctcaggaactcggcgcaaccgttattggtttctccgattccagcggttgggttcatacccctaacggcgttgacgtggctaagctccgcgaaatcaaggaagttcgtcgcgcacgcgtatccgtgtacgccgacgaagttgaaggcgcaacctaccacaccgacggttccatctgggatctcaagtgcgatatcgctcttccttgtgcaactcagaacgagctcaacggcgagaacgctaagactcttgcagacaacggctgccgtttcgttgctgaaggcgcgaacatgccttccacccctgaggctgttgaggtcttccgtgagcgcgacatccgcttcggaccaggcaaggcagctaacgctggtggcgttgcaacctccgctctggagatgcagcagaacgcttcgcgcgattcctggagcttcgagtacaccgacgagcgcctccaggtgatcatgaagaacatcttcaagacctgtgcagagaccgcagcagagtatggacacgagaacgattacgttgtcggcgctaacattgctggcttcaagaaggtagctgacgcgatgctggcacagggcgtcatctaagacccctgcgctttacttaa

SEQ ID NO: 136948 - protein, 447 aa, Corynebacterium glutamicum
MTVDEQVSNYYDMLLKRNAGEPEFHQAVAEVLESLKIVLEKDPHYADYGLIQRLCEPERQLIFRVPWVDDQGQVHVNRGFRVQFNSALGPYKGGLRFHPSVNLGIVKFLGFEQIFKNSLTGLPIGGGKGGSDFDPKGKSDLEIMRFCQSFMTELHRHIGEYRDVPAGNIGVGGHEIGYLFGHYRRMANQHESGVLTGKGLTWGGSLVRTEATGYGCVYFVSEMIKAKGESISGQKIIVSGSGNVATYAIEKAQELGATVIGFSDSSGWVHTPNGVDVAKLREIKEVRRARVSVYADEVEGATYHTDGSIWDLKCDIALPCATQNELNGENAKTLADNGCRFVAEGANMPSTPEAVEVFRERDIRFGPGKAANAGGVATSALEMQQNASRDSWSFEYTDERLQVIMKNIFKTCAETAAEYGHENDYVVGANIAGFKKVADAMLAQGVI

SEQ ID NO: 136949 - DNA, 1344 bp, Corynebacterium thermoaminogenes
  CDS (1)..(1344): transl_table=11
atgactgtagatgagcaggtctccaactactacgacatgctgctgaagcgcaacgccggggaacctgagttccaccaggctgtcgcggaggttctcgaatctctgaagatcgtcctggagaaggacccgcactacgccgactacggtctgatccagcgtctctgcgaaccggaacgccagctgatcttccgtgtgccctgggtggatgacaacggtcaggtgcacgtcaaccgtggtttccgtgtccagttcaactccgcactcggcccgtacaagggtggtctgcgtttccacccctccgtcaacctcggcatcgtcaagttcctcggcttcgagcagatcttcaagaactccctcaccggtctgccgatcggtggcggcaagggtggttccgacttcgacccgaagggcaagtccgagctggagatcatgcgcttctgccagtccttcatgaccgagctgcaccgccacatcggcgagtaccgggatgtcccggccggtgacatcggagtcggtggccgcgagatcggttacctcttcggccactaccgccgtctggccaaccagcacgagtccggtgtgctcaccggcaagggcctgacctggggtggttccctggtccgcaccgaggccaccggcttcggcaccgtctacttcgtccaggagatgatcaaggcggaaggggagaccctcgagggcaagaaggtcatcgtctccggttccggcaacgtggccacctacgccatccagaaggtgcaggaactgggtgcggttgtggtcggcttctccgactccagcggctgggtctccaccccgaacggtgttgacgtggccaagctgcgtgagatcaaggaggtccgtcgtgcacgcgtgtcctcctacgccgacgaggtggagggtgcggagtaccacaccgacggctccatctgggatctgaccgccgacatcgcgctgccctgcgccacccagaacgaactggacggcgacaacgcccgcaccctcgcggacaacggctgccgcttcgtggcggagggcgccaacatgccctccacccccgaggccatcgacgtcttccgtgagcgtggtgttctcttcgggccgggcaaggctgccaacgccggtggcgtggccacctccgccctggagatgcagcagaacgcctcccgtgattcctggagcttcgagtacaccgatgagcgtctccaccgcatcatgaagaacatcttcaagtcctgcgccgataccgccaaggagtacggccacgagaagaactacgtggtcggtgcgaacatcgccggattcaagaaggtcgctgacgccatgctcgcccagggtgtcatctaa

SEQ ID NO: 136950 - protein, 447 aa, Corynebacterium thermoaminogenes
MTVDEQVSNYYDMLLKRNAGEPEFHQAVAEVLESLKIVLEKDPHYADYGLIQRLCEPERQLIFRVPWVDDNGQVHVNRGFRVQFNSALGPYKGGLRFHPSVNLGIVKFLGFEQIFKNSLTGLPIGGGKGGSDFDPKGKSELEIMRFCQSFMTELHRHIGEYRDVPAGDIGVGGREIGYLFGHYRRLANQHESGVLTGKGLTWGGSLVRTEATGFGTVYFVQEMIKAEGETLEGKKVIVSGSGNVATYAIQKVQELGAVVVGFSDSSGWVSTPNGVDVAKLREIKEVRRARVSSYADEVEGAEYHTDGSIWDLTADIALPCATQNELDGDNARTLADNGCRFVAEGANMPSTPEAIDVFRERGVLFGPGKAANAGGVATSALEMQQNASRDSWSFEYTDERLHRIMKNIFKSCADTAKEYGHEKNYVVGANIAGFKKVADAMLAQGVI

SEQ ID NO: 136951 - DNA, 1383 bp, Aspergillus awamori
  CDS (1)..(1383)
atgtctaaccttcctcacgagcccgagttcgagcaggcctacaaggagcttgcctcgacccttgagaactccaccctcttccagaagaaccccgaataccgcaaggcccttgctgtcgtctccgtccccgagcgtgtcatccagttccgtgtcgtctgggaggatgatgccggcaacgtccaggtcaaccgcggtttccgtgtccagttcaacagcgccctcggtccctacaagggtggtcttcgtttccacccctccgtcaacttgtccatcctcaagttccttggtttcgagcagatcttcaagaatgctctcactggcctgaacatgggtggtggtaagggtggttccgacttcgaccccaagggcaagtccgacaacgagatccgtcgcttctgtgtttccttcatgaccgagctctgcaagcacatcggtgccgacactgatgttcccgctggtgacatcggtgtcaccggtcgtgaggtcggtttcctcttcggccagtaccgcaagatccgcaaccagtgggagggtgttctcaccggtaagggtggcagctggggtggttccctcatccgccctgaggccaccggttacggtgttgtctactacgtcgagcacatgattgctcacgccaccaacggccaggagtccttcaagggcaagcgcgttgccatctccggttccggtaacgttgcccagtacgccgccctcaaggtcattgagctcggcggttccgtcgtctccctgagcgacacgcagggctccctcatcatcaacggcgagggtagcttcacccccgaggagatcgagctcatcgctcagaccaaggtcgagcgcaacgagctcgccagcatcgtcggtgctgctcccttcagcgacgccaacaagttcaagtacattgctggtgcccgcccctgggttcacgtcggcaaggtcgacgtcgctctcccctccgctacccagaacgaagtttccggcgaggaggcccaggtcctcatcaacgctggctgcaagttcatcgccgagggttccaacatgggttgcacccaggaggccatcgacaccttcgaggcccaccgtaccgccaacgctggcgcggctgccatctggtacgcccccggtaaggccgccaacgccggtggtgtcgctgtctccggtctggagatggctcagaactctgcccgcctcagctggacttctgaggaggttgatgcccgtcttaaggacatcatgcgcgactgcttcaagaacggtcttgagactgctcaggagtacgccacccccgctgagggtgtcctgccttccctggtgaccggatccaacattgccggtttcaccaaggtggctgccgccatgaaggaccagggtgactggtggtaa

SEQ ID NO: 136952 - protein, 460 aa, Aspergillus awamori
MSNLPHEPEFEQAYKELASTLENSTLFQKNPEYRKALAVVSVPERVIQFRVVWEDDAGNVQVNRGFRVQFNSALGPYKGGLRFHPSVNLSILKFLGFEQIFKNALTGLNMGGGKGGSDFDPKGKSDNEIRRFCVSFMTELCKHIGADTDVPAGDIGVTGREVGFLFGQYRKIRNQWEGVLTGKGGSWGGSLIRPEATGYGVVYYVEHMIAHATNGQESFKGKRVAISGSGNVAQYAALKVIELGGSVVSLSDTQGSLIINGEGSFTPEEIELIAQTKVERNELASIVGAAPFSDANKFKYIAGARPWVHVGKVDVALPSATQNEVSGEEAQVLINAGCKFIAEGSNMGCTQEAIDTFEAHRTANAGAAAIWYAPGKAANAGGVAVSGLEMAQNSARLSWTSEEVDARLKDIMRDCFKNGLETAQEYATPAEGVLPSLVTGSNIAGFTKVAAAMKDQGDWW

SEQ ID NO: 136953 - DNA, 1922 bp, Oryza sativa
  CDS (229)..(1584)
  misc_feature (39)..(39): s is g or c
  misc_feature (475)..(475): y is t or c
  misc_feature (503)..(503): y is t or c
  misc_feature (592)..(592): n is a, g, c or t
  misc_feature (1111)..(1111): n is a, g, c or t
ctgacgacctttgcctctagatgcatgctcgagcggccscagtgtgatggatatctgcagaattcgcccttgccgctctagaactagtggatcccccgggctgcaggaattcggcacgaggacacgtctcgaaaagtgtatcgaacctcttcgcaatcttgctcctagaaggaatctatttatcaatcaccactctcgacacacacatcccaaatgcagctgaacaccatgtctcaccttccccaagagcccgagttcgagcaggcttatggcgagctctgctctgccctcgagaacagctccctcttcaacgagcaccccgagtatcgtactgcccttgctgtggcccgcatccctgagcgtgtcattcagttccgtgtcgtctggaacgacgacaagggtaacctccaggtcaaccgcggttaccgcgtccagttcaacggtgcccttggcccctacaagggcggtcttcgaytccaccccagcgtcaacctgtccattcycaagttccttggtttcgagcaaatcttcaagaatgccctgactggcctcaacatgggtggtggcaagggtggtgccgacttcgaccccnaaggcaagtccgatgccgagattcgacgattttgccaggctttcatgactgagctgtccaagcacattggtgctgagactgatgtccctgctggtgacatcggtgtcggtggccgagagatcggttacctctttggcgcctaccgcaagcttcgcaaccgttgggagggtgtcctcactggaaagggtctttcatggggtggtagcttgatccgacctgaggctactggttacggtctcgtctactatgttgagtacatgctcaagcacgccaaccgtggcaccttcgagggcaagcgtgttgctctgtccggctccggaaatgtcgcccagtacgctgctctcaagatcatcgagctcggtggctccgttgtctctctttccgactccaagggtgctctcgtcgccaaggagggttcttccttcacacccgagcaaattcacaacattgctgccctcaagatcaagcaccaagccctgaccactttcgagcacgatgggcagttcacatggattgaanggtgccgtccttgggtccatgttggcaaggtcgacattgccctccccagtgctactcagaacgaggtcagcaaggaggaggcccaggctcttgttgacgctggcgccttcatcgtcgctgagggttccaacatgggctgcactgctgaggctattgatgtcttcgaggcccaccgcaaggagaagggtgctgatgctctctggtacgcccctggcaaggcctccaactgtggtggtgtcgctgtttccggccttgagatggctcagaacagccagcgtatccagtggaccgagaaggaggttgatgaccgcctcaaggccattatgaaggacgcctttgtcgccggtctcgagactgctcagaagtacgttgaggccaaggagggtgagcttcccagcttgattgctggtagcaacatcgccggcttcatcaaggttgctgaggccatgcacgaccagggtgactggttctaaatggacagttaaggatggctggagcgagataagagacctatcagagagaccgcaatacccgagctgggctcacatcaagggtctctgatcttctcaccatgattatctcgcccagagtcgacctatttctgcacgaaaaggagtttcattcttggctactatcagggcatgcatactgttgggcgttggcggggtttcaagaaggggattacttttgtttttcttcacgatagacgtgggcctggatcttatatagcttttttcacctttttccttttactttttctccttttcagcccgatagaatgaggaatgaaacaaaatgctttgattcaaaa

SEQ ID NO: 136954 - protein, 451 aa, Oryza sativa
  misc_feature (83)..(83): The Xaa at location 83 stands for Leu, or Phe.
  misc_feature (92)..(92): The Xaa at location 92 stands for Leu, or Pro.
  misc_feature (122)..(122): The Xaa at location 122 stands for Stop, Gln, Glu, or Lys.
  misc_feature (295)..(295): The Xaa at location 295 stands for Arg, Gly, or Trp.
MSHLPQEPEFEQAYGELCSALENSSLFNEHPEYRTALAVARIPERVIQFRVVWNDDKGNLQVNRGYRVQFNGALGPYKGGLRXHPSVNLSIXKFLGFEQIFKNALTGLNMGGGKGGADFDPXGKSDAEIRRFCQAFMTELSKHIGAETDVPAGDIGVGGREIGYLFGAYRKLRNRWEGVLTGKGLSWGGSLIRPEATGYGLVYYVEYMLKHANRGTFEGKRVALSGSGNVAQYAALKIIELGGSVVSLSDSKGALVAKEGSSFTPEQIHNIAALKIKHQALTTFEHDGQFTWIEXCRPWVHVGKVDIALPSATQNEVSKEEAQALVDAGAFIVAEGSNMGCTAEAIDVFEAHRKEKGADALWYAPGKASNCGGVAVSGLEMAQNSQRIQWTEKEVDDRLKAIMKDAFVAGLETAQKYVEAKEGELPSLIAGSNIAGFIKVAEAMHDQGDWF

SEQ ID NO: 136955 - DNA, 1377 bp, Listeria monocytogenes
  CDS (1)..(1377): transl_table=11
atggcacaaacatccactatccaaaacgacacaaaggcagccgaagaatacgcagctcgagtgtttgaaacaattaaacaacggaatcctggcgaaacggaattccaccaagcagttgaagaattcttaaactctgttatcccagcccttgcaaaagaacctaaatacgaagcaaatggcattttagaacagttaacagaacccgaacgccttatcagtttccgagttccatgggtggatgattctggcacagtacacgtaaatcgcggttaccgggtccaattcaatagcgcaattggtccatataaaggtggtcttcgtttccacccttctgtaacaggaagcatcgtcaaattcctcggttttgaacaaatcttcaaaaactccctaactggcttaccaatcggtggcggtaaaggtggctctgactttgatccaaaaggaaaatcagactcagaagtaatgcgtttctgccaaagttttatgactgaactacaaaaacatatcggcccagatacagatgttcctgctggtgatatcggagttggcggtcgtgaaatcggctacttattcggtcaatacaaacgtcttcgcggcgcttatgatgccggtacaattacaggtaaaggcctttcttacggcggaagtttagctcgtacagaagcaacaggttacggtcttgtttatttcaccgttgaaatgttagaagcagctggtgaaaccattcgcggcaaaaaaatcgtcgtttctggttcaggtaacgttgccatttatgctatcgaaaaagcacacgaattaggtgctaaagtagttgcatgtagcgactctgctggttttgtttatgacaaagaaggtatcaaagtagagaccgtgaaacaattaaaagaagtagaacgcaaacgcattagcgaatacacaaccattcatccatctgcagaatattacgcaggcggcgacgtatggtccgttccatgtgatatcgcactaccatgtgcaactcaaaatgaaatcaatgctgatcaagcccgagcgcttgtaaaaaatggtgttatcgctgttgcagaaggcgcaaacatgccttctacccttgatgcagtggatatttaccacgaaaataaagttctattcggtcctgcaaaagctgccaatgctggtggtgttgccgtatcagcacttgaaatggcacaaaacagcacacgtatgagctggactttccaaacagtcgacgaacatttacaaaacatcatgaaagatatttataaaaattcaagcaatgctgcaagcgagtatggcgcacctggtaaccttgttatcggcgcaaatatcgccggattcctcaaagtagcagatacaatgatttctcaaggtattatttaa

SEQ ID NO: 136956 - protein, 458 aa, Listeria monocytogenes
MAQTSTIQNDTKAAEEYAARVFETIKQRNPGETEFHQAVEEFLNSVIPALAKEPKYEANGILEQLTEPERLISFRVPWVDDSGTVHVNRGYRVQFNSAIGPYKGGLRFHPSVTGSIVKFLGFEQIFKNSLTGLPIGGGKGGSDFDPKGKSDSEVMRFCQSFMTELQKHIGPDTDVPAGDIGVGGREIGYLFGQYKRLRGAYDAGTITGKGLSYGGSLARTEATGYGLVYFTVEMLEAAGETIRGKKIVVSGSGNVAIYAIEKAHELGAKVVACSDSAGFVYDKEGIKVETVKQLKEVERKRISEYTTIHPSAEYYAGGDVWSVPCDIALPCATQNEINADQARALVKNGVIAVAEGANMPSTLDAVDIYHENKVLFGPAKAANAGGVAVSALEMAQNSTRMSWTFQTVDEHLQNIMKDIYKNSSNAASEYGAPGNLVIGANIAGFLKVADTMISQGII

SEQ ID NO: 136957 - DNA, 1335 bp, Neisseria meningitidis serogroup B
  CDS (1)..(1335): transl_table=11
atgactgacctgaacaccctgtttgccaacctcaaacaacgcaatcccaatcaggagccgttccatcaggcggttgaagaagtcttcatgagtctcgatccgtttttggcaaaaaatccgaaatacacccagcaaagcctgctggaacgcatcgtcgaacccgaacgcgtcgtgatgttccgcgtaacctggcaggacgataaagggcaagtccaagtcaaccggggctaccgcgtgcaaatgagttccgccatcggtccttacaaaggcggcctgcgcttccatccgaccgtcgatttgggcgtattgaaattcctcgcttttgaacaagtgttcaaaaacgccttgaccaccctgcctatgggcggcggcaaaggcggttccgacttcgaccccaaaggcaaatccgatgccgaagtaatgcgcttctgccaagcctttatgaccgaactctaccgccacatcggcgcggacaccgatgttccggccggcgacatcggcgtaggcgggcgcgaaatcggctacctgttcggacaatacaaaaaaatccgcaacgagttttcttccgtcctgaccggcaaaggtttggaatggggcggcagcctcatccgtcccgaagcgaccggctacggctgcgtctatttcgcccaagcgatgctgcaaacccgcaacgatagttttgaaggcaaacgcgtcctgatttccggctccggcaatgtggcgcaatacgccgccgaaaaagccatccaactgggtgcgaaagtactgaccgtttccgactccaacggcttcgtcctcttccccgacagcggtatgaccgaagcgcaactcgccgccttgatcgaattgaaagaagtccgccgcgaacgcgttgccacctacgccaaagagcaaggtctgcaatactttgaaaaacaaaaaccgtggggcgtcgccgccgaaatcgccctgccctgcgcgacccagaacgaattggacgaagaagccgccaaaaccctgttggcaaacggctgctacgtcgttgccgaaggtgcgaatatgccgtcgactttgggcgcggtcgagcaatttatcaaagccggcatcctctacgccccgggaaaagcctccaatgccggcggcgtggcaacttcaggtttggaaatgagccaaaacgccatccgcctgtcttggactcgtgaagaagtcgaccaacgcctgttcggcatcatgcaaagcatccacgaatcctgtctgaaatacggcaaagtcggcgacacagtaaactacgtcaatggtgcgaacattgccggtttcgtcaaagttgccgatgcgatgctggcgcaaggcttctaa

SEQ ID NO: 136958 - protein, 444 aa, Neisseria meningitidis serogroup B
MTDLNTLFANLKQRNPNQEPFHQAVEEVFMSLDPFLAKNPKYTQQSLLERIVEPERVVMFRVTWQDDKGQVQVNRGYRVQMSSAIGPYKGGLRFHPTVDLGVLKFLAFEQVFKNALTTLPMGGGKGGSDFDPKGKSDAEVMRFCQAFMTELYRHIGADTDVPAGDIGVGGREIGYLFGQYKKIRNEFSSVLTGKGLEWGGSLIRPEATGYGCVYFAQAMLQTRNDSFEGKRVLISGSGNVAQYAAEKAIQLGAKVLTVSDSNGFVLFPDSGMTEAQLAALIELKEVRRERVATYAKEQGLQYFEKQKPWGVAAEIALPCATQNELDEEAAKTLLANGCYVVAEGANMPSTLGAVEQFIKAGILYAPGKASNAGGVATSGLEMSQNAIRLSWTREEVDQRLFGIMQSIHESCLKYGKVGDTVNYVNGANIAGFVKVADAMLAQGF

SEQ ID NO: 136959 - DNA, 1665 bp, Bombyx mori; identical to SEQ ID NO: 56910
  CDS (1)..(1665)

SEQ ID NO: 136960 - protein, 554 aa, Bombyx mori; identical to SEQ ID NO: 56911

SEQ ID NO: 136961 - DNA, 1923 bp, Oryza sativa (japonica cultivar-group); identical to SEQ ID NO: 57194
  CDS (1)..(1923)

SEQ ID NO: 136962 - protein, 640 aa, Oryza sativa (japonica cultivar-group); identical to SEQ ID NO: 57195

SEQ ID NO: 136963 - DNA, 1236 bp, Oryza sativa (japonica cultivar-group); identical to SEQ ID NO: 56912
  CDS (1)..(1236)

SEQ ID NO: 136964 - protein, 411 aa, Oryza sativa (japonica cultivar-group); identical to SEQ ID NO: 56913

SEQ ID NO: 136965 - DNA, 1308 bp, Thermoplasma volcanium GSS1; identical to SEQ ID NO: 56914
  CDS (1)..(1308): transl_table=11

SEQ ID NO: 136966 - protein, 435 aa, Thermoplasma volcanium GSS1; identical to SEQ ID NO: 56915

SEQ ID NO: 136967 - DNA, 1251 bp, Thermoplasma volcanium GSS1; identical to SEQ ID NO: 56916
  CDS (1)..(1251): transl_table=11

SEQ ID NO: 136968 - protein, 416 aa, Thermoplasma volcanium GSS1; identical to SEQ ID NO: 56917

SEQ ID NO: 136969 - DNA, 1269 bp, Pyrococcus horikoshii OT3; identical to SEQ ID NO: 56918
  CDS (1)..(1269): transl_table=11

SEQ ID NO: 136970 - protein, 422 aa, Pyrococcus horikoshii OT3; identical to SEQ ID NO: 56919

SEQ ID NO: 136971 - DNA, 1914 bp, Arabidopsis thaliana
  CDS (1)..(1914)
atgtttggaccaacaggtgggttggggatgaatccctcaatggatgatatgaacttaatccagcaagcacaaaggcatcagcttgttgtaagtaatcttggggaagagattgatttggaaattggacctggagaggatgatgctgcttttgctaacaattcattgattggcgggcctccacgggagccctccactggggaacatgatgaaacaaagcatatggttttggtatctgaccttcccagtgaggatcaggatatttcaaagggtacaccggcgaagagaaagaaaaaagttgtcaaacggtggagagaggaatgggctgacacgtacaagtgggcttatgttgatatgaaggatggtacagctaggatattctgctctatttgcagagaatatggtagaaaacatcgaagaaatccttacggaaatgaaggaagtagaaacatgcagatgagtgctttagaggaacacaacaatagtttgctacacaaagaggctctgcgtctccaaacggcttccaaagataagattgttgttgacaagcccatttatgtgaagactgtcatgtcaaagagtgctggttcaattgttgagggtgccctgaaacgagatcctaatgaaattgagtttgttcaatctgtacaagaatctgtgcatgctctagagcgggtgattgcaaaaaattctcattatgtcaatatcatggagcggctactagaacctgaacgtatgatagtctttcgagttccatggattgatgaccgtggtgaaacacatgtaaaccgtggctttagagttcagttcaaccaagctctgggtccatgtaggggaggtatccgatttcacccatccatgaacttaagcattgccaaatttcttggctttcagcagacgttgaagaatgctctgtcaccatataaactgggaggggcttctggtggaagcgactttgatcctaaaggaaaaagtgacaatgagattatgagattttgccaaagtttcatgaatgagatgtacagatatatgggtcctgacaaagatcttccgtcagaggaggttggtgttggtactcgggaaatgggatatctttttggacaatatagacgacttgctggtcagtttcagggaagttttacaggaccgcggatatattgggctgcttctagcctcagaactgaagctagtggctatggcgtggtgtactttgcacgacttatacttgcagatatgaataaggaaataaagggactaagatgtgtcgtgagtggttgcgggaagattgcgatgcatgttgtagagaagctaattgcttgtggagcccatccggttactgtttcagattcaaaaggatatttggtggacgatgatggatttgattatatgaaacttgcattcttgagagatataaaatctcaacagagaagtctgagagactattccaagacctatgcaagggcgaaatactttgatgaattaaagccttggaatgaaaggtgtgatgtggcatttccttgtgcttctcagaatgaagttgatcaagcggatgccattaatctggtcaatgcaggatgccgtttactggtagaaggttcaaacatgccgtgtacagctgaagcagtcgatgttttcagaaaggcgaatgttctgattgctcctgccattgctgctggagctggaggagttgctgctggtgaaatcgaagtactccgtgaatctaattcaatgcaatggtcagcagaagattttgagtctagattacaggaagcactgaagcagacttatgaaaaagctcttaaagcagcaaatgatttcggttatcaaaaagaaagtcctgaggcactacttcatggagcaacgattgcagcatttttgaacatagctcaagccatgacggaccaaggttgtgtctag

SEQ ID NO: 136972 - protein, 637 aa, Arabidopsis thaliana
MFGPTGGLGMNPSMDDMNLIQQAQRHQLVVSNLGEEIDLEIGPGEDDAAFANNSLIGGPPREPSTGEHDETKHMVLVSDLPSEDQDISKGTPAKRKKKVVKRWREEWADTYKWAYVDMKDGTARIFCSICREYGRKHRRNPYGNEGSRNMQMSALEEHNNSLLHKEALRLQTASKDKIVVDKPIYVKTVMSKSAGSIVEGALKRDPNEIEFVQSVQESVHALERVIAKNSHYVNIMERLLEPERMIVFRVPWIDDRGETHVNRGFRVQFNQALGPCRGGIRFHPSMNLSIAKFLGFQQTLKNALSPYKLGGASGGSDFDPKGKSDNEIMRFCQSFMNEMYRYMGPDKDLPSEEVGVGTREMGYLFGQYRRLAGQFQGSFTGPRIYWAASSLRTEASGYGVVYFARLILADMNKEIKGLRCVVSGCGKIAMHVVEKLIACGAHPVTVSDSKGYLVDDDGFDYMKLAFLRDIKSQQRSLRDYSKTYARAKYFDELKPWNERCDVAFPCASQNEVDQADAINLVNAGCRLLVEGSNMPCTAEAVDVFRKANVLIAPAIAAGAGGVAAGEIEVLRESNSMQWSAEDFESRLQEALKQTYEKALKAANDFGYQKESPEALLHGATIAAFLNIAQAMTDQGCV

SEQ ID NO: 136973 - DNA, 1377 bp, Bacillus halodurans C-125
  CDS (1)..(1377): transl_table=11
atgacaacattggtaagagagaaacaaacgtatgacgttcagtattatgtacagcacgtatacgaaaccgtgaaacgacgtaatccgaatgaacatgaatttcatcaagcggttaaggaagtgtttgattcgttactacctgtccttgtgaagcatcctcaatatgttaagcaagcgatactcgaaagaatcgtagaaccggaaagagttatttcctttcgagtcccttgggtggatgatcaaggaaacgtccaagtgaatcgtgggtttcgtgtacaatttaacagtgctctcggaccgtataaaggtggtttgcggtttcatccttctgttaatgcaagcatcattaaatttctcggatttgagcaaatatttaaaaacgctttaacaggtcaaccaattggcggtggcaaaggcggctccgattttgacccaaaaggaaagagcgacggtgaaatcatgcgttttagccaaagcttcatgtcagagcttagcaactatattggaccggatatagatgttcctgcaggagatatcggtgtgggcgccaaggaaattggctatatgttcgggcagtataaaaaaatgcgtggcggctttgaggccggagtgctgactggaaaaggcattggctacggcggaagtcttgccagaaaagaagcgactggctacggcacggtgtattttgtagaagaaatgatcaaagatcacggcttcagctttgctgggagtacggttgttgtatcgggatcgggaaatgtctcgatttacgccatggaaaaagcgatgcagctcggtgcaaaagtggtagcatgcagcgattctggaggctacgtctacgacaaaaacggcatcgatttacagacggtcaagcgtttgaaagaagtcgaaagaaaacggatcagcgaatacgtaaacgaacatccccatgctcattatgttcaaggttgctcaggtatatggtctgttccgtgcgacattgccttgccttgtgcaacacaaaatgaactcgatgaagcggctgcaacgatgttaatcgctaacggtgtgaaagcagtcggtgaaggagccaatatgccttccacacttcaagctgtccatacctttcaagagcatggagtactgtttgcgcctgcgaaagcggcgaatgcaggcggtgtttccgtgtctgctttggaaatggcacaaaacagcacaagattagcgtggacttttgaggaagtggatgccaagctgtatgagataatgaaaaacatttatcgcgaaagcataaaggcggcggagttgtatgaggcttctggaaatcttgtggtcggcgccaacattgctggattcgtgaaagttgcagatgccatgatttcccacggggtcgtctag

SEQ ID NO: 136974 - protein, 458 aa, Bacillus halodurans C-125
MTTLVREKQTYDVQYYVQHVYETVKRRNPNEHEFHQAVKEVFDSLLPVLVKHPQYVKQAILERIVEPERVISFRVPWVDDQGNVQVNRGFRVQFNSALGPYKGGLRFHPSVNASIIKFLGFEQIFKNALTGQPIGGGKGGSDFDPKGKSDGEIMRFSQSFMSELSNYIGPDIDVPAGDIGVGAKEIGYMFGQYKKMRGGFEAGVLTGKGIGYGGSLARKEATGYGTVYFVEEMIKDHGFSFAGSTVVVSGSGNVSIYAMEKAMQLGAKVVACSDSGGYVYDKNGIDLQTVKRLKEVERKRISEYVNEHPHAHYVQGCSGIWSVPCDIALPCATQNELDEAAATMLIANGVKAVGEGANMPSTLQAVHTFQEHGVLFAPAKAANAGGVSVSALEMAQNSTRLAWTFEEVDAKLYEIMKNIYRESIKAAELYEASGNLVVGANIAGFVKVADAMISHGVV

SEQ ID NO: 136975 - DNA, 1263 bp, Bacillus halodurans C-125; identical to SEQ ID NO: 56920
  CDS (1)..(1263): transl_table=11

SEQ ID NO: 136976 - protein, 420 aa, Bacillus halodurans C-125; identical to SEQ ID NO: 56921

SEQ ID NO: 136977 - DNA, 1350 bp, Pasteurella multocida subsp. multocida str. Pm70
  CDS (1)..(1350): transl_table=11
atgtctcaagttgcaacattagatgcgtttttagaaagagtcgcacaacgcgacggtacgcaacctgaatttttacaggcagtacgtgaagtatttacctctatctggccttttttagaagctaacccaaaatatcgttcacaagccctactcgaacgcttagttgaacctgaacgtgttattcagttccgcgtagcatggacagatgatcaaggtcaaacccaagttaaccgtgcattccgcgtgcaatacaacagtgcaatcggtcctttcaaaggaggaatgcgcttccatccttctgttaatctttccattttaaaattcttaggttttgaacaaatcttcaaaaacgcgttaaccacattaccaatggggggcggcaaaggcggttccgattttgatcctaaaggaaaatctgacggtgaagtcatgcgtttctgccaagctttaatggcagaattataccgtcatgttggcgccgataccgatgtgcctgcgggtgatattggtgtaggaggacgtgaagtcggctatctagcaggttatatgaaaaaattatctaaccaagccgcttgcgtgtttaccggtcgtggcttgtcattcggtggcagtttaattcgcccagaagcaaccggttatggtctagtctatttcgcccaagcgatgctcgctgaaaaagggcaaagctttgccggtaaaacggtgtctgtttcaggttcgggtaacgtggcgcaatatgccattgaaaaagcgctgcaattgggggcaaaagtcgtaacttgttctgactcatctggttatgtttatgatgaagccggtttcacaacagaaaaattggctgcattaatggaattgaaaaacgaaaaacgcggtcgtgtggaagaatacgcgaaacaattcggtttaaaatacgtagcaggcaaaacgccttgggaagtcaaagttgatattgcactgccttgtgcgacacaaaacgaattagacttagcgtctgctaataccttaattgccaatggcgtacaattagtggctgaaggggctaacatgccaactactattgaagcaacagatgcctttttagacgcgggcgtgctctttggtccgggtaaagcggcgaatgctggcggtgtagcaacctcaggactagaaatgacgcaaagttcacaacgtttatactggtctgcggaagaagtcgataaaaaactccacagtatcatgttagatattcacgcgaactgtaaaaaatacggcacgattgaaggtcaagccaacattaattatgtcgttggtgcaaacgttgcgggatttgtcaaagtcgccgatgcgatgttagcgcaaggtgtttactaa

SEQ ID NO: 136978 - protein, 449 aa, Pasteurella multocida subsp. multocida str. Pm70
MSQVATLDAFLERVAQRDGTQPEFLQAVREVFTSIWPFLEANPKYRSQALLERLVEPERVIQFRVAWTDDQGQTQVNRAFRVQYNSAIGPFKGGMRFHPSVNLSILKFLGFEQIFKNALTTLPMGGGKGGSDFDPKGKSDGEVMRFCQALMAELYRHVGADTDVPAGDIGVGGREVGYLAGYMKKLSNQAACVFTGRGLSFGGSLIRPEATGYGLVYFAQAMLAEKGQSFAGKTVSVSGSGNVAQYAIEKALQLGAKVVTCSDSSGYVYDEAGFTTEKLAALMELKNEKRGRVEEYAKQFGLKYVAGKTPWEVKVDIALPCATQNELDLASANTLIANGVQLVAEGANMPTTIEATDAFLDAGVLFGPGKAANAGGVATSGLEMTQSSQRLYWSAEEVDKKLHSIMLDIHANCKKYGTIEGQANINYVVGANVAGFVKVADAMLAQGVY

SEQ ID NO: 136979 - DNA, 1266 bp, Neisseria meningitidis MC58; identical to SEQ ID NO: 56922
  CDS (1)..(1266): transl_table=11

SEQ ID NO: 136980 - protein, 421 aa, Neisseria meningitidis MC58; identical to SEQ ID NO: 56923

SEQ ID NO: 136981 - DNA, 1335 bp, Neisseria meningitidis Z2491
  CDS (1)..(1335): transl_table=11
atgactgacctgaacaccctgtttgccaacctcaaacaacgcaatcccaatcaggagccgttccatcaggcggttgaagaagtcttcatgagtctcgatccgtttttggcaaaaaatccgaaatacacccagcaaagcctgctggaacgcatcgtcgaacccgaacgcgtcgtgatgttccgcgtaacctggcaggacgataaagggcaagtccaagtcaaccggggctaccgcgtgcaaatgagttccgccatcggtccttacaaaggcggcctgcgcttccatccgaccgtcgatttgggcgtattgaaattcctcgcttttgaacaagtgttcaaaaacgccttgaccaccctgcctatgggcggcggcaaaggcggttccgacttcgaccccaaaggcaaatccgatgccgaagtaatgcgcttctgccaagcctttatgaccgaactctaccgccacatcggcgcggacaccgatgttccggccggcgacatcggcgtaggcgggcgcgaaatcggctacctgttcggacaatacaaaaaaatccgcaacgagttttcttccgtcctgaccggcaaaggtttggaatggggcggcagcctcatccgtcccgaagcgaccggctacggctgcgtctatttcgcccaagcgatgctgcaaacccgcaacgatagttttgaaggcaaacgcgtcctgatttccggttccggcaacgtggcgcaatacgccgccgaaaaagccatccaactgggcgcgaaagtgctgaccgtttccgactccaacggcttcgtcctcttccccgacagcggtatgagcgaagcgcaactcgccgccttgatcgaattgaaagaagtccgccgcgaacgggttgccacctacgccaaagagcaaggtctgcaatactttgaaaaccaaaaaccgtggggcgtcgccgccgaaatcgccctgccctgcgcgacccagaacgaattggacgaagaagccgccaaaaccctgttggcaaacggctgctacgtcgttgccgaaggtgcgaatatgccgtcgactttgggcgcggtcgagcaatttatcaaagccggcatcctctacgccccgggcaaagcctccaacgccggcggcgtagcaacttcaggtttggaaatgagccaaaacgccatccgcctgtcttggactcgtgaagaagtcgaccaacgcctgttcggcatcatgcaaagcatccacgaatcctgtctgaaatacggcaaagtcggcgacacagtaaactacgtcaatggtgcgaacattgccggtttcgtcaaagttgccgatgcgatgctggcgcaaggcttctaa

SEQ ID NO: 136982 - protein, 444 aa, Neisseria meningitidis Z2491
MTDLNTLFANLKQRNPNQEPFHQAVEEVFMSLDPFLAKNPKYTQQSLLERIVEPERVVMFRVTWQDDKGQVQVNRGYRVQMSSAIGPYKGGLRFHPTVDLGVLKFLAFEQVFKNALTTLPMGGGKGGSDFDPKGKSDAEVMRFCQAFMTELYRHIGADTDVPAGDIGVGGREIGYLFGQYKKIRNEFSSVLTGKGLEWGGSLIRPEATGYGCVYFAQAMLQTRNDSFEGKRVLISGSGNVAQYAAEKAIQLGAKVLTVSDSNGFVLFPDSGMSEAQLAALIELKEVRRERVATYAKEQGLQYFENQKPWGVAAEIALPCATQNELDEEAAKTLLANGCYVVAEGANMPSTLGAVEQFIKAGILYAPGKASNAGGVATSGLEMSQNAIRLSWTREEVDQRLFGIMQSIHESCLKYGKVGDTVNYVNGANIAGFVKVADAMLAQGF

SEQ ID NO: 136983 - DNA, 1275 bp, Deinococcus radiodurans R1
  CDS (1)..(1275): transl_table=11
ttgcaggcggtgaccgaggtgatgaccagcatctggccctttgtgcaggcgcaccccgagtacgccgagcacgcgctgcttgagcgccttatcgagcccgagcgcgtcatcagcttccgcgtgacctgggtggacgacgccgggcaggtgcaggtcaaccggggctaccgcgtgcagcacagttccagcatcgggccatacaagggcgggatgcgctttcaccccagcgtcaacctcagcatcctcaagtttctggccttcgagcagaccttcaaaaatgccctcaccaccctgccgctcggcgggggcaagggcggcagcgacttcgaccccaagggcaagtccgacggcgaggtcatgcgcttttgtcaggcattgatgaccgagctgtggcggcatctcggtcccgacaccgacgttccggcgggcgatatcggcgtgggcgggcgcgaggtcggctacctcgccggcatgatgaaaaagctcgccaaccacgcgggtggggtatttaccggcaagggcctgagctacggcggctcgctgctgcgccccgaggcgaccggctacggcacggtgtatttcgtggagcacatgctgcgcgaccagaggatggagatggagggcctgcgcgtgtcggtgtcgggctcgggcaatgtggcgcagtacgccatcgaaaaggcgctgcacctcggcgcccacgtgctgaccgccagcaactcgggcggcacggtggtggacgaggacggctttacctacgacaagctcgccgtcctgatggacatcaagaacgagcgccggggccgggtggaggactacgcccgcgaggtcggcgccgagttccgccccggcgtgcgcccctgggacgtgccggtggatgtggcgcttccctgcgcgacccagaacgaactcggcgccgacgacgcccgcaccttgattgcaggcggcgtgcgcgtggtggccgagggcgccaacatgccgtgcgacctcgcagccatccaggccttcgaggaagcgggcgtgctctacgcaccgggcaaggcgaccaacgcgggcggcgtggcgacctcgggcctggaaatgtcgcaaaacgcccagcgcctctcctggacccgcgaggaagtggaccagcgcctgcgcagcatcatgtcggccattcacgattcgtgcctggagtatggccgccgcccggaccgccacgtcagctacctcgacggcgccaacattgcgggcttcgtcaaagtggcgacggcgatgcgcgaacagggcgtgctgtaa

SEQ ID NO: 136984 - protein, 424 aa, Deinococcus radiodurans R1
MQAVTEVMTSIWPFVQAHPEYAEHALLERLIEPERVISFRVTWVDDAGQVQVNRGYRVQHSSSIGPYKGGMRFHPSVNLSILKFLAFEQTFKNALTTLPLGGGKGGSDFDPKGKSDGEVMRFCQALMTELWRHLGPDTDVPAGDIGVGGREVGYLAGMMKKLANHAGGVFTGKGLSYGGSLLRPEATGYGTVYFVEHMLRDQRMEMEGLRVSVSGSGNVAQYAIEKALHLGAHVLTASNSGGTVVDEDGFTYDKLAVLMDIKNERRGRVEDYAREVGAEFRPGVRPWDVPVDVALPCATQNELGADDARTLIAGGVRVVAEGANMPCDLAAIQAFEEAGVLYAPGKATNAGGVATSGLEMSQNAQRLSWTREEVDQRLRSIMSAIHDSCLEYGRRPDRHVSYLDGANIAGFVKVATAMREQGVL

SEQ ID NO: 136985 - DNA, 1263 bp, Sulfolobus solfataricus P2
  CDS (1)..(1263): transl_table=11
ttgatggaagaagttctaagttcgagtctatatactcaacaagtgaaaaagttatataaagtcggagagttgttgggccttgataatgaaactttagagacactttctcagcccgagagaataattcaagttaagatacaaattaggggttctgacggtaaattaaagacatttatggggtggaggagtcaacacaactccgccctaggtccctataagggaggagtgagatatcatcctaatgttacgcaagatgaggtagaagcactatctatgataatgacgtggaagaactcgttattgttattgccatatggaggaggaaagggtggagttagagtagaccccaaaaagttaactagggaagaattagaacaattatccagaaagtacattcaagctatttataaatatttgggtagtgaattggatatcccagccccagatgtaaatacagattcacaaaccatggcttggttcctggatgagtacataaagataaccggaaaagttgatttcgcagtgttcactgggaagccggtagagctgggtggaataggggttaggttatatagtactggacttggagttgctaccatagctaaggaagctgcaaataagtttataggaggggttgaggaggctagagtcataattcaaggttttggaaatgttgggtattatgcaggtaagttcctaagtgaaatgggagctaaaatagttggagttagcgattctaaaggtggagtaattaatgagaaaggaatagatgttggaaaggctattgagataaaggagaaaactggaagtgtgataaattatcctgagggaaggaaggtaaccaatgaggaattgttaatatcggattgtgatatattaattccagctgcccttgaaaacgtcataaacaagttcaatgctccgaaggttaaggcaaagcttattgtagaaggtgcaaatggtccgttgacagcagatgctgatgaaataatgagacagaggggaatagcagttgtaccagatatactcgccaatgctggtggagttgttgggagttatgtggaatgggctaataataaaatgggagagataataagcgatgaggaagctaagaaacttatagtcgatagaatgaataatgccttcaatacgctatatgattatcatcagaagaagctagaagatcatgacctaagaactgctgcaatggcattggcagtagacagagtagtaagagctatgaaagctaggggcatattataa

SEQ ID NO: 136986 - protein, 420 aa, Sulfolobus solfataricus P2
MMEEVLSSSLYTQQVKKLYKVGELLGLDNETLETLSQPERIIQVKIQIRGSDGKLKTFMGWRSQHNSALGPYKGGVRYHPNVTQDEVEALSMIMTWKNSLLLLPYGGGKGGVRVDPKKLTREELEQLSRKYIQAIYKYLGSELDIPAPDVNTDSQTMAWFLDEYIKITGKVDFAVFTGKPVELGGIGVRLYSTGLGVATIAKEAANKFIGGVEEARVIIQGFGNVGYYAGKFLSEMGAKIVGVSDSKGGVINEKGIDVGKAIEIKEKTGSVINYPEGRKVTNEELLISDCDILIPAALENVINKFNAPKVKAKLIVEGANGPLTADADEIMRQRGIAVVPDILANAGGVVGSYVEWANNKMGEIISDEEAKKLIVDRMNNAFNTLYDYHQKKLEDHDLRTAAMALAVDRVVRAMKARGIL

SEQ ID NO: 136987 - DNA, 1347 bp, Streptococcus pneumoniae TIGR4
  CDS (1)..(1347): transl_table=11
atgacatctgctaaagaatatatccaaagcgtgtttgaaactgtgaaagctcgtaacgggcacgaggctgaattcctccaagctgttgaagaatttttcaacactttagaacctgtatttgaaaaacaccctgagtatatcgaagaaaatatcttggcacgtattactgagcctgagcgcgtggtttctttccgtgttccttgggttgaccgtgatggaaaaattcaagtaaaccgtggttaccgtgttcaattcaactcagctgttggaccatacaaaggtggacttcgtttccacccaactgtaaaccaagggatcttgaaattcctcggatttgaacaaatctttaaaaatgtcttgactggacttcctatcggtggaggtaaaggtggatcagacttcgatcctaaaggtaaaacagatgctgaagtgatgcgcttctgccaaagcttcatgactgaattgcaaaaacacatcggaccatcacttgacgtacctgctggtgatatcggtgttggtggacgtgaaattggttacctttacggtcaatacaaacgtcttaaccaatttgatgctggtgtcttgactggtaaacctcttggatttggtggtagcttgattcgtccagaagcaactggttacggtttggtttactatactgaagaaatgctcaaagctaacggtaacagctttgctggtaagaaagtcgttatttcaggttctggtaacgttgctcaatatgctcttcaaaaagcaactgaactcggtgcaactgttatttctgtttctgactcaaatggttatgtcatcgatgaaaatggtatcgacttcgatcttttggttgatgttaaagaaaaacgtcgtgctcgtttgactgagtatgcagctgaaaaagcaactgcaacctaccacgaaggtactgtatggacttacgctggaaactatgacattgctcttccatgtgccactcaaaacgaaatcaacggtgaagcagctaaacgtttggttgctcaaggcgttatctgtgtatctgaaggtgccaacatgccgagcgaccttgatgccatcaaagtttacaaagaaaatggtatcttctacggacctgcaaaagctgccaacgctggtggtgtagccgtttcagctcttgaaatgagccaaaacagtcttcgcctctcatggactcgtgaagaagttgatggccgtctcaaagacatcatgacaaacatcttcaacacagctaaaacgacttcagaaacatacggtcttgataaagactaccttgcaggagctaacattgctgcctttgaaaatgtagcaaatgccatgattgcacaaggtattgtttaa

SEQ ID NO: 136988 - protein, 448 aa, Streptococcus pneumoniae TIGR4
MTSAKEYIQSVFETVKARNGHEAEFLQAVEEFFNTLEPVFEKHPEYIEENILARITEPERVVSFRVPWVDRDGKIQVNRGYRVQFNSAVGPYKGGLRFHPTVNQGILKFLGFEQIFKNVLTGLPIGGGKGGSDFDPKGKTDAEVMRFCQSFMTELQKHIGPSLDVPAGDIGVGGREIGYLYGQYKRLNQFDAGVLTGKPLGFGGSLIRPEATGYGLVYYTEEMLKANGNSFAGKKVVISGSGNVAQYALQKATELGATVISVSDSNGYVIDENGIDFDLLVDVKEKRRARLTEYAAEKATATYHEGTVWTYAGNYDIALPCATQNEINGEAAKRLVAQGVICVSEGANMPSDLDAIKVYKENGIFYGPAKAANAGGVAVSALEMSQNSLRLSWTREEVDGRLKDIMTNIFNTAKTTSETYGLDKDYLAGANIAAFENVANAMIAQGIV

SEQ ID NO: 136989 - DNA, 1332 bp, Clostridium acetobutylicum ATCC 824
  CDS (1)..(1332): transl_table=11
atggaaattttaaagcatgtaatggatgatgttattaaaagaaatccaaatgaacctgaatttcatcaagcagtaaaagaagttctcctatctctagagatagttgcagaaaaacatcctgaatgggtaaaagacaaaatttttgataaaattgtagaacctgaaagacagattattttcagggtaccatgggtagatgacaatggcgaagagcatattaacagaggcttcagaattcaatttaatagtgctataggcccatataaaggtggcttaagatttcatccatcagtaaatcttggaatagtaaagtttttgggctttgaacaaatctttaagaattccttaactggtcttccaataggaggcggaaaaggcggcagcgattttaatccaaagagcaaatcaaattcagaaataaagagattttgtcaaagctttatgcttgaacttaataaatatataggagcaaatacagatgtacctgccggcgatattggagttggaagccgtgaaataggctatttatatggcatgttcaaaaagatacgtaatgaatctactggcgtattgactggaaaaggattaaccttaggtggaagtttagtgaggactgaagccactggttatggattatgttatttcatgaatgaggcactaaaggctaaaggtaaatcttttgacggtgctactgttattatttcaggatcaggtaatgtggctatttatgcaaatcaaaaagcaactcaacttggtgctaaagttgttgctatgagtgattcaaatggatatatttacgatgctaatggaataaatttaaatactattagaaaaataaaagaagttgaaagaaaaagaatacatgagtacacaaaatatcatcctaatgcatcttatactgaaggctgcgatggtatttggaaacttaaatgtgatatagctcttccctgtgcaacacaaaatgaaattgatgaaaattctgctaaaactttaattgccaatggatgctatgctgttggagaaggtgctaatatgccatctacaatagaagctgttgatttatttataaaaaacaaagtgattttcgggccagcaaaagctgctaatgccggtggtgttgccacatcagctcttgaaatgtctcaaaacagtatgcgctattcatggacttttgaggaagttgatactaagcttcaaaatataatgaagaatatatatataaagtgcagtaatgctgcaaatgaatatggcttcgaagataatttggttgcaggcgctaacatagctggattcactaaagttgctgaagccatgtattctcttggattttaa

SEQ ID NO: 136990 - protein, 443 aa, Clostridium acetobutylicum ATCC 824
MEILKHVMDDVIKRNPNEPEFHQAVKEVLLSLEIVAEKHPEWVKDKIFDKIVEPERQIIFRVPWVDDNGEEHINRGFRIQFNSAIGPYKGGLRFHPSVNLGIVKFLGFEQIFKNSLTGLPIGGGKGGSDFNPKSKSNSEIKRFCQSFMLELNKYIGANTDVPAGDIGVGSREIGYLYGMFKKIRNESTGVLTGKGLTLGGSLVRTEATGYGLCYFMNEALKAKGKSFDGATVIISGSGNVAIYANQKATQLGAKVVAMSDSNGYIYDANGINLNTIRKIKEVERKRIHEYTKYHPNASYTEGCDGIWKLKCDIALPCATQNEIDENSAKTLIANGCYAVGEGANMPSTIEAVDLFIKNKVIFGPAKAANAGGVATSALEMSQNSMRYSWTFEEVDTKLQNIMKNIYIKCSNAANEYGFEDNLVAGANIAGFTKVAEAMYSLGF

SEQ ID NO: 136991 - DNA, 1347 bp, Streptococcus pneumoniae R6
  CDS (1)..(1347): transl_table=11
atgacatctgctaaagaatatatccaaagcgtgtttgaaactgtaaaagctcgtaacgggcacgaggctgaattcctccaagctgttgaagaatttttcaacactttggaacctgtatttgaaaaacaccctgagtatatcgaagaaaatatcttggcacgtattactgagcctgagcgcgtgatttctttccgtgttccttgggttgaccgtgatggaaaagttcaagtaaaccgcggctaccgtgttcaattcaactcagctgttggaccatataaaggcggacttcgtttccacccaactgtaaaccaagggattttgaaattcctcggatttgaacaaatctttaaaaacgtcttgactggacttcctatcggtggaggtaaaggtggatcagacttcgatcctaaaggtaaaacagatgctgaagtgatgcgcttctgccaaagcttcatgactgaattgcaaaaacacattggaccatcacttgacgtacctgctggtgatatcggtgttggtggacgtgagattggttacctttacggtcaatacaagcgtcttaaccaatttgatgctggtgtcttgactggtaaacctcttggatttggtggtagcttgattcgtccagaagcaactggttacggtttggtttactatactgaagaaatgctcaaagctaacggtaacagctttgctggtaagaaagtggttatttcaggttctggtaacgttgctcaatacgctcttcaaaaagcaaccgaacttggtgcaacagttatctctgtttctgactcaaacggctatgttatcgatgaaaacggtatcgacttcgatcttttggttgatgttaaagaaaaacgtcgcgctcgtttgactgagtatgcagctgagaaagcaactgctacttatcatgaaggttctgtatggacttacgctggaaactatgacattgcgcttccatgtgctactcaaaacgaaatcaacggtgaagcagctaaacgtttggttgctcaaggcgttatctgtgtatctgaaggtgccaacatgccaagcaaccttgatgccatcaaagtttacaaagaaaatggtatcttctacggacctgccaaagctgccaacgctggtggtgtagccgtttcagcccttgaaatgagccaaaacagccttcgcctctcatggactcgtgaagaagttgatggacgtctcaaagacatcatgaccaacatctttaacacagctaaaacaacttcagaaacatatggtcttgataaagactaccttgcaggagctaacattgctgcctttgaaaatgtagcaaacgctatgattgcacaaggtattgtttaa

SEQ ID NO: 136992 - protein, 448 aa, Streptococcus pneumoniae R6
MTSAKEYIQSVFETVKARNGHEAEFLQAVEEFFNTLEPVFEKHPEYIEENILARITEPERVISFRVPWVDRDGKVQVNRGYRVQFNSAVGPYKGGLRFHPTVNQGILKFLGFEQIFKNVLTGLPIGGGKGGSDFDPKGKTDAEVMRFCQSFMTELQKHIGPSLDVPAGDIGVGGREIGYLYGQYKRLNQFDAGVLTGKPLGFGGSLIRPEATGYGLVYYTEEMLKANGNSFAGKKVVISGSGNVAQYALQKATELGATVISVSDSNGYVIDENGIDFDLLVDVKEKRRARLTEYAAEKATATYHEGSVWTYAGNYDIALPCATQNEINGEAAKRLVAQGVICVSEGANMPSNLDAIKVYKENGIFYGPAKAANAGGVAVSALEMSQNSLRLSWTREEVDGRLKDIMTNIFNTAKTTSETYGLDKDYLAGANIAAFENVANAMIAQGIV

SEQ ID NO: 136993 - DNA, 1311 bp, Thermoplasma acidophilum DSM 1728; identical to SEQ ID NO: 56928
  CDS (1)..(1311): transl_table=11

SEQ ID NO: 136994 - protein, 436 aa, Thermoplasma acidophilum DSM 1728; identical to SEQ ID NO: 56929

SEQ ID NO: 136995 - DNA, 1260 bp, Thermoplasma acidophilum DSM 1728
  CDS (1)..(1260): transl_table=11
gtgacctatatgccggagaatatggatccttttgagatggccctccagcagcttgaaaaagccgccgcggttctgaagctggatgagcaggcccttgagatactgaagcagccggagaagatcctgcaggtgagcattcccgttcggatggacaacggcaggataaaggttttcaccggattcagggtgaggtacaacaccgccagggggccagggaagggcggtatcaggtatcacacagaggaaacgctgtccacggtgaaggcccttgccgcctggatgacatggaaatgcgcgatcgttgacattccattcggcggtgccaagggaggggtgatatgcgatccaaagtccatgagccagggtgagcttgagaggctaagcaggggatacatacgggccatcgctgatttcatcggcccggaggtggatgtgccggccccggatgtatatacgaacccgcagataatggcctggatgatggacgaatatgagaacgttgtgaggcacagcgcaccgaatgtcataaccggaaagccacttgaagtgggcggatccgagggccgcggagacgcaacagcaaaaggtggaatgtacgttcttagggaaggtgcgaagaggatcggtcttgatctttctaaggctcgcgtggccgtgcagggattcggaaatgcagggcagtttgcagtgaaattcgttcatgagatgttcggatcaaaggtcgtcgcggtatcggacacgaagggaggcatatatgtgaaggatggaattgactatgcagcgcttctcgaacacaagaaaaagacgggatcggtcgtgggattcccgggatcggaaccgataaccaacgaggagcttctcgaatcggacgtagacgttctgataccggcggcaatagaggagcagatcaccggaaagaacgcggacaggatcagggcgaagatagtgctggaacttgcaaacggccctacaacgccggaggcggatgagatactgtacaagcgcggcatactggatcttccagatttcctctcaaactccggtggagtaacggtctcttacttcgagtgggtccagaacaactacggcgagtactggacggccgatgatgtgtacaaaaagctcgaccagaagatgaccaaggcagcgcatgacgtgttcgatgctatggataaatacaaggtcaatccaaggacagcggcctacgttgtctcagtcaagaaagtggcggacgccatgaaggccagaggcatgtattaa

SEQ ID NO: 136996 - protein, 419 aa, Thermoplasma acidophilum DSM 1728
MTYMPENMDPFEMALQQLEKAAAVLKLDEQALEILKQPEKILQVSIPVRMDNGRIKVFTGFRVRYNTARGPGKGGIRYHTEETLSTVKALAAWMTWKCAIVDIPFGGAKGGVICDPKSMSQGELERLSRGYIRAIADFIGPEVDVPAPDVYTNPQIMAWMMDEYENVVRHSAPNVITGKPLEVGGSEGRGDATAKGGMYVLREGAKRIGLDLSKARVAVQGFGNAGQFAVKFVHEMFGSKVVAVSDTKGGIYVKDGIDYAALLEHKKKTGSVVGFPGSEPITNEELLESDVDVLIPAAIEEQITGKNADRIRAKIVLELANGPTTPEADEILYKRGILDLPDFLSNSGGVTVSYFEWVQNNYGEYWTADDVYKKLDQKMTKAAHDVFDAMDKYKVNPRTAAYVVSVKKVADAMKARGMY

SEQ ID NO: 136997 - DNA, 1344 bp, Yersinia pestis CO92
  CDS (1)..(1344): transl_table=11
atgaatggtttagtttctttggagtcatttctagaatcgttacaacggcgtgatgccaaccaaccagaatatctccaggccgtacgtgaagtatttacgtcgctctggccctttctggaacagaacccacattatcgtgaacaaagcctgctagagcgcttagtcgaacctgaacgtgttatccagttccgcgttgcctggactgatgataaaggccatgttcaggttaaccgcgcatggcgcgtgcagttcagctcagcaattggtccttataagggcggaatgcgtttccatccctcagtaaacttatcaattctgaagttcctcggttttgaacaaaccttcaaaaatgccctgactaccctgccaatgggcggtggtaaaggcggttctgattttaatccgaaagggaaaagtcaggctgaagttatgcgtttttgtcaggccttgatgactgaactttatcgccaccttggcccggatactgacgtgcctgcaggcgatattggcgtgggcggccgtgaagttgccttcatggctggcatgatgaaaaagttatccaataacaccgcttgcgtctttacgggtaaagggctgtcattcggtggtagtttgattcgcccagaagcaaccggttacggtttggtttatttcaccgatgcgatgctaaaacgccatggtttaggctttgaaggtagaaaagtgtctgtttcaggtgctggcaacgtggcgcaatataccattgaaaaagcgatggagctgggggctaaagtggttactgcctctgattcaggcggtaccgtagtggatgaagttggcttcacgcctgaaaaactggctcatctggctgaaattaagaataagcgttatggcactatcgaagactatgcccgcgaacgtaatttggtctatttagcgggtcaacaaccgtggagcgtccctgttgatattgccctaccttgtgcgacacaaaatgaattggacctgccagcagcacttcagttgattgccaatggtgtgaaagcggttgctgaaggcgcgaacatgccaaccaccatccaggcgacagatgctttccttgaagcaggcgtcttgtttgctccgggtaaagcggccaatgcgggcggtgttgccacatccggcctggaaatggctcagaatgcagcccgtatgagctggaaatcagaaaaagttgatgtccgtttacatcacatcatgttggatattcaccagtcctgtgttgaatacggcggtgaaggcaagcaaacccactatgtacacggcgctaatattgccgggtttgtcaaagtggccgatgcaatgctggcccaaggcgtgctgtaa

SEQ ID NO: 136998 - protein, 447 aa, Yersinia pestis CO92
MNGLVSLESFLESLQRRDANQPEYLQAVREVFTSLWPFLEQNPHYREQSLLERLVEPERVIQFRVAWTDDKGHVQVNRAWRVQFSSAIGPYKGGMRFHPSVNLSILKFLGFEQTFKNALTTLPMGGGKGGSDFNPKGKSQAEVMRFCQALMTELYRHLGPDTDVPAGDIGVGGREVAFMAGMMKKLSNNTACVFTGKGLSFGGSLIRPEATGYGLVYFTDAMLKRHGLGFEGRKVSVSGAGNVAQYTIEKAMELGAKVVTASDSGGTVVDEVGFTPEKLAHLAEIKNKRYGTIEDYARERNLVYLAGQQPWSVPVDIALPCATQNELDLPAALQLIANGVKAVAEGANMPTTIQATDAFLEAGVLFAPGKAANAGGVATSGLEMAQNAARMSWKSEKVDVRLHHIMLDIHQSCVEYGGEGKQTHYVHGANIAGFVKVADAMLAQGVL

SEQ ID NO: 136999 - DNA, 1347 bp, Sinorhizobium meliloti 1021
  CDS (1)..(1347): transl_table=11
gtgaatgtcgacgagaaactggaacccattctagcggaagtcctgaggcgtaacggaggtgaacacgagtttcaccaggcagtgcgcgaggttctcgagagcctcgggcgcgtgatagccaaacatccccgttacgccgaaaacgcgctcatcgagaggatctgcgaaccagagcgtcagatcatcttccgcgtgccctgggtggacgacaagggccaggtccagatcaaccgggggttccgggttcagttcaactccgcacttgggccgtacaagggcggaatccgttttcatccttcggtgaacatcggaatcatcaagtttctcggcttcgagcagaccttcaagaacgcactgaccgggatgccgatcggcggggggaagggtggctccgacttcaatcccaggggccgttcggacggcgagatcatgcgcttctgccagtcgttgatgaccgagcttcacaggcatctcggcgaatacacggacgttcccgcgggtgatatcggtgtgggaggccgggagatcggctacatgttcggtcagtataagcggcttaccaaccgctacgaagccggtgtgctcacgggcaaggcattgttctacggcggttcgcgggcccgaaaggaagcgacgggctacggggcgacctatttcgtccagcgcatgatcgcaaccaagggcctggacttcgagggcaaacgggtgaccgtctccggatccggcaacgtagcgatctatacgatggagaaggtgatcgagttcggaggaaaaatcgtggcgtgctccgattcgaacgggtacgtggtcgacgaggacggcatcgaccttgaactggtcaaggagatcaaggaagtgcgtcgcgagcggatctcggagtacgcgcgactgaaaggcgccgggactcactatatagaagcgggctcggtctgggacgttccatgcgatgtcgccatgccttcagcgactcagaacgagcttaccggcaaggatgcacgaacattggtgaagaacggtgttcttgcggtgggtgagggcgccaacatgccgtgcacgccggaggcggtccgcatcttccaggaggcgggtgtactgtttgccccgggcaaggccgcgaatgcagggggtgttgccacctccgctctcgaaatgcagcagaacgcctcacgtgacagctggacgttcgaacagaccgaggcgcgccttgcaaccatcatgcaggcgattcacgaccgttgcgccgagaccgcagaggagtatggcacccctggagactatgttctcggagccaacatagcgggcttcgtcagagtggccgaggcaatggatgccctcggcgtgatctga

SEQ ID NO: 137000 - protein, 448 aa, Sinorhizobium meliloti 1021
MNVDEKLEPILAEVLRRNGGEHEFHQAVREVLESLGRVIAKHPRYAENALIERICEPERQIIFRVPWVDDKGQVQINRGFRVQFNSALGPYKGGIRFHPSVNIGIIKFLGFEQTFKNALTGMPIGGGKGGSDFNPRGRSDGEIMRFCQSLMTELHRHLGEYTDVPAGDIGVGGREIGYMFGQYKRLTNRYEAGVLTGKALFYGGSRARKEATGYGATYFVQRMIATKGLDFEGKRVTVSGSGNVAIYTMEKVIEFGGKIVACSDSNGYVVDEDGIDLELVKEIKEVRRERISEYARLKGAGTHYIEAGSVWDVPCDVAMPSATQNELTGKDARTLVKNGVLAVGEGANMPCTPEAVRIFQEAGVLFAPGKAANAGGVATSALEMQQNASRDSWTFEQTEARLATIMQAIHDRCAETAEEYGTPGDYVLGANIAGFVRVAEAMDALGVI

SEQ ID NO: 137001 - DNA, 1326 bp, Salmonella typhimurium LT2; identical to SEQ ID NO: 56930
  CDS (1)..(1326): transl_table=11

SEQ ID NO: 137002 - protein, 441 aa, Salmonella typhimurium LT2; identical to SEQ ID NO: 56931

SEQ ID NO: 137003 - DNA, 1377 bp, Listeria innocua Clip11262; identical to SEQ ID NO: 56932
  CDS (1)..(1377): transl_table=11

SEQ ID NO: 137004 - protein, 458 aa, Listeria innocua Clip11262; identical to SEQ ID NO: 56933

SEQ ID NO: 137005 - DNA, 1314 bp, Nostoc sp. PCC 7120; identical to SEQ ID NO: 56934
  CDS (1)..(1314): transl_table=11

SEQ ID NO: 137006 - protein, 437 aa, Nostoc sp. PCC 7120; identical to SEQ ID NO: 56935

SEQ ID NO: 137007 - DNA, 1266 bp, Brucella melitensis 16M; identical to SEQ ID NO: 56936
  CDS (1)..(1266): transl_table=11

SEQ ID NO: 137008 - protein, 421 aa, Brucella melitensis 16M; identical to SEQ ID NO: 56937

SEQ ID NO: 137009 - DNA, 1284 bp, Pyrobaculum aerophilum str. IM2
  CDS (1)..(1284): transl_table=11
atggcccatataagtggggtttatatcaacagcgcatttcttgaaaatacgttatatacaataaaacgtggaattgaactatcaggtttgcctgtggaattctacgagatcatcacaaagcctaaaagaatacacattgtgtatatccctgttaaaatggacagcggcagaattgaagtgtttgagggctatagagttcagcataatgacgccctcgggccttttaaaggcggaattcgttttcacccggaggtcactctagctgacgacgtcgccttggctattctcatgacgcttaaaaacagcctcgcgggcttgccctacggcggggctaagggcgcggttagagtagaccccaagaggctctcccagagagagctcgaggagttaagccggggctacgccagggcaatcgccccgctaataggcgatttggtggacataccggcgccagacgtggggactaactcgcagataatggcctggatggtagacgagtattcaaaaatagcggggagaaacgcccccgccgtgttcacctcaaagccgccggagctttggggaaacccagtgagggaatacgccacgggctttggagtggcagttgtcgctagagaaatggccaaaaggctgtgggacggaatagaggggaagacagtggctgtacaaggcttaggcaatgtgggcaggtggacggcgtattggctggcaaaactcggcgccaaggttgtagccgtatcggatataaacggcgtggcgtataaaaaagaggggttgaatgtagatattatcgctaataatagaggactcggcggccccgccctactagaggcgtttgtctctaaagacggggctcaatatgtgaaagatccagacgctatactcgctgttgatgtggatattttcattccagcggctattgagaacgtgattagaagcgacaacgccggccgagttaaggctaggcttgtggttgagggcgctaacggcccgacaacgccagaggccgagcgggttttataccagaggggagttgtagtagtgcccgacatattggccaacgcaggcggcgtgattatgtcttatttagagtgggtggaaaacctccagtggctctcgtgggacgaggaggagactaggaagagactagaggcaataatggttaacaacgtggcgagagtataccagaggtggcaaaaagaaaaatggacaatgagagacgcggcaatagtcacggcgctggagagaatatacaaggcaatgaaattaagagggtggatttaa

SEQ ID NO: 137010 - protein, 427 aa, Pyrobaculum aerophilum str. IM2
MAHISGVYINSAFLENTLYTIKRGIELSGLPVEFYEIITKPKRIHIVYIPVKMDSGRIEVFEGYRVQHNDALGPFKGGIRFHPEVTLADDVALAILMTLKNSLAGLPYGGAKGAVRVDPKRLSQRELEELSRGYARAIAPLIGDLVDIPAPDVGTNSQIMAWMVDEYSKIAGRNAPAVFTSKPPELWGNPVREYATGFGVAVVAREMAKRLWDGIEGKTVAVQGLGNVGRWTAYWLAKLGAKVVAVSDINGVAYKKEGLNVDIIANNRGLGGPALLEAFVSKDGAQYVKDPDAILAVDVDIFIPAAIENVIRSDNAGRVKARLVVEGANGPTTPEAERVLYQRGVVVVPDILANAGGVIMSYLEWVENLQWLSWDEEETRKRLEAIMVNNVARVYQRWQKEKWTMRDAAIVTALERIYKAMKLRGWI

SEQ ID NO: 137011 - DNA, 1320 bp, Fusobacterium nucleatum subsp. nucleatum ATCC 25586; identical to SEQ ID NO: 56938
  CDS (1)..(1320): transl_table=11

SEQ ID NO: 137012 - protein, 439 aa, Fusobacterium nucleatum subsp. nucleatum ATCC 25586; identical to SEQ ID NO: 56939

SEQ ID NO: 137013 - DNA, 1386 bp, Streptomyces coelicolor A3(2); identical to SEQ ID NO: 56944
  CDS (1)..(1386): transl_table=11

SEQ ID NO: 137014 - protein, 461 aa, Streptomyces coelicolor A3(2); identical to SEQ ID NO: 56945

SEQ ID NO: 137015 - DNA, 1608 bp, Drosophila melanogaster; identical to SEQ ID NO: 56946
  CDS (1)..(1608)

SEQ ID NO: 137016 - protein, 535 aa, Drosophila melanogaster; identical to SEQ ID NO: 56947

SEQ ID NO: 137017 - DNA, 1257 bp, Chlorobium tepidum TLS
  CDS (1)..(1257): transl_table=11
atggccggacttaccaaagaaaatcctttcgacatcgcccgccgccagctcgatgctgccgctggaatcatcggtcttgacgccgaagtgctcgaactgctgcgctggccgatgcgggaaatgcatgtcaccattccggtcaaaatggacgacggagcggtacgcgcttttcacggcttcagggtgcagtacaacgacgcacgtggccccaacaaggggggcatccgctttcatcccgacgaaactatcgacacggtccgggcgcttgcagcatggatgacctggaaaaccgccgtcatggacattccgctcggcggcgccaaagggggcgttatctgcaatccgaaaacgatgtcgcccggcgaactcgaacggctgtcgcgcagctacatccggcaggtcggccgcctgctcgacctcgaaaaggatgtgcctgcacccgacgtttacaccacgccacagatcatggcctggatggctgacgaatactctttcatgcaggggcacaacgatttcggcgtcattaccggcaaaccgctggcgctcggcggatcgctcgggcgcggcgacgcgacggcgcggggaggcattatctgcatccgtgaagccgcgaagatgctcggcatcaatctgcgcgggaaacccgccgccatcaacggcttcggcaacgccggagccttcgcccacaagctcgccgtcgagctgctcggcatgaaagtggtggccgtctccgactcgaaaggcagcatttacaacccggatggattcgatcatcaagccctcatggagtacaaaaagcaacacggatcggtcgccgattttcccggctccacgccgctgaccgacgccggactgctggaactggatgtgaccgtgctcataccggcggcccttgaagatgaaatttcctgccgcaacgcgcggaacatccaggcgaaaatcgtcgccgaactggccaacggtccgaccaccccggaagctgacaaaattttgcacgagcgcggcgtctatctcattcccgacctgctctgcaacgcgggtggcgtaaccgtctcctatttcgaaatggtacagaacgccagtggatggtactgggaagaggaggtcgtacatcgccagctcgaaaagaaaatggccgccgcaatcaaagccgtgcatcaggccgccgtgcagtacagcgtcgataaccgcacagcagccatgatcgtggcgattcgccgcgtggccgaggcgatgaagctgcgtggctgggtgtga

SEQ ID NO: 137018 - protein, 418 aa, Chlorobium tepidum TLS
MAGLTKENPFDIARRQLDAAAGIIGLDAEVLELLRWPMREMHVTIPVKMDDGAVRAFHGFRVQYNDARGPNKGGIRFHPDETIDTVRALAAWMTWKTAVMDIPLGGAKGGVICNPKTMSPGELERLSRSYIRQVGRLLDLEKDVPAPDVYTTPQIMAWMADEYSFMQGHNDFGVITGKPLALGGSLGRGDATARGGIICIREAAKMLGINLRGKPAAINGFGNAGAFAHKLAVELLGMKVVAVSDSKGSIYNPDGFDHQALMEYKKQHGSVADFPGSTPLTDAGLLELDVTVLIPAALEDEISCRNARNIQAKIVAELANGPTTPEADKILHERGVYLIPDLLCNAGGVTVSYFEMVQNASGWYWEEEVVHRQLEKKMAAAIKAVHQAAVQYSVDNRTAAMIVAIRRVAEAMKLRGWV

SEQ ID NO: 137019 - DNA, 1347 bp, Yersinia pestis KIM
  CDS (1)..(1347): transl_table=11
gtgatgaatggtttagtttctttggagtcatttctagaatcgttacaacggcgtgatgccaaccaaccagaatatctccaggccgtacgtgaagtatttacgtcgctctggccctttctggaacagaacccacattatcgtgaacaaagcctgctagagcgcttagtcgaacctgaacgtgttatccagttccgcgttgcctggactgatgataaaggccatgttcaggttaaccgcgcatggcgcgtgcagttcagctcagcaattggtccttataagggcggaatgcgtttccatccctcagtaaacttatcaattctgaagttcctcggttttgaacaaaccttcaaaaatgccctgactaccctgccaatgggcggtggtaaaggcggttctgattttaatccgaaagggaaaagtcaggctgaagttatgcgtttttgtcaggccttgatgactgaactttatcgccaccttggcccggatactgacgtgcctgcaggcgatattggcgtgggcggccgtgaagttgccttcatggctggcatgatgaaaaagttatccaataacaccgcttgcgtctttacgggtaaagggctgtcattcggtggtagtttgattcgcccagaagcaaccggttacggtttggtttatttcaccgatgcgatgctaaaacgccatggtttaggctttgaaggtagaaaagtgtctgtttcaggtgctggcaacgtggcgcaatataccattgaaaaagcgatggagctgggggctaaagtggttactgcctctgattcaggcggtaccgtagtggatgaagttggcttcacgcctgaaaaactggctcatctggctgaaattaagaataagcgttatggcactatcgaagactatgcccgcgaacgtaatttggtctatttagcgggtcaacaaccgtggagcgtccctgttgatattgccctaccttgtgcgacacaaaatgaattggacctgccagcagcacttcagttgattgccaatggtgtgaaagcggttgctgaaggcgcgaacatgccaaccaccatccaggcgacagatgctttccttgaagcaggcgtcttgtttgctccgggtaaagcggccaatgcgggcggtgttgccacatccggcctggaaatggctcagaatgcagcccgtatgagctggaaatcagaaaaagttgatgtccgtttacatcacatcatgttggatattcaccagtcctgtgttgaatacggcggtgaaggcaagcaaacccactatgtacacggcgctaatattgccgggtttgtcaaagtggccgatgcaatgctggcccaaggcgtgctgtaa

SEQ ID NO: 137020 - protein, 448 aa, Yersinia pestis KIM
MMNGLVSLESFLESLQRRDANQPEYLQAVREVFTSLWPFLEQNPHYREQSLLERLVEPERVIQFRVAWTDDKGHVQVNRAWRVQFSSAIGPYKGGMRFHPSVNLSILKFLGFEQTFKNALTTLPMGGGKGGSDFNPKGKSQAEVMRFCQALMTELYRHLGPDTDVPAGDIGVGGREVAFMAGMMKKLSNNTACVFTGKGLSFGGSLIRPEATGYGLVYFTDAMLKRHGLGFEGRKVSVSGAGNVAQYTIEKAMELGAKVVTASDSGGTVVDEVGFTPEKLAHLAEIKNKRYGTIEDYARERNLVYLAGQQPWSVPVDIALPCATQNELDLPAALQLIANGVKAVAEGANMPTTIQATDAFLEAGVLFAPGKAANAGGVATSGLEMAQNAARMSWKSEKVDVRLHHIMLDIHQSCVEYGGEGKQTHYVHGANIAGFVKVADAMLAQGVL

SEQ ID NO: 137021 - DNA, 1350 bp, Streptococcus agalactiae 2603V/R
  CDS (1)..(1350): transl_table=11
atgacaagcggaaagacatatgtagcaagtgttttagagaaagtgaagaagcaaaatgagcatgaggaagaatttctacaagcggttgaagaggtttttgagtcactagtaccagtttttgataaataccctcagtacattgaagaaaatcttttagaacgtttggttgagcctgagcgcgtgatttcttttagagttccatgggtagatgataaaggccaggttcaagttaaccgaggatatcgtgtacaattttcatcagctattggtccttataaaggtggtttacgttttcaccctacagtaacacaatctattgtcaaatttttaggatttgaacaaatttttaagaattcactgacaggtctaccaattggtggtggcaaaggagggtcaaactttgatccaaaagggaaatcagataatgaagtgatgcgtttcacacaaagttttatgactgaacttcaaaaatacattggaccagatttagatgtgccagctggcgatattggagtaggtggacgtgaaattggttatctttatggtcaatataagcgtttaaatggttatcaaaatggggttttaaccggaaaaggactgacttatggtggctctttggctcgtacagaagcaactggttatggggcagtctattttgctaaagaaatgctagcagcgcgtggtcaagatttaactggcaaagttgcactggtttcgggatctggtaacgtggctatttatgctactgaaaaattacaagagttgggtgcaactgttgtagctgtatcagattcttcaggttatgtttatgatccagacggtattgaccttgaaacattgaaacagataaaagaggttgaaagagcacgtattgttaaatatacggagaaacatccaaaagctaatttcacaccagcagatcaaggtagtatctggtctattaaagctgatttagctttcccgtgtgctactcaaaacgaattagacgaagaagacgctaagttattagttgaaaatggtgtcttggcagtaacagaaggagcaaatatgccatctaccttgggtgctattaaagttttccaaaaggcaggggttgcttttggtcctgctaaagctgccaatgcagggggagtagctgtttcagcgcttgaaatggcacaaaattctagtcgtagggcatggacttttgaagaagttgatcaagaattgcaacgtattatgaaaactatttttgtgaatgcttccgaagcggctgatgaatttggcgatagtggtaacctggttctaggtgctaacattgcaggctttttaaaagttgctcaagctatgtctgcacaaggtattgtttaa

SEQ ID NO: 137022 - protein, 449 aa, Streptococcus agalactiae 2603V/R
MTSGKTYVASVLEKVKKQNEHEEEFLQAVEEVFESLVPVFDKYPQYIEENLLERLVEPERVISFRVPWVDDKGQVQVNRGYRVQFSSAIGPYKGGLRFHPTVTQSIVKFLGFEQIFKNSLTGLPIGGGKGGSNFDPKGKSDNEVMRFTQSFMTELQKYIGPDLDVPAGDIGVGGREIGYLYGQYKRLNGYQNGVLTGKGLTYGGSLARTEATGYGAVYFAKEMLAARGQDLTGKVALVSGSGNVAIYATEKLQELGATVVAVSDSSGYVYDPDGIDLETLKQIKEVERARIVKYTEKHPKANFTPADQGSIWSIKADLAFPCATQNELDEEDAKLLVENGVLAVTEGANMPSTLGAIKVFQKAGVAFGPAKAANAGGVAVSALEMAQNSSRRAWTFEEVDQELQRIMKTIFVNASEAADEFGDSGNLVLGANIAGFLKVAQAMSAQGIV

SEQ ID NO: 137023 - DNA, 1347 bp, Bifidobacterium longum NCC2705
  CDS (1)..(1347): transl_table=11
atgctcactgacgagtacatcaagcgtgtctacgaccaggtcgttgcccgtgacggcgatcagccggagttcctgcaagccgttcgcgaggtcttcgagaccctgcagccggttgtcgagaagcacccggagtacgagaaggccggtgtactggagcgcatcgtcgagccggagcgcaccatcaagttccgcgtggcctgggttgacgacgagggcaaggttcaggtgaaccgcggctaccgtatccagttcaactccgccattggcccgtacaagggcggactacgcttccacccgaccgtgaccgagtccgtcgtcaagttccttggcttcgagcagattctcaagaactccctgaccacgctgccgatgggcggcggcaagggcggttccgacttcaacccgaagggcaagtccgacgctgaggtcatgcgcttctgccaggccttcatgaccgagctgagccgccacatcggccagttcaccgacgttcccgccggcgacatcaacgtcggtggccgtgagatcggctacctgttcggtcagtacaagcgcatccgcgacgagtactccggcgtcctgaccggtaaggggctggaattcggcggctccctggcccgcaccgaggccaccggttacggcgtgtgctactacacccaggaagccctgcgcgtgctgcgcaacgactccttcgagggcaagaccgtcgtgatctccggctccggcaacgtggccacctacgccgctcagaaggctgagcagctgggcgccaaggtcgtcaccgtctccgactccaacggctacatctacgacccgaacggcatcaacgtcgaggtcgtcaagcagatcaaggaagtcgagcgcggccgcatcaaggaatacgccgagcgcgttccgggctccgagtaccacgagggcagcaagggcgtgtggaccgtcaagggcgacatcgctctgccttgcgccacccagaacgaggttgatggcgaatccgcacagaagctcgtggacaacggcgtgaccgtggtcgtcgagggtgcgaacatgccgtccaccccggaggccatcgaggtctaccagaagaacggcgtgctgtacggcccggccaaggctgccaacgccggtggcgtggccgtctccggcctggagatgagccagaacagctaccgcctgtcttggaccttcgaagaggtcgacgccaagctcaagtccatcatggaagaaatcgtcgccaactccctggccgccgccaaggaatacggtcacgagggtgacctgatgctcggtgccaacgccgcaggcttcgtcaaggtcgccaacgccatggttgcccagggcgtgctgtga

SEQ ID NO: 137024 - protein, 448 aa, Bifidobacterium longum NCC2705
MLTDEYIKRVYDQVVARDGDQPEFLQAVREVFETLQPVVEKHPEYEKAGVLERIVEPERTIKFRVAWVDDEGKVQVNRGYRIQFNSAIGPYKGGLRFHPTVTESVVKFLGFEQILKNSLTTLPMGGGKGGSDFNPKGKSDAEVMRFCQAFMTELSRHIGQFTDVPAGDINVGGREIGYLFGQYKRIRDEYSGVLTGKGLEFGGSLARTEATGYGVCYYTQEALRVLRNDSFEGKTVVISGSGNVATYAAQKAEQLGAKVVTVSDSNGYIYDPNGINVEVVKQIKEVERGRIKEYAERVPGSEYHEGSKGVWTVKGDIALPCATQNEVDGESAQKLVDNGVTVVVEGANMPSTPEAIEVYQKNGVLYGPAKAANAGGVAVSGLEMSQNSYRLSWTFEEVDAKLKSIMEEIVANSLAAAKEYGHEGDLMLGANAAGFVKVANAMVAQGVL

SEQ ID NO: 137025 - DNA, 1350 bp, Streptococcus mutans UA159
  CDS (1)..(1350): transl_table=11
atgacaacaggtaaagagtatgttgctagtgtttttgaaaaagttaaagcacaaaatgctcatgaaccagaattcttacaagctgtagaggaagtatttgaatcacttattccagtgtttgataactatccaaaatatattgaagaaaatctgctggaacgattggtcgaaccagaacgtattgtttcgttccgtgttccttgggtagacgataaaggtcaagtccaagttaaccgcggttttcgtgtgcaattttcatcagctatcggaccttacaaaggcggccttcgtttccatccatcagtaaaccaatctattatcaaattccttggttttgaacaaatctttaagaattctcttactggccaaccaatcggtggtggtaaaggcggctcaaactttgatcctaaagggaagtcagataatgaaatcatgcgtttctgccaaagcttcatgactgaactcagcaaacatattggtgcagacacagatgttcctgctggggatattggtgttggcggacgtgaaattggctatctctacggtcaatataaacgcctccgcaatgaatacacgggtgtccttactggtaaaggtttgacttggggcggatcacttgcccgtacagaagcaactggttacggtgcagtttactttgcagaacaaatgctgaaagcgcgtggtcaagactttgcaggaaaaactgctattgtttcaggttcaggtaatgtagctatttatgctactgaaaaattgcagacacttggagctaaagttgtggctgtttctgattcatctggttatgtttacgatccagatggtattgatgttgctcttcttaaagagcttaaagaagtacagcgtgcgcgtatcatcaaatatgctgatgcacgtccaaatgcaagcttcacacctgcaggtggtgattcaatctggacaatcaaagcagatcttgctttcccatgtgctactcaaaatgaattgaatgaagcagatgctaaaacgcttgttgctaatggggttatcgctgtttctgaaggagctaatatgccttcaactcttgaagcaattgatgtctttcttaaggccggcgtctcgtttggtcctgccaaagcagccaatgctggcggtgtagccgtatcggctcttgaaatggcacaaaatagccaacgtacagcatggacattcgaagaagtagatcgtaaactttatgatattatgaagggtatctatgacaactctgcagcagcagctaagtcatttggccaagaaggcaacctcgtagttggtgccaacattgctggtttccttaaggttgcagatgctatgtcagcacaaggaattgtataa

SEQ ID NO: 137026 - protein, 449 aa, Streptococcus mutans UA159
MTTGKEYVASVFEKVKAQNAHEPEFLQAVEEVFESLIPVFDNYPKYIEENLLERLVEPERIVSFRVPWVDDKGQVQVNRGFRVQFSSAIGPYKGGLRFHPSVNQSIIKFLGFEQIFKNSLTGQPIGGGKGGSNFDPKGKSDNEIMRFCQSFMTELSKHIGADTDVPAGDIGVGGREIGYLYGQYKRLRNEYTGVLTGKGLTWGGSLARTEATGYGAVYFAEQMLKARGQDFAGKTAIVSGSGNVAIYATEKLQTLGAKVVAVSDSSGYVYDPDGIDVALLKELKEVQRARIIKYADARPNASFTPAGGDSIWTIKADLAFPCATQNELNEADAKTLVANGVIAVSEGANMPSTLEAIDVFLKAGVSFGPAKAANAGGVAVSALEMAQNSQRTAWTFEEVDRKLYDIMKGIYDNSAAAAKSFGQEGNLVVGANIAGFLKVADAMSAQGIV

SEQ ID NO: 137027 - DNA, 1401 bp, Corynebacterium efficiens YS-314; identical to SEQ ID NO: 56952
  CDS (1)..(1401): transl_table=11

SEQ ID NO: 137028 - protein, 466 aa, Corynebacterium efficiens YS-314; identical to SEQ ID NO: 56953

SEQ ID NO: 137029 - DNA, 1350 bp, Pseudomonas putida KT2440; identical to SEQ ID NO: 56954
  CDS (1)..(1350): transl_table=11

SEQ ID NO: 137030 - protein, 449 aa, Pseudomonas putida KT2440; identical to SEQ ID NO: 56955

SEQ ID NO: 137031 - DNA, 1347 bp, Lactobacillus plantarum WCFS1; identical to SEQ ID NO: 56956
  CDS (1)..(1347): transl_table=11

SEQ ID NO: 137032 - protein, 448 aa, Lactobacillus plantarum WCFS1; identical to SEQ ID NO: 56957

SEQ ID NO: 137033 - DNA, 1338 bp, Bacteroides thetaiotaomicron VPI-5482
  CDS (1)..(1338): transl_table=11
atgaacatccagaaaatcatgtcctctttggaggcaaagcaccccggtgaattagagtatcttcaagcagtaaaagaagttcttctttcgatcgaagatatatacaatcagcatcccgaatttgaaaaggtcaagatcatagaaagactggtagaacctgatcgtatcttcactttccgtgtcacttgggtagacgataaaggggaagttcagaccaatctcggttatcgtgtacagttcaacaatgcaatcggtccgtacaaaggcggtatccgtttccatgcttccgtcaacctctccattttgaaattcctcggcttcgagcagacattcaagaatgcgctgactacccttccgatgggtggcggcaaaggcggttcggacttctcgccccgtggcaagagcgatgctgaaatcatgcgtttctgtcaggcgtttatgcttgaattgtggcgccatctgggaccggacatggatgtacctgccggtgatatcggtgtaggcggacgcgaagtaggttatatgttcggtatgtacaagaagctgacccgcgaatttacgggaacctttaccggaaaaggactggagttcggcggttcgctgattcgtccggaagctaccggcttcggcggtttgtacttcgtttatcagatgttgcaggcaaaaaatatagatatcaaaggcaagacagtcgctatctccggcttcggtaacgtagcttggggcgctgccaccaaggcgaccgaattgggtgccaaagtaattacgatctccggaccggacggatatatctacgatccggacggcatcagcggagaaaagatagattatatgctcgaacttcgggcttcgggcaatgacatcgttgctccttacgccgaaaaatatccgggtgcaaccttcgtagaaggcaagcgtccgtgggaagtaaaagcagatattgcacttccttgcgctactcagaacgaattaaatggagaagatgcacaaaatctcataaaaaataacgttctttgcattggagaaatttccaacatgggatgtacaccggaagcaatcgacttatttatcgaaaagaaaataatgtatgctccgggtaaggcagtcaacgctggtggtgttgccacttccgggctggaaatgtctcagaacgccatgcacctgagctggagcgctgctgaagtggacgaaaaactccacgccatcatgcacggtatccatgcacaatgcgtgaaatacggtacagaacccgacggatatatcaattatgtgaagggagctaacattgccggattcatgaaagtagctcacgctatgatgggacaaggcgttatttaa

SEQ ID NO: 137034 - protein, 445 aa, Bacteroides thetaiotaomicron VPI-5482
MNIQKIMSSLEAKHPGELEYLQAVKEVLLSIEDIYNQHPEFEKVKIIERLVEPDRIFTFRVTWVDDKGEVQTNLGYRVQFNNAIGPYKGGIRFHASVNLSILKFLGFEQTFKNALTTLPMGGGKGGSDFSPRGKSDAEIMRFCQAFMLELWRHLGPDMDVPAGDIGVGGREVGYMFGMYKKLTREFTGTFTGKGLEFGGSLIRPEATGFGGLYFVYQMLQAKNIDIKGKTVAISGFGNVAWGAATKATELGAKVITISGPDGYIYDPDGISGEKIDYMLELRASGNDIVAPYAEKYPGATFVEGKRPWEVKADIALPCATQNELNGEDAQNLIKNNVLCIGEISNMGCTPEAIDLFIEKKIMYAPGKAVNAGGVATSGLEMSQNAMHLSWSAAEVDEKLHAIMHGIHAQCVKYGTEPDGYINYVKGANIAGFMKVAHAMMGQGVI

SEQ ID NO: 137035 - DNA, 1347 bp, Enterococcus faecalis V583
  CDS (1)..(1347): transl_table=11
atggacgcaaaacaatatgttaaaaatattcaagaaaaaattcaccaattagaccaaggtcaaacagaatatttacaagcagtcgatgagtttttaccaaccgtagaaggttttttagaaaaaaatcctcaatacattgaagcaaatgttttaggtgtcttgattgaacctgaacgtatttttcaatttcgtgtgccgtggcaagatgaccagggcaattggcatgtgaacagaggctatcgtgtccaatataattcagcgattggaccatacaaaggtggtttgcggtttcatccaagtgtgaatttaagtgtgatgaagtttttggcctttgaacaaatttttaaaaatagtttaactggtttgccaatcggtggcggcaaaggcggtagtgattttgatccaaaaggtaagtcagatgctgaagtgatgcgcttttgtcaaagtttcatgaccgaacttcaaaaacatattggtccaagcacagatgttccagcaggcgatattggcgtaggcgctcgtgaaattggttatttgtttggcatgtataaacgcttgcgcaactatgatgcaggagtgttgactggcaaacctttaggatactggggaagccaagcaagaacagaagcgacgggttatggaacggtttattttgttaaacatttattagcagataaaaacgatacgtttgaaggcaaaaaagtcgctgtttctggtagtgggaatgtcgcaatttatgccatggaaaaagcaactgagctaggcgccacagtaatcacatgttccgattcgtctggttttgtctatgatccagaaggaattgatgtggcgttagtaaaagaactaaaagaaaaaaatcgtgagcgcatttcaaaatatgttgaaacacgtaaaggcgcaacttattatgataaagaatctgtttggaatttcgaaacagcgtatgacattgcgttaccatgtgcaacacaaaatgaaatcaacgaaaagcaagccgctattttagtgaaaaacggagtgaaagtcgtggcagaaggcgcaaatatgccttgtacactagaagcagtcgccgtttttgctaaatcagctgtaatttattgtccaggcaaagccgctaatgcaggtggtgttgcggtttctgcattagagatgagccaaaatgctgaacgtttagcttggtcctttgaaaaagttgacggtatgctagatcaaattatgcaaaacatttatgagacttgtcgtgatacagctaacgaatatcaggcacgagataactttgttttaggtgcgaatattgctggctttgaaaaagtagcggcagcgatgctaagtcaaggactcgtttaa

SEQ ID NO: 137036 - protein, 448 aa, Enterococcus faecalis V583
MDAKQYVKNIQEKIHQLDQGQTEYLQAVDEFLPTVEGFLEKNPQYIEANVLGVLIEPERIFQFRVPWQDDQGNWHVNRGYRVQYNSAIGPYKGGLRFHPSVNLSVMKFLAFEQIFKNSLTGLPIGGGKGGSDFDPKGKSDAEVMRFCQSFMTELQKHIGPSTDVPAGDIGVGAREIGYLFGMYKRLRNYDAGVLTGKPLGYWGSQARTEATGYGTVYFVKHLLADKNDTFEGKKVAVSGSGNVAIYAMEKATELGATVITCSDSSGFVYDPEGIDVALVKELKEKNRERISKYVETRKGATYYDKESVWNFETAYDIALPCATQNEINEKQAAILVKNGVKVVAEGANMPCTLEAVAVFAKSAVIYCPGKAANAGGVAVSALEMSQNAERLAWSFEKVDGMLDQIMQNIYETCRDTANEYQARDNFVLGANIAGFEKVAAAMLSQGLV

SEQ ID NO: 137037 - DNA, 1344 bp, Nitrosomonas europaea ATCC 19718
  CDS (1)..(1344): transl_table=11
atgaaatacaacagtatcgaggaattcaagaattatgtttccgaaaggaatccagggcaacccgaattcctgcaggccgtttcagaagtcattgaaagcttgtggccttttatcgtcgatcattctcgttacgctgagcaggggttgctggatcggctgatcgagccggagcgcatgatcatattccgggtggcgtgggtggatgatcggggtgaagtcaaggtcaatcgggggtaccgcattcaatataattcggcgatcggcccatacaaggggggtacgcgcttccatccgtcagtcaacctttccattctcaaattccttgcatttgagcagactttcaagaatgcactgacaacattgccgatgggaggaggcaagggtggatcggattttgatcccaagggtaaaagtcccggtgaaatcatgcgcttctgccaagcgtatgcggccgaactgttccggcatgtcggtgcggatacggatgtacctgccggagacatcggtgtgggcggacgggaagtcggctacatggctggtatggtcaagaagctgaccaaccgttcggactgtgtatttaccggcaaaggattgaccttcgggggatcgctgctgcggccggaagctaccgggtacggtctggtctattttgccgaagagatgctgaatcactccggttgttcattgaaaggcatgcgggtatccgtatccggttccgggaacgtggcacagtttgccattgacaaggccatgtcgctgggtgccaaagtagtcacggtttcagattcgagtggtacggtggtggatgaagccggttttacaccagaaaaactggcaattctggccgaagtcaagaatcgtctctacgggcgtgtcaatgaatttgctgaacgggtggaagcacagttccttccgggtgaaaaaccgtggcatgtgccggtggatgtcgctttgccctgtgcgacccagaatgaactgaacgaaaacgacgccgcaatactgatcaggaatggtgcgaattgtgtggccgagggtgccaatatgccatgcactgcaggtgccgtggaacgattccatcatgcgaaagtactgtttgcacctggcaaggcgagcaacgcaggcggagtggctacctcgggtctggaaatgagccagcaggccatgcgactttcctggacgagcggagaagtcgatatgcggttacaggaaatcatgcgtgccattcatcattcctgcaccgaatacggcaagaagcctgacggtacggtcaactatgtggatggtgccaatgttgccggatttgtgaaagtggccgaggcaatgctggcgcaaggggtgatctga

SEQ ID NO: 137038 - protein, 447 aa, Nitrosomonas europaea ATCC 19718
MKYNSIEEFKNYVSERNPGQPEFLQAVSEVIESLWPFIVDHSRYAEQGLLDRLIEPERMIIFRVAWVDDRGEVKVNRGYRIQYNSAIGPYKGGTRFHPSVNLSILKFLAFEQTFKNALTTLPMGGGKGGSDFDPKGKSPGEIMRFCQAYAAELFRHVGADTDVPAGDIGVGGREVGYMAGMVKKLTNRSDCVFTGKGLTFGGSLLRPEATGYGLVYFAEEMLNHSGCSLKGMRVSVSGSGNVAQFAIDKAMSLGAKVVTVSDSSGTVVDEAGFTPEKLAILAEVKNRLYGRVNEFAERVEAQFLPGEKPWHVPVDVALPCATQNELNENDAAILIRNGANCVAEGANMPCTAGAVERFHHAKVLFAPGKASNAGGVATSGLEMSQQAMRLSWTSGEVDMRLQEIMRAIHHSCTEYGKKPDGTVNYVDGANVAGFVKVAEAMLAQGVI

SEQ ID NO: 137039 - DNA, 1353 bp, Helicobacter hepaticus ATCC 51449
  CDS (1)..(1353): transl_table=11
atgtcatacgcaagtaatgttcttaacaaacttaaggaacaatatccttcacaaacgctttttcatcaagctgtggcggaagtttttgaatctctagaaccggctcttcaaaaggataagaaatatgaaacttatgcgatacttgagcgtctcacaataccagatagagaaatccattttcgtgtaagttggactgatgataatggtaaaatccaaacaaaccgagcttatcgtattgaatttaatgctgctattggaccatataaaggtggtttgcgttttcacccaagtgtaaatgaaggtgtaattaaatttttaggatttgagcagattctaaaaaactctcttacaactctcgctatgggaggtggtaagggcggaagtgattttgacccaaaaggaaagagtgaaggcgagataatgcgattttgtcaagcttttatgaatgagctttatcgtcatatcggtgcaaccactgatgttccagcaggagatattggcgtaggtggtagagaaataggctatctttttggacaatatcgtaaattaacaaactgctttgaaggtgtctttacaggtaaggcaattccttggggcggaagtcttgtgcgcacggaagcaacaggttatggttgtgtatattttgctcaagaaatgcttaaagatagaggtgaaagtttagagggcaaagtttgtagcgtttcaggtgcgggtaatgttgctatttatacgattgaaaaactccttcagcttggggcaattcctgttactgcaagtgattctcaaggtatgatttatgataaagagggtattgatttagcattactcaaagaagtcaaagaaatcaaacgtttaacacttgcagaatatgcaaaagcaagacctcaagcggtttatacaaaagtggctgattatccaaaagatagcaatcctgtatgggctatcccttgttttgcggcattcccaagtgcaacacaaaatgaactcaatgggaatgatgctaaaacacttcttgcgaatggttgcaaatgtgtcagtgaaggggcaaatatgccttcaaccattgaagctgttcatcaatttcttgatgcaaaaatctgctatggaccaggtaaggctgcaaatgcaggtggtgtagcagtcagtggtttggaaatggcacaaaatgcaagtatgaatccgtggacttttgaagttgtggataaacgcttacatactattatggaaagcatttatgcaaatgcaagtgaaactgcaaaagaatttggtgagcctacaaacttagtgcttggtgcaaatattgcaggattccgcaaggttgctggagcaatgatagaccaaggtgtgatttaa

SEQ ID NO: 137040 - protein, 450 aa, Helicobacter hepaticus ATCC 51449
MSYASNVLNKLKEQYPSQTLFHQAVAEVFESLEPALQKDKKYETYAILERLTIPDREIHFRVSWTDDNGKIQTNRAYRIEFNAAIGPYKGGLRFHPSVNEGVIKFLGFEQILKNSLTTLAMGGGKGGSDFDPKGKSEGEIMRFCQAFMNELYRHIGATTDVPAGDIGVGGREIGYLFGQYRKLTNCFEGVFTGKAIPWGGSLVRTEATGYGCVYFAQEMLKDRGESLEGKVCSVSGAGNVAIYTIEKLLQLGAIPVTASDSQGMIYDKEGIDLALLKEVKEIKRLTLAEYAKARPQAVYTKVADYPKDSNPVWAIPCFAAFPSATQNELNGNDAKTLLANGCKCVSEGANMPSTIEAVHQFLDAKICYGPGKAANAGGVAVSGLEMAQNASMNPWTFEVVDKRLHTIMESIYANASETAKEFGEPTNLVLGANIAGFRKVAGAMIDQGVI

SEQ ID NO: 137041 - DNA, 1242 bp, Rhodopirellula baltica SH 1
  CDS (1)..(1242): transl_table=11
atgaaagctttcgaagccacgcggattttctttgaccaagccgcggatcgtttagagattgatccggatcttcgagaagctttgttgatgccccagcgtgaggtgcaggtccaagtgaccatccgtctcgatgacgggcgtctcgcgaattacatcggatttcgtgttcagcacgatcacagtcgcggccccatgaagggcggattgcgattccaccccgaagtcgacctggatgaaactcgcgcattggcgagtttgatgacttggaaaaccgccgtggtcgatttgccatatggcggagcaaaaggcggcattggaattgatcccagcaagatgtcgtcggccgagatcgaacgactgactcgggcgtttgtcgatcagattcatgacatcgtggggcctgatacggacattcccgcacctgacatgggtacggatcaccaagtgatggcctggttccggaaccaatgggaaaagtaccacggttttcatccggccgtcatcacgggaaagcccgtcgaagaatatggtgccaagggccgtgaagaagcgaccggtcgcggggtcgggactttgacagtgaagttgaccaagcgtttgggaatggatgcatcaaagactcgcgttgccattcaaggttttgggaatgtgggttcacatgccgccaagttcttgcatgacgcccagtttccgatcgtcgcggtttcggacatcaccgggacctattacaacgccgacggattgaacatccccgagttgctgcgtcacaagtttgcgcacccaaagggattgctggaaggattcgagcgagccgagcatttgccgcttgatgcgttgttgaaactcgatcatgtcgaggtgttgattcccgccgcgttgggtggtgtcatcacgcaaaagaatgctcaagacatcaacgcgaaagtcattgttgaggcagcgaacggtccggtcgatccagatgccgacgcggcacttcacgatcgtggggtcacgattctgccggacattctcgccaacgcgggcggcgtgacggtcagctatttcgaatgggtgcaaaaccggcagcactaccgatggccgctggatcgtgtgcgtcaagaactcgatcacacgatgaatgaagcgttcgaaaaggtttggcagatggcggctcagcacgaagtgtcacttcgaaccgccgcctacatgatcggaatctcaagagttcgtcgtgcaacggaactcgccggcttggcttga

SEQ ID NO: 137042 - protein, 413 aa, Rhodopirellula baltica SH 1
MKAFEATRIFFDQAADRLEIDPDLREALLMPQREVQVQVTIRLDDGRLANYIGFRVQHDHSRGPMKGGLRFHPEVDLDETRALASLMTWKTAVVDLPYGGAKGGIGIDPSKMSSAEIERLTRAFVDQIHDIVGPDTDIPAPDMGTDHQVMAWFRNQWEKYHGFHPAVITGKPVEEYGAKGREEATGRGVGTLTVKLTKRLGMDASKTRVAIQGFGNVGSHAAKFLHDAQFPIVAVSDITGTYYNADGLNIPELLRHKFAHPKGLLEGFERAEHLPLDALLKLDHVEVLIPAALGGVITQKNAQDINAKVIVEAANGPVDPDADAALHDRGVTILPDILANAGGVTVSYFEWVQNRQHYRWPLDRVRQELDHTMNEAFEKVWQMAAQHEVSLRTAAYMIGISRVRRATELAGLA

SEQ ID NO: 137043 - DNA, 1344 bp, Bordetella pertussis Tohama I
  CDS (1)..(1344): transl_table=11
ttgaaattgcagagtctggacgacttcctgcgccgggttgccgcgcgcgatccgcaacaagccgaattcatgcaggcagtccaagaggtcatgctgagcctctggcccttcatcgagaagcacccgcattacgccgagcacgccctgctggaacgcctggtcgagcccgaacgcgtgatccagttccgtgtctgctggaccgatgaccagggccaggcccaggtcaaccgcgccttccgcatccagcacagctcggccatcggccccttcaagggcggcatgcgcttccacccgacggtcaatctgtcggtgctgaagttcctggctttcgaacaaaccctgaagaacgcgctgaccaccctgcccatgggcggcggcaagggcggctccgacttcgaccccaagggcaagtcggacgccgaggtgatgcgtttctgccaggcgctgatgctggaactgcaccgccacctgggcccggacaccgacgtgcccgccggcgatatcggcgtgggcgcgcgcgaggtcggcttcatggccggcatgatgaaaaagctgtcgaactcggcggccagcgtattcaccggcaagggcctgtgcttcggcggcagcctgatccgccccgaagccaccggctacggcacggtctatttcgcgcaggaaatgctgcaacgcgccggcctgtctttcgacggcatgcgcgtgtcggtgtcgggctcgggcaacgtggcccagtacgcgatcgagaaagccatggcgctgggcgccaaggtcgtcacgatctcggactcgtgcggcacggtcatcgacgaagccggcttcacgcacgagaagctgctggccctgatgcacatcaagaacgacctgcgcggccgcctggacacgtacgccagccagttcggcctgcgctacgaggccggcgtgcgcccctggcacgtgccggtggatgtcgccctgccgtgcgccacccagaacgagctggacgaaaacgacgcccgcacgctgatccgcaacggcgtgaaatgcgtggccgaaggcgccaacatgcccgccaccctggacgccgccaaggctttcatcgcggccgaagtgctgtacgcgccgggcaaggccagcaacgccggcggcgtggcggtgtcgggcctggaaatgagccagaactcggcccgcctgccctggacgcgtgaacaggtgaacgcgcggctgcatgccatcatgcgcgatatccacgaaaactgcgtgcgccacggccacggcgccggcaactacgtcaactatgtggatggcgccaacatcgccggcttcgtcaaggtcgccgacgccatgcgccagcaaggcctgtactga

SEQ ID NO: 137044 - protein, 447 aa, Bordetella pertussis Tohama I
MKLQSLDDFLRRVAARDPQQAEFMQAVQEVMLSLWPFIEKHPHYAEHALLERLVEPERVIQFRVCWTDDQGQAQVNRAFRIQHSSAIGPFKGGMRFHPTVNLSVLKFLAFEQTLKNALTTLPMGGGKGGSDFDPKGKSDAEVMRFCQALMLELHRHLGPDTDVPAGDIGVGAREVGFMAGMMKKLSNSAASVFTGKGLCFGGSLIRPEATGYGTVYFAQEMLQRAGLSFDGMRVSVSGSGNVAQYAIEKAMALGAKVVTISDSCGTVIDEAGFTHEKLLALMHIKNDLRGRLDTYASQFGLRYEAGVRPWHVPVDVALPCATQNELDENDARTLIRNGVKCVAEGANMPATLDAAKAFIAAEVLYAPGKASNAGGVAVSGLEMSQNSARLPWTREQVNARLHAIMRDIHENCVRHGHGAGNYVNYVDGANIAGFVKVADAMRQQGLY

SEQ ID NO: 137045 - DNA, 1350 bp, Bordetella parapertussis 12822; identical to SEQ ID NO: 56958
  CDS (1)..(1350): transl_table=11

SEQ ID NO: 137046 - protein, 449 aa, Bordetella parapertussis 12822; identical to SEQ ID NO: 56959

SEQ ID NO: 137047 - DNA, 1395 bp, Bordetella bronchiseptica RB50
  CDS (1)..(1395): transl_table=11
ttgcaccgcaacacaacgcgctgcaccatcgcattgccaggaggcagtatcttgaaattgcagagtctggacgacttcctgcgccgggttgccgcgcgcgatccgcaacaagccgaattcatgcaggcagtccaagaggtcatgctgagcctctggcccttcatcgagaagcacccgcattacgccgagcacgccctgctggaacgcctggtcgagcccgaacgcgtgatccagttccgcgtctgctggaccgatgaccagggccaggcccaggtcaaccgcgccttccgcatccagcacagctcggccatcggccccttcaagggcggcatgcgcttccacccgacggtcaatctgtcggtgctgaagttcctggctttcgaacaaaccctgaagaacgcgctgaccaccctgcccatgggcggcggcaagggcggctccgacttcgaccccaagggcaaatcggacgccgaggtgatgcgtttctgccaggcgctgatgctggaactgcaccgccacctgggcccggacaccgacgtgcccgccggcgatatcggcgtgggcgcgcgcgaggtcggcttcatggccggcatgatgaaaaagctgtcgaactcggcggccagcgtattcaccggcaagggcctgtgcttcggcggcagcctgatccgccccgaagccaccggctacggcacggtctatttcgcgcaggaaatgctgcaacgcgccggcctgtctttcgacggcatgcgcgtgtcggtgtcgggctcgggcaacgtggcccagtacgcgatcgagaaagccatggcgctgggcgccaaggtcgtcacgatctcggactcgtgcggcacggtcatcgacgaggccggcttcacgcacgagaagctgctggccctgatgcacatcaagaacgacctgcgcggccgcctggacacgtacgccagccagttcggcctgcgctacgaggccggcgtgcgcccctggcacgtgccggtggatgtcgccctgccgtgcgccacccagaacgagctggacgaaaacgacgcccgcacgctgatccgcaacggcgtgaagtgcgtggccgaaggcgccaacatgcccgccaccctggacgccgccaaggctttcatcgcggccgaagtgctgtacgcgccgggcaaggccagcaacgccggcggcgtggcagtgtcgggcctggaaatgagccagaactcggcccgcctgccctggacgcgcgaacaggtggacgcgcggctgcatgccatcatgcgcgatatccacgaaaactgcgtgcgccacggccacggcgcgggcaactacgtcaactacgtggatggcgccaacatcgccggcttcgtcaaggtcgccgacgccatgcgccagcagggcctgtactga

SEQ ID NO: 137048 - protein, 464 aa, Bordetella bronchiseptica RB50
MHRNTTRCTIALPGGSILKLQSLDDFLRRVAARDPQQAEFMQAVQEVMLSLWPFIEKHPHYAEHALLERLVEPERVIQFRVCWTDDQGQAQVNRAFRIQHSSAIGPFKGGMRFHPTVNLSVLKFLAFEQTLKNALTTLPMGGGKGGSDFDPKGKSDAEVMRFCQALMLELHRHLGPDTDVPAGDIGVGAREVGFMAGMMKKLSNSAASVFTGKGLCFGGSLIRPEATGYGTVYFAQEMLQRAGLSFDGMRVSVSGSGNVAQYAIEKAMALGAKVVTISDSCGTVIDEAGFTHEKLLALMHIKNDLRGRLDTYASQFGLRYEAGVRPWHVPVDVALPCATQNELDENDARTLIRNGVKCVAEGANMPATLDAAKAFIAAEVLYAPGKASNAGGVAVSGLEMSQNSARLPWTREQVDARLHAIMRDIHENCVRHGHGAGNYVNYVDGANIAGFVKVADAMRQQGLY

SEQ ID NO: 137049 - DNA, 1356 bp, Prochlorococcus marinus str. MIT 9313
  CDS (1)..(1356): transl_table=11
atgtctgatgctactagccatgagatagatcatttcatgaaaggtctgatgaagagaaatcctggagagcctgagtttcatcaagccgtccatgaagttgttgaaactctaataccttttattctttccaaccgtgtttacaaagatgcacagattctggagcggatgacggaacctgaccgcgtcgttatcttcagagtctgctgggaagatgattcaggcaatatccgcacaaatcgagcatggcgtgtacagtttaataattccattggcccttataaaggtggaatacgtttccatcccaatgtcaccttgagtgtcctgaaatttttaggttttgaacagacctttaaaaacagtcttactggtctgccgatgggtggagggaagggtggatctaactttaatcctaaaggtaaaagtgaccgggagataatgcgattttgtcaatctctgatgattgaacttcatagacatattggtgaagacacagatgtacctgcaggtgatatcggagtcggttctcgtgaaattagttatatgttcggtcagtacaagcgccttgaaaatcggtttagtggaatcttgactggcaaggggctgtcattcggtggaagtcttgttcgtactgaagcgacgggttacggatgtgcttatttctgtgaaaatatgctcaatcatatagaggactctctcgttgacaaaatatgttccatctccggttctggaaacgtagccctctacgcagttgaaaaggccattgaactaggagccaaagttgttactctttctgactcagatggttttgtacacgtcccaaacggcattaatctcgagatgcttgcgtttatcaaagagctaaagactgttcgccgtgggcgaatccatgaatttgctaatcactacaaaggcgtagatttttacgcaggaaagcgtccatggaatgttccctgtgatattgccttcccttgtgctactcaaaatgagattaaccgtgcagattcacaggaactgatcaacaatggtgtcaaagcagttgttgaaggtgcgaacatgccaaccaatcttgacggcattcatgaatttcgtcatgcaaaagtaatacttgctcctgccaaggctgcaaatgctgggggtgtcgcagtctctggccttgagcagagtcagaatgcattgcgtctatcttggagtcgtgaagaggtcgatcaacgcttaaagtcaattatgttggaaattcactccaaatgtgttcagcatagtcataaatacgaagactacactgattacattacaggagccaatattgcaggatttacgaaagttgctgatgcaatgctggcttatggaattgtttga

SEQ ID NO: 137050 - protein, 451 aa, Prochlorococcus marinus str. MIT 9313
MSDATSHEIDHFMKGLMKRNPGEPEFHQAVHEVVETLIPFILSNRVYKDAQILERMTEPDRVVIFRVCWEDDSGNIRTNRAWRVQFNNSIGPYKGGIRFHPNVTLSVLKFLGFEQTFKNSLTGLPMGGGKGGSNFNPKGKSDREIMRFCQSLMIELHRHIGEDTDVPAGDIGVGSREISYMFGQYKRLENRFSGILTGKGLSFGGSLVRTEATGYGCAYFCENMLNHIEDSLVDKICSISGSGNVALYAVEKAIELGAKVVTLSDSDGFVHVPNGINLEMLAFIKELKTVRRGRIHEFANHYKGVDFYAGKRPWNVPCDIAFPCATQNEINRADSQELINNGVKAVVEGANMPTNLDGIHEFRHAKVILAPAKAANAGGVAVSGLEQSQNALRLSWSREEVDQRLKSIMLEIHSKCVQHSHKYEDYTDYITGANIAGFTKVADAMLAYGIV

SEQ ID NO: 137051 - DNA, 1350 bp, Wolinella succinogenes DSM 1740
  CDS (1)..(1350): transl_table=11
atgccctatatccagcagaccctagaacaactccaaaaaactttccccgcccaaaaagagttccaccaagccgtccacgaagtccttgatagtctccgccctcttttggccaaagagtccaaatatgagcgctacaacattcttcaacgcatcgttatccccgagcgccaaatcggctttcgtgtcacatggatggatgacgcaggccgcattcaagtcaaccaaggctaccgcatccaatacaactccactcttgggccctacaaagggggaatcagactccatcccagcgtgaacgagggaatcatcaaattccttggcttcgagcagatttttaaaaatgccctcacaggactagcgatggggggcgccaaaggaggctctgactttgatcccaagggcaaaagtgaggctgaagtgatgcgattcgctcaagcttttatgagcgagctctatcgccatattggccctctcacagatgttcctgcgggagatattggcacaggcgcgcgcgagattggctatctatttggtcaatacaagaaactagtcaatcgctatgaaggcgtcctcacgggcaaatccttgctatggggcggctcgctcgctcgcaaggaggcgacaggctttggctccgtctattttgccgaagagatgctaagagaaagaggggagagcctagagggcaaaacctgcctcgtctctggatcgggcaatgtcgccatctataccgtgcaaaaacttctcgaactaggggcaaaacccatcactgtgagcgattcaacgggcatgattcatgatgcctcaggaattgatctagatctcctcaaagagatcaaggagaatcgccgcgaaagtctcacctcctatgccaaagagcatcccggctcacgctttatttctgtgggtgaataccccaaagatcacaaccctctatgggcaattccctgctttgcagccttccccagtgccacccaaaacgagctcaacgaaaaagacgccaagcacctcctccaaaatggctgcatctgcgtctctgaaggggccaatatgccctccactcctagtgccgtggagaagtttttggccgcgaaaatctgctatggcccaggcaaggccgccaatgcaggaggagtggcgactagtggtctagagatgagccaaaatgcttcgatgacttcgtggagttttgaagaggtggatatgaagcttcatggaatcatgaggggaatctatcgtgccgccaaagagaccgccaaagagtttggcgaaccccacaatctcgtcttgggcgccaatattgctggattccgcaaggtcgctgatgcgatgatcgagcaggggatttaa

SEQ ID NO: 137052 - protein, 449 aa, Wolinella succinogenes DSM 1740
MPYIQQTLEQLQKTFPAQKEFHQAVHEVLDSLRPLLAKESKYERYNILQRIVIPERQIGFRVTWMDDAGRIQVNQGYRIQYNSTLGPYKGGIRLHPSVNEGIIKFLGFEQIFKNALTGLAMGGAKGGSDFDPKGKSEAEVMRFAQAFMSELYRHIGPLTDVPAGDIGTGAREIGYLFGQYKKLVNRYEGVLTGKSLLWGGSLARKEATGFGSVYFAEEMLRERGESLEGKTCLVSGSGNVAIYTVQKLLELGAKPITVSDSTGMIHDASGIDLDLLKEIKENRRESLTSYAKEHPGSRFISVGEYPKDHNPLWAIPCFAAFPSATQNELNEKDAKHLLQNGCICVSEGANMPSTPSAVEKFLAAKICYGPGKAANAGGVATSGLEMSQNASMTSWSFEEVDMKLHGIMRGIYRAAKETAKEFGEPHNLVLGANIAGFRKVADAMIEQGI

SEQ ID NO: 137053 - DNA, 1377 bp, Gloeobacter violaceus PCC 7421; identical to SEQ ID NO: 56960
  CDS (1)..(1377): transl_table=11

SEQ ID NO: 137054 - protein, 458 aa, Gloeobacter violaceus PCC 7421; identical to SEQ ID NO: 56961

SEQ ID NO: 137055 - DNA, 1344 bp, Photorhabdus luminescens subsp. laumondii TTO1
  CDS (1)..(1344): transl_table=11
atgagctgtttactatctttgtcttcatttcttggatcgattcaacgcagggatgaatatcaaccagaatatctccaggctgttcgggaagtattcacctctctttggccgtttcttgaacaaaacccgaaataccgtgaatacagcttactggagcgtatggtggagccagaaagggttatccagttccgggtttgttgggtagatgatcaaggtaaagttcaggtaaaccgtgcatggcgagtgcagttcagctcagccattgggccatataaaggtggtatgcgttttcatccatcggtgaacctctctattctgaaattcttgggctttgaacaaaccttgaaaaatgcactgacaaccttaccaatgggtggtggtaaaggcggttcagattttgatcctaaaggaaaaagtcagggcgaggttatgcgtttttgtcaggcattaatgacagaattgtaccgtcatttggggccagatactgatgttcccgcaggtgatattggtgtgggtggccgtgaagtggctttcatgtcagggatgatgaaaaagctttctaacaacacggcttgtgtatttaccggcaaaggtctctcttttggcggtagtttgattcgcccggaagcaaccggttatggtctggtctatttcgtcaatgccatgttgaaacgtcatggcatggggtttgaaggtatgcgcgtatcggtttccggtgctggtaatgtcgcgcaatatacgattgaaaaatgcatggcattgggagcgaaagtggtcaccgcttcggattccggcggtaccttagttgatgaggatgggttcacaccagagaaactgactcatcttgaagagataaaaaaccaacgctatggccgagtggaagaatatgccagagagcggggtctgactttcttgaaagggttacaaccgtggtctgtaccggttgatatcgctttgccatgtgccacccagaatgagctggatttggatgcggctaaggtccttatcaagaatggtgttaaagctgttgctgaaggggcgaatatgccagcaactatttcagcgacggaagcctttattgaagcaggtgtgctatttgcaccaggtaaagcagccaatgcgggtggcgtggcaacatctggtctggaaatggcacaaaatgcggcccgtttaggctggaaggctgaaaaagtggatgcacgtttgcatcatatcatgctagatattcaccacgcttgtgttgagtatggtggcgagggcaaacagatcaattatgttcagggggcgaatatcgctggatttgtgaaagttgccgacgctatgcttgctcaaggtattctgtag

SEQ ID NO: 137056 - protein, 447 aa, Photorhabdus luminescens subsp. laumondii TTO1
MSCLLSLSSFLGSIQRRDEYQPEYLQAVREVFTSLWPFLEQNPKYREYSLLERMVEPERVIQFRVCWVDDQGKVQVNRAWRVQFSSAIGPYKGGMRFHPSVNLSILKFLGFEQTLKNALTTLPMGGGKGGSDFDPKGKSQGEVMRFCQALMTELYRHLGPDTDVPAGDIGVGGREVAFMSGMMKKLSNNTACVFTGKGLSFGGSLIRPEATGYGLVYFVNAMLKRHGMGFEGMRVSVSGAGNVAQYTIEKCMALGAKVVTASDSGGTLVDEDGFTPEKLTHLEEIKNQRYGRVEEYARERGLTFLKGLQPWSVPVDIALPCATQNELDLDAAKVLIKNGVKAVAEGANMPATISATEAFIEAGVLFAPGKAANAGGVATSGLEMAQNAARLGWKAEKVDARLHHIMLDIHHACVEYGGEGKQINYVQGANIAGFVKVADAMLAQGIL

SEQ ID NO: 137057 - DNA, 1347 bp, Corynebacterium diphtheriae NCTC 13129
  CDS (1)..(1347): transl_table=11
atgtcgcctatcgatgagaaggtacagggctactacgagctgcttttgaagcgaaaccctgcggagccggaattccaccaggcagttaacgaagtccttgactctctgaaaattgttttggaaaaggatcctcactacgcggactacggcttgattcagcgcttgtgtgagcctgagcgccagcttatgttccgcgttccatgggtagatgacaacggagttgtccaggttaaccgtggtttccgcgttcaatttaactcggccatcggtccttataagggcggcctgcgtttccacccatccgttaacttgggcatcatcaagttcttaggctttgagcagatctttaagaactctttgaccggtcttcctatcggcggtggcaagggtggttccgacttcgaccctaagggtaagtctgatgtagaaattatgcgcttctgccagtccttcatgacagagctttaccgccacatcggcgagtaccgtgacgttcctgctggcgacatcggagttggcggccgtgagattggttatttattcggtcagtatcgtcgactagcaaaccagcatgagtccggtgttttgaccggtaagggtcttacctggggcggatccttggtccgtaccgaggctaccggttatggattggtgtacttcactgctgagatgcttgctcatcacggccagtccttcgaaggtaagaaggttattgtttccggttccggcaacgtggcaatttacgccatcgagaaagctcaggaactgggcgcaaccgtgattggtttctctgattcttctgcttgggttgaaactcctaacggtgtggatgttgccaaactcaaggagatcaaggaagtccgtcgtgagcgtgtatcgagctatgtcgacgaagttgaaggcgcaatcctgcacactgagggctcgatttgggatctcacctgtgatgttgctcttccatgtgccacccaaaacgagcttgatggcgagcatgccaagaaactagctgacaatggctgtgccttcgttgcagagggtgccaacatgccatcgactgctgatgctatcgaggtctaccgcgagcgtggaatccactttggtccaggtaaggctgctaacgctggcggcgtggcaacctcagcactggagatgcagcagaacgcatctcgtgattcgtggagcttcgagtatgcagatcagcgccttcgcgagatcatgaagggtatcttcaagaactgtgagtctactgctcgcgaatatggtcatgagggcgactacgtagtaggtgccaacattgcaggcttcaagaaggtcgcagatgcgatgcttgcacaaggtgtcatctaa

SEQ ID NO: 137058 - protein, 448 aa, Corynebacterium diphtheriae NCTC 13129
MSPIDEKVQGYYELLLKRNPAEPEFHQAVNEVLDSLKIVLEKDPHYADYGLIQRLCEPERQLMFRVPWVDDNGVVQVNRGFRVQFNSAIGPYKGGLRFHPSVNLGIIKFLGFEQIFKNSLTGLPIGGGKGGSDFDPKGKSDVEIMRFCQSFMTELYRHIGEYRDVPAGDIGVGGREIGYLFGQYRRLANQHESGVLTGKGLTWGGSLVRTEATGYGLVYFTAEMLAHHGQSFEGKKVIVSGSGNVAIYAIEKAQELGATVIGFSDSSAWVETPNGVDVAKLKEIKEVRRERVSSYVDEVEGAILHTEGSIWDLTCDVALPCATQNELDGEHAKKLADNGCAFVAEGANMPSTADAIEVYRERGIHFGPGKAANAGGVATSALEMQQNASRDSWSFEYADQRLREIMKGIFKNCESTAREYGHEGDYVVGANIAGFKKVADAMLAQGVI

SEQ ID NO: 137059 - DNA, 1353 bp, Geobacter sulfurreducens PCA
  CDS (1)..(1353): transl_table=11
atgtcaccgcatcaagtcgacgagaaacttcagggcatctatcaggacgttctcaagcgcaacccgggcgaagtggaattccaccaggcagtggccgaggtgctcgaatccctcggccccgtcgtcaccaagcaccccgaatacctggagcgcaagatcatcgagcggatctgcgaacccgaacgccagatcatcttccgggtaccctggcaggacgacaaaggccaagtccacatcaaccgcggcttccgcgtggagttcaactcggccctcggtccctacaagggcggcctccgcttccatccgtcggtctacctgggcattatcaagttcctgggcttcgagcagatcttcaagaactccctcaccggcatgcccatcggcggcggcaaggggggttccgacttcgaccccaaaggaaggtccgatgatgagatcatgcgtttctgccagagcttcatcaccgagctctaccgccacctgggcgagcacaccgacgttcccgccggcgacatcggcgtgggcggccgcgagatcggctacatgttcggccagtacaagcggatcaccaaccggtgggaagcgggcgtgctgaccggcaaggggctcaagtggggcggctccctcgtgcgtaccgaggccaccggctacggcgcaaccttcttcatcaacgaggccctcaaggtccgcaaggattcctttgacggcaagatctgcaccgtgtccggttccggcaacgtggccatctacaccatcgagaagattcaccaactgggcggcaagtgcgtggcctgctccgactccaacggcgtcattttccacgaaaaaggtctcgacctggacctcatcaagcagctgaaggaagtggagcgtcgccgcattgaggactacgcctcctatcacaaggatgccaagtacatcgcgggcggcaacatctgggacatcccctgccaggtagccatgccgtcggcaacccagaacgagatcaacggcaaggatgccaagaccctggtgaagaacggctgcatcgccgtgggcgaaggcgccaacatgcccaccacccccgaaggggtcaaggtatttctcgacgccaagattgcctacggccccggcaaggctgccaacgcaggcggcgtcgcaacgtcggccctggaaatgcagcagaacgcccagcgcgattcctggtcgttcgaagacaccgagaagaagcttgagaacatcatgaagggcatccaccgtctctgccacgagaccgccgaggaatacggcgccaccggcaactacgtgctcggcgccaacatcgccggcttcaccaaggttgccgatgccatggtggcccacggcctcgtctaa

SEQ ID NO: 137060 - protein, 450 aa, Geobacter sulfurreducens PCA
MSPHQVDEKLQGIYQDVLKRNPGEVEFHQAVAEVLESLGPVVTKHPEYLERKIIERICEPERQIIFRVPWQDDKGQVHINRGFRVEFNSALGPYKGGLRFHPSVYLGIIKFLGFEQIFKNSLTGMPIGGGKGGSDFDPKGRSDDEIMRFCQSFITELYRHLGEHTDVPAGDIGVGGREIGYMFGQYKRITNRWEAGVLTGKGLKWGGSLVRTEATGYGATFFINEALKVRKDSFDGKICTVSGSGNVAIYTIEKIHQLGGKCVACSDSNGVIFHEKGLDLDLIKQLKEVERRRIEDYASYHKDAKYIAGGNIWDIPCQVAMPSATQNEINGKDAKTLVKNGCIAVGEGANMPTTPEGVKVFLDAKIAYGPGKAANAGGVATSALEMQQNAQRDSWSFEDTEKKLENIMKGIHRLCHETAEEYGATGNYVLGANIAGFTKVADAMVAHGLV

SEQ ID NO: 137061 - DNA, 1287 bp, Bacillus cereus ATCC 10987
  CDS (1)..(1287): transl_table=11
atggtagccgaaaagggaactcaaacaaaaacacaacaacaaagggaacaacattttgaactattgaattcaacacaaattgttatcagtgaagcgttagaaaaattgggttatccaaacgaagtatatgaattattaaaagaaccagttcgtatgatgacagtgaaaataccagttcgtatggatgacgggactgttaaaatatttacaggatatcgtgcacaacataatgatgctgttggtccaacgaaaggtggaattcgcttccatccgaatgtaacagaaaatgaagtgaaagcactttcaatttggatgagtttaaaatgtggtattgtcgacttaccatatggcggaggtaaaggtggaattatctgtgacccacgtgaaatgtcattccgtgagttagaaagattaagccgtggttatgtacgagcaattagtcaaatcgtagggccgacgaaagatattccagctccagatgtattcacaaactctcaaattatggcatggatgatggatgagtatagccgtattgatgaatttaactcgccaggatttattacaggtaagccacttgtattaggtggatcacatggacgtgaaacagcaacagcgaaaggtgttacaatttgtattcgcgaagctgcaaaaaaacgcgacattgatattaaaggtgcgcgcgttgttgttcaaggattcggtaatgctggtagcttcttagctaaatttatgcatgatgcaggtgcaaaagttattgcaatctcagatgcttacggcgcattgcatgatccaaatggattagatattgattatttattagaccgtcgtgacagcttcggtacagtaacaaaactatttaataatacaatttcaaacaaagaattgttagaacttgattgtgacattttagttccagctgcaattgagaatcaaattacagaagaaaatgctaatgatattaaagcaaaaattgttgttgaagctgcaaatggtccaacaacattagaagcaactaaaattttaacagatcgcggaattttacttgttccagacgtattagcgagtgctggtggggtaacagtatcttactttgagtgggtacaaaataaccaaggttactactggactgaagaagaagtagaacaacgtttagaaaaagtaatggtaagatcatttgattctatttatgaaacagcacaagttcgtaaagtgaacatgcgcttagcagcgtatatggtcggtgttcgtaaaatggctgaagcaagtcgcttcagaggttgggtataa

SEQ ID NO: 137062 - protein, 428 aa, Bacillus cereus ATCC 10987
MVAEKGTQTKTQQQREQHFELLNSTQIVISEALEKLGYPNEVYELLKEPVRMMTVKIPVRMDDGTVKIFTGYRAQHNDAVGPTKGGIRFHPNVTENEVKALSIWMSLKCGIVDLPYGGGKGGIICDPREMSFRELERLSRGYVRAISQIVGPTKDIPAPDVFTNSQIMAWMMDEYSRIDEFNSPGFITGKPLVLGGSHGRETATAKGVTICIREAAKKRDIDIKGARVVVQGFGNAGSFLAKFMHDAGAKVIAISDAYGALHDPNGLDIDYLLDRRDSFGTVTKLFNNTISNKELLELDCDILVPAAIENQITEENANDIKAKIVVEAANGPTTLEATKILTDRGILLVPDVLASAGGVTVSYFEWVQNNQGYYWTEEEVEQRLEKVMVRSFDSIYETAQVRKVNMRLAAYMVGVRKMAEASRFRGWV

SEQ ID NO: 137063 - DNA, 1650 bp, Drosophila melanogaster; identical to SEQ ID NO: 56966
  CDS (1)..(1650)

SEQ ID NO: 137064 - protein, 549 aa, Drosophila melanogaster; identical to SEQ ID NO: 56967

SEQ ID NO: 137065 - DNA, 1692 bp, Anopheles gambiae str. PEST; identical to SEQ ID NO: 56972
  CDS (1)..(1692)

SEQ ID NO: 137066 - protein, 563 aa, Anopheles gambiae str. PEST; identical to SEQ ID NO: 56973

SEQ ID NO: 137067 - DNA, 1356 bp, Gibberella zeae PH-1; identical to SEQ ID NO: 56976
  CDS (1)..(1356)

SEQ ID NO: 137068 - protein, 451 aa, Gibberella zeae PH-1; identical to SEQ ID NO: 56977

SEQ ID NO: 137069 - DNA, 1383 bp, Candida glabrata CBS 138; identical to SEQ ID NO: 56980
  CDS (1)..(1383)

SEQ ID NO: 137070 - protein, 460 aa, Candida glabrata CBS 138; identical to SEQ ID NO: 56981

SEQ ID NO: 137071 - DNA, 1386 bp, Kluyveromyces lactis NRRL Y-1140; identical to SEQ ID NO: 56982
  CDS (1)..(1386)

SEQ ID NO: 137072 - protein, 461 aa, Kluyveromyces lactis NRRL Y-1140; identical to SEQ ID NO: 56983

SEQ ID NO: 137073 - DNA, 1368 bp, Debaryomyces hansenii CBS767; identical to SEQ ID NO: 56984
  CDS (1)..(1368)

SEQ ID NO: 137074 - protein, 455 aa, Debaryomyces hansenii CBS767; identical to SEQ ID NO: 56985

SEQ ID NO: 137075 - DNA, 1377 bp, Yarrowia lipolytica CLIB122; identical to SEQ ID NO: 56986
  CDS (1)..(1377)

SEQ ID NO: 137076 - protein, 458 aa, Yarrowia lipolytica CLIB122; identical to SEQ ID NO: 56987

SEQ ID NO: 137077 - DNA, 1380 bp, Aspergillus nidulans FGSC A4; identical to SEQ ID NO: 56988
  CDS (1)..(1380)

SEQ ID NO: 137078 - protein, 459 aa, Aspergillus nidulans FGSC A4; identical to SEQ ID NO: 56989

SEQ ID NO: 137079 - DNA, 1371 bp, Candida albicans SC5314; identical to SEQ ID NO: 56990
  CDS (1)..(1371): transl_table=12

SEQ ID NO: 137080 - protein, 456 aa, Candida albicans SC5314; identical to SEQ ID NO: 56991

SEQ ID NO: 137081 - DNA, 1368 bp, Ustilago maydis 521; identical to SEQ ID NO: 56992
  CDS (1)..(1368)

SEQ ID NO: 137082 - protein, 455 aa, Ustilago maydis 521; identical to SEQ ID NO: 56993

SEQ ID NO: 137083 - DNA, 1356 bp, Cryptococcus neoformans var. neoformans B-3501A; identical to SEQ ID NO: 56994
  CDS (1)..(1356)

SEQ ID NO: 137084 - protein, 451 aa, Cryptococcus neoformans var. neoformans B-3501A; identical to SEQ ID NO: 56995

SEQ ID NO: 137085 - DNA, 1356 bp, Prochlorococcus marinus str. MIT 9303
  CDS (1)..(1356): transl_table=11
atgtctgatgctattagccatgagatagatcatttcatgaaaggtctgatgaagagaaatcctggagagcctgagtttcatcaagccgtccatgaagttgttgaaactctaattccattcattctttccaaccgtgtttacaaagatgcacagattctggagcggatgacggaacctgaccgcgtcgtcatcttccgagtctgctgggaagatgacgcaggcaatatccgcacaaatcgagcgtggcgtgtacagtttaataattccattggaccttataaaggtggaatacgtttccatcccaatgtcaccttgagtgtcctgaaatttttaggttttgaacagacctttaaaaacagtcttactggtctgccgatgggtggagggaagggtggatctaactttaatcctaaaggtaaaagtgaccgggagataatgcgattttgtcaatctctgatgattgaacttcatagacatattggtgaagacacagatgtacctgctggtgatatcggagtcggttctcgtgaaattagttatatgttcggtcagtacaagcgccttgaaaatcggtttagtggaatcttgactggcaaggggctgtcattcggtggaagtcttgttcgtactgaagcgacgggttacggatgtgcttatttctgtgaaaatatgctcaatcatatagaagactctctcgttgacaaaatatgttccatctccggttctgggaacgtagccctctacgcagttgaaaaggccattgagctaggagcgaaagttgttactctttctgactcagatggttttgtacacgtcccaaacggcattaatctcgagatgcttgcgtttgtcaaagagctaaagactgttcgccgtgggcgaatccatgaatttgctaaccactacaaaggcgttgatttttacgcaggaaagcgtccatggaatgttccctgtgatattgccttcccttgtgctactcaaaatgagattaaccgagcagattcacaggaactgatcaacaatggtgttaaagcagttgttgaaggtgcgaacatgccaaccaatcttgacggcattcatgaatttcgtcatgcaaaagtaatacttgctcctgccaaggctgcaaatgctgggggtgtcgcagtctctggccttgagcagagtcagaatgcattgcgtctatcttggagtcgtgaagaggtcgatcaacgcttaaagtcaattatgttggaaattcactccaaatgtgttcagcatagtcataaatacgaagactacactgattacattacaggagccaatattgcaggatttaagaaagttgctgatgcaatgctggcttatggaattgtttga

SEQ ID NO: 137086 - protein, 451 aa, Prochlorococcus marinus str. MIT 9303
MSDAISHEIDHFMKGLMKRNPGEPEFHQAVHEVVETLIPFILSNRVYKDAQILERMTEPDRVVIFRVCWEDDAGNIRTNRAWRVQFNNSIGPYKGGIRFHPNVTLSVLKFLGFEQTFKNSLTGLPMGGGKGGSNFNPKGKSDREIMRFCQSLMIELHRHIGEDTDVPAGDIGVGSREISYMFGQYKRLENRFSGILTGKGLSFGGSLVRTEATGYGCAYFCENMLNHIEDSLVDKICSISGSGNVALYAVEKAIELGAKVVTLSDSDGFVHVPNGINLEMLAFVKELKTVRRGRIHEFANHYKGVDFYAGKRPWNVPCDIAFPCATQNEINRADSQELINNGVKAVVEGANMPTNLDGIHEFRHAKVILAPAKAANAGGVAVSGLEQSQNALRLSWSREEVDQRLKSIMLEIHSKCVQHSHKYEDYTDYITGANIAGFKKVADAMLAYGIV

SEQ ID NO: 137087 - DNA, 1335 bp, Clostridium thermocellum ATCC 27405
  CDS (1)..(1335): transl_table=11
atgaagttattggctggtgtaatggaacaagtcattaaaagaaatccaaatgaacctgagtttcatcaagcggtaagagaagtgttggagtcgctggaaatagtcgccgaaaaaaatccggagtacttaaaagcaggtatatttgaaaggattgttgaacctgaaagacagattattttcagagtaccgtgggtggatgacaatggcaaggtacaggtaaacagaggttttagagttcagttcaacagtgcaattggtccttacaagggcggaataagattccatccttcggttaacttgggaattatcaaattccttggtttcgagcagattttcaagaattcattgaccggccttccaatggggggaggaaaaggcggcagcgactttgatccgaaaggaaaatccgacggagaaatcatgaggttctgtcagagctttatgaccgagctttacagacatatcggaccggataccgacgttcctgcgggagatatcggtgtaggtgcccgtgaaataggttatatgttcggcatgtacagaaaaataagaaacgagtttaccggagttctgacaggaaaaggactgacatggggcggaagccttgtaagaactgaggctacaggttatggtctctgctacttcatggaagaagcaatgaagacaataaaaggtaaatcttttgaaggtgcgacagttgttatctcaggttcgggcaatgtggccatttatgcaacggaaaaagctcagcagcttggtgctaaagtagttgcattgagcgattcaaacggatatgtttatgatcctgacggaataaaactcgatacggttaagcaaataaaagaggtagaaagaaagagaatcagtgaatatgtaaaatatcatcctaatgcaaaatatacagaaggatgttcaggaatatggtcagtcaagtgtgatgttgcgcttccgtgtgcaactcagaacgagcttgacggaaacgcggcaaagactcttgttgaaaacggatgttatgcggtaggagaaggtgcaaacatgccgtgtacgcctgaagctattgatatatttatgaagaacggcgttctttatgctccaggaaaagcttcaaatgccggcggtgttgcaacttccggacttgaaatgtgccagaacagcatgaggtattcctggtcttttgaagaagttgacgccaagttgaaggatattatggttaacatattcagaaatgtaagagcggtagcaaaagaatacggccaggaagacaatcttgttttgggtgcaaatattgcaggattcctgaaagttgcaaatgctatgatggcacagggagtgtaa

SEQ ID NO: 137088 - protein, 444 aa, Clostridium thermocellum ATCC 27405
MKLLAGVMEQVIKRNPNEPEFHQAVREVLESLEIVAEKNPEYLKAGIFERIVEPERQIIFRVPWVDDNGKVQVNRGFRVQFNSAIGPYKGGIRFHPSVNLGIIKFLGFEQIFKNSLTGLPMGGGKGGSDFDPKGKSDGEIMRFCQSFMTELYRHIGPDTDVPAGDIGVGAREIGYMFGMYRKIRNEFTGVLTGKGLTWGGSLVRTEATGYGLCYFMEEAMKTIKGKSFEGATVVISGSGNVAIYATEKAQQLGAKVVALSDSNGYVYDPDGIKLDTVKQIKEVERKRISEYVKYHPNAKYTEGCSGIWSVKCDVALPCATQNELDGNAAKTLVENGCYAVGEGANMPCTPEAIDIFMKNGVLYAPGKASNAGGVATSGLEMCQNSMRYSWSFEEVDAKLKDIMVNIFRNVRAVAKEYGQEDNLVLGANIAGFLKVANAMMAQGV

SEQ ID NO: 137089 - DNA, 1344 bp, Herminiimonas arsenicoxydans
  CDS (1)..(1344): transl_table=11
atgaaacaccaatctcttgaagactttctaacgcacgttgcagagcgcaacccaggacaaccggagtttttgcaagcggtcacggaagtgatggaaagtctctggcctttcatcgaacaaaaccctcactatgccgaacacggcttgctggatcgcctgattgaaccggaacgcatcatcatgttccgcgtttcctgggttaatgaccacggcgacgtgcaagtcaaccgcggctatcgcattcagcaaaactcggcgatcggcccgtataaaggcggcattcgcttccatccttcggttaatttgtcgatcctgaaattcctcgccttcgagcaaaccttcaagaatgcattgaccacgctgcctatgggcggcggcaagggcggctccgatttcgaccctaaaggcaagagcccgggtgaagtcatgcgtttctgccaggctttcgtcagcgaactgttccgtcacatcggttccgataccgacgtaccagcaggcgatatcggcgtgggcgggcgcgaagtcggcttcatggccggcatgatgaaaaagctcagcaatcgtgcggactgcgtctttaccggcaagggcttgagcttcggcggctccctgattcgccccgaagcaaccggctacggtactgtctattttgccgagcaaatgctgaaacagaagggtttgagcttcgacggcatgcgcgtcagcgtatccggctcgggcaatgtcgctcagttcgcagtcgaaaaagcaatgtcgctgggcgcgaaagtgattaccgtgtccgactccagcggcactatcgttgataacgacggcttcaccccggataaactggcgatcctgatggaagtcaaaaaccatctgtatggccgcgtcagcgactacgcacaacgtaccggcgtcgaattccatgccggcatgagcccatggcatgtaccggttgatgttgccctgccttgtgcaactcaaaacgaactggatatcgaagccgccaatattctggtcaaaaacggtgtgatctgcgtcgccgaaggcgccaacatgccgaccacgatcgaagcagtccgcgtattcgaaagcagcggcgtattgtacgcaccaggcaaagccagcaatgctggcggcgttgctacttcaggcctggaaatgggtcagaacgcgatgcgcatttcctggccgcgtgaagaagtcgatgcacgcttgcattccatcatgtgcaacatccatgacgcctgcttgcgtcacggtcgtcgcgccgatggcacaatcagctatgtagacggtgccaatatcgccggtttcgtcaaagtcgcagacgcgatgctggcacaaggcgtcatttaa

SEQ ID NO: 137090 - protein, 447 aa, Herminiimonas arsenicoxydans
MKHQSLEDFLTHVAERNPGQPEFLQAVTEVMESLWPFIEQNPHYAEHGLLDRLIEPERIIMFRVSWVNDHGDVQVNRGYRIQQNSAIGPYKGGIRFHPSVNLSILKFLAFEQTFKNALTTLPMGGGKGGSDFDPKGKSPGEVMRFCQAFVSELFRHIGSDTDVPAGDIGVGGREVGFMAGMMKKLSNRADCVFTGKGLSFGGSLIRPEATGYGTVYFAEQMLKQKGLSFDGMRVSVSGSGNVAQFAVEKAMSLGAKVITVSDSSGTIVDNDGFTPDKLAILMEVKNHLYGRVSDYAQRTGVEFHAGMSPWHVPVDVALPCATQNELDIEAANILVKNGVICVAEGANMPTTIEAVRVFESSGVLYAPGKASNAGGVATSGLEMGQNAMRISWPREEVDARLHSIMCNIHDACLRHGRRADGTISYVDGANIAGFVKVADAMLAQGVI

SEQ ID NO: 137091 - DNA, 1287 bp, Burkholderia vietnamiensis G4
  CDS (1)..(1287): transl_table=11
atgtcttcgcaattgcagtccatcccgtcctacctgcacgccgacgatctcggcccgtggggcaactatcttcagcaggtcgatcgcgtcgcgccgtacctcggttcgctgtcgcgctggctcgaaacgctgaagcgtccgaagcgcatcctgatcgtcgacgtgcccatcgagctcgacaacggcaccgtcgcgcacttcgaaggctatcgcgtgcagcacaacgtgtcgcgcggtccgggcaagggcggcgtgcgctaccaccaggacgtgacgctgtcggaagtgatggcgctgtcggcatggatgtcggtgaagaacgcggccgtgaacgtgccgtacggcggtgcgaagggcggcatccgcgtcgacccgcgcaagctgtcgcgcggtgagctcgagcgcgtgacgcgccgctacaccagcgagatcggcatcatcatcggcccgaacaccgacattccggcgccggacgtcaacaccaacgaacaggtgatggcgtggatgatggacacgtattcgatgaaccagggccagacgtcgaccggcgtcgtgaccggcaagccgatctcgctcggcggttcgctcggccgcaaggaagcgacgggccgcggcgtgttcgtggtcggctgcgaagcggcgaagaagaagggcctcgaaatcgaaggcgcgcgcatcgcggtgcagggcttcggcaacgtcggcggcatcgcggcgaagctgttccaggaagcgggcgcgaaggtgatcgcggtgcaggatcacacgggcacgatctatcagccggccggcctcgacgcgaacaagctgctcgaccacgtggcgcgcaccggcggtgtcgcgggtttcgagggcacggagccgatgccgaacgacgagttctggacggtcgaaaccgacatcctgatcccggcggcgctggaaaaccagatcaccgagaagaacgcgtcgaagatccgcacgaagatcatcgtcgaaggcgcgaacggcccgaccacgaccgcggccgacgacatcctgagcgcgaacggcgtgctggtgatccccgacgtgatcgccaacgcgggcggcgtgaccgtgtcgtacttcgagtgggtgcaggatttctcgagcttcttctggaccgaagacgagatcaaccatcgcctcgagcgcgtgatgcgcgaagcgttcgccggcgtatgggcggtcgcggaagagcacaacgtgtcggtgcgcacggcggcgttcatcgtcgcgtgcaagcgaatcctgatggcgcgcgaaatgcgcggtctgtacccgtga

SEQ ID NO: 137092 - protein, 428 aa, Burkholderia vietnamiensis G4
MSSQLQSIPSYLHADDLGPWGNYLQQVDRVAPYLGSLSRWLETLKRPKRILIVDVPIELDNGTVAHFEGYRVQHNVSRGPGKGGVRYHQDVTLSEVMALSAWMSVKNAAVNVPYGGAKGGIRVDPRKLSRGELERVTRRYTSEIGIIIGPNTDIPAPDVNTNEQVMAWMMDTYSMNQGQTSTGVVTGKPISLGGSLGRKEATGRGVFVVGCEAAKKKGLEIEGARIAVQGFGNVGGIAAKLFQEAGAKVIAVQDHTGTIYQPAGLDANKLLDHVARTGGVAGFEGTEPMPNDEFWTVETDILIPAALENQITEKNASKIRTKIIVEGANGPTTTAADDILSANGVLVIPDVIANAGGVTVSYFEWVQDFSSFFWTEDEINHRLERVMREAFAGVWAVAEEHNVSVRTAAFIVACKRILMAREMRGLYP

SEQ ID NO: 137093 - DNA, 1347 bp, Lactococcus lactis
  CDS (1)..(1347): transl_table=11
atgtcacaagcaactgaatatatcaaagaagttcgggcgaaccttgctcaacgcgatggcaaccaagctgagtttcttgaagcggtcgataattttctagcaacgatcacgccggtgtttgaagcacatcccgaatatattgaagctaatattttgggccagatcactgaacctgagcgggccttccaattccgtgtaccgtgggtcgacgatgctggtaaagttcagatcaatcgcggcttccgggtgcaatttaattctgctattggcccgtacaagggtgggctgcgcttccatcctagtgttaacttgtccgttgttaaatttttaggctttgaacaaattttcaaaaatagcctaactggcttaccaatcggtggtggtaaaggcggtagtgattttaatcctaaaggtaaatctgatggtgaagtcatgcgttttgcccaaagctttatgaccgaattgcaaaaacatattggtcctgatattgacgtgccagctggtgatattggtgtcggcggtcgtgaaattggttacttatttggtcaatacaaacgtctaaatggctttagcggtgggattttaactggtaaaggtctcagctacggtggtagcttagtgcggccagaagcgactggttttggcttactttactatgtggatgcgatgctcaaagcacatcgcgatgatctcagcggtaaaaaaatcaaattatctggtgccggtaatgtggcaatctatgcgattcaaaaagcgactgaactaggtgctaaaatcgtaacggtttctgattctgatggctatatttatgatgaacgaggtattgactacaaggttgtgcaacagatcaaagaagtcgaacgcggtcgtatcagcgaatacgctaagcgggtctcgacggcagaatattctaaaggttctgtttgggaagcaccaattgattgtgacgttgctttaccatgtgcaacacaaaatgaaattgatgttgatggagctaaattattgatttccagcggcgtccaagtggttgctgaaggggccaatatgccaagtacaccagaagctatcaaagcttatcgccaagccggcttattgtacggtccagctaaagcagctaatgctggtggcgttgccgtttctgcgttagaaatgagtcaaaacagtcaacggctagcttggtcgtttgctgatgtagatcaacgtttacagaagattatgcaagatattttccaaaaatcagctgatgccgctaaacagtataatttaggcgacgattatgttgcgggtgccaatattgctggtttcttgaaagttgctgatgcgatgtacgctcaaggtattgtctaa

SEQ ID NO: 137094 - protein, 448 aa, Lactococcus lactis
MSQATEYIKEVRANLAQRDGNQAEFLEAVDNFLATITPVFEAHPEYIEANILGQITEPERAFQFRVPWVDDAGKVQINRGFRVQFNSAIGPYKGGLRFHPSVNLSVVKFLGFEQIFKNSLTGLPIGGGKGGSDFNPKGKSDGEVMRFAQSFMTELQKHIGPDIDVPAGDIGVGGREIGYLFGQYKRLNGFSGGILTGKGLSYGGSLVRPEATGFGLLYYVDAMLKAHRDDLSGKKIKLSGAGNVAIYAIQKATELGAKIVTVSDSDGYIYDERGIDYKVVQQIKEVERGRISEYAKRVSTAEYSKGSVWEAPIDCDVALPCATQNEIDVDGAKLLISSGVQVVAEGANMPSTPEAIKAYRQAGLLYGPAKAANAGGVAVSALEMSQNSQRLAWSFADVDQRLQKIMQDIFQKSADAAKQYNLGDDYVAGANIAGFLKVADAMYAQGIV

SEQ ID NO: 137095 - DNA, 1275 bp, Thermus thermophilus HB27; identical to SEQ ID NO: 57000
  CDS (1)..(1275): transl_table=11

SEQ ID NO: 137096 - protein, 424 aa, Thermus thermophilus HB27; identical to SEQ ID NO: 57001

SEQ ID NO: 137097 - DNA, 1377 bp, Listeria monocytogenes str. 4b F2365
  CDS (1)..(1377): transl_table=11
atggcacaaacatccactattcaaaatgacacaaaggcagccgaagaatacgcagctcgcgtgtttgaaacaattaaactacggaatcctggcgaaacggaattccaccaagcagttgaagaattcttaaactctgttatcccagcccttgcaaaagaacctaaatacgaagcaaatggtattttagaacagttaacagaacccgaacgccttatcagtttccgagttccatgggtggatgattctggcacagtacatgtaaatcgcggttaccgtgtccaattcaatagcgcaattggtccatataaaggcggtcttcgtttccacccttccgttactggaagcatcgtcaaattcctcggttttgaacaaatcttcaagaactccctaactggcttaccaatcggtggcggtaaaggtggctctgactttgatccaaaaggaaaatcagactcagaagtaatgcgtttctgccaaagttttatgactgaactacaaaaacatatcggtccagatacagatgttcctgctggtgatattggtgttggtggtcgtgaaattggctacttattcggtcaatacaaacgtcttcgcggtgcgtatgatgccggtacaattacaggtaaaggcctttcttacggcggaagtttagctcgtacagaagcaaccggttacggtcttgtttatttcaccgttgaaatgttagaagcagccggtgaaaccattcgcggcaaaaaaatcgtcgtttctggttcaggtaacgttgcgatttatgcaatcgaaaaagcacacgaattgggcgctaaagtagttgcatgtagcgattctgctggttttgtttatgacaaagaaggtatcaaagttgaaacagtaaaacaattaaaagaagtagaacgtaaacgtattagcgaatacacaaccattcatccatctgcagaatattacgcaggcggcgacgtatggtccgttccatgtgatatcgcactaccatgtgcaactcaaaatgaaatcaacgctgaccaagctcgtgcccttgtaaaaaatggtgttatcgctgttgcagaaggcgcaaacatgccttctactcttgatgcagtggatatttaccacgaaaataaagttctattcggtcctgcaaaagctgccaatgctggtggtgttgccgtatcagcacttgaaatggcacaaaacagcacacgtatgagctggactttccaaacagtcgacgaacatttacaaaacatcatgaaagatatttataaaaattcaagcaatgctgcaagcgagtatggcgcacctggtaacctagttatcggcgcaaatatcgccggattcctcaaagtagcagacacaatgatttctcaaggtattatttaa

SEQ ID NO: 137098 - protein, 458 aa, Listeria monocytogenes str. 4b F2365
MAQTSTIQNDTKAAEEYAARVFETIKLRNPGETEFHQAVEEFLNSVIPALAKEPKYEANGILEQLTEPERLISFRVPWVDDSGTVHVNRGYRVQFNSAIGPYKGGLRFHPSVTGSIVKFLGFEQIFKNSLTGLPIGGGKGGSDFDPKGKSDSEVMRFCQSFMTELQKHIGPDTDVPAGDIGVGGREIGYLFGQYKRLRGAYDAGTITGKGLSYGGSLARTEATGYGLVYFTVEMLEAAGETIRGKKIVVSGSGNVAIYAIEKAHELGAKVVACSDSAGFVYDKEGIKVETVKQLKEVERKRISEYTTIHPSAEYYAGGDVWSVPCDIALPCATQNEINADQARALVKNGVIAVAEGANMPSTLDAVDIYHENKVLFGPAKAANAGGVAVSALEMAQNSTRMSWTFQTVDEHLQNIMKDIYKNSSNAASEYGAPGNLVIGANIAGFLKVADTMISQGII

SEQ ID NO: 137099 - DNA, 1248 bp, Picrophilus torridus DSM 9790; identical to SEQ ID NO: 57002
  CDS (1)..(1248): transl_table=11

SEQ ID NO: 137100 - protein, 415 aa, Picrophilus torridus DSM 9790; identical to SEQ ID NO: 57003

SEQ ID NO: 137101 - DNA, 1344 bp, Acinetobacter sp. ADP1
  CDS (1)..(1344): transl_table=11
ttgaaatacagcaaaatgagtgattttttggattacgttaaaacacgtgatcagtaccaacctgaatttttgcaggctgttgaagaggtgatgataagtttatggccgtttattgaaaagcacccagaatatgcagattacggattattagaaagactgattgaacctgaacgagtcattcaatttcgtgtggcatggatggatgaccaaggtcatacccaagttaatcgtgcatttcgtgtgcaatacaattctgcgattggtccatataaaggcggaatgcgttttcatccttcagtaaatttatctattttaaaatttttgggttttgaacagacatttaagaatgcattaactactttgccaatggggggaggtaagggcggttctgattttaatccgaaaaataaatcagaagcagaaatcatgcgtttttgtcaggcattaatgcttgaacttcatcgtcatttaggtgcagatacggatattccagctggagatattggggtcggcgctcgtgaagttggttatatggcgggaatgatgaaaaagctgagcaatgatacggcagctgtttttacaggaaaaggtgtctcatttggtggaagtctgatgcgtcctgaagctacaggatatggaactgtatattttgccgaagaaatgctcaaaacacgtggtcaaaattttctaggaaaaacagtttcaatctctggctctggtaatgtggcccaatatgcagccgaaaaggcgatgtttttgggcgcaaaagtggttacattgtccgactcaaatggtactgtatatttagaaaatggtttcaccgaagtgcttctagccgaattaatggaattaaaaaataaaaagcgtggacgtatttcagaattcgcctctaaacacggatttgaatattttgaaggtcaaacaccttggcatattccagttgatattgctttgccatgcgcaacccaaaatgagttgaatggagatgatgctgaaactttgattaaaaacggagtgatttgtgtggcagaaggtgcgaatatgccatctacactcgaagcagtagaaaaatttctgcatgcaaaaatcttgtatgcacctggtaaggcatcaaatgctggaggggttgcaacctctggacttgaaatgtctcaaaactctatccgactcaactggtctcatgccgaagtagatgaaagattacatgcgattatgaaagatattcatgccaattgtgtcaagtacggtaccaaacaagatggttcaattaactatgttgatggggcaaatattgcaggttttgtcaaagttgcagatgccatgttggcacaagggatttactaa

SEQ ID NO: 137102 - protein, 447 aa, Acinetobacter sp. ADP1
MKYSKMSDFLDYVKTRDQYQPEFLQAVEEVMISLWPFIEKHPEYADYGLLERLIEPERVIQFRVAWMDDQGHTQVNRAFRVQYNSAIGPYKGGMRFHPSVNLSILKFLGFEQTFKNALTTLPMGGGKGGSDFNPKNKSEAEIMRFCQALMLELHRHLGADTDIPAGDIGVGAREVGYMAGMMKKLSNDTAAVFTGKGVSFGGSLMRPEATGYGTVYFAEEMLKTRGQNFLGKTVSISGSGNVAQYAAEKAMFLGAKVVTLSDSNGTVYLENGFTEVLLAELMELKNKKRGRISEFASKHGFEYFEGQTPWHIPVDIALPCATQNELNGDDAETLIKNGVICVAEGANMPSTLEAVEKFLHAKILYAPGKASNAGGVATSGLEMSQNSIRLNWSHAEVDERLHAIMKDIHANCVKYGTKQDGSINYVDGANIAGFVKVADAMLAQGIY

SEQ ID NO: 137103 - DNA, 1272 bp, Acinetobacter sp. ADP1; identical to SEQ ID NO: 57004
  CDS (1)..(1272): transl_table=11

SEQ ID NO: 137104 - protein, 423 aa, Acinetobacter sp. ADP1; identical to SEQ ID NO: 57005

SEQ ID NO: 137105 - DNA, 1344 bp, Erwinia carotovora subsp. atroseptica SCRI1043
  CDS (1)..(1344): transl_table=11
atggcacaaatcgtatctctggcaagttttcttgattctgttcaacaacgcgatccgcatcagcctgaatttctacaggctgttaatgaagtactttccacgctgtggccttttctggagcagaaccctcactatgccgattacagcctgctggaacgattggtagaaccggaacgtgtaattcagtttcgcgtggcgtggacggatgacaaaggtcaggtacaggtgaaccgtgcctggcgcgtccagttcagctccgcgattggcccgtacaaaggtggcatgcgtttccatccgtccgttaacctgtcgattctgaaattccttgggttcgagcagacgttcaagaatgcgctgacgacgctgccaatgggcggcggtaaagggggttcggactttaatccgaaagggaaaagtcagggcgaagtcatgcgcttctgtcaggcgctgatgacggaactgtatcgtcatttgggcgcggatacggatgttccagcgggtgacatcggcgtgggtggtcgcgaagtcggcttcatgaccggcatgatgaagaagctgaccaacaacacggcgtgcgtcttcaccggcaaagggttgtcgtttggcggcagtctgattcgtcctgaagcaacgggctacggcctgatttacttcacagaagcgatgctgaaacgccacggtctgggttttgaaggcatgcgggttgcggtgtctggttccggtaatgtggcgcagtacgcgattgaaaaagcgatggaactgggtgcccgcgtggtcacggtatcggattctaacggcactgtggtggatgaaaacggatttaccccagagaaactggcgctgctggaagagatcaagaacaaacgctatggccgtgtggaagattacgcgcgtgaagcgaaactgacctacctcgcaggcaaaacgccgtgggaagtgccagtagatatcgcgctgccgtgtgcgacgcagaatgagctggatctcccagcggcgcagacgctgattgctaacggcgtgaaagccgtggcggaaggtgccaatatgccgaccacgattccagcgaccgatgcgttcctggatgcaggcgtgctgtttgcaccgggtaaggcggctaacgccggcggcgtggcgacatccgggctggaaatggcgcagaacgcggcacgtttgggctggaaagcggagaaggtggatgcgcgtttgcatcacatcatgctggatattcacactgcgtgcgtgcagtacggtggtgaagatagccagacgaactacgtgcgcggtgccaacgtggcgggctttgtcaaagtggccgacgcgatgctggcgcagggcgttgtgtaa

SEQ ID NO: 137106 - protein, 447 aa, Erwinia carotovora subsp. atroseptica SCRI1043
MAQIVSLASFLDSVQQRDPHQPEFLQAVNEVLSTLWPFLEQNPHYADYSLLERLVEPERVIQFRVAWTDDKGQVQVNRAWRVQFSSAIGPYKGGMRFHPSVNLSILKFLGFEQTFKNALTTLPMGGGKGGSDFNPKGKSQGEVMRFCQALMTELYRHLGADTDVPAGDIGVGGREVGFMTGMMKKLTNNTACVFTGKGLSFGGSLIRPEATGYGLIYFTEAMLKRHGLGFEGMRVAVSGSGNVAQYAIEKAMELGARVVTVSDSNGTVVDENGFTPEKLALLEEIKNKRYGRVEDYAREAKLTYLAGKTPWEVPVDIALPCATQNELDLPAAQTLIANGVKAVAEGANMPTTIPATDAFLDAGVLFAPGKAANAGGVATSGLEMAQNAARLGWKAEKVDARLHHIMLDIHTACVQYGGEDSQTNYVRGANVAGFVKVADAMLAQGVV

SEQ ID NO: 137107 - DNA, 1338 bp, Propionibacterium acnes KPA171202
  CDS (1)..(1338): transl_table=11
atggataggcaactcgaaaacgcgtacgaatcggtgttgcgtcgcaacccaggggaggccgagttccaccaggctgtgcgggagatctttgaatctctcggcccggtgctcgacacgaatccgcagtacgtggaggcagccgtgttgtcgcgcatctgcgaaccggaacgccagatcattttccgggtgccgtgggttgacgacgagggcaagatccgtatcaaccgtggcttccgcgttgaatattcgtcggtgctggggccgtataagggtggattgcgattccacccctcggtgtacttaggaacgattaagttccttggttttgagcagatcttcaaaaatgctctgactggcatgccgatcggtggcgcgaagggtgggtcggactttgatccccatgacgcgtccgaggctgaggtcatgcgattctgccagtccttcatgaccgagctctaccgtcaccttggtgaacacaccgacgtgccagctggtgatatcggcgttggcagtcgtgagatcggattcctcttcggccaatacaagcgcattactaaccgtcatgagtccggtgtgctcaccggtaaaggactcacctggggtggatccttggtgcgcactgaagctaccggatatggcacagtcttcttcgtccaacgaatgctggcgaccaacggcaagtctttagacggcctgcgagttaccgtctccgggtcgggcaacgtcgcgatctacgccatcgagaaggctcaggatctcggagccaccgtggttgcgtgctcagattccagcggttacgtcgttgacgagaaaggtatcgacgtcgccctgcttaagcagatcaaggaggtggaacgggcccgcatctgcgagtatgccgctcgacgcgactcggctactttccactccgacggatcgatctgggatgtgccggtcgacgtcgccttgccctgtgccactcagaacgagctcaatggtcaggctgccgccaccctcatccgcaacggtgtggtcgctgtcgctgaaggtgccaacatgccctgcactcctgaggcggtgcattccttccaggacgccggcgtcattttcgccccgggtaaggcatctaatgcgggtggcgtcgctacttcggccctcgagatgcaacagaatgccgcgcgcgactcctgggatttcgacgcgaccgaagctagactgcagcagattatggccgacatccacgatcgttgcatcgagaccgccgacgagtatggccacccgggggattacgttatgggtgccaacatcgccgggttcaccaaggtggctgacgccgttatcgcgatgggtgtcgtctga

SEQ ID NO: 137108 - protein, 445 aa, Propionibacterium acnes KPA171202
MDRQLENAYESVLRRNPGEAEFHQAVREIFESLGPVLDTNPQYVEAAVLSRICEPERQIIFRVPWVDDEGKIRINRGFRVEYSSVLGPYKGGLRFHPSVYLGTIKFLGFEQIFKNALTGMPIGGAKGGSDFDPHDASEAEVMRFCQSFMTELYRHLGEHTDVPAGDIGVGSREIGFLFGQYKRITNRHESGVLTGKGLTWGGSLVRTEATGYGTVFFVQRMLATNGKSLDGLRVTVSGSGNVAIYAIEKAQDLGATVVACSDSSGYVVDEKGIDVALLKQIKEVERARICEYAARRDSATFHSDGSIWDVPVDVALPCATQNELNGQAAATLIRNGVVAVAEGANMPCTPEAVHSFQDAGVIFAPGKASNAGGVATSALEMQQNAARDSWDFDATEARLQQIMADIHDRCIETADEYGHPGDYVMGANIAGFTKVADAVIAMGVV

SEQ ID NO: 137109 - DNA, 1353 bp, Leifsonia xyli subsp. xyli str. CTCB07
  CDS (1)..(1353): transl_table=11
gtgactcctgtgctctccaccctcctggacgacgtcctccgccggaatgccggcgaacccgagttccaccaggccacgcgggaagtcttcggctcccttggccccgtcatcgctgctcagccacgctacactcaggccgccgtcctcgaacggctgaccgagccggagcgccagctcatctttcgggtgccgtggaccgacgacgagggcaacgtccgtgtcaaccgcggattccgcgtcgagttcaactcggcgctcggcccattcaagggcggcctgcgcttccacccgagcgtaacgctcggcaccgtcaaattcctcggcttcgagcagatcttcaagaatgcgctcaccggcctccccatcggcggcggcaagggcggcagcgacttcgacccgaagggccgctcggacgcggaggtcatgcgcttctgccagtcgttcatgaccgagctgtaccgccacctgggcgagtacacagacgtgcccgccggcgacatcggcgtgggcggccgcgaaatcgggtacctcttcggccagtacaaacgcatcaccaaccgctacgagtccggggtgctgaccagcaagggcatcggctggggaggctccctcgtccgcaccgaggccaccggctatggcagcgtcttcttcgccgagcggatgctggccacacgcggccgggacttcaccggcgtgcgcgtcctcgtctcgggctccggcaacgtcgcgctctacgcgatcgagaaggtccaccagctcggcggcaccgtcgtcgcctgctcggactcctccggtgtggtctacgaccgcggcggcctcgacctcgacctgcttcgccagatcaaggagaacgagcgcggccggctctcggactacgccgcccgccgcgccgccgggtccgagtaccgagccaacggcgacatctgggccatcgccgcccagacgccgatcgatgtcgccctgctcgccgcgacccagaacgaactcgatgcgaccgcggcggcaaccctcgcccagaacggcgtcatcgcggtcgtcgagggcgcgaatatgccatgcaccccggaggccgtccacctcctgcgcaccgccggtgtgctcttcgcgcccggcaaagctgccaacgcgggcggtgtcgccacctccgcgctcgaaatgcagcagaacgcctcgcgcgacgcctggagcttcgaatacgccgaaggacgtctcgcggacatcatggcgaacatccacgacagctgcgcggagactgccgagaagtacggcgcccccggcgactacgtgcttggcgcgaacatcgccggtttcgtccgcgtcgccgacgccatgctcgccctgggtgtcatctag

SEQ ID NO: 137110 - protein, 450 aa, Leifsonia xyli subsp. xyli str. CTCB07
MTPVLSTLLDDVLRRNAGEPEFHQATREVFGSLGPVIAAQPRYTQAAVLERLTEPERQLIFRVPWTDDEGNVRVNRGFRVEFNSALGPFKGGLRFHPSVTLGTVKFLGFEQIFKNALTGLPIGGGKGGSDFDPKGRSDAEVMRFCQSFMTELYRHLGEYTDVPAGDIGVGGREIGYLFGQYKRITNRYESGVLTSKGIGWGGSLVRTEATGYGSVFFAERMLATRGRDFTGVRVLVSGSGNVALYAIEKVHQLGGTVVACSDSSGVVYDRGGLDLDLLRQIKENERGRLSDYAARRAAGSEYRANGDIWAIAAQTPIDVALLAATQNELDATAAATLAQNGVIAVVEGANMPCTPEAVHLLRTAGVLFAPGKAANAGGVATSALEMQQNASRDAWSFEYAEGRLADIMANIHDSCAETAEKYGAPGDYVLGANIAGFVRVADAMLALGVI

SEQ ID NO: 137111 - DNA, 1350 bp, Desulfotalea psychrophila LSv54; identical to SEQ ID NO: 57006
  CDS (1)..(1350): transl_table=11

SEQ ID NO: 137112 - protein, 449 aa, Desulfotalea psychrophila LSv54; identical to SEQ ID NO: 57007

SEQ ID NO: 137113 - DNA, 1254 bp, Symbiobacterium thermophilum IAM 14863
  CDS (1)..(1254): transl_table=11
atgactggccaggagttcttccgagatacccaggagacgattcgtgctgccgtcgcgaaactgggccactcggaaggcgtctacaagatcctgcgtaaccctcgtcgtacgcttgaggttcacattgcggtgacgatgcccgacggatccgttgagaccttcctgggttaccggtcgcagcacgccgccgtcttcggcccctacaagggcggcgtccggttccaccccaacgtcaccaaggaagaggtcgaggcgctggcgatgctcatgaccctgaagaacgccgtgctcggcctgccttacgggggcgccaagggaggcgtcatctgcgatcccaacgccctgccgcccaccgcggtggagcagatcgcccggggctacgtgcgcgggctgcgtgacatgatcggtcccgatacggacatccccgcgccggacgtcaacaccaactcccgggtcatgggctggatgctcgacgagtacctgaagtgcaccaacgccatcgacttctcggtcttcaccggcaagagcctcaacctgggcggcattgagggccgcaccggggccaccggcctcggcatcgcctacgtgacccgcgaggcctgcaaggtccggggggtggacctgaagggcgccagggtcgccgtgcagggctttggcaacgtgggccgcggcgcggcgcaggccctcaccgcgctgggggccaggatcgtcggcgtcaccgacatcaccggcggcgtctacaaggaggacggcctcgacgtggccgcgctgacggagtacgccagggaccgcggcggcgtcgccggcttccccggcgccgagcccctcaccaacgagcagctcttcgccctgccggtggatgtgctgatcccggcggccttggagggacagatcacgggcaaggtcgccgagaccatccaggcgccgatcgtggtggagggcgccaacggcccgaccacccccgagggcgcccaggtgctggcggaccggggcatcatgcaggtcccggacatcctggccaacggcggcggcgtgaccgtctcttatttcgagtgggtgcagggccagcagggcggcctccgctggtccgaacgcaccgtgcaccgccgcctcgaccggtacatgaccagcgccttcgccgccgtgctggcgtacagcgagcgctacaacgtctccatgcgtgaggcggcctacctgttcgccgtggaccggctcgccaccggcatgatcgagcgcggctgggtcccgaggtag

SEQ ID NO: 137114 - protein, 417 aa, Symbiobacterium thermophilum IAM 14863
MTGQEFFRDTQETIRAAVAKLGHSEGVYKILRNPRRTLEVHIAVTMPDGSVETFLGYRSQHAAVFGPYKGGVRFHPNVTKEEVEALAMLMTLKNAVLGLPYGGAKGGVICDPNALPPTAVEQIARGYVRGLRDMIGPDTDIPAPDVNTNSRVMGWMLDEYLKCTNAIDFSVFTGKSLNLGGIEGRTGATGLGIAYVTREACKVRGVDLKGARVAVQGFGNVGRGAAQALTALGARIVGVTDITGGVYKEDGLDVAALTEYARDRGGVAGFPGAEPLTNEQLFALPVDVLIPAALEGQITGKVAETIQAPIVVEGANGPTTPEGAQVLADRGIMQVPDILANGGGVTVSYFEWVQGQQGGLRWSERTVHRRLDRYMTSAFAAVLAYSERYNVSMREAAYLFAVDRLATGMIERGWVPR

SEQ ID NO: 137115 - DNA, 1317 bp, Symbiobacterium thermophilum IAM 14863; identical to SEQ ID NO: 57008
  CDS (1)..(1317): transl_table=11

SEQ ID NO: 137116 - protein, 438 aa, Symbiobacterium thermophilum IAM 14863; identical to SEQ ID NO: 57009

SEQ ID NO: 137117 - DNA, 1389 bp, Mannheimia succiniciproducens MBEL55E
  CDS (1)..(1389): transl_table=11
ttgcaaacattaacaatattactaataagaggaaagcttatgtccagcacagtatcatctctagaagactttttatcattagttgcacaacgtgacggtaaccaacctgaattcctgcaggcggtgcgtgaagtgtttacttctatttggccgtttttggaagcaaatccgcaatatcgttcacaagcattattagaacgtttggttgaacctgagcgtgcattccaattccgtgtggcttggacagacgataaaggtcaagtgcaggtaaaccgcgcatttcgcgttcagttcagtagtgctatcggtccgtacaaaggcggtatgcgtttccacccgtcagtgaacttatctatcttaaaattcttaggttttgaacaaatttttaaaaatgccttaacaaccttgccgatgggcggtggtaaaggcggttcggatttcgatccgaaaggtaaatccgatgcggaagttatgcgtttctgtcaggcgttggtagccgaattatatcgccatatcggtccggatacagacgtgccggcaggcgacatcggtgttggcggtcgtgaagtgggttatcttgccggctacatgaaaaaattatctaaccaggccgcttgcgtattcaccggacgcggtctgtcattcggcggcagcttaatccgtccggaagcgacaggttacggcttagtttactttgctcaagcaatgttggcggaaaaaggtgatagtttccaaggtaaaaccgtttctgtatccggttccggtaacgttgcccaatacgccatcgaaaaggctcttcaattaggtgcgaaagtagtaacctgttcggacagtgccggttatgtgtatgatgaagcgggtttcaccactgaaaaattagcggcattattagacatcaagaatgtaaaacgcggtcgtgtgaaagattacgcagaacaattcggcttgcaatacttcccgggcgaacgtccgtggggtgtgaaagtggatatcgctttaccatgtgcaacccaaaacgaattggaacttaccgatgcgcaaaaattaattgccaacggcgtgcaattggtagcggaaggtgcaaatatgccgacaactattgaagcgaccgaagcattacaggcggcaggcgtattatttgcgccgggtaaagcggcaaatgccggcggtgtagcaacttcaggccttgaaatggcacagagttcgcaacgtttattctggagcgcggaagaagtggatcaaaaattacacaatattatgttagatattcatgcgaactgcaaaaaatacggtacggatgcaaacggcaatattaactacgtagcgggcgccaacatcgcaggtttcgtgaaagtagcggatgcaatgcttgcgcaaggcgtatattaa

SEQ ID NO: 137118 - protein, 462 aa, Mannheimia succiniciproducens MBEL55E
MQTLTILLIRGKLMSSTVSSLEDFLSLVAQRDGNQPEFLQAVREVFTSIWPFLEANPQYRSQALLERLVEPERAFQFRVAWTDDKGQVQVNRAFRVQFSSAIGPYKGGMRFHPSVNLSILKFLGFEQIFKNALTTLPMGGGKGGSDFDPKGKSDAEVMRFCQALVAELYRHIGPDTDVPAGDIGVGGREVGYLAGYMKKLSNQAACVFTGRGLSFGGSLIRPEATGYGLVYFAQAMLAEKGDSFQGKTVSVSGSGNVAQYAIEKALQLGAKVVTCSDSAGYVYDEAGFTTEKLAALLDIKNVKRGRVKDYAEQFGLQYFPGERPWGVKVDIALPCATQNELELTDAQKLIANGVQLVAEGANMPTTIEATEALQAAGVLFAPGKAANAGGVATSGLEMAQSSQRLFWSAEEVDQKLHNIMLDIHANCKKYGTDANGNINYVAGANIAGFVKVADAMLAQGVY

SEQ ID NO: 137119 - DNA, 1383 bp, Bacillus licheniformis ATCC 14580
  CDS (1)..(1383): transl_table=11
gtgcatacgctagaaaaaatggagcaaacaaatttccagacggcgagagattatgtgacacaagcatacgagacagtacagaagcgaaatttttacgaaagcgaatttcttcaagctgtaaaggaaatatttgattcccttgtccctgtattggcaaggcatccaaagtatatcgaacaccgcattcttgagaggatcgcagagccggaacggatgatcaccttcagggtgccgtgggtcgatgatgaaggcaatatccgggttaaccgagggttccgggttcaatttaacagtgcaatcggtccgtataaaggcggcatccgctttcacccttctgtgaacgcgagcattattaaatttttgggttttgagcagatttttaaaaattctttgaccggactgccgatcggaggcggaaaaggcggggctgattttgatccgaagggcaaatcggacagggagattatgagttttacgcagagcttcatgaatgaactgtacagacatatcggaccggacacggatatccctgccggcgatattggtgtcggagcaagggaagtcgggtttatgttcggacagtataaaaagattcggggccgctatgatgcaggcgtgttaacaggcaaaggccttgaatacgggggcagtttaacgaggaaagaagcgacagggtacggtctggtttatttcgtggaagaaatgctgaaggatcaggggatgcgctttgaaaacagcaccgttgtcgtctccggttcagggaatgtggcgctgtacgcgatggaaaaagccgctcaattcggtgcgaaggtggtggcctgcagcgattctgacggctatgtctatgacgaaaaaggcatctgtcttgagacggtgaagcggctcaaagaagacgggaacggaaggattcgcgagtatgtcagcgagcatccggaagcacactatttcgagggatgtaccggcatttggtctattccatgcgatatcgcgcttccgtgcgcgacccagaacgaaattgacgaagaggcggccgaagtgctcatttcaaatggggtcaaagctgtcggagaaggagcaaatatgccgtctgaagagggcgccgtcaaacgctttttggatgcgggagttctattcggaccggctaaggctgcaaatgccggcggtgtagccgtttcagcgctcgaaatggcgcagaacagcgcacggcttcactggacggcggaagaaacggatgcgaagctcagggcgatcatggctgatattcacaagagaagcgttgaagcggcttcagaatacggacggcccggaaatctgctcgacggctgcaatatagccggatttatcaaagtggcggatgcgatgatcgctcagggagtcgtttaa

SEQ ID NO: 137120 - protein, 460 aa, Bacillus licheniformis ATCC 14580
MHTLEKMEQTNFQTARDYVTQAYETVQKRNFYESEFLQAVKEIFDSLVPVLARHPKYIEHRILERIAEPERMITFRVPWVDDEGNIRVNRGFRVQFNSAIGPYKGGIRFHPSVNASIIKFLGFEQIFKNSLTGLPIGGGKGGADFDPKGKSDREIMSFTQSFMNELYRHIGPDTDIPAGDIGVGAREVGFMFGQYKKIRGRYDAGVLTGKGLEYGGSLTRKEATGYGLVYFVEEMLKDQGMRFENSTVVVSGSGNVALYAMEKAAQFGAKVVACSDSDGYVYDEKGICLETVKRLKEDGNGRIREYVSEHPEAHYFEGCTGIWSIPCDIALPCATQNEIDEEAAEVLISNGVKAVGEGANMPSEEGAVKRFLDAGVLFGPAKAANAGGVAVSALEMAQNSARLHWTAEETDAKLRAIMADIHKRSVEAASEYGRPGNLLDGCNIAGFIKVADAMIAQGVV

SEQ ID NO: 137121 - DNA, 1344 bp, Azoarcus sp. EbN1
  CDS (1)..(1344): transl_table=11
atgcgctataagtccctcgaagagttcctgtcccatgtagaacaacgcaatcccggtcagcccgagttcatccaggcggtggccgaggtgatggaaagcctcgtgccgttcatcaccgaatatccgcgttatgccgagcacggcctgcttgaccgcctcatcgagccggagcgcgccatccagttccgtgtgtcgtgggtcgacgaccgcggcgaagtccaggtcaaccgcggctaccgcatccagcacagctcggcgatcgggccgttcaaggggggcctgcgcttccatccgtcggtgaacctgtcggtgctgaaattcctggcattcgagcagacgttcaagaacgccttgacgacgctgccgatgggcggcggcaagggcggctccgacttcgatccgaaagggcgcagccccggcgaggtgatgcgtttttgccagagcttcatgaccgaactgtatcggcatgtcggctcggataccgatgtgccggcgggtgacatcggcgtcggagggcgcgagatcggctttctcgccggcatgatgaaaaagctgtcgaacaaggcgagctgcgtattcacgggcaaggggctgagctttggcggctcgctgatccgtccggaagcgaccggttacggcatggtgtatttcgccgaggagatgctgcgtcacgtcggcaagacgatggcgggcatgacggtctcggtctcgggctcgggcaacgtcgcgcagtacggcatcgagaaggcgatggcgctcggcgcgaaggtcatcaccgcgtccgactcgagcggcaccgtcatcgacgaggcgggtttcacgcccgagaagctcgcggtgctgatggacgtcaagaacgtccattacggtcgcgtcagcgaatacgccgagcgactcggtctgcatttcgagcccggcaggcggccgtggcacgtgccggtcgacatcgcgttcccgtgtgcgacgcagaacgagctcgacggcgacgacgccgcggtgctcgtgcgcaacggcgtcagttgcgtcgccgagggcgcgaacatgccgtccaatgcggctgccgtgcgcgtgttcgagaagaacggcgtgctgtatgcgccaggcaaggcgagcaatgccggtggggtggccacttccggcctcgagatgagccagaacgcgatgcgcctgtcgtggacgcgcgaagaggtcgatgggcgcctgctcgagatcatgcaggggattcaccacatgtgcctgcagtacggcaccaagcccgacggctccgtgaattactccgacggcgcaaacgtcgcaggtttcgtcaaggtcgcggacgcgatgctttctcagggcgtcatctga

SEQ ID NO: 137122 - protein, 447 aa, Azoarcus sp. EbN1
MRYKSLEEFLSHVEQRNPGQPEFIQAVAEVMESLVPFITEYPRYAEHGLLDRLIEPERAIQFRVSWVDDRGEVQVNRGYRIQHSSAIGPFKGGLRFHPSVNLSVLKFLAFEQTFKNALTTLPMGGGKGGSDFDPKGRSPGEVMRFCQSFMTELYRHVGSDTDVPAGDIGVGGREIGFLAGMMKKLSNKASCVFTGKGLSFGGSLIRPEATGYGMVYFAEEMLRHVGKTMAGMTVSVSGSGNVAQYGIEKAMALGAKVITASDSSGTVIDEAGFTPEKLAVLMDVKNVHYGRVSEYAERLGLHFEPGRRPWHVPVDIAFPCATQNELDGDDAAVLVRNGVSCVAEGANMPSNAAAVRVFEKNGVLYAPGKASNAGGVATSGLEMSQNAMRLSWTREEVDGRLLEIMQGIHHMCLQYGTKPDGSVNYSDGANVAGFVKVADAMLSQGVI

SEQ ID NO: 137123 - DNA, 1266 bp, Bacillus clausii KSM-K16
  CDS (1)..(1266): transl_table=11
gtggaaaagatggacgaaaaccaagaggataaattagatgttcttgcagcgactcagtccattatacataaggcgctaaaaaaactaggctatccagatgaaatgtatgaactacttaaagagcctgtacggatgttgaccgtccgtattcctgtaagaatggatgatggatcaacgaaaatttttacaggctaccgtgcccaacataatgacgctgttggtcccacaaaaggaggcgtacggtttcatccagatgttagtgaaaaagaagtcaaggcgctgtcgatttggatgagtttaaaagcaggcattgtcaacttgccatacggtggaggaaaaggaggcattgtttgcgacccaaggcagatgtcgtttagagaagtggaacgtctaagtcgtggctatgtccgcgcgattagccaaattgttggcccgacaaaagacattcctgcgccagatgtttttaccaattcgcaaatcatggcgtggatgcttgatgaatatagccgaattcgcgaatttgactcacccaattttattacgggaaagccgcttgtgctcggggggtcacatggccgagaggcagcgactgcaaaaggtgtgacgatttgcatcatggaagcggcaaaaaagaaaggaattgaccttgaaggggcgcgcgtcatcattcaagggtttggcaatgcagggagctttttggcgaagtttatggccgacgcaggggcattagtagtgggaattgccgatgcatatggcgctctttatgcagaagaaggtttagatattgactatttgcttgatcgccgcgatagtttcgggacagtaacaaatttatttaaagatacgattacaaatgaggagctattagaaaaagattgtgatattttggttccggcagcaattgaaaaccaaatcacctcacacaatgcaggcaagttaaaagcagcgattgtcgtcgaagcagctaatggcccgactacgcttgaggccacgcaaatccttgcagaacggggcattttgcttgtgcctgatgtcttggcaagtgctgggggcgtaacggtctcttactttgaatgggtgcaaaacaaccagggctactactggacggatgaagaagtcgaaggacggttgcggacagtgctgacggaagcgtttaacaacatatacaaccttgctttacgtcgtaaagtcgacatgcgtctcgctgcctatatggtcggtgtgagacgcatggccgaagcttctcggttccgtggatgggtttga

SEQ ID NO: 137124 - protein, 421 aa, Bacillus clausii KSM-K16
MEKMDENQEDKLDVLAATQSIIHKALKKLGYPDEMYELLKEPVRMLTVRIPVRMDDGSTKIFTGYRAQHNDAVGPTKGGVRFHPDVSEKEVKALSIWMSLKAGIVNLPYGGGKGGIVCDPRQMSFREVERLSRGYVRAISQIVGPTKDIPAPDVFTNSQIMAWMLDEYSRIREFDSPNFITGKPLVLGGSHGREAATAKGVTICIMEAAKKKGIDLEGARVIIQGFGNAGSFLAKFMADAGALVVGIADAYGALYAEEGLDIDYLLDRRDSFGTVTNLFKDTITNEELLEKDCDILVPAAIENQITSHNAGKLKAAIVVEAANGPTTLEATQILAERGILLVPDVLASAGGVTVSYFEWVQNNQGYYWTDEEVEGRLRTVLTEAFNNIYNLALRRKVDMRLAAYMVGVRRMAEASRFRGWV

SEQ ID NO: 137125 - DNA, 1383 bp, Bacillus clausii KSM-K16
  CDS (1)..(1383): transl_table=11
atgaacgtattggaaaaagagaaaggaacgtatacgagtgacgtgcacgaatatgttcaacacgtctacgaaacagtaaaacagcggaacccatatgaaaacgagtttcatcaagcagtcaaggaagtgttggactcgttattgcctgtccttgctaagcgcccacagtatattagacaagctatacttgaacgaatcgtggagccagaaagaatgatctcttttcgcgttccgtgggtcgatgaccaaggaaatgtccaagtaaatcgtggtttccgagtacagttcaacagtgctttaggcccgtataaaggcgggttgcggtttcacccttccgtcaatacaagcatcattaaattcctcgggtttgaacaaatcttcaaaaatgcactgacaggccaaccgatcggtggcggaaaaggcggttcagacttcgatccaaaaggaaaaagcgatggcgaaatcatgcgctttacgcaaagtttcatgtctgaactgagcaaatacatcggaccagataccgatgttccggcaggagacattggtgtaggtgccaaggaaattggttatatgtttggtcaatataaaaaaatgcgcggtcgttttgaagcaggcgtcctgaccggaaaagacatcgcttacggcggaagtcttgccagaaaagaagcgacaggttatggaacggtttatttcgtcgaagagatgcttaaagaaaaaggccatagtttcgcaggaagcaccgttgtcgtgtcagggtcagggaatgtatcgatctatgcgatggaaaaagccatgcatcttggcgcgaaagtggtcgcctgtagcgactcagaaggctatatttacgacaaacgcggcattaacttggaaacggtcaaacgtttgaaggaaagcgagaaaaaacggattagcgaatacgtaaacgaacacccacaagctcactttttccaaggttgctcagacatttggtctgtgccttgtgatattgctcttccttgtgccacgcaaaatgaaattgacgaaaacacggcgaccgttttagtctccaacggcgtaaaagcaattggcgaaggagccaatatgccttcaacgctagaagcggtaaacgtgtttcacgaacatggtgttctgtttgctccagcaaaagcggcgaacgcaggcggcgtttctgtctctgctttagaaatggcgcaaaacagcgcccggctttcttggacgttcgaagaagtcgacgcgaagctccaagacattatgaagaccatttacagagattgtatagaagcggcaaaagagaacgatgctcctggcaacctagtagtgggcgctaatattgctggctttgttaaagtagccgatgcgatgatcgcacaaggagtaatataa

SEQ ID NO: 137126 - protein, 460 aa, Bacillus clausii KSM-K16
MNVLEKEKGTYTSDVHEYVQHVYETVKQRNPYENEFHQAVKEVLDSLLPVLAKRPQYIRQAILERIVEPERMISFRVPWVDDQGNVQVNRGFRVQFNSALGPYKGGLRFHPSVNTSIIKFLGFEQIFKNALTGQPIGGGKGGSDFDPKGKSDGEIMRFTQSFMSELSKYIGPDTDVPAGDIGVGAKEIGYMFGQYKKMRGRFEAGVLTGKDIAYGGSLARKEATGYGTVYFVEEMLKEKGHSFAGSTVVVSGSGNVSIYAMEKAMHLGAKVVACSDSEGYIYDKRGINLETVKRLKESEKKRISEYVNEHPQAHFFQGCSDIWSVPCDIALPCATQNEIDENTATVLVSNGVKAIGEGANMPSTLEAVNVFHEHGVLFAPAKAANAGGVSVSALEMAQNSARLSWTFEEVDAKLQDIMKTIYRDCIEAAKENDAPGNLVVGANIAGFVKVADAMIAQGVI

SEQ ID NO: 137127 - DNA, 1335 bp, Neisseria gonorrhoeae FA 1090
  CDS (1)..(1335): transl_table=11
atgactgacctgaacaccctgtttgccaacctcaaacaacgcaaccccaatcaggagccgttccatcaggcggttgaagaagtcttcatgagccttgatccgtttttggcaaaaaatccgaaatacacccagcaaagcctgctggaacgcatcgtcgaacccgaacgcgtcgtgatgttccgcgtaacctggcaggacgacaaaggacaagtccaagtcaaccgcggctaccgcgtgcaaatgagttccgccatcggcccttacaaaggcggcctgcgcttccacccgaccgtcgatttgggcgtgttgaaattcctcgcttttgaacaagtgttcaaaaacgccttgaccaccctgcctatgggcggcggcaaaggcggttccgacttcgaccccaaaggcaaatccgatgccgaagtaatgcgcttctgccaagcctttatgaccgaactctaccgccacatcggcgcggacaccgatgttccggccggcgacatcggcgtaggcggacgcgaaatcggctacctgttcggacaatacaaaaaaatccgcaatgaattcacttccgtcctgaccggcaaaggtttggaatggggtggcagcctcatccgccccgaggcgaccggctacggctgcgtctatttcgcccaagcgatgctgcaaacccgcaacgatagttttgaaggcaaacgcgttctgatttccggttccggcaacgtggcgcaatacgccgctgaaaaagccatccaactgggtgcgaaagtgctgaccgtctccgactccgacggcttcgtcctcttccccgacatcggtatgaccgaagcgcaactcgccgccttgatcgaattgaaagaagtccgccgcgaacgcgttgccacctacgccaaagagcaaggtttgcaatactttgaaaaccaaaaaccgtggggcgttgccgccgaaatcgccctgccctgcgcgacccagaacgaattggacgaagaagccgccaaaaccctgttggcaaacggctgctacgtcgttgccgaaggcgcgaatatgccgtcgactttgggcgcggtcgagcaatttatcaaagccggcatcctctacgctccgggcaaagcctccaacgccggcggcgtggcaacttcgggcttggaaatgagccaaaacgccatccgcctgtcttgggcgcgcgaagaagtggacagccgactgttcggcatcatgcaaagcatccacgagtcctgcctgaaatacggcaaagtcggcgacaaagtgaactacgtcaacggtgcgaacatcgccggcttcgtcaaagttgccgatgcgatgctggcgcaaggcttctaa

SEQ ID NO: 137128 - protein, 444 aa, Neisseria gonorrhoeae FA 1090
MTDLNTLFANLKQRNPNQEPFHQAVEEVFMSLDPFLAKNPKYTQQSLLERIVEPERVVMFRVTWQDDKGQVQVNRGYRVQMSSAIGPYKGGLRFHPTVDLGVLKFLAFEQVFKNALTTLPMGGGKGGSDFDPKGKSDAEVMRFCQAFMTELYRHIGADTDVPAGDIGVGGREIGYLFGQYKKIRNEFTSVLTGKGLEWGGSLIRPEATGYGCVYFAQAMLQTRNDSFEGKRVLISGSGNVAQYAAEKAIQLGAKVLTVSDSDGFVLFPDIGMTEAQLAALIELKEVRRERVATYAKEQGLQYFENQKPWGVAAEIALPCATQNELDEEAAKTLLANGCYVVAEGANMPSTLGAVEQFIKAGILYAPGKASNAGGVATSGLEMSQNAIRLSWAREEVDSRLFGIMQSIHESCLKYGKVGDKVNYVNGANIAGFVKVADAMLAQGF

SEQ ID NO: 137129 - DNA, 1335 bp, Bacteroides fragilis NCTC 9343
  CDS (1)..(1335): transl_table=11
atgaatgcagctaaggtattagaagatttgaagagaaggttccccaacgaaccggagtatcatcaggcagtagaagaagttctttctaccattgaagaagaatacaacaaacatcctgaattcgacaaggccaatctgattgaacgtctttgcattccagacagagtataccagttccgtgtaacttgggtagacgataaaggcaacgtgcagaccaacatgggttaccgtgttcagcacaacaacgccatcggcccgtacaaaggaggtatccgcttccatgcttctgtaaaccttggtattctgaaattccttgctttcgaacaaacatttaaaaactcgctgaccacattgcctatgggtggcggtaaaggtggatcggacttctctccacgcggaaagtcaaatgccgaagtaatgcgtttcactcaagccttcatgctcgaactgtggcgccacatcggtcctgaaaccgacgtaccggccggtgacatcggtgtaggtggccgcgaagtaggcttcatgttcggtatgtacaagaagttatctcacgaatttaccggaacattcaccggcaagggacgcgaattcggcggttcactgatccgtccggaagctacaggttacggtaacatctacttcctgatggaaatgctgaagaccaaagaaaccgatctgaaaggtaaagtatgcctgatctccggttcgggtaacgtggctcagtacactgccgaaaaagtattggaactcggtggtaaagtagttaccatgtccgactccgatggttacatctacgatccggacggaatcgaccgcgccaaactggattacatcatggagttgaagaacctctatcgtggacgtatccgcgaatatgccgaaacttatggttgtaaatatgttgaaggagcccgcccctggggtgaaaagggtgatatcgcactgccttcagccactcagaacgaacttaacggagacgatgcacgcaagttggttgccaacggggtgatagccgtatcggaaggtgctaacatgccttctacacctgaagccatcaaagtgttccaggatgctaagatcctgtacgctccgggtaaagcagccaatgcaggcggtgtatctgtgtcaggattggaaatgactcaaaactctatcaaactgagctggagttcggaagaggtggacgaaaaactgaagagcatcatgaagaacattcacgaagcttgcgtacagtacggtaccgaaccggacggatacgtaaactatgtgaagggtgctaacgttgccggattcatgaaagtagccaaagcaatgatggcacaaggaatcgtataa

SEQ ID NO: 137130 - protein, 444 aa, Bacteroides fragilis NCTC 9343
MNAAKVLEDLKRRFPNEPEYHQAVEEVLSTIEEEYNKHPEFDKANLIERLCIPDRVYQFRVTWVDDKGNVQTNMGYRVQHNNAIGPYKGGIRFHASVNLGILKFLAFEQTFKNSLTTLPMGGGKGGSDFSPRGKSNAEVMRFTQAFMLELWRHIGPETDVPAGDIGVGGREVGFMFGMYKKLSHEFTGTFTGKGREFGGSLIRPEATGYGNIYFLMEMLKTKETDLKGKVCLISGSGNVAQYTAEKVLELGGKVVTMSDSDGYIYDPDGIDRAKLDYIMELKNLYRGRIREYAETYGCKYVEGARPWGEKGDIALPSATQNELNGDDARKLVANGVIAVSEGANMPSTPEAIKVFQDAKILYAPGKAANAGGVSVSGLEMTQNSIKLSWSSEEVDEKLKSIMKNIHEACVQYGTEPDGYVNYVKGANVAGFMKVAKAMMAQGIV

SEQ ID NO: 137131 - DNA, 1338 bp, Bacteroides fragilis NCTC 9343
  CDS (1)..(1338): transl_table=11
atgaacatcgaaaaaatcatgtcctctcttgaggcaaaacatcccggtgaatctgaatatcttcaggccgtaaaagaagtattactctctatcgaagatatctacaaccaacacccagaatttgaaaaggccaaaatcatcgaaagactggtagagcccgaccgtattttcacattccgtgtaacatgggtggatgataaaggtgaagttcagaccaacctgggatatcgtgttcagttcaacaacgctatcggcccatacaaaggcggtatccgtttccacgcttctgtcaacctctcgatcctgaaattcctgggattcgaacagactttcaaaaatgcactgacaactttacctatgggcggtggcaaaggaggttccgacttctctccacgaggaaaaagtgatgcggaaatcatgcgtttctgtcaggcattcatgcttgaattgtggcgtcatctagggccggatatggatgtgcctgccggtgatatcggtgtaggaggacgtgaagtcggctatatgttcggtatgtacaagaaactgacccgtgagtttacaggaactttcacgggtaaaggacttgaatttggcggttcactgattcgcccggaagccactggattcggcggattgtatttcgtcaaccaaatgttgcagaccaagggtatcgacataaaaggtaaaactgtggctatctccggattcggaaacgttgcctggggagctgctaccaaagctaccgaactgggagccaaagtagttaccatctccggaccggacggatatatctatgatccgaatggaatcagtggagagaagatcgattatatgcttgagttgcgtgcttcgggcaacgatattgtggctccgtatgcagatgaatttccgggttctacattcgtagccggtaaacgcccatgggaagtaaaagcagacatagcgcttccttgcgccactcaaaacgaattgaatggcgaagatgccaagaacctgatcgacaacaacgttctttgtgtcggagagatctccaatatgggttgtacacccgaagctatcgatctctttatcgaacacaaaacaatgtacgctcccggcaaagctgtcaatgcaggcggtgtggcaacatccggactcgaaatgtcacaaaatgcaatgcacttgagctggagtgcagccgaggtagacgagaaactgcattctatcatgcacggcattcatgcacaatgtgtgaagtatggtacagagcccgacggatatatcaattatgtaaaaggtgccaatattgcaggtttcatgaaagtagcccatgcaatgatgggacaaggaatcatctga

SEQ ID NO: 137132 - protein, 445 aa, Bacteroides fragilis NCTC 9343
MNIEKIMSSLEAKHPGESEYLQAVKEVLLSIEDIYNQHPEFEKAKIIERLVEPDRIFTFRVTWVDDKGEVQTNLGYRVQFNNAIGPYKGGIRFHASVNLSILKFLGFEQTFKNALTTLPMGGGKGGSDFSPRGKSDAEIMRFCQAFMLELWRHLGPDMDVPAGDIGVGGREVGYMFGMYKKLTREFTGTFTGKGLEFGGSLIRPEATGFGGLYFVNQMLQTKGIDIKGKTVAISGFGNVAWGAATKATELGAKVVTISGPDGYIYDPNGISGEKIDYMLELRASGNDIVAPYADEFPGSTFVAGKRPWEVKADIALPCATQNELNGEDAKNLIDNNVLCVGEISNMGCTPEAIDLFIEHKTMYAPGKAVNAGGVATSGLEMSQNAMHLSWSAAEVDEKLHSIMHGIHAQCVKYGTEPDGYINYVKGANIAGFMKVAHAMMGQGII

SEQ ID NO: 137133 - DNA, 1407 bp, Pseudomonas fluorescens Pf-5
  CDS (1)..(1407): transl_table=11
gtgcggattgaattgataaagtcccgggcaaatctcttcttaacgacaataaatttgccgagacttcccatgatcgaatccgtcgaagacttcctcgcccgcctgaaaaaacgcgatccggaccagcctgaattccatcaggcggtggaagaggtcctgcgcagcctctggccgtttctcgaagccaatccgcactacttgagctccggtattctcgagcggatctgcgagccggaacgcgcggtggtgtttcgcgtgtcgtgggtcgacgatcagggcaaggtccgggtcaaccgcggcttccgcatccagatgaacagcgccatcggcccgtacaagggcggcctgcgcttccatccctcggtcaacatgggcgtgctgaaattcctcgccttcgagcagaccttcaagaactccctgacctccctgcccatgggcggcggcaagggcggttcggacttcaatcccaagggcaagagcgacgccgaggtgatgcgcttctgccaggccttcatgagcgagctgtaccggcatatcggtgccgacgttgacgtcccggccggtgacatcggcgtgggtgcccgggaaatcggtttcctctttggccagtacaagcgcctgagcaaccagttcacgtcggtgctgaccggcaagggcatcagctacggcggcagcctgatccgccccgaggccacgggctttggctgcgtgtacttcgccgaggaaatgctcaagcgccgcggtgatcgggtcgaaggcaagcgcgtggccatctccggctccggcaacgtggcccagtatgcggcgcgcaaggtcatggacctgggtggcaaggtgatctccctgtccgattccgaaggcaccctgtattgcgagtcgggcctgagcgaagagcagtggctggcggtactggaactcaagaacgtgcagcgtgggcgtatcagcgagctggcgagccagttcggcctggagttccgcgccggccagactccgtgggacctgccgtgcgatatcgccttgccctgcgccacgcagaatgaactggacgccgaggcggcccgtaccctgctgcgcaacggctgcacctgtgtcgccgaaggtgccaacatgccgaccactctggaggctgtggatatctttatcgacgcgggcatcctcttcgccccgggcaaggcgtccaacgccggtggcgtggcggtgagtggcctggaaatgtcgcagaacgccatgcgcctgctgtggaccgccggtgaagtggacagcaagctgcacaacatcatgcagtcgatccaccacgcttgcgtgcactatggcgaagagaatggccggatcaactacgtgaagggtgcgaacatcgccggcttcgtcaaggtcgccgatgccatgctggcccagggcgtggtctga

SEQ ID NO: 137134 - protein, 468 aa, Pseudomonas fluorescens Pf-5
MRIELIKSRANLFLTTINLPRLPMIESVEDFLARLKKRDPDQPEFHQAVEEVLRSLWPFLEANPHYLSSGILERICEPERAVVFRVSWVDDQGKVRVNRGFRIQMNSAIGPYKGGLRFHPSVNMGVLKFLAFEQTFKNSLTSLPMGGGKGGSDFNPKGKSDAEVMRFCQAFMSELYRHIGADVDVPAGDIGVGAREIGFLFGQYKRLSNQFTSVLTGKGISYGGSLIRPEATGFGCVYFAEEMLKRRGDRVEGKRVAISGSGNVAQYAARKVMDLGGKVISLSDSEGTLYCESGLSEEQWLAVLELKNVQRGRISELASQFGLEFRAGQTPWDLPCDIALPCATQNELDAEAARTLLRNGCTCVAEGANMPTTLEAVDIFIDAGILFAPGKASNAGGVAVSGLEMSQNAMRLLWTAGEVDSKLHNIMQSIHHACVHYGEENGRINYVKGANIAGFVKVADAMLAQGVV

SEQ ID NO: 137135 - DNA, 1347 bp, Psychrobacter arcticus 273-4
  CDS (1)..(1347): transl_table=11
atgagtatcagtcaggcaatcgaaaaaatcgaagcacgttatgcccatcaacctgagtttattcaggcagtaaaagaagttgcaattacgattgcgccactatatgactctcatccagaatatgatacttttaaagtctttgagcgccttgttgagcctgatcgtgtgatagcgtttcgtatcaattgggaaaacgataaaggtgaagtgcaggtaaatcgcggctggcgtgtccagttcagtaatgctttaggtccttataaaggtggtattagatttcacccaaccgtcaaccaatcggttttgaaattcttaggttttgagcaaatctttaaaaatgctttgacgggcttaccgatgggcggcgctaaaggtggttctgactttgatccaaagggcaagtcagacaatgaaatccgtcgcttttgctacgcctttatgcgtgagctgcatccatatatcaacaaagatacggatgtaccagcgggtgatatcggcgttggcggacgcgaaatcagctatatgtttgccatgtataagaatctaactcgcgaatatggcggtgtattgactggtaaaggtgtgggttttggcggtagtttgatgcgtacagaagcgactggctatggcgcagtttacttcttagaaaatatgctcaccgctcaaaacgaacacatcgccggtaaaagagtactgatttcaggtgcaggtaacgtctctctacatgccgctgaaaaagttcatatgctgggcggcgtcgtcgttaccgtatctgactcacaaggtaccttgtatgatgaaaaaggtctaaatcaagaaaagatcaactggctaaaagagcagaaagcaaaaagccaaccattagcagattacgttgctgtctatggtggtgagtggttcgctggacaaaagccctggcatatcaaaggcgatatcgccatcccatcagccacgcaaaacgaagtgaatgaaggcgacgccaagttgatggttgagaacggcattaagtatgtggttgaaggtgctaatatgccattgactgcagaagcaattgatcatatccgcttgcaccgtgtgcactatgctccaggtaaagctgcgaatgcgggcggtgtggcagtatctggtcttgagatgtcgcagaactcagtgcgtcagtacaagagctttgaacaaatcgatgcacgtttaaaatgtattatgaaaaatattcatgatagcgctgctgaagcctcaggaaagtatcatcaaactgataaaggctacattgactatatgactggtgccaatatcgttggctttgagcgtgttgctgacgccttggttgcttatggtatcttgaactaa

SEQ ID NO: 137136 - protein, 448 aa, Psychrobacter arcticus 273-4
MSISQAIEKIEARYAHQPEFIQAVKEVAITIAPLYDSHPEYDTFKVFERLVEPDRVIAFRINWENDKGEVQVNRGWRVQFSNALGPYKGGIRFHPTVNQSVLKFLGFEQIFKNALTGLPMGGAKGGSDFDPKGKSDNEIRRFCYAFMRELHPYINKDTDVPAGDIGVGGREISYMFAMYKNLTREYGGVLTGKGVGFGGSLMRTEATGYGAVYFLENMLTAQNEHIAGKRVLISGAGNVSLHAAEKVHMLGGVVVTVSDSQGTLYDEKGLNQEKINWLKEQKAKSQPLADYVAVYGGEWFAGQKPWHIKGDIAIPSATQNEVNEGDAKLMVENGIKYVVEGANMPLTAEAIDHIRLHRVHYAPGKAANAGGVAVSGLEMSQNSVRQYKSFEQIDARLKCIMKNIHDSAAEASGKYHQTDKGYIDYMTGANIVGFERVADALVAYGILN

SEQ ID NO: 137137 - DNA, 1359 bp, Thermobifida fusca YX
  CDS (1)..(1359): transl_table=11
atgtcggcgaatctcgatgagaaactgtccccgatctacgaggaaatcctgcggcgtaacccgggggaggtcgagttccaccaggctgttcgcgaagtcctggagtgcctcggccccgtggtggccaagaaccctgacatcagccacgccaagatcatcgagcggctctgtgagccggagcgccagctgatcttccgggtgccctggatggacgactccggtgagatccacgtcaaccggggtttccgggtggagttcagcagctctttgggaccttacaagggcgggctgcggttccacccgtcggtgaacctgagcatcatcaagttcctcgggttcgagcagatcttcaagaactcgctgaccggattgccgatcggcggtgcgaaaggcggcagcgacttcgacccgaagggccgttccgacgccgagatcatgcggttctgccagtcgttcatgacggagctgtaccggcacctgggtgagcacacggacgtgcctgccggtgacatcggcgtgggccagcgtgagatcggctacctgttcggccagtacaagcggatcaccaaccgctacgagtcgggcgtgttcaccggtaagggcctcagttggggcggttcccaggtgcgtcgtgaggccaccgggtacggctgtgtgctcttcactgcggagatgctgcgagcccgcggcgactcgctggaaggcaagcgggtctcggtgtcgggttcgggcaatgtggcgatctacgcgatcgagaaggcccagcagctcggcgcgcatgtggtgacctgctcggactccaacggctacgtggtggacgagaaggggatcgacctggagctgctcaagcaggtcaaggaggtcgaacgcggccgggtgtccgactacgccaagcggcgcggctcccacgtccgctacatcgactcgtcgtcgtccagcgtgtgggaggtgccctgcgacatcgcgctgccgtgcgcgacgcagaacgagctgaccggccgcgacgctatcaccctggtgcgcaacggggtgggcgcggtggcggagggcgcgaacatgcccacgaccccggaggggatccgggtgttcgcggaggcgggcgtagcgttcgcgccgggcaaggccgcgaacgcgggcggggtggcgacgagcgcgttggagatgcagcagaacgcgtcccgcgactcgtggtcgttcgagtacaccgagaagcggctcgcggaaatcatgcgccacatccacgacacctgctatgagacggcggaacgctatgggcggcccggcgactatgtggcaggtgccaacatcgctgctttcgagatcgtcgctgaggcgatgctcgctcagggcctgatctga

SEQ ID NO: 137138 - protein, 452 aa, Thermobifida fusca YX
MSANLDEKLSPIYEEILRRNPGEVEFHQAVREVLECLGPVVAKNPDISHAKIIERLCEPERQLIFRVPWMDDSGEIHVNRGFRVEFSSSLGPYKGGLRFHPSVNLSIIKFLGFEQIFKNSLTGLPIGGAKGGSDFDPKGRSDAEIMRFCQSFMTELYRHLGEHTDVPAGDIGVGQREIGYLFGQYKRITNRYESGVFTGKGLSWGGSQVRREATGYGCVLFTAEMLRARGDSLEGKRVSVSGSGNVAIYAIEKAQQLGAHVVTCSDSNGYVVDEKGIDLELLKQVKEVERGRVSDYAKRRGSHVRYIDSSSSSVWEVPCDIALPCATQNELTGRDAITLVRNGVGAVAEGANMPTTPEGIRVFAEAGVAFAPGKAANAGGVATSALEMQQNASRDSWSFEYTEKRLAEIMRHIHDTCYETAERYGRPGDYVAGANIAAFEIVAEAMLAQGLI

SEQ ID NO: 137139 - DNA, 1344 bp, Ralstonia eutropha JMP134
  CDS (1)..(1344): transl_table=11
gtgaattctccctccctcgacgcattccttgccggcgtcgcccggcgcgaccccggccaacctgaatttctgcaggccgtgaaggaagtcatgatgacgctctggccgtttgtcgagcgtcacccgcgctacgccgatcaggccctgctcgaacgcctggtcgagcccgagcgtgtgatccagttccgcgtggcgtggaccgacgaccagaaccgcgtgcaggtcaaccgcgcgttccgcgtgcagcacagctcggccatcggcccgtacaagggcggcatgcgtttccacccgacggtgaacctgtcggtgctcaagttcctcggtttcgagcagaccttcaagaacgcactgaccacgctgccgatgggcggtggcaagggcggttcggatttcgacccgaagggcaagtcggacgctgaagtgatgcgcttctgccaggcgctggtcaccgagctgtaccgccacctggggccggacaccgacatccccgccggcgacatcggcgtgggcgcgcgcgaggtcggcttcatggccggtatgatgaagaagctgtcgaaccagtcggcctgcgtgttcaccggcaagggcctggcgttcggcggcagcctgatgcgccccgaagccacgggctacggcaccgtgtacttcgcccaggaaatgctccaccgccgtggcatggacttcgacggcctgcgcgtgctgctgtccggctcgggcaacgtggcgcagtacgcagccgagaaggccatcgaactgggtgccaaggtgctgacgctgaccgactccggcggcgtgctgcactacccggaggggatgaccacagagcaactggccgaagtgatggcgttcaagaacgaagagcgtggtcgactgtccgactttgccgcacgccatggcatgaagttcgaagccggccgcacgccgtggcatgtgcctgccgacgtagcgctgccttgcgcaacgcagaacgaactcgatggcaacgacgccgagaccctgcttggcaacggtgtgatctgcgtggccgaaggtgcgaacatgccctcgacgctcgaagccgtggaccgcttcgtcgacgcgaaaatcctctacgcacccggcaaggccagcaatgccggtggcgtggcgacctcaggtctggaaatgtcgcagaatgccatgcgcctgtcctggcaccatgccgaggtcgacgagaagttgcacgcgatcatgaaggacatccaccagaactgcattcaccatgggcagaaggatggcgggtacgtcaactatgtcgaaggggcgaatatcgctggctttgtgaaggtggcggatgcgatgttggcgcaaggggtgatttga

SEQ ID NO: 137140 - protein, 447 aa, Ralstonia eutropha JMP134
MNSPSLDAFLAGVARRDPGQPEFLQAVKEVMMTLWPFVERHPRYADQALLERLVEPERVIQFRVAWTDDQNRVQVNRAFRVQHSSAIGPYKGGMRFHPTVNLSVLKFLGFEQTFKNALTTLPMGGGKGGSDFDPKGKSDAEVMRFCQALVTELYRHLGPDTDIPAGDIGVGAREVGFMAGMMKKLSNQSACVFTGKGLAFGGSLMRPEATGYGTVYFAQEMLHRRGMDFDGLRVLLSGSGNVAQYAAEKAIELGAKVLTLTDSGGVLHYPEGMTTEQLAEVMAFKNEERGRLSDFAARHGMKFEAGRTPWHVPADVALPCATQNELDGNDAETLLGNGVICVAEGANMPSTLEAVDRFVDAKILYAPGKASNAGGVATSGLEMSQNAMRLSWHHAEVDEKLHAIMKDIHQNCIHHGQKDGGYVNYVEGANIAGFVKVADAMLAQGVI

SEQ ID NO: 137141 - DNA, 1260 bp, Methanosarcina barkeri str. Fusaro
  CDS (1)..(1260): transl_table=11
gtgaaggaggtaactgtgggttctcgttccaagcttcttgaaggtgttaagcagcacctgtgtacctgtgctgcaggacttaagctcacgcctgatatggaagcgttcctggaaatgcctatgagagaactctatgtttccctgcctgtccacatggatgacggttctataaaagtttttaaaggcttccgggtgcagtacaacgaagctctgggccccacaaaaggaggtgtgcgttttcatcctgaagatactatggaaactacgagagcccttgcagccctcatgacttggaaatgtgctcttcataagctgcctctgggaggagcaaaaggcggggttatttgcaaccccaaagaactttcacatcgagaaatcgagcgcctgagcagggcctacatacgtgggatttatcagataataggccctgatagagatatccctgcccctgacatttatacaaatccgcaggttatggcctggatgatggacgaatactcaaaactcgcaggcaggaatgtgttcggttccattacaggcaagccgacaagccttggaggctcggcaggcagatacgatgccacggcaagaggcggtttatacactataagggaagctgcagaaagaattggaataagcctgaaagcttcaagggttgcagttcatggtttcggaaacgtaggatatcatgccgcttatcttgcaaataaactatacggctgcaaggttgttgctgtaagcgacagcaaaggtgcgatcttttcaccctatggacttgaccccgaagacgtttcaggccataagcactcaactggttcggtgctggactatcccgaagcagagaacctgactaacaaagagttgcttgaactggatgttgaaatcctgattccggcttctcttgaaaacataataactgaagagaacgcgggaaatattaaagccaggattcttgccgagatggctaacggcccaacgacagtcgaaggagaagcaatcctgaattcaaaaggaattcatattatcccagatattctgtgcaatggaggcggagtcattgtctcatactttgaaatggtacagaaccagtcaagcacacagtgggaagaagaggaagttcaaaatcgtctggagagaaaaatgaaagaagcatatttttcggtgtatgatttcgcctcaaaaaacaatgttgaaatgcgtcaggctgcatatacccttgctgtcggcagagtggttgaagctatgcagctcaggggctag

SEQ ID NO: 137142 - protein, 419 aa, Methanosarcina barkeri str. Fusaro
MKEVTVGSRSKLLEGVKQHLCTCAAGLKLTPDMEAFLEMPMRELYVSLPVHMDDGSIKVFKGFRVQYNEALGPTKGGVRFHPEDTMETTRALAALMTWKCALHKLPLGGAKGGVICNPKELSHREIERLSRAYIRGIYQIIGPDRDIPAPDIYTNPQVMAWMMDEYSKLAGRNVFGSITGKPTSLGGSAGRYDATARGGLYTIREAAERIGISLKASRVAVHGFGNVGYHAAYLANKLYGCKVVAVSDSKGAIFSPYGLDPEDVSGHKHSTGSVLDYPEAENLTNKELLELDVEILIPASLENIITEENAGNIKARILAEMANGPTTVEGEAILNSKGIHIIPDILCNGGGVIVSYFEMVQNQSSTQWEEEEVQNRLERKMKEAYFSVYDFASKNNVEMRQAAYTLAVGRVVEAMQLRG

SEQ ID NO: 137143 - DNA, 1338 bp, Pseudomonas fluorescens PfO-1
  CDS (1)..(1338): transl_table=11
atgatcgaatccgtcgaatccttcctcgcccgtctgaaaaaacgcgatccggatcaacccgaattccaccaggccgtcgaagaagtcctgcgcagtctgtggccgtttctcgaggccaatccgcactatctgacctcgggaattctggagcgtatctgcgagccggagcgggcggtggtgttccgagtgtcgtgggtcgacgatcagggcagggtccaggtcaatcgcggtttccgcatccagatgaacagcgccattggcccctacaagggcggtttgcgtttccatccttcggtgaatctgggcgtgttgaaattcctcgccttcgagcagaccttcaagaattccctgacctcgctgcccatgggcggaggcaagggtggctcggacttcgatccgaagggcaagagcgacgccgaagtcatgcgtttttgccaggcattcatgagcgagctgtaccgccacatcggtgccgacgtggacgtcccggccggtgatatcggtgtcggcgcacgggaaatcggtttcctgttcggccagtacaaacgcctgagcaaccagttcaccagcgtgctgaccggcaagggcatgacctacggcggcagcttgattcgccccgaagccaccggtttcggttgcgtgtacttcgccgaggaaatgctcaagcgtcgcgagcagaccgtcgaaggcaaacgcgtggcgatctccggttccggcaacgttgcgcaatacgcggctcgcaaagtgatggatctgggcggcaaggtgatttccctctccgactccgaaggcacgctgtattgcgaggcgggcctgagcgaagaacagtggttggcgctgctggaactgaagaacgtcaagcgtgggcggatcagcgaattggcgtctgccttcggtctggagttccgcgccggtcagttgccatggtcgttgccgtgcgacattgcgctgccatgcgcgacccagaacgaacttgacgcggaatccgcccgcaccttgctgcgcaacggctgcgtctgcgtggccgaaggcgcgaacatgccgaccacccttgaggctgtggatatctttatcgaagcgggcattctgttcgcgccgggcaaggcctcgaatgccggcggcgtagcggtcagtgggctggagatgtcgcagaacgccatgcgcctgctgtggacgggcggcgaggtggacagcaagctgcacgggatcatgcagtcgatccaccacgcctgcgtgcattacggtgaggaaaacggccggatcaactacgtcaaaggcgcgaacatcgccggcttcgtcaaggtcgccgacgcgatgctcgcccaaggcgtggtttaa

SEQ ID NO: 137144 - protein, 445 aa, Pseudomonas fluorescens PfO-1
MIESVESFLARLKKRDPDQPEFHQAVEEVLRSLWPFLEANPHYLTSGILERICEPERAVVFRVSWVDDQGRVQVNRGFRIQMNSAIGPYKGGLRFHPSVNLGVLKFLAFEQTFKNSLTSLPMGGGKGGSDFDPKGKSDAEVMRFCQAFMSELYRHIGADVDVPAGDIGVGAREIGFLFGQYKRLSNQFTSVLTGKGMTYGGSLIRPEATGFGCVYFAEEMLKRREQTVEGKRVAISGSGNVAQYAARKVMDLGGKVISLSDSEGTLYCEAGLSEEQWLALLELKNVKRGRISELASAFGLEFRAGQLPWSLPCDIALPCATQNELDAESARTLLRNGCVCVAEGANMPTTLEAVDIFIEAGILFAPGKASNAGGVAVSGLEMSQNAMRLLWTGGEVDSKLHGIMQSIHHACVHYGEENGRINYVKGANIAGFVKVADAMLAQGVV

SEQ ID NO: 137145 - DNA, 1287 bp, Burkholderia sp. 383
  CDS (1)..(1287): transl_table=11
atgtcttcgcaattgcagtccatcccgtcctaccttcacgccgacgatctcggcccgtggggcaactaccttcagcaagtcgatcgcgtcgcgccgtacctcggctcgctgtcgcgctggctcgaaacgctgaagcgcccgaagcgcatcctgatcgtcgactgccccatcgagctcgataacggtaccgtcgcgcacttcgaaggctatcgcgtgcagcacaacgtgtcgcgcggcccgggcaagggcggtgtgcgttaccaccaggacgtgacgctgtcggaagtgatggcactgtccgcatggatgtcggtcaagaacgcggccgtgaacgtgccgtacggcggcgcgaagggcggtatccgcgtcgacccgcgcaagctgtcgcgtggtgagctcgagcgcgtgacgcgccgctacaccagcgaaatcggcatcatcatcggcccgaacaccgacattccggcgccggacgtcaacaccaacgaacaggtgatggcgtggatgatggacacgtactcgatgaaccagggccagacgtcgaccggcgtcgtgaccggcaagccgatcgcactcggcggttcgctcggccgcaaggaagcaacgggccgcggcgtgttcgtcgtcggcagcgaagcggcgaagaagaagggcctcgagatcgaaggcgcacgaatcgcggtgcagggcttcggcaacgtcggcggcatcgcggcgaagctgttccaggaagcgggtgcgaaggtgatcgcggtgcaggatcacacgggcacgatctaccagccggccggcctcgattcgaacaagctgctcgaccacgtcgcacgcacgggcggtgtcgcgggcttcgaaggcgcggaaccgatgccgaatgacgagttctggaccgtcgaaaccgacatcctgatcccggcggcactggaaaaccagatcaccgagaagaacgcagggaagatccgcacgaagatcatcgtcgaaggcgcgaacggcccgacgacgacggcggcggacgacatcctgaccgcgaacggcgtgctggtgatcccggacgtgatcgcgaacgcaggtggcgtgaccgtgtcgtatttcgaatgggtgcaggatttctcgagcttcttctggacggaagacgagatcaaccaccgtctcgaacgcgtgatgcgcgaagcgttctccggcgtgtgggcggtcgcggaagagcacaaggtgtcggtgcgtacggcagcgttcatcgttgcgtgcaagcgcatcctgatggcgcgcgaaatgcgcggcctgtacccctga

SEQ ID NO: 137146 - protein, 428 aa, Burkholderia sp. 383
MSSQLQSIPSYLHADDLGPWGNYLQQVDRVAPYLGSLSRWLETLKRPKRILIVDCPIELDNGTVAHFEGYRVQHNVSRGPGKGGVRYHQDVTLSEVMALSAWMSVKNAAVNVPYGGAKGGIRVDPRKLSRGELERVTRRYTSEIGIIIGPNTDIPAPDVNTNEQVMAWMMDTYSMNQGQTSTGVVTGKPIALGGSLGRKEATGRGVFVVGSEAAKKKGLEIEGARIAVQGFGNVGGIAAKLFQEAGAKVIAVQDHTGTIYQPAGLDSNKLLDHVARTGGVAGFEGAEPMPNDEFWTVETDILIPAALENQITEKNAGKIRTKIIVEGANGPTTTAADDILTANGVLVIPDVIANAGGVTVSYFEWVQDFSSFFWTEDEINHRLERVMREAFSGVWAVAEEHKVSVRTAAFIVACKRILMAREMRGLYP

SEQ ID NO: 137147 - DNA, 1353 bp, Geobacter metallireducens GS-15
  CDS (1)..(1353): transl_table=11
atgtcaccacaacttatcgacgaaagactcgcaggcatctatcaggatgtgctcaagcgcaacccgggcgaggtggaattccaccaggccgtggccgaggtcctggaatccctcggaccggtcgtgaccaagcacccggaatacctggagcgcaaaatcattgagcggatcgctgaaccggagcgtcagattatcttccgggtgccctggcaggacgacaaggggcaggtccacatcaaccgaggcttccgcgttgaattcaactccgctctcggcccctataagggaggcctccgcttccacccctccgtctatctcggcattatcaagttcctcggcttcgagcagatcttcaagaactccctcaccggcatgccgatcggtggcggcaaaggtggttccgacttcgatccgaaagggaagaccgatgacgaagtaatgcgtttctgccagagcttcatgactgaactctatcgccacattggcgaacacaccgatgttccggcaggagacatcggggttggcggccgcgaaatcggctacatgttcggccagtacaagcggatcactaaccgctgggaagccggcgtcctcaccggcaagggactcaagttcggcggatccctggttcgtccggaagcaacaggctacggcgccacatacttcatcaacgaagccctcaaggtacgcaaagattccttcgacggcaagacctgcctggtatcaggttcaggtaacgtggccatctacaccatcgagaagatccaccaactgggtggcaagtgcattgcctgctccgacagtaacggcgtcatcatccacgagaaagggcttgatgtggaactgatcaagcagctgaaggaagtggagcgtcgccggatcgccgattacgccacctaccacaaggatgccaagtacatcgccaacggcaacatctgggatatcccctgccaggtagccatgccatcagcaacccagaacgagatcaacggcaaggatgccaagaccctggtgaagaacggttgtattgccgtgggcgaaggggcaaacatgcccaccacgccggaagggatcaaggtgttcatcgaggcccaaattgcctacggtccaggcaaggcggccaatgccggcggggttgccacctcggccctcgaaatgcaacagaacgcccagcgcgattcctggtccttcgaagagaccgagaagaagctggagaagatcatggtcggcattcacaagctctgctacgaaactgccgaagagtatggcgacaaggggaactatgtcaccggcgccaacatcgccggtttcatcaaggtagctgacgccatggtcgctcacggtctggtataa

SEQ ID NO: 137148 - protein, 450 aa, Geobacter metallireducens GS-15
MSPQLIDERLAGIYQDVLKRNPGEVEFHQAVAEVLESLGPVVTKHPEYLERKIIERIAEPERQIIFRVPWQDDKGQVHINRGFRVEFNSALGPYKGGLRFHPSVYLGIIKFLGFEQIFKNSLTGMPIGGGKGGSDFDPKGKTDDEVMRFCQSFMTELYRHIGEHTDVPAGDIGVGGREIGYMFGQYKRITNRWEAGVLTGKGLKFGGSLVRPEATGYGATYFINEALKVRKDSFDGKTCLVSGSGNVAIYTIEKIHQLGGKCIACSDSNGVIIHEKGLDVELIKQLKEVERRRIADYATYHKDAKYIANGNIWDIPCQVAMPSATQNEINGKDAKTLVKNGCIAVGEGANMPTTPEGIKVFIEAQIAYGPGKAANAGGVATSALEMQQNAQRDSWSFEETEKKLEKIMVGIHKLCYETAEEYGDKGNYVTGANIAGFIKVADAMVAHGLV

SEQ ID NO: 137149 - DNA, 1362 bp, Syntrophus aciditrophicus SB
  CDS (1)..(1362): transl_table=11
atgtccgtagtcggcgatgtaatcgacaagatcaagcaaaaggacccttacgaatttgaatttcatcaggcggcggaagaagtgcttctcacattggaacccaccacccagaaacatccggagttcgtcaaggctaaaatctatgaacgcattgtggagcctgatcgggttatcacttttcgtgtcccctggatggatgataaaggcgatgtacaggtcaaccggggatttcgtgttcagttcaataatgccatcggcccttataaaggagggctgcgttttcacccctctgtcaacctcagcatcctgaaatttctgggctttgaacagattttcaagaattcgcttacaacgcttcccatgggcggcgcgaaaggcggttcggatttcgaccccaagggaaaatccgatacggaagtcatgcgcttctgtcagtccttcatgcgcgagctcttccgccatatcggacccgacacggatgtgccggcgggagacatcggcgtgggcgcccgcgaaatcggctatctgtatggctattacaaaaagttgatcaatgagcatacaggcgttttgaccggcaagagactggaatacgggggaagcctcatccgaccggaagcgaccggctatggctgcgtctatttcgccgcggaaatgctgtcctggcgcggccttgatttcaagggaaagaccgtcgcgatcagcggttccggaaatgtcgcccagtatgccgttgaaaaagtcaaccgcctgggcggaaaagtcatcaccctgtgcgattccagctcgacgattgtagatgaagccggcattgattacgaaaagtgcgaatatgtcatggaactgaagaatgtccggagaggccgcatcagtgagtacgcggacaaatactcaagctcctcctgctgttatatcggcgaaagcgtctgggatgtgatcaaaaatcaggggatcaaagtggacatcgccctgccctgcgccacccagaacgaaattgacgagagccacgcggaagccctggtgaaaaacggctgcatctgcgtttccgaaggcgccaacatgccttccactccggaagccatccgcgtctatcaggacaacggaatcatctatggtcccggcaaggctgccaatgccggcggcgtggccacctcaggcctggaaatgagccagaacagcatgcggctttcctggcctcgggaagaggtcgatgcgaggctgcttcagatcatgaagagcatccataaagcctgtctcgatgcggcggcggaatacgggaaagagggagactatgtgctgggcgccaatatcgccgggttcatgaaggtggccaacagcatgctggccttcgggatcgtgtaa

SEQ ID NO: 137150 - protein, 453 aa, Syntrophus aciditrophicus SB
MSVVGDVIDKIKQKDPYEFEFHQAAEEVLLTLEPTTQKHPEFVKAKIYERIVEPDRVITFRVPWMDDKGDVQVNRGFRVQFNNAIGPYKGGLRFHPSVNLSILKFLGFEQIFKNSLTTLPMGGAKGGSDFDPKGKSDTEVMRFCQSFMRELFRHIGPDTDVPAGDIGVGAREIGYLYGYYKKLINEHTGVLTGKRLEYGGSLIRPEATGYGCVYFAAEMLSWRGLDFKGKTVAISGSGNVAQYAVEKVNRLGGKVITLCDSSSTIVDEAGIDYEKCEYVMELKNVRRGRISEYADKYSSSSCCYIGESVWDVIKNQGIKVDIALPCATQNEIDESHAEALVKNGCICVSEGANMPSTPEAIRVYQDNGIIYGPGKAANAGGVATSGLEMSQNSMRLSWPREEVDARLLQIMKSIHKACLDAAAEYGKEGDYVLGANIAGFMKVANSMLAFGIV

SEQ ID NO: 137151 - DNA, 1356 bp, Novosphingobium aromaticivorans DSM 12444; identical to SEQ ID NO: 57026
  CDS (1)..(1356): transl_table=11

SEQ ID NO: 137152 - protein, 451 aa, Novosphingobium aromaticivorans DSM 12444; identical to SEQ ID NO: 57027

SEQ ID NO: 137153 - DNA, 1350 bp, Francisella tularensis subsp. holarctica; identical to SEQ ID NO: 57028
  CDS (1)..(1350): transl_table=11

SEQ ID NO: 137154 - protein, 449 aa, Francisella tularensis subsp. holarctica; identical to SEQ ID NO: 57029

SEQ ID NO: 137155 - DNA, 1434 bp, Desulfitobacterium hafniense Y51
  CDS (1)..(1434): transl_table=11
ttgacctataacagagaatatttctacgttacttctgttacattaattgggacagaagacggaaaacttaaacaaagacgtttagggggaaaactgaatatgacctatgttcaagaagttctggaacaagccgttaagcgcaatcccggtgaagctgaatttcaccaggcactgagagaggtcttggaatctctcgaacccgtgttggaaaaacgtcccgatcttaaggaagcaggaattctcgagcgcatcgtcgagcctgaacggcagattctcttccgggtcccttgggttgacgaccagggcaaggtccaggtgaaccgtggtttccgtgtggaatacaacagtgccatcggaccttataaagggggcctgcgtttccatccttcggtgtatttaggtatcataaaattcttaggcttcgaacagatctttaaaaactccctgaccggtttgcccattggcggcggtaaagggggcagtgattttgatccgaaaggaaaatccgaaggagaaatcatgcggttctgccaaagcttcattacagaactttatcgctaccttggtgccgatacagacgtcccggcaggggatatcggtgtcggcggacgggaagtgggctatatgttcggtcaatataagcggattaccaatagatatgaaggtgttctcaccggcaaaggcttaacctttggcggcagcctgggccgtacggaagcaaccggctatggattggtttattttatggaagaagcccttaaagccgtgggcaaatccttcagcggcgctactgtcgttgtttccggctccggaaacgttgccatttacgcgacccaaaaggccacccagctagggggcacagtcgtggccatgagcgattccaacggctatatctatgataaagacggtattaatctcgatacagtccgccagttgaaagaggttgagcggaagcgccttaaagactacgtcagcattcatcccactgccgaatattatgaaggctgtgcaggcatctggaccatcccctgcgctatcgcactcccctgtgccactcaaaacgaattggacggggaagcggccgaagttcttgttaaaaacggctgctacgctgtcggtgaaggagccaatatgccttccactccggaagctgtggatgtgttcctccagcacaaaatcatctatggtccgggcaaagcagccaatgccggaggtgtggccgtatccgctctggagatgtcccaaaacagcatgcgctattcatggacttttgaagaagtggatgccaagctcaaaaatattatggtcaatatctaccacaatgccagcaaagccgctcaagagttcggctttgaggggaatttggtggcaggggccaatatcgccggcttccttaaggtagccgaagctatgaaggctcagggaacggtgtaa

SEQ ID NO: 137156 - protein, 477 aa, Desulfitobacterium hafniense Y51
MTYNREYFYVTSVTLIGTEDGKLKQRRLGGKLNMTYVQEVLEQAVKRNPGEAEFHQALREVLESLEPVLEKRPDLKEAGILERIVEPERQILFRVPWVDDQGKVQVNRGFRVEYNSAIGPYKGGLRFHPSVYLGIIKFLGFEQIFKNSLTGLPIGGGKGGSDFDPKGKSEGEIMRFCQSFITELYRYLGADTDVPAGDIGVGGREVGYMFGQYKRITNRYEGVLTGKGLTFGGSLGRTEATGYGLVYFMEEALKAVGKSFSGATVVVSGSGNVAIYATQKATQLGGTVVAMSDSNGYIYDKDGINLDTVRQLKEVERKRLKDYVSIHPTAEYYEGCAGIWTIPCAIALPCATQNELDGEAAEVLVKNGCYAVGEGANMPSTPEAVDVFLQHKIIYGPGKAANAGGVAVSALEMSQNSMRYSWTFEEVDAKLKNIMVNIYHNASKAAQEFGFEGNLVAGANIAGFLKVAEAMKAQGTV

SEQ ID NO: 137157 - DNA, 1344 bp, Methylobacillus flagellatus KT
  CDS (1)..(1344): transl_table=11
atgaagtatcaatcggcacatgatttcttagccgttgtcgcacaaaaaaatcccggtcaaccggagttcctgcaggcagtcactgaagtcgtcgaaagcctttggccattcatcagcgccaatccgcgctacgccgaacacggcattcttgaccggctggttgaaccggaacgtgccatcctgtttcgtgtctcctgggttgatgataaaggcgaagttcaggtcaaccgcggctaccgtatccagcataatggtgccattggcccatacaagggcggcttgcgtttccatccgtccgtcaacttgtccattctgaaattcctcgctttcgagcaaaccttcaagaatgccctgacgaccttgcccatgggcggaggcaagggtggtgccgatttcgatccaaagggcaagagtaatggcgaagtcatgcgtttctgccaggcatttatcagtgagctgttccgccacgtgggttccgatacggatgtcccggctggcgatatcggcgttggagcacgcgagatcggcttcatgaccggcatgatcaagaaactgaccaatcgcgccgattgcgtcctgaccggcaagggactgagctatggcggatcgctcatccgcccggaagcgaccggttacggcactgtctactttgccgaagaaatgctgcgccacagcggccgcaccatcgcaggcatgcgcgttgctgtctcgggttcaggtaacgtggcgcaatacgcgattgagaaggccctggcactcggtgctaaggtcatcaccgcttctgactccagcggcaccgtaattgacgaggctggtttcactgccgagaaactgcaaatcctgatgcaggtcaagaatgtcgagtatggccgtatcaaggattatgctgagcgggttggcgcactttacgtccctggcggctcaccctggagtgtcaaggctgaagtggcactaccgtgcgccacgcagaatgaactgaccaaggctgacgcagcaaccctgatcgcaaatggcgtgttgtgtgtagctgaaggtgccaacatgccatgcacggccgaagcgatgaagctgttcgacgagcaccatattctttatgcgccaggcaaggcaaccaatgcaggtggtgtggcaacgtccggcctggaaatgacccagaatgccatgcgtctctcatggacacgtgaagaagtggatgcacgtctgttcgacatcatgaagggcatccatgatgcctgtgtacaatacggcacgcgtgaggatggcagcgtcaattatgtggatggtgccaacatcgccggcttcgtcaaggtagcggaagccatgctggcgcaaggcgtggtctaa

SEQ ID NO: 137158 - protein, 447 aa, Methylobacillus flagellatus KT
MKYQSAHDFLAVVAQKNPGQPEFLQAVTEVVESLWPFISANPRYAEHGILDRLVEPERAILFRVSWVDDKGEVQVNRGYRIQHNGAIGPYKGGLRFHPSVNLSILKFLAFEQTFKNALTTLPMGGGKGGADFDPKGKSNGEVMRFCQAFISELFRHVGSDTDVPAGDIGVGAREIGFMTGMIKKLTNRADCVLTGKGLSYGGSLIRPEATGYGTVYFAEEMLRHSGRTIAGMRVAVSGSGNVAQYAIEKALALGAKVITASDSSGTVIDEAGFTAEKLQILMQVKNVEYGRIKDYAERVGALYVPGGSPWSVKAEVALPCATQNELTKADAATLIANGVLCVAEGANMPCTAEAMKLFDEHHILYAPGKATNAGGVATSGLEMTQNAMRLSWTREEVDARLFDIMKGIHDACVQYGTREDGSVNYVDGANIAGFVKVAEAMLAQGVV

SEQ ID NO: 137159 - DNA, 1251 bp, Methanococcoides burtonii DSM 6242; identical to SEQ ID NO: 57032
  CDS (1)..(1251): transl_table=11

SEQ ID NO: 137160 - protein, 416 aa, Methanococcoides burtonii DSM 6242; identical to SEQ ID NO: 57033

SEQ ID NO: 137161 - DNA, 1389 bp, Ralstonia metallidurans CH34
  CDS (1)..(1389): transl_table=11
gtggcgcaggcgccgcacatcgcatcaagaaaactcagagacatcgtgacttctcgcaccctcgattccttcctggccggggtctcccggcgtgaccccaaccagcccgaattcttccaggccgtgaaggaggtcatgatgaccttgtggccgttcgtcgaacgcaacccgcgctatggcgatcaggcactgctggaacggctggtggaaccggaacgtgtgatccagttccgcgtggcatggaccgacgatcgcggccaggtgcaggtcaaccgcgcattccgcgtgcagcacagctccgcaatcggcccgtacaagggtgggatgcgcttccacccgaccgtgaacctgtcggtactgaagttcctgggcttcgagcagaccttcaagaatgcgctgaccaccctgcccatgggcggcggcaagggcggctcggacttcgacccaaagggcaagaccgacgctgaagtcatgcgcttctgccaggcgctgatcaccgagctgtatcgtcacctgggaccggacaccgacgtgccggccggtgacatcggcgtgggcgcgcgggaagtcggcttcatggccggcatgatgaagaagctgtcgaaccagtccgcctgcgtgttcactggcaagggtctggccttcggcggcagcctgatgcgtcccgaggccaccggctacggcacggtgtacttcgcgcaggagatgctgcatcgtcgcggccgcgaattcgacggtctgcgtgtgctgctgtcgggctcgggcaacgtggcgcaatacgccgccgaaaaggcgatcgagctgggtgccaaggtgctgacggtatcggactccggaggcgtgctgcacttccccgagggcatgaatcgcgagcaactggacgcgctgatgacgttcaagaacgacacccgtggccgcctgtccgactttgccgagcagcatggcctgcgcttcgaggccggcaagacgccgtggcacgtgcccgccgacgttgctctgccgtgcgccacccagaacgaactgaacggtcaggatgccgagcgcctgctgtcgaacggcgtgttctgcgtagccgaaggcgccaacatgccgtcgacgctggacgccgtggaccgcttcgtggccgcacgcatcctgtatgcgccgggcaaggccagcaacgctggcggtgtggccacttcgggcctggagatgtcgcagaacgccatgcgcatggcctggcatcacgccgagatcgacgagaagctccacgccatcatgaaggacatccacggcaactgcatccactacggccagaaggaagacggctacatcaattatgtggaaggcgccaacatcgccggcttcgtcaaggtggcggacgccatgctggcgcagggtgtgatctga

SEQ ID NO: 137162 - protein, 462 aa, Ralstonia metallidurans CH34
MAQAPHIASRKLRDIVTSRTLDSFLAGVSRRDPNQPEFFQAVKEVMMTLWPFVERNPRYGDQALLERLVEPERVIQFRVAWTDDRGQVQVNRAFRVQHSSAIGPYKGGMRFHPTVNLSVLKFLGFEQTFKNALTTLPMGGGKGGSDFDPKGKTDAEVMRFCQALITELYRHLGPDTDVPAGDIGVGAREVGFMAGMMKKLSNQSACVFTGKGLAFGGSLMRPEATGYGTVYFAQEMLHRRGREFDGLRVLLSGSGNVAQYAAEKAIELGAKVLTVSDSGGVLHFPEGMNREQLDALMTFKNDTRGRLSDFAEQHGLRFEAGKTPWHVPADVALPCATQNELNGQDAERLLSNGVFCVAEGANMPSTLDAVDRFVAARILYAPGKASNAGGVATSGLEMSQNAMRMAWHHAEIDEKLHAIMKDIHGNCIHYGQKEDGYINYVEGANIAGFVKVADAMLAQGVI

SEQ ID NO: 137163 - DNA, 1401 bp, Acidobacteria bacterium Ellin345
  CDS (1)..(1401): transl_table=11
atgagcttgtcaacgatgattcccggcgccatcgcgacgccgcggacctacgtcaacgaagtattggcactggtaaaagcgaaaaaccctgccgaaaaggaattccaccaggcagtccaggaagtgttggaatctctgatccccgcactcgagcgtcatcctgaatacatcagccacaagatccttgagcgcgtcaccgaacccgagcgcctcctcatgttccgcgttccctggttcgacgacaagggcgagatccaggtcaatcgcggcttccgcattgagatgaacagcgccatcggcccctacaaaggcggcttacgcttccatccttcggtgaacctcggcattttgaagttcctggctttcgaacaggtattcaagaactcgctcaccacgctgcccatgggcggcggcaagggcggatcggacttcgatccgaaaggcaagagcgacaacgaagtgatgcgtttctgccagagcttcatgaccgaattgcaacgccacatcggccccgacacagacgtgccggcgggcgacatcggcgtgggcggccgtgaaatcggcttcctcttcgggcagtacaagcggctgcgcaacgaattcaccggcgtcctcaccggcaagggcttgaactggggcggctcgttgattcgtccggaagccaccggctacggctgcgtgtactttgcggaagaaatgttgaagaccgtgaagcagacgctcgaaggcaaggtttgcctggtcagcggcagcggcaacgtgtcgcaatacaccattgagaagctgctcgatctcggcgcgaagccgatcgcttgcagtgattcgaacggcatcattcacgatccggccggcatcgatcgcgaaaaactggcgtacatcctcgacctgaagaacaccaagcgcggccgcatcagcgactacgccgagaagttcaagacggcgaagtacatcccggtcgatccgaagctcgatcacaacccgctgtgggacatcaaggccgattgcgcattcccgagcgccacgcagaatgagatcaacgcgaaggacgcgaagaacctcattaagaatggctgcaaggtcgtcagcgaaggcgccaacatgccgagcacgctcgaagccacgaacctgttcctcgaagcgggcgtactgtacggaccggcaaaggctgcgaatgcgggcggcgttgccacctcaggcctcgagatggcgcagaacagcgcgcgcttggcctggacgcgcgaagaagttgaccatcgcctccacaacatcatgatcgccatccacaagaactgcttcgagactgccgagaagtacggcaagccgggcaatctggtggtcggcgccaacatcggcggcttcctgaagattgccgactcgatgctggatcaaggcttggtgtag

SEQ ID NO: 137164 - protein, 466 aa, Acidobacteria bacterium Ellin345
MSLSTMIPGAIATPRTYVNEVLALVKAKNPAEKEFHQAVQEVLESLIPALERHPEYISHKILERVTEPERLLMFRVPWFDDKGEIQVNRGFRIEMNSAIGPYKGGLRFHPSVNLGILKFLAFEQVFKNSLTTLPMGGGKGGSDFDPKGKSDNEVMRFCQSFMTELQRHIGPDTDVPAGDIGVGGREIGFLFGQYKRLRNEFTGVLTGKGLNWGGSLIRPEATGYGCVYFAEEMLKTVKQTLEGKVCLVSGSGNVSQYTIEKLLDLGAKPIACSDSNGIIHDPAGIDREKLAYILDLKNTKRGRISDYAEKFKTAKYIPVDPKLDHNPLWDIKADCAFPSATQNEINAKDAKNLIKNGCKVVSEGANMPSTLEATNLFLEAGVLYGPAKAANAGGVATSGLEMAQNSARLAWTREEVDHRLHNIMIAIHKNCFETAEKYGKPGNLVVGANIGGFLKIADSMLDQGLV

SEQ ID NO: 137165 - DNA, 1230 bp, Myxococcus xanthus DK 1622; identical to SEQ ID NO: 57038
  CDS (1)..(1230): transl_table=11

SEQ ID NO: 137166 - protein, 409 aa, Myxococcus xanthus DK 1622; identical to SEQ ID NO: 57039

SEQ ID NO: 137167 - DNA, 1347 bp, Clostridium perfringens ATCC 13124
  CDS (1)..(1347): transl_table=11
atggaagtaaaaaaatatgtagataatttaatggaagatttaaagaaaaataaccctggagaaagtgagttcttagctgctgcagaagaagtgttatactctttagtacctgtcttagaaaagaatcctaagtatatggaagagggaatattagaaagaattgttgaaccagagagagttataatgtttagagttccttgggttgacgatgctggaaatgtaagagttaacagaggatatagagtacaatttaatagtgctataggaccatataagggaggattaagattccatccttcagttaatttaagcataataaaatttttaggatttgagcaaatatttaagaattctttaactactcttcctattggaggaggaaaaggaggatctaactttgatcctaagggaaaatcagatagagagataatgagattttgccaaagctttatgagtgaactttatagacatataggacctaatacagatgttcctgcaggagatattggggttggaggaagagaaataggctatatgtttggtcaatataaaaaacttaaaaattcagtagatgcgggagttttaactggtaagggattaacttatggtggtagcttagctagaaaagaagcaactggatatggtttagtatattttgtagatgaaatgttaagagataacggtcaaacaatagaaggaaaaactgttgtaatctcaggttcaggaaatgttgcaatatatgccactgaaaaagttcaagagcttggaggaaaggttgttgcactttcagattcatcaggttatgtatatgatgaaaatggaatagatttagaggttgtaaaagaaatcaaagaagtaaaaagaggaagaatttctgaatatgtaaattatgttaaaactgctaagtttactgagggatgcagaggaatttggaatgttaaatgtgatatagcacttccttgtgctactcaaaatgaaatagataaaagcagtgcaaaaactttaattgataatggagtaattgctgtaggagaaggagcaaatatgccttcaactttagaagctcaaaaactttttgtggataataaaattttatttgcaccagcaaaagctgccaatgcaggtggagtagcaacatcagctttagaaatgagtcaaaatagtttaagaatgtcttggacttttgaagaggttgatgcaaaacttaaagacataatgaaaaatatatactataattctagaaatgcagcttctgaatatggtcatgatggaaatctaatagttggagctaatattgcaggatttaaaaaggttgcagatgctatgttagaccatggtattatataa

SEQ ID NO: 137168 - protein, 448 aa, Clostridium perfringens ATCC 13124
MEVKKYVDNLMEDLKKNNPGESEFLAAAEEVLYSLVPVLEKNPKYMEEGILERIVEPERVIMFRVPWVDDAGNVRVNRGYRVQFNSAIGPYKGGLRFHPSVNLSIIKFLGFEQIFKNSLTTLPIGGGKGGSNFDPKGKSDREIMRFCQSFMSELYRHIGPNTDVPAGDIGVGGREIGYMFGQYKKLKNSVDAGVLTGKGLTYGGSLARKEATGYGLVYFVDEMLRDNGQTIEGKTVVISGSGNVAIYATEKVQELGGKVVALSDSSGYVYDENGIDLEVVKEIKEVKRGRISEYVNYVKTAKFTEGCRGIWNVKCDIALPCATQNEIDKSSAKTLIDNGVIAVGEGANMPSTLEAQKLFVDNKILFAPAKAANAGGVATSALEMSQNSLRMSWTFEEVDAKLKDIMKNIYYNSRNAASEYGHDGNLIVGANIAGFKKVADAMLDHGII

SEQ ID NO: 137169 - DNA, 1344 bp, Rhodococcus sp. RHA1
  CDS (1)..(1344): transl_table=11
gtgtcaacgcgcgaccaggtagcagagatctacgagcaggtccgcctgcggaacgccggcgaacccgagttccaccaggcagccgccgaggtcttcgagtcgctgcaggtcgtgctcgaccaccacccccactacgctgactccggattgatcgagcggctgtgcgagcccgagcgtcagatcatcttccgggtgccgtgggtcgacgactccggcaacgtgcacgtcaaccgcggtttccgcgtgcagtacaacagtgtgctcggcccctacaagggcggcctgcggtttcaccccagcgtgaacctgggaatcgtgaaattcctcgggttcgagcagatcttcaagaacgccctcaccggacttccgatcggcggcggcaagggtggttccgacttcgaccccaagggtcgctcggaggccgagatcatgcggttctgccagtcgttcatgaccgaactgcatcgccacatcggcgagtacaccgacgtcccggcaggtgacatcggcgtcggcgggcgcgagatcggctacctgttcggccagtacaagcgcctcaccaactcctacgagtccggggtcctcaccggtaagggcctcacctggggtggctcgcaggtgcgtcgcgaggcgaccgggtacggcgtcgcctacttcgtcgccgagatgctgaaggcggcgaacagctcactggacggcaagaccgtcgtcgtctccgggtccggaaacgtcgcgatctacgcgatcgagaaggtgcaccagctcggcggaatcgcgattgcgagctccgattcctccggatacctcgtcgacgagaagggcatcgacctcgagctcctgaaggagatcaaggaggtgcggcgcggacggatcagcgagtacgcggacacggtgccgcacgcccggttcgtgccgaacggatccatctgggacgtgccgtgcgacgtcgcgctcccctgcgccacccagaacgaactcgacgaagcggccgccaagacgctggtcgcgaacggcgtgcaggcggtggccgagggcgcgaacatgcccacgaccccgcagggcgtccaggtgttccgcgatgccgcggtggcgttcgcgccgggcaaggcggccaacgcgggcggcgtcgccacgtcggcgctcgagatgcagcagaacgcatcccgcgactcgtggggcttcgaatacacggatgagcggttggccggaatcatgcgcggcatccacgagcgcaccgtggccacggccgccgagtacggcatgccgggcgactacgtgcacggtgcgaacatcgccggtttcgtgaaggtggctgacgccatgatctcgctcggggtcatctag

SEQ ID NO: 137170 - protein, 447 aa, Rhodococcus sp. RHA1
MSTRDQVAEIYEQVRLRNAGEPEFHQAAAEVFESLQVVLDHHPHYADSGLIERLCEPERQIIFRVPWVDDSGNVHVNRGFRVQYNSVLGPYKGGLRFHPSVNLGIVKFLGFEQIFKNALTGLPIGGGKGGSDFDPKGRSEAEIMRFCQSFMTELHRHIGEYTDVPAGDIGVGGREIGYLFGQYKRLTNSYESGVLTGKGLTWGGSQVRREATGYGVAYFVAEMLKAANSSLDGKTVVVSGSGNVAIYAIEKVHQLGGIAIASSDSSGYLVDEKGIDLELLKEIKEVRRGRISEYADTVPHARFVPNGSIWDVPCDVALPCATQNELDEAAAKTLVANGVQAVAEGANMPTTPQGVQVFRDAAVAFAPGKAANAGGVATSALEMQQNASRDSWGFEYTDERLAGIMRGIHERTVATAAEYGMPGDYVHGANIAGFVKVADAMISLGVI

SEQ ID NO: 137171 - DNA, 1272 bp, Rhodococcus sp. RHA1
  CDS (1)..(1272): transl_table=11
ttgaccacgacaactgacgtcatatccatcgacgcgggtccactcgacgacgctttggcgcagttgacgggcgcagtcgagaaactcggctacggccccggaatgcaccaacttctcgccaaacctcggcgcgagatgtcggtgagcatcccgctgcgccgggataacggtgacgtcgaggtgctgtccggataccgggttcagcacaatttctcccgcggaccggcgaagggtgggttgcgcttcagcccccacgtgtccctcgacgaggtccgcgcgctggcgatgtggatgacgtggaagtgcgcgttgctcgacgtcccgtacggcggtgccaagggcgggatcacgatcgacccgacgcagtactcgatgggggaactcagccgggtgacccgccgctataccagcgagattctgccgatcatcggtccggagaaggacatcccggcgccggacatcgggactgatgaacagacgatggcgtggatgatggacaccttctcggcgaacgtgggctacaccgttccgtccgtggtcaccggcaaacctgtcagtttgggtggttcgctgggtcgttcgtcggccacctcgaagggcgtcgtccacgtcgcactcgccgcgctcgaatatcgtgggctgacgccgtcgttcgcgaccgctgctgtgcagggcttcggcaaggtcggggccggcagcgcccaattccttgccgaggccggcgtcaaggtcgtcgcagtcggcgaccagtacggatcgatccacaacggcaacggcctcgacattcccgcgctgcaggcccatgtggccgcaacgggaaccgtgcggggcttcgccgactccgagccgatcgatgcggcggcgctgctcgaactcgaggtcgatctcctggtgcccgcggccgtcgagggtgtcatcaactccgacaacgcgtcaaacatccgggcgtcgatcgtggtggaaggcgcgaatgggccgaccaccgctgcggcggacaaaatcttggccgcaaggaatgtcctcgttgtccccgacatcctcgccaacgccggcggtgtcatcgtttcctacttcgagtgggtgcaggggaatcaggcctactggtggaccgccaacgaggtcgacgaacgcctcgagacccgcatgatccaggggtggcggtgcgtcctggagacctccattcgccggggactgtccttgcgtgaggctgcgacggtgaccgctgtcgagcgggtggccgacgcccacctcacccggggcctctacccctaa

SEQ ID NO: 137172 - protein, 423 aa, Rhodococcus sp. RHA1
MTTTTDVISIDAGPLDDALAQLTGAVEKLGYGPGMHQLLAKPRREMSVSIPLRRDNGDVEVLSGYRVQHNFSRGPAKGGLRFSPHVSLDEVRALAMWMTWKCALLDVPYGGAKGGITIDPTQYSMGELSRVTRRYTSEILPIIGPEKDIPAPDIGTDEQTMAWMMDTFSANVGYTVPSVVTGKPVSLGGSLGRSSATSKGVVHVALAALEYRGLTPSFATAAVQGFGKVGAGSAQFLAEAGVKVVAVGDQYGSIHNGNGLDIPALQAHVAATGTVRGFADSEPIDAAALLELEVDLLVPAAVEGVINSDNASNIRASIVVEGANGPTTAAADKILAARNVLVVPDILANAGGVIVSYFEWVQGNQAYWWTANEVDERLETRMIQGWRCVLETSIRRGLSLREAATVTAVERVADAHLTRGLYP

SEQ ID NO: 137173 - DNA, 1287 bp, Trichodesmium erythraeum IMS101; identical to SEQ ID NO: 57042
  CDS (1)..(1287): transl_table=11

SEQ ID NO: 137174 - protein, 428 aa, Trichodesmium erythraeum IMS101; identical to SEQ ID NO: 57043

SEQ ID NO: 137175 - DNA, 1350 bp, Alkalilimnicola ehrlichei MLHE-1
  CDS (1)..(1350): transl_table=11
atggcagccaggctcgacgagaagctggaaccgatctttcaggacgtattgcgccgcaaccccggtgagagcgaattccaccaggccgtgcacgaggtgctggagaccctgggtccggtgctggtgaagtacccggagctggccgagcgtaagatcatccagcgcatctgtgagcccgaacggcagatcatcttccgcgtgccgtggcaggacgaccggggtgagacccacatcaaccgtgcgttccgggtggagttcaacagcgccctggggccctacaagggcggcatgcgcttccacccctcggtctacctgggcatcatcaagttcctgggctttgagcagatcttcaagaacgccctgaccggcctgcccatcggcggcggcaagggcggtagcgacttcgatcccaagggcaagtccgaagacgagatcatgcgcttctgccagagcctgatgaccgagctctatcgccacttgggcgaatacaccgatgtgcccgccggcgatatcggcgtcggtcagcgcgaggtggggttcctgttcggccagtacaagcgcatcaccaaccgctacgagtccggtgtgttcaccggcaagggcctgagctggggcggcagccgcgcacgcaaagaggccaccggcttcggtaccgtctatttcctcgaggagatgctgaaggcccgcaacgacggccttgagggcaagacctgcgtggtttccggctccggcaatgtggccgtctacgccatggagaagatctacgagctgggcggcaaggtcatcgcctgctctgactccagcggcatcgtggtcgatgagaagggaattgacctggaccgcgtcaagcgcatcaaggaggtggagcgccgacggatctccacctacgccgatgaggtcaagcacgccaagtacatcgaggacggcaacatctgggccgtgccctgcgaggcggcgctgccctgtgccacccagaacgagctcaacggcaaggacgcgaagaagctgctgcagaatggctgcatcgccgtggccgagggtgccaacatgcccagcaccccggaggccatccgcctgttcctggaatccggtatcgcctacggtccgggcaaggcggccaacgccggtggcgtggcgaccagtgcgctggagatgcagcagaacgccagccgtgactcctggaccttcgagcacaccgaacagcggttgcacgagatcatgaagaacatccaccgtaactgctacgagaccgccgacgagttcggggcccccggcaactacgtcaccggcgccaacatcgccggcttcctgaaggtcagccaggccatggaggccatgggtctgatctga

SEQ ID NO: 137176 - protein, 449 aa, Alkalilimnicola ehrlichei MLHE-1
MAARLDEKLEPIFQDVLRRNPGESEFHQAVHEVLETLGPVLVKYPELAERKIIQRICEPERQIIFRVPWQDDRGETHINRAFRVEFNSALGPYKGGMRFHPSVYLGIIKFLGFEQIFKNALTGLPIGGGKGGSDFDPKGKSEDEIMRFCQSLMTELYRHLGEYTDVPAGDIGVGQREVGFLFGQYKRITNRYESGVFTGKGLSWGGSRARKEATGFGTVYFLEEMLKARNDGLEGKTCVVSGSGNVAVYAMEKIYELGGKVIACSDSSGIVVDEKGIDLDRVKRIKEVERRRISTYADEVKHAKYIEDGNIWAVPCEAALPCATQNELNGKDAKKLLQNGCIAVAEGANMPSTPEAIRLFLESGIAYGPGKAANAGGVATSALEMQQNASRDSWTFEHTEQRLHEIMKNIHRNCYETADEFGAPGNYVTGANIAGFLKVSQAMEAMGLI

SEQ ID NO: 137177 - DNA, 1338 bp, Pseudomonas aeruginosa UCBPP-PA14
  CDS (1)..(1338): transl_table=11
atgacgcaatccgtcgacgctttcctcgagcgcctgaagcggcgcgatcccgatcagcccgaattccaccaggcggtggaagaggtgctgcgttccctctggccgttcctcgaggccaacccgcactacctggaagccggcatcatcgaacgcatcgtcgaacccgagcgggcgatcctgttccgcgtaccctgggtcgacgaccagggccgggtacgggtcaaccgtggctaccgggtgcagatgagcagcgccatcggcccctacaagggcggcctgcgcttccatccctcggtcaacctcggggtgctgaagttcctcgccttcgagcaggtcttcaagaactccctgaccactctgcccatgggcggcggcaagggcggctccgacttcgatccgaagggcaagagcgacgccgaggtgatgcgtttctgccagtcgttcatgagcgagctgtaccgccacgtcggcgccgacctggacgtgccggccggcgacatcggcgtcggcgcgcgtgagatcggctacctgttcggccagtacaagcgcctgtccaaccagttcacctcggtgctgaccggcaagggcctgagctacggcggcagcctgatccgcccggaggcgaccggcttcggctgcgtctacttcgcccaggaaatgctcaaggatcgtggccgcggcttcgacggccagcgggtggcgatctccggctcgggcaacgtcgcccagtacgcggcgcgcaaggtcatggaaatgggcggcaaggtgatctcgctgtccgactccgaaggcaccctgtatgccgaggcggggctctccgacgagcagtgggaatacctgatggagctgaagaacgtgcgccgcgggcgcatccgcgagatggcggagcagttttccctgcagttcctcgaagggcgccggccctggggcctggcctgcgatatcgcgctgccctgcgcgacccagaacgaactggatgccgaggatgcgcggcgcctgctggccaacggctgcgtctgtgtcgccgaaggcgccaacatgccctcgaccctggaagccgtcgacctgttcctcgaggccggcatcctctacgcgccgggcaaggcgtcgaacgccggcggggtggcggtgagcggtctggagatgtcgcagaacgccatgcgcctgcgttggagcgagggcgaggtggataccaagctgcacggcatcatgcagtcgatccaccatgcctgcctgctgtacggcgaggagcaggggcgggtcaactacgtgaagggggcgaacatcgccggcttcgtcaaggtcgccgatgcgatgctggcgcagggcgtggtctga

SEQ ID NO: 137178 - protein, 445 aa, Pseudomonas aeruginosa UCBPP-PA14
MTQSVDAFLERLKRRDPDQPEFHQAVEEVLRSLWPFLEANPHYLEAGIIERIVEPERAILFRVPWVDDQGRVRVNRGYRVQMSSAIGPYKGGLRFHPSVNLGVLKFLAFEQVFKNSLTTLPMGGGKGGSDFDPKGKSDAEVMRFCQSFMSELYRHVGADLDVPAGDIGVGAREIGYLFGQYKRLSNQFTSVLTGKGLSYGGSLIRPEATGFGCVYFAQEMLKDRGRGFDGQRVAISGSGNVAQYAARKVMEMGGKVISLSDSEGTLYAEAGLSDEQWEYLMELKNVRRGRIREMAEQFSLQFLEGRRPWGLACDIALPCATQNELDAEDARRLLANGCVCVAEGANMPSTLEAVDLFLEAGILYAPGKASNAGGVAVSGLEMSQNAMRLRWSEGEVDTKLHGIMQSIHHACLLYGEEQGRVNYVKGANIAGFVKVADAMLAQGVV

SEQ ID NO: 137179 - DNA, 1350 bp, Mycobacterium smegmatis str. MC2 155
  CDS (1)..(1350): transl_table=11
atgagcgaactacaccccaaactgcaggcagtattcgaagaggtctcgcaccgcaacggcggtgagaaagagttccaccaggccgttttcgaggtgctccagagcctcggtccggtggtcgagaagcatcccgaatacgccgacaacgcgatcatccgccgcctgtgcgaacccgagcgccagatcatcttccgcgtgccgtgggtcgacgacaccggtcacgtgcagatcaaccgcgggttccgcgtcgagttcaactccgcgctcgggccgtacaagggcgggctgcggtttcacccgtcggtgtacctggggatcgtcaagttcctgggcttcgagcagatcttcaagaacgctctgaccggcctgccgatcggcggcggcaagggtggttcggacttcgaccccaagggccgctccgacgccgagatcatgcggttctgtcagtcgttcatgaccgagttgtaccggcacatcggtgaatacaccgacgtgcccgcgggtgacatcggcgtcgggacgcgcgagatcgggtatctgttcggccagtacaagcgcatcaccaaccgctacgagtccggcgtgctgacgggcaagggcctcacgtggggcggatcccgggtgcgcaccgaggccaccggctacggcacggtgttcttcgtcgacgagatcctgcagtcgcgcgggcagtcgttcgacggcaagcgcgtcgtggtgtccgggtcgggcaacgtcgcgatctacgcgatcgagaaggtgcacgcactcggcggaatcgtggtcgcgtgctcggattcgggcggctacgtggtcgacgagaagggcatcgacctcgacctgctcaaggaggtcaaggaagtccagcgcgcccgcatcgacgcctacgccgaagcccgcggtggcgcaacgcagttcgtctccggcggcagcgtgtggaacgtggcgtgcgacatcgcgctgccgtgcgcgacgcagaacgaggtgtccggcgacgacgccagggcgctcatcgaatcgggttgccgcatcgtcgccgagggcgcgaacatgccgtgcacacccgaggccgtgaaactgttcgaccaggccggggtgacgttcgcaccgggcaaggccgtcaacgcaggcggtgtggccaccagcgcgctggagatgcagcagaacgcctcgcgtgactcgtggaccttcgacgacaccgagggccgcctcgcggggatcatgcgccgtatccacgaccgctgcctgaccacggccgacgagtacgaccagcccggcaattacgtggcaggcgccaacatcgccgggttcacccaggtcgcggacgccatgctcgcactcgggctcatctga

SEQ ID NO: 137180 - protein, 449 aa, Mycobacterium smegmatis str. MC2 155
MSELHPKLQAVFEEVSHRNGGEKEFHQAVFEVLQSLGPVVEKHPEYADNAIIRRLCEPERQIIFRVPWVDDTGHVQINRGFRVEFNSALGPYKGGLRFHPSVYLGIVKFLGFEQIFKNALTGLPIGGGKGGSDFDPKGRSDAEIMRFCQSFMTELYRHIGEYTDVPAGDIGVGTREIGYLFGQYKRITNRYESGVLTGKGLTWGGSRVRTEATGYGTVFFVDEILQSRGQSFDGKRVVVSGSGNVAIYAIEKVHALGGIVVACSDSGGYVVDEKGIDLDLLKEVKEVQRARIDAYAEARGGATQFVSGGSVWNVACDIALPCATQNEVSGDDARALIESGCRIVAEGANMPCTPEAVKLFDQAGVTFAPGKAVNAGGVATSALEMQQNASRDSWTFDDTEGRLAGIMRRIHDRCLTTADEYDQPGNYVAGANIAGFTQVADAMLALGLI

SEQ ID NO: 137181 - DNA, 1377 bp, Nocardioides sp. JS614
  CDS (1)..(1377): transl_table=11
atggtcgccactgcaactccgggccacgacgtctccgcgctgcaccccgagctccgcccgatgtacgagaaggtcgtgagccgcaaccccggggagcgggagttccaccaggccgtcttcgaggtgatgcagagcgtcggcccgatcgccgaggagcgctcggactacgcccagtggtcgatcctgcagcggatctgcgagcccgagcgccagatcatcttccgggtgccgtgggtcgccgacgacggcaaggtcgagatcaaccggggcttcagggtggagttcaactcggccctcggccccttcaagggtggcctgcgcttccacccgagcgtgaacctgtcgatcatcaagttcctcggcttcgagcaggtcttcaagaacgccctcaccggcatgccgatcggcgggggcaagggtggcgccgacttcgacccgaagggccgctcggacggcgaggtgatgcggttctgccagtcgttcatgaccgagctctaccggcacgtcggtgagtacaccgacgtgcccgcgggcgacatcggtgtcggtgggcgggagatcggctacctgttcgggcagtacaagcggatcacgaaccggtacgagtccggcgtcatcacgggcaagggcctgacctggggcgggtcgcaggtgcgcaccgaggcgaccggctacggcacggtcttcttcgtcgagcagatgctgcaggcccgcggcgagcacctcgagggcaagcgcgtggtcgtctccggtgcgggcaacgtggccatctacgcggtcgagaaggcgcaggccctcggcgccgtcgtcgtcgcggtgtccgactcgggcgggtacgtcgtggacgaggccggcatcgacctcgagctcctcaaggagatcaaggaggtcgagcgcggacgcctgacggagtacgtcgagcgtcggtccggggcgacccacgtcacggatggctgcatctgggacgtcccctgcgacatcgcgctcccgtgcgccacccagaacgagctcgacgagtccgccgcgaagacgctcgcggcgaacggcgtgacgctggtggcggagggcgcgaacatgcccagcaccccggcagccgtgcagctcttccaggcggccggggtgctcttcgcgcccggcaaggcctcgaacgccggcggggtcgcgaccagtgcgctggagatgcagcagaacgcctcgcgcgactcctggcacttcgacgagaccgaggctcggctgcaggagatcatgagcgagatccacgacacctgcctggcgaccagcgaccactacggcgcgcccggcaactacgtcgtcggcgccaacctcgccggctacgtcagggtggccgacgcgatggtggccctcggcgtgatctga

SEQ ID NO: 137182 - protein, 458 aa, Nocardioides sp. JS614
MVATATPGHDVSALHPELRPMYEKVVSRNPGEREFHQAVFEVMQSVGPIAEERSDYAQWSILQRICEPERQIIFRVPWVADDGKVEINRGFRVEFNSALGPFKGGLRFHPSVNLSIIKFLGFEQVFKNALTGMPIGGGKGGADFDPKGRSDGEVMRFCQSFMTELYRHVGEYTDVPAGDIGVGGREIGYLFGQYKRITNRYESGVITGKGLTWGGSQVRTEATGYGTVFFVEQMLQARGEHLEGKRVVVSGAGNVAIYAVEKAQALGAVVVAVSDSGGYVVDEAGIDLELLKEIKEVERGRLTEYVERRSGATHVTDGCIWDVPCDIALPCATQNELDESAAKTLAANGVTLVAEGANMPSTPAAVQLFQAAGVLFAPGKASNAGGVATSALEMQQNASRDSWHFDETEARLQEIMSEIHDTCLATSDHYGAPGNYVVGANLAGYVRVADAMVALGVI

SEQ ID NO: 137183 - DNA, 1347 bp, Mycobacterium sp. KMS; identical to SEQ ID NO: 57040
  CDS (1)..(1347): transl_table=11

SEQ ID NO: 137184 - protein, 448 aa, Mycobacterium sp. KMS; identical to SEQ ID NO: 57041

SEQ ID NO: 137185 - DNA, 1266 bp, Neisseria meningitidis FAM18; identical to SEQ ID NO: 57048
  CDS (1)..(1266): transl_table=11

SEQ ID NO: 137186 - protein, 421 aa, Neisseria meningitidis FAM18; identical to SEQ ID NO: 57049

SEQ ID NO: 137187 - DNA, 1335 bp, Neisseria meningitidis FAM18
  CDS (1)..(1335): transl_table=11
atgactgacctgaacaccctgtttgccaacctcaaacaacgcaatcccaatcaggagccgttccatcaggcggttgaagaagtcttcatgagtctcgatccgtttttggcaaaaaatccgaaatacacccagcaaagcctgctggaacgcatcgtcgaacccgaacgcgtcgtcatgttccgcgtaacctggcaggacgataaagggcaagtccaagtcaaccggggctaccgcgtgcaaatgagttccgccatcggtccttacaaaggcggcctgcgcttccatccgaccgtcgatttgggcgtattgaaattcctcgcttttgaacaagtgttcaaaaacgccttgaccaccctgcctatgggcggcggcaaaggcggttccgacttcgaccccaaaggcaaatccgatgccgaagtaatgcgcttctgccaagcctttatgaccgaactctaccgccacatcggcgcggacaccgacgttccggccggcgacatcggcgtaggcggacgcgaaatcggctatctgttcggacaatacaaaaaaatccgcaacgagttttcttccgtcctgaccggcaaaggtttggaatggggcggcagcctcatccgtcccgaagcgaccggctacggctgcgtctatttcgcccaagcgatgctgcaaacccgcaacgatagttttgaaggcaaacgcgtcctgatttccggttccggcaacgtggcgcaatacgccgccgaaaaagccatccaactgggcgcgaaagtgctgaccgtttccgactccaacggcttcgtcctcttccccgacagcggtatgaccgaagcgcaactcgccgccttgatcgaattgaaagaagtccgccgcgaacgcgttgccacctacgccaaagagcaaggtctgcaatactttgaaaaccaaaaaccgtggggcgtcgccgccgaaatcgccctgccctgcgcgacccagaacgaattggacgaagaagccgccaaaaccctgttggcaaacggctgctacgtcgttgccgaaggtgcgaatatgccgtcgactttgggcgcggtcgagcaatttatcaaagccggcatcctctacgccccgggaaaagcctccaatgccggcggcgtagcaacttcaggtttggaaatgagccaaaacgccatccgcctgtcttggactcgtgaagaagtcgaccaacgcctgttcggcatcatgcaaagcatccacgaatcctgtctgaaatacggcaaagtcggcgacacagtaaactacgtcaatggtgcgaacattgccggtttcgtcaaagttgccgatgcgatgctggcgcaaggcttctaa

SEQ ID NO: 137188 - protein, 444 aa, Neisseria meningitidis FAM18
MTDLNTLFANLKQRNPNQEPFHQAVEEVFMSLDPFLAKNPKYTQQSLLERIVEPERVVMFRVTWQDDKGQVQVNRGYRVQMSSAIGPYKGGLRFHPTVDLGVLKFLAFEQVFKNALTTLPMGGGKGGSDFDPKGKSDAEVMRFCQAFMTELYRHIGADTDVPAGDIGVGGREIGYLFGQYKKIRNEFSSVLTGKGLEWGGSLIRPEATGYGCVYFAQAMLQTRNDSFEGKRVLISGSGNVAQYAAEKAIQLGAKVLTVSDSNGFVLFPDSGMTEAQLAALIELKEVRRERVATYAKEQGLQYFENQKPWGVAAEIALPCATQNELDEEAAKTLLANGCYVVAEGANMPSTLGAVEQFIKAGILYAPGKASNAGGVATSGLEMSQNAIRLSWTREEVDQRLFGIMQSIHESCLKYGKVGDTVNYVNGANIAGFVKVADAMLAQGF

SEQ ID NO: 137189 - DNA, 1305 bp, Acidovorax sp. JS42; identical to SEQ ID NO: 57050
  CDS (1)..(1305): transl_table=11

SEQ ID NO: 137190 - protein, 434 aa, Acidovorax sp. JS42; identical to SEQ ID NO: 57051

SEQ ID NO: 137191 - DNA, 1344 bp, Acidovorax sp. JS42
  CDS (1)..(1344): transl_table=11
atgaagcaccaatccgtgggccatttccttgaacaggttgcacagcgcaaccccggccagcccgaatacctgcaagccgtgaccgaggtcatggaaagcctgtggccgttcatcgaaaagaatccgcgctatgccgagcaaggcctgctggagcgcctggtggagcccgagcgggtggtgatgttccgcgtgtcctggttcgacgatcacggcaatgtgcatatcaaccgcggctaccgcatccagcacagcatggcgatcggcccatacaagggcggcctgcgctttcacccctcggtcaacctgtcggtgctgaagttcctggccttcgagcagaccttcaagaacgcgctgaccacgctgcccatgggcggcggcaagggcggctcggacttcgaccccaagggcaagagcccggccgaagtcatgcgcttttgccaggccttcgtgacggagctgttccgccacgtgggtcccgacaccgacgtgcccgcgggtgatatcggcgtgggcggccgtgaggtcggcttcatggccggcatgtacaagaagctggccaacaacgccgccagcgtgttcacgggcaagggcctggccttcggcggctcgctgatccgccccgaggccaccggctacggcacggtgtacttcgccgacgagatgctcaagacccgcggccgcagcttcgacggcctgcgcgtgtccgtgtccggctcgggtaacgtggcccagtacgccgtggaaaaggccatgcaactcggcgccaaggtcatcaccgtgtcggactccagcggcaccatcatcgacgaagacggcttcacccccgagaagctggccatcctgatggacgtgaagaaccaccattacggccgcgtgagcgactacgccgcgcgtaccggcgtgaagttcgaagccggcgtgcgtccctggcatgtcaaggtggacgtggccctgccctgcgccacgcaaaacgagctggacgaaaacgacgcccgcaccctcatcaagaacggcgtgctgtgcgtggccgaaggcgccaacatgccctcgaccaacgaggcagccaaactgttcgagcaggcgggcgtgctgtacgcaccgggcaaggccagcaacgccggtggcgtggccacctcgggcctggaaatgagccagaacgccatgcgcctgtcgtggacccgcgacgaagtggatgcgcgcctgctccagatcatgcagggcatccacgccgcctgcctgcaatacggcaagcgcgccgatggcagcgtgagctacatcaacggtgccaacgtggctggattcgtgaaggtggccgaggctatgctggcgcaaggcgtggtctga

SEQ ID NO: 137192 - protein, 447 aa, Acidovorax sp. JS42
MKHQSVGHFLEQVAQRNPGQPEYLQAVTEVMESLWPFIEKNPRYAEQGLLERLVEPERVVMFRVSWFDDHGNVHINRGYRIQHSMAIGPYKGGLRFHPSVNLSVLKFLAFEQTFKNALTTLPMGGGKGGSDFDPKGKSPAEVMRFCQAFVTELFRHVGPDTDVPAGDIGVGGREVGFMAGMYKKLANNAASVFTGKGLAFGGSLIRPEATGYGTVYFADEMLKTRGRSFDGLRVSVSGSGNVAQYAVEKAMQLGAKVITVSDSSGTIIDEDGFTPEKLAILMDVKNHHYGRVSDYAARTGVKFEAGVRPWHVKVDVALPCATQNELDENDARTLIKNGVLCVAEGANMPSTNEAAKLFEQAGVLYAPGKASNAGGVATSGLEMSQNAMRLSWTRDEVDARLLQIMQGIHAACLQYGKRADGSVSYINGANVAGFVKVAEAMLAQGVV

SEQ ID NO: 137193 - DNA, 1290 bp, Nostoc punctiforme PCC 73102
  CDS (1)..(1290): transl_table=11
atgatttcaaaatcactactaccgctagaacctgcttctccagcgcatatatgcccatttgaccaagcctgtagctacttagaagcggcagctaaagaattaaatttaaatcaaggtttgctggaaatcctcagccatccgcgtaaggttgtcacagtttccattccagtgaaactagatgatggcgaaatacaagttcttgctggacaccgtgtacagcactccgatgttttaggcccctacaaaggtggaattcgttaccatccagctgtgacattgcgcgaagtatcggctttggcaatgctgatgacctggaaatgtgccttgttaggtattccttatggtggtgggaagggtggcattcctatagatccaaaacgctacagtgttggcgaattagagcgaattagccgccgttatatcagtgagttacttaaagatattgggccttctgtagatattcctgcgccagacatgggtacttctgctcgtgaaatggcttggatgatggacacttactctgtaaatgttggtcatgctgtaccaggggttgtgactggcaaaccgctttccattggtggttctctggggcgagaaatggcaactggacgtggcacaatgattattgtgcgtgaggcgctagcagatcgaggtaaatccttagtaggagtgcgagtagctattcagggttttggtaatgtcggtggtgccgcagctgaattactccatcaagcaggcgcgaaaattatcgctgtttcaacaggtgctgggggaatattttccgaagctggtcttgatattcccgcgttgaaaatctacgctgctgaaaatcgcaagagtattgtaggtttcccgcaatctgtaccaataagtaatgcagatttattaactttaccctgcgatgtcttaataccagcggctttagaaaaccagataactggagaaaatgtgaatcaggtgcaagcgcaaattgtcgcagaagcagctaacgggccggttactcttgaagctaacttggcattagaggcgcggggtgtaacagtgctaccagacatcttggcgaatgctggtggtgtggtagtcagttatttggagtgggtgcagggtctttcttacgtattttgggatgaggagcgcgttaaccgcgaaatggagcatttgatggtacaagcctaccgtaaggtgattcagcaatctaataagcggcaaatttctttaagattagcagcttacactttaggcgtgggtagagttgcccaggccctgactgacagaggtctttatccttaa

SEQ ID NO: 137194 - protein, 429 aa, Nostoc punctiforme PCC 73102
MISKSLLPLEPASPAHICPFDQACSYLEAAAKELNLNQGLLEILSHPRKVVTVSIPVKLDDGEIQVLAGHRVQHSDVLGPYKGGIRYHPAVTLREVSALAMLMTWKCALLGIPYGGGKGGIPIDPKRYSVGELERISRRYISELLKDIGPSVDIPAPDMGTSAREMAWMMDTYSVNVGHAVPGVVTGKPLSIGGSLGREMATGRGTMIIVREALADRGKSLVGVRVAIQGFGNVGGAAAELLHQAGAKIIAVSTGAGGIFSEAGLDIPALKIYAAENRKSIVGFPQSVPISNADLLTLPCDVLIPAALENQITGENVNQVQAQIVAEAANGPVTLEANLALEARGVTVLPDILANAGGVVVSYLEWVQGLSYVFWDEERVNREMEHLMVQAYRKVIQQSNKRQISLRLAAYTLGVGRVAQALTDRGLYP

SEQ ID NO: 137195 - DNA, 1350 bp, Haemophilus somnus 2336
  CDS (1)..(1350): transl_table=11
atgtcagcaatcgtatcgttagaagattttttagcaaaagtagaacaacgtgacggtcatcaaccagaatttttgcaagcagtacgtgaagtattcacttccatttggccatttttagagaaaaatccaaaatatcgctctgaagctttattggagcgtttagttgagccggaacgtgcatttcaatttcgtgtcgcttggacagatgataaaggtcaagtgcaagtaaaccgagcattccgagttcaattcaatagtgcgattggaccgtttaaaggtggaatgcgttttcatccatctgtaaatttatctattttaaaatttttaggctttgaacaaattttcaaaaatgctttaactaccttaccgatggggggaggtaaaggtggttccgattttgatcctaagggtaagtcagatgcggaagtcatgcgtttttgtcaagcattaatgtctgaattatatcgtcatgtcggtgcagataccgatgtaccggcaggtgatatcggtgtaggtggacgagaagtaggttatcttgcaggatatatgaaaaaattatctaaccaagcagcttgcgtgtttaccggtcgaggtttgtcatttggtggcagtttaattcgtccggaagcaacaggttatggtttagtttattttgctcaagctatgcttgctgaaaaaggacaatctttcgcagggaaaacagttgtagtttccggttcaggtaacgttgctcaatatgctatcgaaaaagccttgcagttaggggcaaaagttgtcacttgttctgatagctccggctatgtttatgatcctgaaggctttacacaagaaaaattgaccgcacttttagatattaaaaatgtaaaacgtggtcgtgttaaagattacgctgaacaatttggtttgcaatacgtggagggagctcgtccttggggagtgaaagcggatattgcactaccttgtgcaacccaaaatgaattggaattatccgatgcacaacaattgatcgccaacggggttcaacttgttgcagaaggtgccaatatgccaacaacaattgaagctaccgacgcattcttggaagcaggcgttttatttggacctggtaaggcggcaaatgccggtggcgttgcaacttccggtttggaaatggcacaaagctcacaacgtttatactggacagctgaggaagttgacgaaaaattacaccgtattatgttggatattcatgcaaattgtaaaaaatacggtactgtcgaagggcaaaaaaatattaactatgttgtaggtgcaaacgttgcaggctttgttaaagtagctgatgcaatgttagcacaaggtgtttactaa

SEQ ID NO: 137196 - protein, 449 aa, Haemophilus somnus 2336
MSAIVSLEDFLAKVEQRDGHQPEFLQAVREVFTSIWPFLEKNPKYRSEALLERLVEPERAFQFRVAWTDDKGQVQVNRAFRVQFNSAIGPFKGGMRFHPSVNLSILKFLGFEQIFKNALTTLPMGGGKGGSDFDPKGKSDAEVMRFCQALMSELYRHVGADTDVPAGDIGVGGREVGYLAGYMKKLSNQAACVFTGRGLSFGGSLIRPEATGYGLVYFAQAMLAEKGQSFAGKTVVVSGSGNVAQYAIEKALQLGAKVVTCSDSSGYVYDPEGFTQEKLTALLDIKNVKRGRVKDYAEQFGLQYVEGARPWGVKADIALPCATQNELELSDAQQLIANGVQLVAEGANMPTTIEATDAFLEAGVLFGPGKAANAGGVATSGLEMAQSSQRLYWTAEEVDEKLHRIMLDIHANCKKYGTVEGQKNINYVVGANVAGFVKVADAMLAQGVY

SEQ ID NO: 137197 - DNA, 1278 bp, Fusobacterium nucleatum subsp. vincentii ATCC 49256
  CDS (1)..(1278): transl_table=11
atgagtaaagaaactttaaacccactagcaagcggacaacaacaagttaaaaaagcatgtgatgctttaggattggatccagcagtatatgaattattaaaggaacctcaaagaataatagaaattactattcctgtaagaatggatgatggatctataaaaacatttaaaggatatagatcagctcataatgatgcagtaggacctttcaaaggaggaattagattccaccaaaatgttaatgctgatgaagtaaaagctctttctttatggatgagtattaaatgtcaagtaactggaatcccttatggaggagggaaaggtggaattactgttgacccttctgaattatctcaaagagaattagaacaattatcaagaggttgggtaagaggattatggaaatacttaggtgaaaaagtagatgttcctgctccagatgtaaatacaaatggacaaattatggcttggatgcaagatgaatacaataaattatctggagaacaaactattggtgtatttactggaaaacctttatcttatggaggatctcaaggaagaaatgaagcaactggatttggtgttgctgtaactatgagagaaatattcaaagcattaggaaaagaattaaaaggtgcaacagttgcagttcaaggatttggaaatgttggaaaatactctgtaaaaaatataatgaaattaggtggaaaagttgtagcagttgctgaatttgaaaaatcaaaaggagcatttgctgtatataaagaggctggatttacatttgaagaattagaagctgcaaaagctgctggaagcttaacaaaagttgctggttcaaaagaaatatctatggatgatttctgggctttaaatgttgaagctattgctccatgtgcattagaaaatgctatcaaagaacatgaagctaatttgataaaagctggaattatttgtgaaggagcaaatggaccaataactccagaagctgatgaaattctttataaaaaaggaacagtagttactcctgacgttttaacaaatgcaggtggagttacagtatcttactttgaatgggtacaaaatatttatggatactattggacagaaaaagaagttgaagaaaaagaagaaagagctatggttgatgcatttaatcctatatgggcattaaagaaagaatttgatggaaaaggacaacctatttctttcagacaagctacttatatgaaatctattaagagaatagcagaagctatgaaaattagaggatggtactaa

SEQ ID NO: 137198 - protein, 425 aa, Fusobacterium nucleatum subsp. vincentii ATCC 49256
MSKETLNPLASGQQQVKKACDALGLDPAVYELLKEPQRIIEITIPVRMDDGSIKTFKGYRSAHNDAVGPFKGGIRFHQNVNADEVKALSLWMSIKCQVTGIPYGGGKGGITVDPSELSQRELEQLSRGWVRGLWKYLGEKVDVPAPDVNTNGQIMAWMQDEYNKLSGEQTIGVFTGKPLSYGGSQGRNEATGFGVAVTMREIFKALGKELKGATVAVQGFGNVGKYSVKNIMKLGGKVVAVAEFEKSKGAFAVYKEAGFTFEELEAAKAAGSLTKVAGSKEISMDDFWALNVEAIAPCALENAIKEHEANLIKAGIICEGANGPITPEADEILYKKGTVVTPDVLTNAGGVTVSYFEWVQNIYGYYWTEKEVEEKEERAMVDAFNPIWALKKEFDGKGQPISFRQATYMKSIKRIAEAMKIRGWY

SEQ ID NO: 137199 - DNA, 1350 bp, Haemophilus influenzae R2846
  CDS (1)..(1350): transl_table=11
atgtcaaaagttgcttccttagacgcatttttaacaaaagttgctcaacgcgatggttatcaacctgaatttttacaagcggttcgcgaggtattcacatcaatttggccttttttagaagccaatcctaaatatcgttcagaagcattattagaacgtttagttgagcctgaacgtgcatttcaattccgtgtggcgtggactgacgataaagggcaagtgcaagtaaacagagcatttcgtgtacaatttaatagtgccataggcccatttaaagggggaatgcgtttccatccatcagtaaatttatctatcttaaaattcttaggttttgagcaaatctttaaaaatgctttaacaacattgcctatgggcggggcaaaaggcggttcagattttgatcctaaaggcaaatctgatgctgaagttatgcgtttttgccaagcattaatgactgaactttatcgtcacgtaggagctgatacagatgttcccgcaggcgatataggcgtcggtgggcgcgaagttggctatttagctggctatatgaaaaaattatcaaaccaatcagcctgtgttttcactggtcgcggtctttctttcggtggtagtttaattcgtccggaagcaacgggatatggattagtttattttgctcaagcaatgcttgctgaaaaaggcgatagttttgcaggtaaagtagtttcagtttctggttctggtaatgtagcacaatacgctattgaaaaagcattatctcttggtgcaaaagtagtaacttgttctgattcatcaggttatgtttatgatccaaatggatttactactgaaaaattagccgcacttttcgatattaaaaatacaaaacgtgggcgtgtgaaagattatgcagaacagtttggtttgcaatattttgaaggtaaacgcccttgggaagtgcaagttgatattgcacttccttgtgcaactcaaaatgaattagaactttctgatgcacaacgtttaattaaaaatggtgtgaaattagtggctgaaggtgcgaatatgccaacaacaattgaagcaacagaagcattactagctgcagatgtattatttggcccgggtaaagctgccaacgctggtggtgttgctacttctggtttagaaatggcacaaagttcacaacgtttatattggacagcggaagaagtggacgctcaattacatcgcattatgttagatattcacgcaaactgtaaaaaatacggcacaattgaaggtcaagaaaacattaactatgttgttggggcaaatgtagcaggctttgttaaggtggctgatgcaatgttagcccaaggcgtttattaa

SEQ ID NO: 137200 - protein, 449 aa, Haemophilus influenzae R2846
MSKVASLDAFLTKVAQRDGYQPEFLQAVREVFTSIWPFLEANPKYRSEALLERLVEPERAFQFRVAWTDDKGQVQVNRAFRVQFNSAIGPFKGGMRFHPSVNLSILKFLGFEQIFKNALTTLPMGGAKGGSDFDPKGKSDAEVMRFCQALMTELYRHVGADTDVPAGDIGVGGREVGYLAGYMKKLSNQSACVFTGRGLSFGGSLIRPEATGYGLVYFAQAMLAEKGDSFAGKVVSVSGSGNVAQYAIEKALSLGAKVVTCSDSSGYVYDPNGFTTEKLAALFDIKNTKRGRVKDYAEQFGLQYFEGKRPWEVQVDIALPCATQNELELSDAQRLIKNGVKLVAEGANMPTTIEATEALLAADVLFGPGKAANAGGVATSGLEMAQSSQRLYWTAEEVDAQLHRIMLDIHANCKKYGTIEGQENINYVVGANVAGFVKVADAMLAQGVY

SEQ ID NO: 137201 - DNA, 1347 bp, Prosthecochloris aestuarii DSM 271
  CDS (1)..(1347): transl_table=11
atgagtactacagcctattgccttgaaccctttatggagtggatccagacaaaaaatccagctgaacctgaatttcatcaggcagtgtttgaggttgccagatcgatcattccattcgtcaatgaacaccagaaataccagcaagcctgcattctggaacgcatgtgcgagcccgacagaatcatatcgttccgggtggtctgggaagatgacaaaggcaatatccggatgaaccgtggtcatcgggttcagttcaacaactctatcggcccctacaaaggcgggctgcgctttcatccgtcggtcaacaccggcattctcaaatttctgggttttgaacaaacctttaaaaacagcctgacgacgttgcctatgggatcggcaaaagggggatccgacttcgacccgaaaggaaaatccgatcgggaaatcatgcggttctgccaatccttcatgaccgaactgtctcattacatcggccactttaccgacattccggctggtgatatcggcgttggcgccaaagaaataagctatctgttcggtgaatacaaacgcctcagccatcagtttacaggggtgctgacgggaaaatcactcgaatacggaggcagcctgatcagaaaagaggcgaccggctatggatgtgtctatttcatggaggaaatgcttcatgagaaaggcgaatcaatcaggggaaaaacatgcacggtctcgggttccggcaatgtcgcgctttactgtgcacagaaaatcaatcatcttggaggaaaagtcgtcaccctgtcggattctgacggatttatccacatccctcagggaatcagcgatgaagagctcgatgcgatcattgagctgaaaaccttcaaaagaggcagacttgccgagtatgctgaaaagaccgcctgcagctatttcgccgcagaaaagccctggggaatcgagtgcgatcttgcattcccctgcgctacggaaaacgaaatcacgaaaagcgacgctgcattactggccggtggcggatgtatcgcactggcagagggagccaacatgccaacgacgcaggatgcactggaagtcctgcgcaacagcggcattctgaccgctcccggaaaagcggccaatgccgggggcgttgcggtatcgggccttgaaatggcgcagaacagcatgagaatggcatggacgactcaggacctcgacagccgactgcaggctatcatgaaaagcatccaccagcagtgcacaacctacggcagaacgaacggctacatcgattatgtcaagggagccaacattgccggattcatcaaggtggcagatgcgatgcttgcctacggcattctttaa

SEQ ID NO: 137202 - protein, 448 aa, Prosthecochloris aestuarii DSM 271
MSTTAYCLEPFMEWIQTKNPAEPEFHQAVFEVARSIIPFVNEHQKYQQACILERMCEPDRIISFRVVWEDDKGNIRMNRGHRVQFNNSIGPYKGGLRFHPSVNTGILKFLGFEQTFKNSLTTLPMGSAKGGSDFDPKGKSDREIMRFCQSFMTELSHYIGHFTDIPAGDIGVGAKEISYLFGEYKRLSHQFTGVLTGKSLEYGGSLIRKEATGYGCVYFMEEMLHEKGESIRGKTCTVSGSGNVALYCAQKINHLGGKVVTLSDSDGFIHIPQGISDEELDAIIELKTFKRGRLAEYAEKTACSYFAAEKPWGIECDLAFPCATENEITKSDAALLAGGGCIALAEGANMPTTQDALEVLRNSGILTAPGKAANAGGVAVSGLEMAQNSMRMAWTTQDLDSRLQAIMKSIHQQCTTYGRTNGYIDYVKGANIAGFIKVADAMLAYGIL

SEQ ID NO: 137203 - DNA, 1344 bp, Croceibacter atlanticus HTCC2559
  CDS (1)..(1344): transl_table=11
atggaacaagaagtaaaagaatttttagacagagtttctctaagaaatgctaatgagccagaattcatgcaagcagttcatgaagttgcagaaactgtcatcccttttataaaagaaaataaaaaatatcagaataaacgtttattagagcgtatgactgaggcagaacgtattatcatgttccgtgtaacttggttagatgataacggtaaaatacaaatgaatagaggattcagaattcagatgaattctgctatcggtccatataaaggtggtttacgttttcacccaacagttaacttaagcgtacttaagtttttagcttttgagcaaacatttaaaaactctcttacaacattaccaatgggtggtggtaaaggaggttcagattttgaccctaaaggaaaatctgataatgaagttatgcgtttttgccaaagctttatgacagagctacaacgtcatattggtgcagatacagatgttcctgcaggagatattggtgtaggcggaagagaaataggctttatgtacggacagtacaaaagactaagaaacgaatttacaggtgtattaacaggaaaaggccgtgagtatggtggttctttaatgcgtcctgaagctacaggttacggtaacgtatactttgcgcaaaatatgcttaaaacaaaaggagattcttttgaagataaaacagttgttatttctggatctggtaacgtggcccaatatgctgcagaaaaggttattgagtttggaggaaaggttgtaacactttcagattcttcaggatatatcttagataatgatggtatagaccaagaaaaacttgagtttgtaatggagcttaagaatgaaaaaagaggtcgtattaaagaatatttagataaatacactaacgcagaatactttgaaggtaagacaccttggtctgtagcttgtgatgttgccttgccttgtgctactcaaaacgagttagaggagagcgatgctaagacattagttaagaatggatgtatgctagttggtgaaggagctaatatgccttgtactccagaagctgtaactgtttttcaagatgctaagatattattctctccaggaaaagcgtctaacgctggaggtgtagcaacatctggattagaaatgtctcaaaactctatgcgttatagctggacagcagaagaagtagacaaaaaattacatgagatcatgaacaacattcatgaccaatgtgtaaaatacggtagcgaagaaggtggctatgtagactacgtgaaaggtgcaaatattgcaggttttgtaaaagtagcagatgcaatgctagctcaaggcgctgtataa

SEQ ID NO: 137204 - protein, 447 aa, Croceibacter atlanticus HTCC2559
MEQEVKEFLDRVSLRNANEPEFMQAVHEVAETVIPFIKENKKYQNKRLLERMTEAERIIMFRVTWLDDNGKIQMNRGFRIQMNSAIGPYKGGLRFHPTVNLSVLKFLAFEQTFKNSLTTLPMGGGKGGSDFDPKGKSDNEVMRFCQSFMTELQRHIGADTDVPAGDIGVGGREIGFMYGQYKRLRNEFTGVLTGKGREYGGSLMRPEATGYGNVYFAQNMLKTKGDSFEDKTVVISGSGNVAQYAAEKVIEFGGKVVTLSDSSGYILDNDGIDQEKLEFVMELKNEKRGRIKEYLDKYTNAEYFEGKTPWSVACDVALPCATQNELEESDAKTLVKNGCMLVGEGANMPCTPEAVTVFQDAKILFSPGKASNAGGVATSGLEMSQNSMRYSWTAEEVDKKLHEIMNNIHDQCVKYGSEEGGYVDYVKGANIAGFVKVADAMLAQGAV

SEQ ID NO: 137205 - DNA, 1278 bp, Oceanicola batsensis HTCC2597; identical to SEQ ID NO: 57058
  CDS (1)..(1278): transl_table=11

SEQ ID NO: 137206 - protein, 425 aa, Oceanicola batsensis HTCC2597; identical to SEQ ID NO: 57059

SEQ ID NO: 137207 - DNA, 1353 bp, Erythrobacter sp. NAP1
  CDS (1)..(1353): transl_table=11
atggccgttactgatcacgtaaatctcgaacagttcatggaaggcgtgaaaaagcgcaatccgggacagcccgaatttgtccaggcagtacatgaagttgcacaggacatcttcgagttcatggaagacaaggtcgaatatcacgaagcgcagatcttgcgccgtatcgcagaaccggatcgcatcgtgtcgttccgcgtctgctgggaagacgacaatcacaacatccgcgttcagcgtggctggcgcgttcagaacaacaacgcgatcggcccttacaagggcggcatccgcttccacccgagcgtgaccgaaagcgtcctgaagttcctagcgtttgagcagaccttcaaaaactcgctgaccggcctgcccatgggcggcggtaagggcggcgcgaacttcaatccgaagggcaagtcggacgccgaagtgatgcgcttctgccagagcttcatgaccgagctttaccgccacatcgggcccgacaccgacgttcccgccggtgacatcggcgttggtggtcgcgagatcggctacatgttcggccagtacaagcgcatcaccaatcgctgggaaggcgttttgacgggcaagggccaggaatatggcggctcgcagatgcgtcccgaagcgaccggctacggcgcggtctatttcctgcagaacatgctcaagcaccagggaaaggatgtcgaagggcacaccgccgtcatttcgggctcgggcaatgtggcaacgcacgctgccgaaaaaatcactcagctgggcggcaaggttctgaccctgtcagattcgggcggcttcatccacgatcccgatggcatcgaccaggagaagatcgactgggtcaaacatctcaagacggtcaagcgcggccggatcagcgagtatgtcgatgagttcaagagtgcgaccttccacgaaggtcgtccgtggaacatcgcagctgacctagcccttccatgcgcaacgcagaatgagctcaacgaagacgaggccaaggcgctcgtgagcaatggctgcaaaggcgtgtcggaaggcgcaaacatgccgaccacgctcgaaggcgtgaaggtattccatgacgccaagatcttgtacggccccggtaaggcggccaatgcaggcggcgttgccgtctccgggctcgaaatgagccagaactccgagcgcatcagctggaaccacgaacgcctcggtgaaatgctcacagatctcatgtcgggcattcacgagaagtgcaccgaatatggtgagcaggacggtggttacgtcgactacgtgaagggcgcaaacatcgcgggcttcaagaaggtcgctgacgcaatgctcgcattcggcgtcgtctaa

SEQ ID NO: 137208 - protein, 450 aa, Erythrobacter sp. NAP1
MAVTDHVNLEQFMEGVKKRNPGQPEFVQAVHEVAQDIFEFMEDKVEYHEAQILRRIAEPDRIVSFRVCWEDDNHNIRVQRGWRVQNNNAIGPYKGGIRFHPSVTESVLKFLAFEQTFKNSLTGLPMGGGKGGANFNPKGKSDAEVMRFCQSFMTELYRHIGPDTDVPAGDIGVGGREIGYMFGQYKRITNRWEGVLTGKGQEYGGSQMRPEATGYGAVYFLQNMLKHQGKDVEGHTAVISGSGNVATHAAEKITQLGGKVLTLSDSGGFIHDPDGIDQEKIDWVKHLKTVKRGRISEYVDEFKSATFHEGRPWNIAADLALPCATQNELNEDEAKALVSNGCKGVSEGANMPTTLEGVKVFHDAKILYGPGKAANAGGVAVSGLEMSQNSERISWNHERLGEMLTDLMSGIHEKCTEYGEQDGGYVDYVKGANIAGFKKVADAMLAFGVV

SEQ ID NO: 137209 - DNA, 1344 bp, Flavobacteria bacterium BBFL7
  CDS (1)..(1344): transl_table=11
atggaaaaaaacatagaaagttttatcgatttgataaaaagtaagaaccctaatgagccagaatttatccaggcggttagtgaagtagcagaagctgttataccttttatcgagaacaatcctcaatacgctagtgataaattactagaacgcatggccgagccagaacgcgtaacaatgttccgtgtaccttggacagatgataatggagaggttcaagtaaatcgcggttaccgcatacaaatgaatagtgctattggtccttataaaggtggattaagatttcacccatctgttaatttgagtatccttaagtttctagcatttgagcaagtttttaaaaatagtttgacaactttaccgatgggtggtggtaaaggtggtgctgactttaacccaaaaggaaaatcagatcgtgaagtaatgcgtttttgccaatcatttatggttgaattacaacgtgtaataggtgctgacacagatgttcctgcaggagatataggagtaggtggtcgtgaaataggctatctatttggttattataagaaattaagaaatgaatttacgggtatacttactggtaaaggacgttcttatggtgggtctttaatacgtccagaagcaacaggttacggtaacgtatactttgcagaaaatatgttgaagacacgtggtgaatctattacaggtaaaactacggttatttcaggatctggaaatgtagctcaatatgctgcagaaaaaatattacagttaggtggtaaagtagttaccatgtctgattctggtggttatatccacgatgcagatggtattgatgcagataagcttgcctttgtaatggatcttaaaaataatagacgtggtcgtatatcagaatatgtatcacaatatcctagcgcaacctatcatgaaggtgaacgtccatggtctgttaaatgtgatatcgcattgccatgtgctactcaaaatgagttgaacggtgatgaagcaaaaacattagtttctaatggttgtatgtgtgtaagtgaaggtgcaaatatgcctagtacacctgacgctatagaacatttcattgacaataaaattttatttgctccaggaaaagcgtctaacgctggtggagtagctacttctggtctggagatgtctcaaaactctatgcgttacagctggactgccgaggaagtggataataaacttcatggtatcatgaatgatattcacgaggcttgtgtagaatacggaaaagatagtgatggatttgtagactatgtaaaaggtgcaaatatcgctggatttgttaaagtagcagacgctatgctagcacaaggaattgtttag

SEQ ID NO: 137210 - protein, 447 aa, Flavobacteria bacterium BBFL7
MEKNIESFIDLIKSKNPNEPEFIQAVSEVAEAVIPFIENNPQYASDKLLERMAEPERVTMFRVPWTDDNGEVQVNRGYRIQMNSAIGPYKGGLRFHPSVNLSILKFLAFEQVFKNSLTTLPMGGGKGGADFNPKGKSDREVMRFCQSFMVELQRVIGADTDVPAGDIGVGGREIGYLFGYYKKLRNEFTGILTGKGRSYGGSLIRPEATGYGNVYFAENMLKTRGESITGKTTVISGSGNVAQYAAEKILQLGGKVVTMSDSGGYIHDADGIDADKLAFVMDLKNNRRGRISEYVSQYPSATYHEGERPWSVKCDIALPCATQNELNGDEAKTLVSNGCMCVSEGANMPSTPDAIEHFIDNKILFAPGKASNAGGVATSGLEMSQNSMRYSWTAEEVDNKLHGIMNDIHEACVEYGKDSDGFVDYVKGANIAGFVKVADAMLAQGIV

SEQ ID NO: 137211 - DNA, 1335 bp, delta proteobacterium MLMS-1
  CDS (1)..(1335): transl_table=11
atggaaaaagttaccgaattcatgaaagtggtcaccgacaagaaccccggcgaaagcgagttccaccaggcggttttggaggtggtggaaaccctgatgccctttatcgaggataaccccaagtaccgggagaccaaaatcctggagcggatggtggagcccgagcgggtcatcatcttccgggtaccctgggtcgatgacaaaggcgaggtgcagatcaaccgcggctaccggatccagatgaacagcgccattggcccctacaaaggcggcctgcgcttccaccccagcgtcaacctgagcatcctcaagttcctggcctttgaacaggtcttcaaaaacagcctcaccaccctgcccatgggcggcggcaagggcggctccgactttgatcccaagggcaagagcgacaatgaggtgatgcgcttctgccagagcttcatgaccgagctttaccggcacatcggggccgaaaccgacgtgccggccggcgacatcggggtcggcggccgggaaatcggctttatgttcggccaataccgcaagatcaccaacgaattcaccggggtcctgaccggcaagagccgcaactggggcggcagcctgatccgccccgaggccaccggctacggggcggtcttcttcgccgaggagatgttcaaggtccggggcgactccctggccggcaagacctgcatcgtctccggctccggcaacgtggcccagtacaccatcgagaaagtcaaccagttgggcggcaaatgcgtgaccctttccgactccgccggcttcatccacgacccggaagggatcgacgacgagaagctggcctatgtgatggagttgaaaaacgtcaagcgggggcggatctccgaatacgccgagaagtatggctgcaagtactacccgggtgagcgcccctggaaaatccccggcgacgtggccttccccagcgccacccagaacgaaatcgacgcccaagatgccgaaaccctggtggcgggcggctgcacctgcgtttccgagggggccaatatgccctccaccagcgaggcggtgcggatctttttgaaggccaaaatcatgtacggccccggcaaagcggccaacgccggcggcgtggccaccagcggcctggagatgagccagaacagcctcaagctctcctggccccgggaagaggtcgaggaacggctgcggcagatcatggaaggcatccatgaggcatgctacaaatatggcaaggaaggcgatttcgtcaactacgtcaaaggggccaatatcgccggctttgtcaaagtggccgatgccatgatcgagcagggcgttatttag

SEQ ID NO: 137212 - protein, 444 aa, delta proteobacterium MLMS-1
MEKVTEFMKVVTDKNPGESEFHQAVLEVVETLMPFIEDNPKYRETKILERMVEPERVIIFRVPWVDDKGEVQINRGYRIQMNSAIGPYKGGLRFHPSVNLSILKFLAFEQVFKNSLTTLPMGGGKGGSDFDPKGKSDNEVMRFCQSFMTELYRHIGAETDVPAGDIGVGGREIGFMFGQYRKITNEFTGVLTGKSRNWGGSLIRPEATGYGAVFFAEEMFKVRGDSLAGKTCIVSGSGNVAQYTIEKVNQLGGKCVTLSDSAGFIHDPEGIDDEKLAYVMELKNVKRGRISEYAEKYGCKYYPGERPWKIPGDVAFPSATQNEIDAQDAETLVAGGCTCVSEGANMPSTSEAVRIFLKAKIMYGPGKAANAGGVATSGLEMSQNSLKLSWPREEVEERLRQIMEGIHEACYKYGKEGDFVNYVKGANIAGFVKVADAMIEQGVI

SEQ ID NO: 137213 - DNA, 1350 bp, Oceanobacter sp. RED65
  CDS (1)..(1350): transl_table=11
atgtctgacttagactcgttttatcaatggctagaagaacgcaatcctggtcaagaagaatttattcaagctgtcaaagaagttgtttgtgatgtccatggtctcgtcgaagacgaagagcgctatcaaaattggaacattttagaacgcttgactgagccagatcgaattatttcattccgagtgacatggcaagatgacgatggtcgcattcgcgtgaatcgcggttggcgcgtccagtattgtggtgttatcggcccttacaaagggggcctacgttttcaccccagtgtcaacgaatccatattaaagtttcttggcttcgagcaaactttcaagaatgccctcacaactttacccatgggtggtgctaaaggtggcagtgactttgacccacgtaattgtagcgacggtgaaatcatgcggttttgccaagctttcatgaacgagctgtaccgtcacataggcgaaaatacagatattcccgctggcgatattaatgtgagttctcgtgagattggatacttattcggccaataccgccgcctagccaatagttttagcggtactctcacgggtaaagacattgagtttggtggcagccatgtacgcttagaagctactggatatggtttagtctattttattagtgaaatgctaaagcaagacgatgaagaattgaaagacaaaaccatcgcgatatctggtgctggcaatgttgcattacatgcggcaaaaaaagccattcaaatgggcggcaaagtgattacactgtcgtctagtaaaggttacttatatgttgaacaaggtttagaagagtatcacataaatgaactgattgagcgacaaggcaagtgttatagcgactctacggagttgttgaaaagtatcaatggcgactccaatgccaaatggcatgacgataaaacaccatgggaagttgagtgtgatattgcactgccatgtgcaacgcaaaacgaacttaagcttgacgatgccaaaaagttagtaaaaaacaaagtgaaatatgtggcagaaggttcgaatatgccttgtacacaagacgctattgattgttttgaagaaagcagtattaaacatgcgccaggtaaagcatccaacgcgggtggcgttgcgctgtcagggtttgaaatggctcagaatgcctccttcacaccaatggggtatgatgatctagacgaaaagctaaaagccatcatgacaaatatacacacccaatgctgtgaggaaggtcaacaagacaatggcttcatacactatcgaaaaggtgccaacttggctgcatttaaacgagtggctgatgcgatcgtctctcaaggtgtaggctaa

SEQ ID NO: 137214 - protein, 449 aa, Oceanobacter sp. RED65
MSDLDSFYQWLEERNPGQEEFIQAVKEVVCDVHGLVEDEERYQNWNILERLTEPDRIISFRVTWQDDDGRIRVNRGWRVQYCGVIGPYKGGLRFHPSVNESILKFLGFEQTFKNALTTLPMGGAKGGSDFDPRNCSDGEIMRFCQAFMNELYRHIGENTDIPAGDINVSSREIGYLFGQYRRLANSFSGTLTGKDIEFGGSHVRLEATGYGLVYFISEMLKQDDEELKDKTIAISGAGNVALHAAKKAIQMGGKVITLSSSKGYLYVEQGLEEYHINELIERQGKCYSDSTELLKSINGDSNAKWHDDKTPWEVECDIALPCATQNELKLDDAKKLVKNKVKYVAEGSNMPCTQDAIDCFEESSIKHAPGKASNAGGVALSGFEMAQNASFTPMGYDDLDEKLKAIMTNIHTQCCEEGQQDNGFIHYRKGANLAAFKRVADAIVSQGVG

SEQ ID NO: 137215 - DNA, 1470 bp, Desulfitobacterium hafniense DCB-2
  CDS (1)..(1470): transl_table=11
atgaatacaatacacactcccaaaacaaaaagggttttgacctataacagagaatatttctacgttacttctgttacattaattgggacagaagacggaaaacttaaacaaagacgtttagggggaaaactgaatatgacctatgttcaagaagttctggaacaagccgttaagcgcaatcccggtgaagctgaatttcaccaggcactgagagaggtcttggaatctctcgaacccgtgttggaaaaacgtcccgatcttaaggaagcaggaattctcgagcgcatcgtcgagcctgaacggcagattctcttccgggtcccttgggttgacgaccagggcaaggtccaggtgaaccgtggtttccgtgtggaatacaacagtgccatcggaccttataaagggggcctgcgtttccatccttcggtgtatttaggtatcataaaattcttaggcttcgaacagatctttaaaaactccctgaccggtttgcccattggcggcggtaaagggggcagtgattttgatccgaaaggaaaatccgaaggagaaatcatgcggttctgccaaagcttcattacagaactttatcgctaccttggtgccgatacagacgtcccggcaggggatatcggtgtcggcggacgggaagtgggctatatgttcggtcaatataagcggattaccaatagatatgaaggtgttctcaccggcaaaggcttaacctttggcggcagcctgggccgtacggaagcaaccggctatggattggtttattttatggaagaagcccttaaagccgtgggcaaatccttcagcggcgctactgtcgttgtttccggctccggaaacgttgccatttacgcgacccaaaaggccacccagctagggggcacagtcgtggccatgagcgattccaacggctatatctatgataaagacggtattaatctcgatacagtccgccagttgaaagaggttgagcggaagcgccttaaagactacgtcagcattcatcccactgccgaatattatgaaggctgtgcaggcatctggaccatcccctgcgctatcgcactcccctgtgccactcaaaacgaattggacggggaagcggccgaagttcttgttaaaaacggctgctacgctgtcggtgaaggagccaatatgccttccactccggaagctgtggatgtgttcctccagcacaaaatcatctatggtccgggcaaagcagccaatgccggaggtgtggccgtatccgctctggagatgtcccaaaacagcatgcgctattcatggacttttgaagaagtggatgccaagctcaaaaatattatggtcaatatctaccacaatgccagcaaagccgctcaagagttcggctttgaggggaatttggtggcaggggccaatatcgccggcttccttaaggtagccgaagctatgaaggctcagggaacggtgtaa

SEQ ID NO: 137216 - protein, 489 aa, Desulfitobacterium hafniense DCB-2
MNTIHTPKTKRVLTYNREYFYVTSVTLIGTEDGKLKQRRLGGKLNMTYVQEVLEQAVKRNPGEAEFHQALREVLESLEPVLEKRPDLKEAGILERIVEPERQILFRVPWVDDQGKVQVNRGFRVEYNSAIGPYKGGLRFHPSVYLGIIKFLGFEQIFKNSLTGLPIGGGKGGSDFDPKGKSEGEIMRFCQSFITELYRYLGADTDVPAGDIGVGGREVGYMFGQYKRITNRYEGVLTGKGLTFGGSLGRTEATGYGLVYFMEEALKAVGKSFSGATVVVSGSGNVAIYATQKATQLGGTVVAMSDSNGYIYDKDGINLDTVRQLKEVERKRLKDYVSIHPTAEYYEGCAGIWTIPCAIALPCATQNELDGEAAEVLVKNGCYAVGEGANMPSTPEAVDVFLQHKIIYGPGKAANAGGVAVSALEMSQNSMRYSWTFEEVDAKLKNIMVNIYHNASKAAQEFGFEGNLVAGANIAGFLKVAEAMKAQGTV

SEQ ID NO: 137217 - DNA, 1353 bp, Vibrio sp. Ex25
  CDS (1)..(1353): transl_table=11
atgtcacacatacacgatactattgttgcgttgcaacacagtagcccggctcaaaaagagttttaccaagccgtagaagaagtattaacttctctcgctccagtcatagaaagcaataataaatataaagaacaagcgattatccaaagaatcgtagaaccagaacgtcaaatcatgtttcgagttccttgggtcgatgacgcagggaatgtgcaagtaaacaaaggctaccgcgtcgagtttaactccgcgttaggtccatacaaaggcggactgaggttccatcattcagtgaacgcgagcatcataaagttcctcggctttgaacagatttttaaaaacgcgcttactggccttccaattggtggcggaaaaggcggttcaaatttcgatcctaaaggaaaatctgacggtgaaatcatgcgattttgccaatcatttatgaacgagttataccgccacattggtcctgttaccgatgttcctgctggcgatatcggcgtcggtgcgcgtgaaattggttatatgtttggtcaatataagcgattgacgggccgctacgaaggggtacttacaggcaagagccttctttgggggggctcacttgttaggaaagaagcaacgggatatggaaccgtatattttgcggaatgcatgctcaatgaccgtaatgattcactcaaaggcaaaacttgcctcgtttctggcgcaggtaacgtcgctatctatgcaattgaaaagctataccacatgggagcaaccccagtaacatgcagcgattctagaggcacgatctatcatgagcacggtattgacctgcagctcctcaagcaacttaaagaagtgaaaagagcaagtttagaagagtatttagacacttaccctgaagcagagtatacgccgttgggtgactatcctaatgaagggcatgctgtatggcgatatcaagctgacgccgcattcccttgcgcgacccaaaatgaactaacgtcaaacgatgctcttgctcttatcgataatgggtgtgttttgattagtgaaggcgcaaacatgccaaccactcgtgatgcggccaatatcatcgtggattccgaaatggcttatgggccagcgaaagcagccaatgcaggcggcgttgcaaccagtcagcttgaaatggcacaaaatgccagcatgcaaaactggacctttgagcaagtcgatagccagttacagaccatcatgaaaaacatctttgttaatgcaaacgaaaccagtcgagagtttggtcaacctggtaatttagttttaggcgcaaacattgccggctttagaagagtcgctgatgcgatgatcgagcaaggcatcgtttag

SEQ ID NO: 137218 - protein, 450 aa, Vibrio sp. Ex25
MSHIHDTIVALQHSSPAQKEFYQAVEEVLTSLAPVIESNNKYKEQAIIQRIVEPERQIMFRVPWVDDAGNVQVNKGYRVEFNSALGPYKGGLRFHHSVNASIIKFLGFEQIFKNALTGLPIGGGKGGSNFDPKGKSDGEIMRFCQSFMNELYRHIGPVTDVPAGDIGVGAREIGYMFGQYKRLTGRYEGVLTGKSLLWGGSLVRKEATGYGTVYFAECMLNDRNDSLKGKTCLVSGAGNVAIYAIEKLYHMGATPVTCSDSRGTIYHEHGIDLQLLKQLKEVKRASLEEYLDTYPEAEYTPLGDYPNEGHAVWRYQADAAFPCATQNELTSNDALALIDNGCVLISEGANMPTTRDAANIIVDSEMAYGPAKAANAGGVATSQLEMAQNASMQNWTFEQVDSQLQTIMKNIFVNANETSREFGQPGNLVLGANIAGFRRVADAMIEQGIV

SEQ ID NO: 137219 - DNA, 1356 bp, Candidatus Desulfococcus oleovorans Hxd3
  CDS (1)..(1356): transl_table=11
atgtcagtcatcaagagcgtcatcgacaaggtcaagcacatggatccggaccagaaggagttccaccaggccgtcatcgaggttatggagacactggagccgactgctgaacgtcatcccgaatttgttaaaaacggtatctacgagcgcatcgtggaacccgagcgagcggtccagttccgggtgccctgggtggacgacaaaggccaggtccaggtcaaccgtggcttccgggtacagttcaacaacgccatcggcccgttcaaaggcggcatccgttttcatccctcggtcaacctgggcatcatcaagttcctggggtttgagcagattttcaaaaattccctcaccaccctggcaatgggcggtggcaagggcggttccgactttgaccccaagggcaagagcgacggtgagatcatgcgcttctgccaggccttcatgcgggagctcttccggcacatcggaccggagactgacgttccggccggagacatcggcgtgggcggccgggaaatcggctacatgtacggctattacaaaaaaatccgcaacgaacataccggcgtgctcacgggtaaaggactggagtacggcggcagcctgatccggcccgaagccaccggctacggcacggtctactttgcctcggaaatgctcgcgacccgtggccttgacttcaaaggcaaacgagtggcggtaagcggggcgggcaatgtggcccagtacgccattgaaaaggtcaacgagatgggtggcacggtgatctcggtatgtgattccggcgccaccatcattgatgaagcgggcatcgacaacgacaagtgctgttatctcatggaactcaaaaacgtccgccggggacgggtcaacgaatatgccgaccagtacaaaacggtctgtgttgaaagtaaaaacgtatgggacgtgatccgtgagcagggcattaaagtggatgtggccctgccctgcgccactcagaacgagatcgacggcgccaatgccgaggccctggtgaaaaacggctgcatctgcgtggccgaaggcgccaacatgccctcttccccggaggcggtgcggattttccaggccaacaacgtgctatacggtccgggcaaggcggccaacgccggtggtgtggccacttcgggccttgagatgagtcagaacagctccaaactctcctggacccgggaagaggtggacagccggctgctgctgatcatgaagggcattcacaagtcctgcctggacgccgccgaagcctacggcaaaaagggcgattatgtcaccggcgccaacattgccggctttgtaaaggtggccaaggccatgctggcctacggcatcgtgtaa

SEQ ID NO: 137220 - protein, 451 aa, Candidatus Desulfococcus oleovorans Hxd3
MSVIKSVIDKVKHMDPDQKEFHQAVIEVMETLEPTAERHPEFVKNGIYERIVEPERAVQFRVPWVDDKGQVQVNRGFRVQFNNAIGPFKGGIRFHPSVNLGIIKFLGFEQIFKNSLTTLAMGGGKGGSDFDPKGKSDGEIMRFCQAFMRELFRHIGPETDVPAGDIGVGGREIGYMYGYYKKIRNEHTGVLTGKGLEYGGSLIRPEATGYGTVYFASEMLATRGLDFKGKRVAVSGAGNVAQYAIEKVNEMGGTVISVCDSGATIIDEAGIDNDKCCYLMELKNVRRGRVNEYADQYKTVCVESKNVWDVIREQGIKVDVALPCATQNEIDGANAEALVKNGCICVAEGANMPSSPEAVRIFQANNVLYGPGKAANAGGVATSGLEMSQNSSKLSWTREEVDSRLLLIMKGIHKSCLDAAEAYGKKGDYVTGANIAGFVKVAKAMLAYGIV

SEQ ID NO: 137221 - DNA, 1341 bp, Pseudomonas putida GB-1; identical to SEQ ID NO: 57062
  CDS (1)..(1341): transl_table=11

SEQ ID NO: 137222 - protein, 446 aa, Pseudomonas putida GB-1; identical to SEQ ID NO: 57063

SEQ ID NO: 137223 - DNA, 1356 bp, Lactobacillus sakei
  CDS (1)..(1356): transl_table=11
atgatcatattgagtcaagcaaccgattatgtccaacatgtttaccaagtcattgaacaccgtgatccgaaccaaaccgaatttttagaggccatcaacgacgtcttcaaaacgatcacgccagtcctcgaacaacatccagaatatatcgaagccaatattttggaacgtttgaccgaaccagaacggattattcaattccgggttccttggctcgacgatgctggtcatgcacgagtcaaccgtgggttccgagtacaatttaactcagcaatcggtccttacaagggcggcttacggttacacccatccgttaatctgagtatcgtcaaattcttgggctttgaacagatcttcaaaaatgccctgaccggcctaccaattggcggtggtaaagggggctctgatttcgaccctaagggcaaatcagacaacgaaattatgcgcttctgtcagagtttcatgaccgaactgagcaagtacattggtctcgatactgacgttcctgctggtgatatcggtgttggtggccgcgaaatcggctttttatacggccaatacaagcgactccggggcgctgaccgcggcgtactcaccggtaaaggattgaactatggcggttcgttagcccggactgaagctaccggttatggtctcgcctactataccaacgaaatgctcaaggccaaccaactttccttccctggtcaacgcgttgccatttctggtgctggtaatgtcgccatctacgcgattcaaaaggttgaagaactcggtggcaaggtgattacctgctccgactcaaacggttacgttattgacgaaaacggtatcgacttcaagatcgttaagcagatcaaggaagttgaacgcggtcgtatcaaagactatgccgaccgtgtagccagtgccagctattacgaaggttccgtctgggacgcccaagtagcttatgatatcgcgttaccttgcgccacccaaaacgaaatcagcggtgatcaagccaagaacttgattgccaatggtgccaaggtcgttgccgaaggggctaacatgcctagcagtccagaagccattgcgacataccaagctgccagcttgctatatggtccggccaaagctgccaatgctggtggcgttgccgtttccgcccttgaaatgagccaaaatagtatgcgtttgagctggacttttgaagaagtcgataatcgcctcaagcaaatcatgcaagatatctttgcacactccgttgccgctgccgacgaataccacgttagcggtgattacctgagtggtgctaacattgctggcttcacaaaaattgctgacgccatgttagcgcaaggcttagtttaa

SEQ ID NO: 137224 - protein, 451 aa, Lactobacillus sakei
MIILSQATDYVQHVYQVIEHRDPNQTEFLEAINDVFKTITPVLEQHPEYIEANILERLTEPERIIQFRVPWLDDAGHARVNRGFRVQFNSAIGPYKGGLRLHPSVNLSIVKFLGFEQIFKNALTGLPIGGGKGGSDFDPKGKSDNEIMRFCQSFMTELSKYIGLDTDVPAGDIGVGGREIGFLYGQYKRLRGADRGVLTGKGLNYGGSLARTEATGYGLAYYTNEMLKANQLSFPGQRVAISGAGNVAIYAIQKVEELGGKVITCSDSNGYVIDENGIDFKIVKQIKEVERGRIKDYADRVASASYYEGSVWDAQVAYDIALPCATQNEISGDQAKNLIANGAKVVAEGANMPSSPEAIATYQAASLLYGPAKAANAGGVAVSALEMSQNSMRLSWTFEEVDNRLKQIMQDIFAHSVAAADEYHVSGDYLSGANIAGFTKIADAMLAQGLV

SEQ ID NO: 137225 - DNA, 1347 bp, Streptococcus suis; identical to SEQ ID NO: 57070
  CDS (1)..(1347): transl_table=11

SEQ ID NO: 137226 - protein, 448 aa, Streptococcus suis; identical to SEQ ID NO: 57071

SEQ ID NO: 137227 - DNA, 1383 bp, Bacillus licheniformis; identical to SEQ ID NO: 57076
  CDS (1)..(1383): transl_table=11

SEQ ID NO: 137228 - protein, 460 aa, Bacillus licheniformis; identical to SEQ ID NO: 57077

SEQ ID NO: 137229 - DNA, 1377 bp, Sporosarcina halophila
  CDS (1)..(1377): transl_table=11
atgcaaaaacaacagaccattattgaagaatctctaaaagctttaatggaagatgaatcgttcctgcctgatctccaggcacagacacgtgaacaggcctttaaatccctggtagctttactttccacccccaatcatatacataaatcctttttgagggtgacgctggatgacaacaccattgttcgtataccggcattccgggtccagcacagtgatacggttgggccatacaaaggcggggtacgattccacgaatccgtaaacgaaggagaagtttcgaacctggccaagctgatgaccttgaaaaacgcactccatgagcttccttttggcggtggtaaaggtggggtcgttattaaacccaaggagtacaacatcaaagagctcaatctgatatgtaagaaatatgtacagtatttcgatgatatactaggtcccgataaagatattcctgctccggacgtaggaaccggtgaacgggagatggactggatgatgggcgaattcaaaaacattcatcccggtgaaccttaccgcaacagctttacaggaaagagtgtagttaacggcggatcacttggaagacgtgaagctaccggtaaaggagtttacttcaccttccgttatatgatgcacaatttcttaaatgaaaatagaaagtggttgtccgacaccgataacatttttgcaaatactgctttaaatcatcatgatcaaaaactgagcatggctatacaaggatttggtaacctgggttctgtagctgctcttgaggcttatcagtgcgattatcttcagaacaaaattgtagcagtcagcgatcacaatgttatgctttacaataatgacgggctagatgtccctgccctcatcaagtttactgaggaatcagatggagatcttccaacgacggaagaagagttggaagagcatgaaattaaagccgagattagagagcgtgatgaactgctggaaatggattgtgacgttcttctgcttgctgcgcttgaggatcaaattcatgaagataatatggaacggattcaggcttctatgatcatagaaggggcgaacggtccaattacagaagatgctgaccggtatcttgcagacaaaggtgtcctaattgtaccggatattcttgcgaacgcaggcggggttattgtttcgtactacgaatggattcaaggccgtgaagcgcaatttatgacagaggatcaggtttttgagcgtttatttgataaaatgaaatacacgatggacacgattttaccacagttctttggagatccattcccgcttagacagaactgctatattcattcggttatgaaattatccacgattatgtatcgtcaagggaaactgtattaa

SEQ ID NO: 137230 - protein, 458 aa, Sporosarcina halophila
MQKQQTIIEESLKALMEDESFLPDLQAQTREQAFKSLVALLSTPNHIHKSFLRVTLDDNTIVRIPAFRVQHSDTVGPYKGGVRFHESVNEGEVSNLAKLMTLKNALHELPFGGGKGGVVIKPKEYNIKELNLICKKYVQYFDDILGPDKDIPAPDVGTGEREMDWMMGEFKNIHPGEPYRNSFTGKSVVNGGSLGRREATGKGVYFTFRYMMHNFLNENRKWLSDTDNIFANTALNHHDQKLSMAIQGFGNLGSVAALEAYQCDYLQNKIVAVSDHNVMLYNNDGLDVPALIKFTEESDGDLPTTEEELEEHEIKAEIRERDELLEMDCDVLLLAALEDQIHEDNMERIQASMIIEGANGPITEDADRYLADKGVLIVPDILANAGGVIVSYYEWIQGREAQFMTEDQVFERLFDKMKYTMDTILPQFFGDPFPLRQNCYIHSVMKLSTIMYRQGKLY

SEQ ID NO: 137231 - DNA, 1659 bp, Aedes aegypti; identical to SEQ ID NO: 56906
  CDS (1)..(1659)

SEQ ID NO: 137232 - protein, 552 aa, Aedes aegypti; identical to SEQ ID NO: 56907

SEQ ID NO: 137233 - DNA, 1362 bp, Trichophyton rubrum; identical to SEQ ID NO: 57082
  CDS (1)..(1362)

SEQ ID NO: 137234 - protein, 453 aa, Trichophyton rubrum; identical to SEQ ID NO: 57083

SEQ ID NO: 137235 - DNA, 1239 bp, Glycine max; identical to SEQ ID NO: 57086
  CDS (1)..(1239)

SEQ ID NO: 137236 - protein, 412 aa, Glycine max; identical to SEQ ID NO: 57087

SEQ ID NO: 137237 - DNA, 1236 bp, Glycine max; identical to SEQ ID NO: 57088
  CDS (1)..(1236)

SEQ ID NO: 137238 - protein, 411 aa, Glycine max; identical to SEQ ID NO: 57089

SEQ ID NO: 137239 - DNA, 1254 bp, Halobacterium salinarium
  CDS (1)..(1254): transl_table=11
atgccggaagccaacccattcgagagcctgcaggaacagctcgacgacgccggcgagttcctcgacgtcaacgcggacgttctcgaacgcctgaaacacccggagcgcgtcctcgaaacgacgctctccgtggagatggacgacgggacgattgagacgttcaaagccttccgttcgcagttcaacggggaccgcggcccctacaagggcggcattcgctaccacccgggcgtcacccgcgacgaggtgaaagcgctctcgggatggatggtgtacaagaccgccgtcgcagacatcccgtacggcggcgggaagggcgggatcatcctcgacccagaggagtactccgacagcgagctcgaacgcatcacacgcgcgttcgccacggaactccgcccgttcatcggcgaggacaaagacgtgcccgcacccgacgtgaacacgggccagcgcgagatgaactggatcaaagacacctacgaaaccctcgaagacaccaccgcgcccggtgtcatcacggggaaggcgcttgagaacggcggcagcgagggccgggtgaacgccaccgggcgctccacgatgttcgccgcccgcgaggtgttcgactacctcgatcgggacctcagtgacgccaccgtcgccgtccaaggctacggcaacgccggcagcgtcgccgcgaagctcatcgccgaccagggcgcggacgtggtcgccgtctcggactcctcgggcgcggtccacaaccccgacgggctggacacgcgcgcggtcaaagcattcaagacggagaccggcagtgtctccggctacgagggtgccaccgaggagctctcgaacgaggccctgctcacgatggacgtcgatctcctcgtgcccgcggcgctagaaaacgccatcgacgaggacctcgcccacgacgtcgacgccgacgtcgtcgtcgaggcggccaacggcccgctcacccccgacgccgacgacgtgctcaccgagcgcggcgtcaccgtcgtcccggacatcctcgcgaacgcgggcggcgtcaccgtctcgtacttcgagtgggtgcagaaccgccagcgcttccagtggaccgaggaccgcgtcaacgaggagcttgaggccatcatcacggacgccttcgacgcgatgaccgacgcccacgaggacgccggcacgccgaacctccgcaccgccgcctacgtggtcgccgtccagcgcgtcgtcgacgcctacgagggcagcggtagctggccctga

SEQ ID NO: 137240 - protein, 417 aa, Halobacterium salinarium
MPEANPFESLQEQLDDAGEFLDVNADVLERLKHPERVLETTLSVEMDDGTIETFKAFRSQFNGDRGPYKGGIRYHPGVTRDEVKALSGWMVYKTAVADIPYGGGKGGIILDPEEYSDSELERITRAFATELRPFIGEDKDVPAPDVNTGQREMNWIKDTYETLEDTTAPGVITGKALENGGSEGRVNATGRSTMFAAREVFDYLDRDLSDATVAVQGYGNAGSVAAKLIADQGADVVAVSDSSGAVHNPDGLDTRAVKAFKTETGSVSGYEGATEELSNEALLTMDVDLLVPAALENAIDEDLAHDVDADVVVEAANGPLTPDADDVLTERGVTVVPDILANAGGVTVSYFEWVQNRQRFQWTEDRVNEELEAIITDAFDAMTDAHEDAGTPNLRTAAYVVAVQRVVDAYEGSGSWP

SEQ ID NO: 137241 - DNA, 2043 bp, Saccharomyces monacensis
  CDS (416)..(1780)
ctagggcgccggaaccggcccacgtattttgagtgcggtggggcaacgaaaaagaaacggtgcggtcccgcggccaatcaacggagaggggctgttatcagctgctgcgccgttttctccaaacgtcaggtaccacaatggaaatgagcggaagaagaaagcgcgagcactcttttctggtagaaccggcttcaggctgaaaaaaaaaagaaaaacgctatacgtaattagagttagaacatagctgaaaaatgctttttagttttcatatataaaaatatacaaaactcacaactggaatttcttcaaatttgttttttcagtttcggagatattttagttatagctgttaaagtagtataaaaagtgtacaactctactataccagtatactagttattataaaaaaaataaaatgtccgagccagaatttcaacaagcttatgatgaagttgtctcttcgctagaagactctactcttttcgagcaacatccaaagtacaaaaaggtcttgccaattgtctctgttccagaaagaattatacaattcagagtcacttgggaaaatgacaagggcgaacaagaagttgctcaaggttacagagtgcaatacaactccgctaagggtccatacaagggtggtttgcgtttccatccatctgttaacttgtctattttgaagttcttgggtttcgaacaaattttcaagaactctttgaccggcctagacatgggtggtggtaaaggtggtttgtgtgttgacttgaaaggaagatccaacaacgaaatcagaagaatctgttacgcctttatgagagaactaagcagacacattggtcaagacaccgatgtgccagccggtgatattggtgttggtggccgtgaaatcggttacttgttcggtgcctacagatcatacaagaactcctgggaaggtgtcttgaccggtaaaggtttgaactggggtggttctttgatcagaccagaagccactggttacggtttggtctactacacccaagccatgattgactacgccaccaacggtaaggaatccttcgaaggtaagcgtgtcaccatctctggtagcggtaacgttgctcaattcgccgctttgaaggttatcgaactaggcggtaccgttgtttctctatccgactccaagggttgtatcatctctgagaccggtatcacttccgagcaaattgctgatatctctagtgccaaggtcaatttcaagtccttggagcaaattgttggtgagtattccaccttcactgaaaacaaagtccaatacatttccggtgcccgtccatggacccacgttcaaaaggtcgacattgccttgccatgtgccactcaaaacgaagtcagcggtgacgaagccaaggccttggtcgcccaaggcgtcaagtttgttgccgaaggttccaacatgggttccaccccagaagccattgccgtttttgaaactgctcgtgccacagcctccacactaaaggaatctgtctggtacggtccaccaaaggctgctaacctgggtggtgttgctgtttctggtttggaaatggcccaaaactcccaaagaatcacatggagcagcgaaagagtcgaccaagaattgaagaaaatcatggtcaactgtttcaacgaatgtattgattccgccaaaaagtacactaaggaaggtaacgctttgccatccttagtcaagggtgctaacattgcaagtttcattaaggtctctgatgctatgttcgaccaaggtgatgtattttaaatagtctaaaacaagagaaaagacagtatatttgtatttaaatagtttggatagataatgagataaaagaagcaaaaaaaaacgtgtaatataaaatcatacttttttaaaattgatgtagaaaatcaaaaggaaaagaagtaaagaaaataaaaatttaaagtacatttattttttgaatgatgacatggtcgaaatataacaaaaagacagaatatttatttatatatgtaagtgttaaaatggataattaactcaactgg

SEQ ID NO: 137242 - protein, 454 aa, Saccharomyces monacensis; identical to SEQ ID NO: 57093

SEQ ID NO: 137243 - DNA, 2043 bp, Saccharomyces pastorianus
  CDS (416)..(1780)
ctagggcgccggaaccggcccacgtattttgagtgcggtggggcaacgaaaaagaaacggtgcggtcccgcggccaatcaacggagaggggctgttatcagctgctgcgccgttttctccaaacgtcaggtaccacaatggaaatgagcggaagaagaaagcgcgagcactcttttctggtagaaccggcttcaggctgaaaaaaaaaagaaaaacgctatacgtaattagagttagaacatagctgaaaaatgctttttagttttcatatataaaaatatacaaaactcacaactggaatttcttcaaatttgttttttcagtttcggagatattttagttatagctgttaaagtagtataaaaagtgtacaactctactataccagtatactagttattataaaaaaaataaaatgtccgagccagaatttcaacaagcttatgatgaagttgtctcttcgctagaagactctactcttttcgagcaacatccaaagtacagaaaggtcttgccaattgtctctgttccagaaagaattatacaattcagagtcacttgggaaaatgacaagggcgaacaagaagttgctcaaggttacagagtgcaatacaactccgctaagggtccatacaagggtggtttgcgtttccatccatctgttaacttgtctattttgaagttcttgggtttcgaacaaattttcaagaactctttgactggcctagacatgggtggtggtaaaggtggtttgtgtgttgacttgaaaggaagatccaacaacgaaatcagaagaatctgttacgcctttatgagagaactaagcagacacattggtcaagacaccgatgtgccagccggtgatattggtgttggtggccgtgaaatcggttacttgttcggtgcctacagatcatacaagaactcctgggaaggtgtcttgaccggtaaaggtttgaactggggtggttctttgatcagaccagaagccactggttacggtttggtctactacacccaagccatgattgactacgccaccaacggtaaggaatccttcgaaggtaagcgtgtcaccatctctggtagcggtaacgttgctcaattcgccgctttgaaggttatcgaactaggcggtaccgttgtttctctatccgactccaagggttgtatcatctctgagaccggtatcacttccgagcaaattgctgatatctctagtgccaaggtcaatttcaagtccttggagcaaattgttggtgagtattccaccttcactgaaaacaaagtccaatacatttccggtgcccgtccatggacccacgttcaaaaggtcgacattgccttgccatgtgccactcaaaacgaagtcagcggtgacgaagccaaggccttggtcgcccaaggcgtcaagtttgttgccgaaggttccaacatgggttccaccccagaagccattgccgtttttgaaactgctcgtgccacagcctccacactaaaggaatctgtctggtacggtccaccaaaggctgctaacctgggtggtgttgctgtttctggtttggaaatggcccaaaactcccaaagaatcacatggagcagcgaaagagtcgaccaagaattgaagaaaatcatggtcaactgtttcaacgaatgtattgattccgccaaaaagtacactaaggaaggtaacgctttgccatccttagtcaagggtgctaacattgcaagtttcattaaggtctctgatgctatgttcgaccaaggtgatgtattttaaatagtctaaaacaagagaaaagacagtatatttgtttttaaatagtttggatagataatgagataaaagaagcaaaaaaaaacgtgtaatataaaatcatacttttttaaaattgatgtagaaaatcaaaaggaaaagaagtaaagaaaataaaaatttaaagtacatttattttttgaatgatgacatggtcgaaatataacaaaaagacagaatatttatttatatatgtaagtgttaaaatggataattaactcaactgg

SEQ ID NO: 137244 - protein, 454 aa, Saccharomyces pastorianus; identical to SEQ ID NO: 57095

SEQ ID NO: 137245 - DNA, 1674 bp, Tigriopus californicus; identical to SEQ ID NO: 57102
  CDS (1)..(1674)

SEQ ID NO: 137246 - protein, 557 aa, Tigriopus californicus; identical to SEQ ID NO: 57103

SEQ ID NO: 137247 - DNA, 1368 bp, Ruminococcus flavefaciens; identical to SEQ ID NO: 57104
  CDS (1)..(1368): transl_table=11

SEQ ID NO: 137248 - protein, 455 aa, Ruminococcus flavefaciens; identical to SEQ ID NO: 57105

SEQ ID NO: 137249 - DNA, 1236 bp, Nicotiana tabacum; identical to SEQ ID NO: 57106
  CDS (1)..(1236)

SEQ ID NO: 137250 - protein, 411 aa, Nicotiana tabacum; identical to SEQ ID NO: 57107

SEQ ID NO: 137251 - DNA, 1236 bp, Solanum lycopersicum; identical to SEQ ID NO: 57108
  CDS (1)..(1236)

SEQ ID NO: 137252 - protein, 411 aa, Solanum lycopersicum; identical to SEQ ID NO: 57109

SEQ ID NO: 137253 - DNA, 1236 bp, Brassica napus; identical to SEQ ID NO: 57110
  CDS (1)..(1236)

SEQ ID NO: 137254 - protein, 411 aa, Brassica napus; identical to SEQ ID NO: 57111

SEQ ID NO: 137255 - DNA, 1610 bp, Ulva pertusa
  CDS (120)..(1463)
gttcttcccggagctttgtgtcagccatacactccggggcacgtcgtcgcttgtttaatctcgttcgtaagttctggtacctgtttcgccttgaaggacataaattacaagaaattggtatgtttggggcactgtccaaagccgttggaagcgtctgctcccgtcagggccaggcagctgtaacaggactggggtccgtgacgggtcatcaggtcaggcgcgctggacatgcggagaacaccaatacattcatccgagaggcactggcggtgctggatcttccccctgcgatggaaaaaattgtgatcacacctcagcgggaaatgacggtggagcttatcattaatcgtgacgatggcaaaccagaaagtttcatgggatatcgtgtgcaacatgacaatgcacgggggccattcaaagggggtttgagatttcataaagatgcagatctggacgatgttcgaagccttgcttcactgatgagcttcaagacggcattgttggatgtgccgttcggaggggcaaaaggtggcattactgtggacacaaaggcgttatctgagcatgagatagaaaaactcacccgcaaatttgttcaggaaatcaaggacatcatcgggcccttccgtgacatacctgcaccagatgtgggcaccgatggccgggtgatggcctggatttttgacgagtattcaaagtttgaaggttactctcccggtgtcgtaactggcaagccaacgtggctgcatggtagccatggtcgagagtccgcaacagggcggggtacagtctttggaatcaaaaacatgttgcaagcgttcggtgagggccctccagcggacaaaacttttgcaattcagggctttggaaacgtgggtgcttgggctgggcgtctgctggcggagcaaggagggattgtaaaagctgtcagtgatgcaagcggttgcgtttatgatgacggacctagcggcattgatgttcccaagttgttgaggcatttgcaccggggcgatgacctaagcaagtacccacatggccagcagctgctacgggatgaaatttttgacgtgaagtgtgacgtgtttgtcccagctgctttgggaggggtaatcacagatcctgtcgcaaggaagatatcatgcaagtatattgtggaagcagcaaatggacctacaactccctcggcagaccttattctccgcgaccgtggtatcccagtgctgccggatatctataccaatgctggaggggtgactgtgagcttcttggaatgggtacagaatttgcagaatttcaagtggaccactgaacaagtcaatgatcaattaaagacccggatggatgaggcattccagagtatgtgggacagcagtcaagagcatggtgttcctttgcgtacgggagctttcactgtcagtctaaggcgtgttgtgcgagcaacggtgaacagaggctttaactaaatggcattccaggcatcgagtggatcacttgcgtaagaaagaggttctgaaacaagtggtttgaccaggatttaagtgtgcagtggtcagaacgcatttgtaatgtcttagccatacaaaaaaaaaaaaaaaaaaaaaaaaaaaaaa

SEQ ID NO: 137256 - protein, 447 aa, Ulva pertusa; identical to SEQ ID NO: 57115

SEQ ID NO: 137257 - DNA, 1260 bp, Thermococcus waiotapuensis; identical to SEQ ID NO: 57116
  CDS (1)..(1260): transl_table=11

SEQ ID NO: 137258 - protein, 419 aa, Thermococcus waiotapuensis; identical to SEQ ID NO: 57117

SEQ ID NO: 137259 - DNA, 2394 bp, Klebsiella aerogenes
  CDS (435)..(1778): transl_table=11
ctgcaggaggagatgggcatcatcgcccgcccggcttgctatatcgctagccatcagcgggaggtctccggccgccggatccatctgcacgcctggtgggtgccgcactttcagggcacgccgctggcccactatcacactcagctgcgctggtgccttcccacagaagcgctggccctcgatctcgccccggccgatattcctctgctgcacgcctttatcgcccagcgccccaccctttccgtccgctgatccgcccgccgcctcgtcatcgcttttagttatgacgagcgggcaattataaattttgttgtcggctcaatttttccttgcttgcctaaggattagcggtgttatagtcggaaaatcggttttttcaaggaccgaatcataataaatacatgcaaccacaaccataaggggaactgatatctatggatcagacgtgcactctggaaggctttctcacccgcgttcaacagcgcgatcctcatcaaaccgaatttgctcaagccgtccgggaggtgatgaccaccctgtggcctttccttgaggaaaatccgcgctatcgtcagcttgctttgctggaacgtctggtggaaccggagcgcgtgatccagttccgcgtggtgtgggtggacgaccgcaatcaggtccaggtcaaccgcgcgtggcgcgtgcagttcaactcggccatcggcccgtataaaggcgggatgcgttttcacccgtcggttaacctgtcgattctcaaattccttggcttcgagcagaccttcaaaaacgccctgaccactctgccgatgggcggcgggaaaggcggcagcgatttcgatcctaaaggcaagagcgatggcgaagtgatgcgtttctgccaggcgctgatgaccgaactctatcgccaccttggcccggataccgacgtaccggcgggcgatatcggcgtcggcggtcgcgaagtcggctttatggccggaatgatgcgcaagctctccaacaacagcgcctgcgtcttcaccggtaaaggactctcctttggcggcagcttgatccgtccggaagccactggttacggcctgatctacttcaccgaagcgatgctcaaacgtcacggcctcggcttcgaaggcgctcgcgtggcggtttccggctccggcaacgtcgcgcaatacgccattgagaaagcgatggagcttggcgcgcgggtggtgacggcctccgactccaacggcaccgtcgttgacgaagcgggcttcaccaaaaaaaaactggcccgcctgatcgacattaaagagcgtgcccacggccgcgtggccgattacgcccgcgaatttggcctcacctatcttgaaggccagcagccgtggtcagtgccggtggatattgccctgccttgcgcgacccagaacgaactggacgtcgatgccgcccgccagctgattgccaatggcgtcaaggccgtggcggaaggcgccaacatgccgaccaccatcgccgcaaccgacctgttcctggaagctggcgtgctgtttgccccgggcaaagcggccaacgccggcggcgtggcgacttccggtctggagatggcgcagaacgccgcgcgcatgggctggaaagcggaaaaagtggatgcccgcctgcatcacatcatgctggatatccaccacgcttgcgtgcagtacggcggcgaagcgaagcagaccaactacgtgcgcggcgcgaatatcgccggtttcgtgaaggttgcggatgctatgctggcccagggcgtgatttaacctcccctaactccatcccggcggcagcccgccgggatgcgtctcacgacgtcatcgtgatcacaactttccccagatgctgaccactgtccagacaggcatgggcctcggcaatctccgccatcgggtagctggcgtagatcagcggcttgcattttcctgcctctagcagcggccaaacgtggcggcgcagcgcctcggcaatctgctgtttctccgccgccgtccggccgcgcatggtcgagccggtgacggtggctcgcttgagcatcagagtctgaatatcaacctcatgagcgagtcgcccgcccataaagccgatgatgaccagtcgtccatcctttttcagtagcccaaggttgcggttaaagtaagggccgccaacaatatccagaatgacgtccaccccttcatcgttggtcagctggccgattttctcggcaaaatcatcggttttgtagttaatcgccgtagcatagggacgtagcgcagcaattttttcgtcctggccgacggtggcatagacggtcatccccagcgcgtggcacagcaggaccgcggtggtgccaatcccgctggcgccgccgtggaccagaatgctttcgccaggctgcag

SEQ ID NO: 137260 - protein, 447 aa, Klebsiella aerogenes
MDQTCTLEGFLTRVQQRDPHQTEFAQAVREVMTTLWPFLEENPRYRQLALLERLVEPERVIQFRVVWVDDRNQVQVNRAWRVQFNSAIGPYKGGMRFHPSVNLSILKFLGFEQTFKNALTTLPMGGGKGGSDFDPKGKSDGEVMRFCQALMTELYRHLGPDTDVPAGDIGVGGREVGFMAGMMRKLSNNSACVFTGKGLSFGGSLIRPEATGYGLIYFTEAMLKRHGLGFEGARVAVSGSGNVAQYAIEKAMELGARVVTASDSNGTVVDEAGFTKKKLARLIDIKERAHGRVADYAREFGLTYLEGQQPWSVPVDIALPCATQNELDVDAARQLIANGVKAVAEGANMPTTIAATDLFLEAGVLFAPGKAANAGGVATSGLEMAQNAARMGWKAEKVDARLHHIMLDIHHACVQYGGEAKQTNYVRGANIAGFVKVADAMLAQGVI

SEQ ID NO: 137261 - DNA, 1236 bp, Vitis vinifera; identical to SEQ ID NO: 57118
  CDS (1)..(1236)

SEQ ID NO: 137262 - protein, 411 aa, Vitis vinifera; identical to SEQ ID NO: 57119

SEQ ID NO: 137263 - DNA, 2685 bp, Debaryomyces hansenii
  CDS (974)..(2341)
tatttggtagttctccccgttgtagtccatgaatcccccatgaatccccttaacccccaccattaccttttcaccggcgactcattttcggggtacaactgagaggtaacgtatccatgccataacgagataacgatctctctgccctattagggcccttgttcccccccctgttccctcggccgacgccgtcaaatatactaggggtttggttgcaccacaaaacgttcgtaccccactgtgcacaaagatccatacaccgataaaacgatacaccaatcattcggtcccattccgcaatctgccgtattgcttgcttcgtggtttgcactggttgcacctatttgacctgacctgtttcccgtgggcaaacctagtccgtcgacagtgcccctgaatcctcaccaattgtatactcaaccgatcgtatcctatcgatcgtctcctattgatcgtatactaccgattgtctactacccatatcctcgtctaatcggtcgtagcctttctgtcggcccactcattccgcaattctgcgtaccaagctatttgctcgcttcctatattttccgaagattggatgacttagaacccgttgatttggcactgataagaaaattacataatccatatccacccaatcatgctgattcaaccgttgatcatcgaatcctgtgactcggaagaaaaaggcaattgaacaattcttgaagtcatccgtgcattttgtgtaaactccgctacaggcgaatcttcggaacttcattttattggatggagatttgattgaaatagaaaggttgaatcatcaagggctacaatcagagattgcagcatggttgaaaattttaagtacgtacgttatgactccggggataatatataaatactggtgggaatcagcaagaaacttgacatgtagatttttctaaagtatcgtctatctcggcatattataacaacaatcaacaaaatggtcttacctcacgaaccagaatttcaacaagcttacaacgaattagtttctgctttagaagactctactttatttaccgaaaaaccagaatacaaaaaggttattccagttgtttcggtcccagaaagaattatccaattcagagttgcatgggaaaacgacaacggtgatgttgaggtcaacaacggttacagagtgcaattcaactcggcgttaggtccattcaagggtggtttaagattccatccatctgtcaacttgtcgattttgaagtttttgggtttcgaacaaatcttcaaaaacgctttgaccggtttatccatgggtggtggtaaaggtggttgtgacttcaacccaaagggtagaaccgactctgaaatcagaagattctgtgttgctttcatgagacaattagccagatacattggcagtgacaccgatgttccagctggtgatattggtgttggtagccgtgaagttggttacatgttcggtgcttacaagcaaatgcaaaacaactggtctggtattttgaccggtaagggtttaagctggggtggttctttaatccgtcctgaagctactggttacggtgttgtctacttcgtcgaaaagatgattgaaaaggccactggaggtaaggaatccttcaagggtaagagagttgcaatctctggttcaggtaacgttgctcaatacgccgccttaaaggttattgagttaggttctaccgttgtttccttatccgactctaagggttgtatcatctcccaaactggtattactccagatcaaatcaaggccatcgctgcagctaagatacacttcaagactttggaagaaattaccaaggagtccgcatcgctcttctccggctctaacgaagttcaatacattgctggtgttcgtccatggacccactgtggccaagttgacgttgctttaccatctgctactcaaaatgaagtttctggtgaagaagcaaaggctttagttgaagctggctgtaagttcgtcgctgaaggttccaatatgggttctaccaaggaagctatcgatgtttttgaagccaacagatctaaggctgtatggtacgctccaggtaaggctgccaactgtggtggtgttgctgtctctggtttagaaatggcacaaaactctcaaagagttacttgggctgctgaagaagtcgacgaaaagttgaagaacattatgtacacttgtttcgataactgttacgctaatgctgctaaatactctgctgaaaaggatgcagaaaatttaccatctttattaaagggtgctaacatcactggtttcatcaaggtcgccgatgctatgtttgaccaaggtgaagtcttttaagacaaggtgcctcagcctataaaaaatattgtcatttcagttctttctatatattattattagttactttttgttttgcgtagcaaataaaaattgggtatcattttattaaacttaagtgtagatttagtagattactattagtagcagtaaattaccattagtggtactaaactagtaaagtaaaaatcaagtcttgcgcgtatgatatggatttttcagaaaaaaatgtaactaaaaaattaagaaattatcattctatcatggattctgaaagcacgtcgcaaagcaatgtgcctcaagatcaaccagtaataactggaagcatagatttgccgccatat

SEQ ID NO: 137264 - protein, 455 aa, Debaryomyces hansenii; identical to SEQ ID NO: 57121

SEQ ID NO: 137265 - DNA, 1338 bp, Pseudomonas aeruginosa
  CDS (1)..(1338): transl_table=11
atgacgcaatccgtcgacgctttcctcgagcgcctgaagcggcgcgatcccgatcagcccgaattccaccaggcggtggaagaggtgctgcgttccctctggccgttcctcgaggccaacccacactacctggaagccggcatcatcgaacgcatcgtcgaacccgagcgggcgatcctgttccgcgtaccctgggtcgacgaccagggccgggtacgggtcaaccgtggctaccgggtgcagatgagcagcgccatcggcccctacaagggcggcctgcgcttccatccctcggtcaacctcggggtgctgaagttcctcgccttcgagcaggtcttcaagaactccctgaccactctgcccatgggcggcggcaagggcggctccgacttcgatccgaagggcaagagcgacgccgaggtgatgcgtttctgccagtcgttcatgagcgagctgtaccgccacgtcggcgccgacctggacgtgccggccggcgacatcggcgtcggcgcgcgtgagatcggctacctgttcggccagtacaagcgcctgtccaaccagttcacctcggtgctgaccggcaagggcctgagctatggcggcagcctgatccgcccggaggcgaccggcttcggctgcgtctacttcgcccaggaaatgctcaaggatcgtggccgcggcttcgacggccagcgggtggcgatctccggctcgggcaacgtcgcccagtacgcggcgcgcaaggtcatggaaatgggcggcaaggtgatctcgctgtccgattccgaaggcaccctgtatgccgaggcggggctctccgacgagcagtgggaatacctgatggagctgaagaacgctcgcgccgggcatccgcgagatggcgtggagcagttttccctgcagttcctcgaaggggtgccgccctggggcctggcctgcgatatcgcgctgccctgcgcgacccagaacgaactggatgccgaggatgcgcggcgcctgctggccaacggctgcgtctgtgtcgccgaaggcgccaacatgccctcgaccctggaagccgtcgacctgttcctcgaggccggcatcctctacgcgccgggcaaggcgtcgaacgccggcggggtggcggtgagcggcctggagatgtcgcagaacgccatgcgcctgcgttggagcgagggcgaggtggataccaagctgcacggcatcatgcagtcgatccaccatgcctgcctgctgtacggcgaggagcaggggcgggtcaactacgtgaagggggcgaacatcgccggcttcgtcaaggtcgccgatgcgatgctggcgcagggcgtggtctga

SEQ ID NO: 137266 - protein, 445 aa, Pseudomonas aeruginosa
MTQSVDAFLERLKRRDPDQPEFHQAVEEVLRSLWPFLEANPHYLEAGIIERIVEPERAILFRVPWVDDQGRVRVNRGYRVQMSSAIGPYKGGLRFHPSVNLGVLKFLAFEQVFKNSLTTLPMGGGKGGSDFDPKGKSDAEVMRFCQSFMSELYRHVGADLDVPAGDIGVGAREIGYLFGQYKRLSNQFTSVLTGKGLSYGGSLIRPEATGFGCVYFAQEMLKDRGRGFDGQRVAISGSGNVAQYAARKVMEMGGKVISLSDSEGTLYAEAGLSDEQWEYLMELKNARAGHPRDGVEQFSLQFLEGVPPWGLACDIALPCATQNELDAEDARRLLANGCVCVAEGANMPSTLEAVDLFLEAGILYAPGKASNAGGVAVSGLEMSQNAMRLRWSEGEVDTKLHGIMQSIHHACLLYGEEQGRVNYVKGANIAGFVKVADAMLAQGVV

SEQ ID NO: 137267 - DNA, 1236 bp, Asparagus officinalis; identical to SEQ ID NO: 57122
  CDS (1)..(1236)

SEQ ID NO: 137268 - protein, 411 aa, Asparagus officinalis; identical to SEQ ID NO: 57123

SEQ ID NO: 137269 - DNA, 1236 bp, Arabidopsis thaliana; identical to SEQ ID NO: 57124
  CDS (1)..(1236)

SEQ ID NO: 137270 - protein, 411 aa, Arabidopsis thaliana; identical to SEQ ID NO: 57125

SEQ ID NO: 137271 - DNA, 1236 bp, Arabidopsis thaliana; identical to SEQ ID NO: 57126
  CDS (1)..(1236)

SEQ ID NO: 137272 - protein, 411 aa, Arabidopsis thaliana; identical to SEQ ID NO: 57127

SEQ ID NO: 137273 - DNA, 1338 bp, Bacteroides fragilis
  CDS (1)..(1338): transl_table=11
atgaacatcgaaaaaatcatgtcctctcttgaggcaaaacatcccggtgaatctgaatatcttcaggccgtaaaagaagtattactctctatcgaagatatctacaaccaacacccagaatttgaaaagagcaaaatcatcgaaagactggtagagcccgaccgtattttcacattccgtgtaacatgggtggatgataaaggtgaagttcagaccaacctgggatatcgtgttcagttcaacaacgctatcggcccatacaaaggcggtatccgtttccacgcttctgtcaacctctcgatcctgaaattcctgggattcgaacagactttcaaaaatgcactgacaactttacctatgggcggtggcaaaggaggttccgacttctctccacgaggaaaaagtgatgcggaaatcatgcgtttctgtcaggcattcatgcttgaattgtggcgtcatctagggccggatatggatgtgcctgccggtgatatcggtgtaggaggacgtgaagtcggctatatgttcggtatgtacaagaaactgacccgtgagtttacaggaactttcacgggtaaaggacttgaatttggcggttcactgattcgcccggaagccaccggattcggcggattgtatttcgtcaaccaaatgttgcagaccaagggtatcgacataaaaggtaaaactgtggctatctccggattcggaaacgttgcctggggagctgctaccaaagctaccgaactgggagccaaagtagttaccatctccggaccggacggatatatctatgatccgaatggaatcagtggagagaagatcgattatatgcttgagttgcgtgcttcgggcaacgatattgtggctccgtatgcagatgaatttccgggttctacattcgtagccggtaaacgcccatgggaagtaaaagcagacatagcgcttccttgcgccactcaaaacgaattgaatggcgaagatgccaagaacctgatcgacaacaacgttctttgtgtcggagagatctccaatatgggttgtacacccgaagctatcgatctctttatcgaacacaaaacaatgtacgctcccggcaaagctgtcaatgcaggcggtgtggcaacatccggactcgaaatgtcacaaaatgcaatgcacttgagctggagtgcagccgaagtagacgagaaactgcattctatcatgcacggcattcatgcacaatgtgtgaagtatggtacagagcccgacggatatatcaattatgtaaaaggtgccaatattgcaggtttcatgaaagtagcccatgcaatgatgggacaaggaatcatctga

SEQ ID NO: 137274 - protein, 445 aa, Bacteroides fragilis
MNIEKIMSSLEAKHPGESEYLQAVKEVLLSIEDIYNQHPEFEKSKIIERLVEPDRIFTFRVTWVDDKGEVQTNLGYRVQFNNAIGPYKGGIRFHASVNLSILKFLGFEQTFKNALTTLPMGGGKGGSDFSPRGKSDAEIMRFCQAFMLELWRHLGPDMDVPAGDIGVGGREVGYMFGMYKKLTREFTGTFTGKGLEFGGSLIRPEATGFGGLYFVNQMLQTKGIDIKGKTVAISGFGNVAWGAATKATELGAKVVTISGPDGYIYDPNGISGEKIDYMLELRASGNDIVAPYADEFPGSTFVAGKRPWEVKADIALPCATQNELNGEDAKNLIDNNVLCVGEISNMGCTPEAIDLFIEHKTMYAPGKAVNAGGVATSGLEMSQNAMHLSWSAAEVDEKLHSIMHGIHAQCVKYGTEPDGYINYVKGANIAGFMKVAHAMMGQGII

SEQ ID NO: 137275 - DNA, 1353 bp, Clostridium symbiosum
  CDS (1)..(1353): transl_table=11
atgagcaagtatgttgacagagtaattgcggaagtcgagaagaaatacgcagacgagccggagttcgtacaaacagtagaagaggttttatcttctttaggtccggttgttgatgcacatccggagtatgaggaagtagctcttctcgagagaatggtaattccggagagagttatcgagttccgtgttccgtgggaggatgacaacggcaaggttcatgtaaacacaggctaccgcgttcagttcaacggcgccattggaccgtacaagggcggcttacgttttgctccgtctgtaaacctttccatcatgaaattcttaggctttgagcaggcattcaaagacagccttacaacacttcctatgggtggtgccaaaggtggttccgacttcgatccgaacggtaagagcgacagagaagttatgagattctgccaggctttcatgacagaattataccgtcacatcggaccggacattgatgttcctgcaggtgaccttggtgtaggcgctcgtgaaatcggttatatgtacggacagtatcgtaaaattgtcggcggattctacaacggcgttctgacaggtaaggcaagatccttcggtggttccttagttcgtccggaagctacaggatacggctccgtatactatgtagaagcagttatgaaacatgagaacgataccctggttggcaagacagttgcattagcaggttttggtaacgtagcatggggcgctgctaagaagcttgctgaattaggcgctaaagcagttacactttccggaccagacggatacatctacgatccggaaggcatcacaacagaagagaagatcaactacatgcttgagatgagagcatccggacgtaacaaagttcaggattatgcagacaagttcggcgtacagttcttcccgggtgagaaaccatggggccagaaggttgacatcatcatgccatgcgctactcagaacgatgttgatttagagcaggctaagaagatcgttgctaacaacgttaaatactacatcgaagttgctaacatgccaactaccaacgaagctctcagattcttaatgcagcagccaaacatggtagtagctccttccaaggctgtaaacgcaggcggcgttcttgtatccggctttgagatgagccagaacagcgagagactttcctggacagcagaggaagttgactccaaacttcatcaggttatgacagatatccatgacggttccgctgcagcagcagagcgttacggcttaggctacaatctggttgccggcgctaacatcgttggattccagaagattgctgatgctatgatggctcagggcattgcttggtaa

SEQ ID NO: 137276 - protein, 450 aa, Clostridium symbiosum
MSKYVDRVIAEVEKKYADEPEFVQTVEEVLSSLGPVVDAHPEYEEVALLERMVIPERVIEFRVPWEDDNGKVHVNTGYRVQFNGAIGPYKGGLRFAPSVNLSIMKFLGFEQAFKDSLTTLPMGGAKGGSDFDPNGKSDREVMRFCQAFMTELYRHIGPDIDVPAGDLGVGAREIGYMYGQYRKIVGGFYNGVLTGKARSFGGSLVRPEATGYGSVYYVEAVMKHENDTLVGKTVALAGFGNVAWGAAKKLAELGAKAVTLSGPDGYIYDPEGITTEEKINYMLEMRASGRNKVQDYADKFGVQFFPGEKPWGQKVDIIMPCATQNDVDLEQAKKIVANNVKYYIEVANMPTTNEALRFLMQQPNMVVAPSKAVNAGGVLVSGFEMSQNSERLSWTAEEVDSKLHQVMTDIHDGSAAAAERYGLGYNLVAGANIVGFQKIADAMMAQGIAW

SEQ ID NO: 137277 - DNA, 1266 bp, Peptostreptococcus asaccharolyticus; identical to SEQ ID NO: 57130
  CDS (1)..(1266): transl_table=11

SEQ ID NO: 137278 - protein, 421 aa, Peptostreptococcus asaccharolyticus; identical to SEQ ID NO: 57131

SEQ ID NO: 137279 - DNA, 1338 bp, Porphyromonas gingivalis
  CDS (1)..(1338): transl_table=11
atgaagacccaagaaattatgacaatgctggaggctaagcaccccggcgaaagcgaattcctccaagcagtgaaggaagttcttctctctgtagaagaagtgtacaaccaacatcccgagttcgaaaagaacggtatcatcgagcgtatcgtagagccggatcgtgtattcacattccgtgtaccctgggtagatgaccaaggtaaggtacaggtaaacatcggctaccgcgttcagttcaacaatgccatcggtccgtacaagggcggtatccgtttccatccttcagtgaacctctctatcctgaagttcctcggtttcgaacagatgttcaagaatgcactcactactctccccatgggtggtggtaaaggtggtgccgacttctctcccaagggtaagagcgaagccgaaatcatgcgtttctgccagagcttcatgaccgaattgtggcgcaacatcggccctgacaccgacattcctgccggtgacatcggcgtaggcggtcgcgaagtaggttatatgttcggtatgtacaagaagctcgctcgcgagcacacaggtacgcttaccggcaagggattcgagttcggcggttctcgtctgcgtcccgaatctaccggtttcggtgctgtttacttcgtacagaacatgtgtaagcaaaacggtgtagactacaagggcaaaactcttgctatctccggattcggtaacgttgcttggggtgtggctcagaaagctaccgagttgggcattaaggttgttacgatctccggtcctgacggctatgtttacgaccccgacggtatcaacacaccggagaaattccgatgcatgcttgacctccgtgacagcggtaacgacgtagtatcagactatgtgaagagattccccaatgctcagttcttccccggcaagaagccttgggagcaaaaggtagacttcgctatgccttgcgctacgcagaacgagatgaacctcgaagatgccaagacgttgcacaagaatggtgttactcttgtagctgaaacttctaacatgggttgtacggccgaagccagcgaatactatgtagcaaacaagatgctcttcgctccgggtaaggctgttaatgcaggtggtgtttcttgctcaggtctcgaaatgacgcagaacgctatgcacctcgtttggacgaatgaagaagtggacaagtggctgcaccagatcatgcaagacatccacgagcagtgcgttacatacggtaaagacggcaactacatcgactatgtgaagggtgccaatatcgccggcttcatgaaggttgccaaggctatggtagctcagggcgtttgctaa

SEQ ID NO: 137280 - protein, 445 aa, Porphyromonas gingivalis
MKTQEIMTMLEAKHPGESEFLQAVKEVLLSVEEVYNQHPEFEKNGIIERIVEPDRVFTFRVPWVDDQGKVQVNIGYRVQFNNAIGPYKGGIRFHPSVNLSILKFLGFEQMFKNALTTLPMGGGKGGADFSPKGKSEAEIMRFCQSFMTELWRNIGPDTDIPAGDIGVGGREVGYMFGMYKKLAREHTGTLTGKGFEFGGSRLRPESTGFGAVYFVQNMCKQNGVDYKGKTLAISGFGNVAWGVAQKATELGIKVVTISGPDGYVYDPDGINTPEKFRCMLDLRDSGNDVVSDYVKRFPNAQFFPGKKPWEQKVDFAMPCATQNEMNLEDAKTLHKNGVTLVAETSNMGCTAEASEYYVANKMLFAPGKAVNAGGVSCSGLEMTQNAMHLVWTNEEVDKWLHQIMQDIHEQCVTYGKDGNYIDYVKGANIAGFMKVAKAMVAQGVC

SEQ ID NO: 137281 - DNA, 1257 bp, Aeropyrum pernix; identical to SEQ ID NO: 57132
  CDS (1)..(1257): transl_table=11

SEQ ID NO: 137282 - protein, 418 aa, Aeropyrum pernix; identical to SEQ ID NO: 57133

SEQ ID NO: 137283 - DNA, 1236 bp, Arabidopsis thaliana; identical to SEQ ID NO: 57134
  CDS (1)..(1236)

SEQ ID NO: 137284 - protein, 411 aa, Arabidopsis thaliana; identical to SEQ ID NO: 57135

SEQ ID NO: 137285 - DNA, 1898 bp, Bacteroides thetaiotaomicron
  CDS (112)..(1446): transl_table=11
gcatttttctttataaaatgtttgctagttcaatttttatctttacttttgcaaccgcataaaagaaataggtaatcgaaatttaatcaaccaataaaagaaaaaaagattatgaatgcagcaaaggtattagacgatctgaaaagacggttccccaacgaaccggagtatcatcaggcagtagaagaagtactttctactattgaagaagaatacaacaaacacccggagtttgacaaagcaaacttaatcgaacgcttgtgtattcctgatagagtatttcagttccgtgtaacttggatggacgacaaaggtaatattcagacaaacatgggttaccgtgttcagcacaacaacgctatcggcccgtacaaaggcggtatccgtttccacgcatctgtaaacctttccatcctgaaattccttgcctttgagcagacattcaaaaactcactgactacgctgcctatgggtggtggtaagggtggttccgacttctctccacgtggtaagtcaaacgctgaagtaatgcgtttcgtacaggcattcatgctggaactgtggcgtcacatcggtcccgaaactgacgtacctgcaggtgatatcggtgtaggtggccgcgaagtaggtttcatgttcggtatgtacaagaagctggctcacgaatttaccggcacattcactggtaaaggccgcgaattcggtggttcactgattcgtccggaagctaccggttacggtaacatctacttcctgatggaaatgctgaaaaccaaaggtactgacctgaaaggtaaagtttgtcttgtttccggttcgggtaacgtagctcaatatacaatcgaaaaagtaatcgaactgggtggtaaagtagttacttgctccgactctgacggttacatctacgatccggacggtatcgaccgcgaaaagctggattacatcatggaactgaagaacctgtaccgtggccgtatccgcgaatacgcagagaaatatggttgcaaatatgtagaaggagctaagccttggggtgaaaaatgcgatatcgcactgccttctgccactcagaacgaattgaacggcgaccacgcccgtcagttggtagcaaacggctgtatagctgtatctgagggtgcaaatatgccttctactccggaagctgtccgtgtattccaagacgctaagattctgtacgctccgggtaaagcagctaatgcaggtggtgtatcagtatcaggtcttgaaatgactcagaactccatcaagttgagctggagcgctgaagaagtagacgaaaagctgaagagcatcatgaagaatatccacgaagcttgcgttcagtatggtactgaagccgacggatatgtaaactatgtaaaaggtgctaacgtagccggatttatgaaggttgccaaagctatgatggctcagggtatcgtataatcagcaaaatataagaaagctatagtcatttttaagataaaggctcccgccttccgaaaggaaggacgggagtttttttatgttgtaccgcagtggtgaaaaacaagtaaaagagtgcaggcaaacatataaaagagtgagtgacaggaagtacttcactctggcaaatgatgtagaagaaaaaggtaaaagaagtacatgacttggatgaaagatgtacttgaaataaaaaatatcggaggttttaaagattgttcatagttattctctatctttagatagaaattatcagtttgacaagcaagcaaaatcggtctatctttgttacatattataaacccggacagaagaataaaaaagacttcggtttatttaaactttgcctccgactaacatctattttatggaagaaaaaaaactaactgccgcgaacggtcgtcccattgccgaca

SEQ ID NO: 137286 - protein, 444 aa, Bacteroides thetaiotaomicron
MNAAKVLDDLKRRFPNEPEYHQAVEEVLSTIEEEYNKHPEFDKANLIERLCIPDRVFQFRVTWMDDKGNIQTNMGYRVQHNNAIGPYKGGIRFHASVNLSILKFLAFEQTFKNSLTTLPMGGGKGGSDFSPRGKSNAEVMRFVQAFMLELWRHIGPETDVPAGDIGVGGREVGFMFGMYKKLAHEFTGTFTGKGREFGGSLIRPEATGYGNIYFLMEMLKTKGTDLKGKVCLVSGSGNVAQYTIEKVIELGGKVVTCSDSDGYIYDPDGIDREKLDYIMELKNLYRGRIREYAEKYGCKYVEGAKPWGEKCDIALPSATQNELNGDHARQLVANGCIAVSEGANMPSTPEAVRVFQDAKILYAPGKAANAGGVSVSGLEMTQNSIKLSWSAEEVDEKLKSIMKNIHEACVQYGTEADGYVNYVKGANVAGFMKVAKAMMAQGIV

SEQ ID NO: 137287 - DNA, 1689 bp, Drosophila melanogaster; identical to SEQ ID NO: 57136
  CDS (1)..(1689)

SEQ ID NO: 137288 - protein, 562 aa, Drosophila melanogaster; identical to SEQ ID NO: 57137

SEQ ID NO: 137289 - DNA, 1236 bp, Zea mays; identical to SEQ ID NO: 57138
  CDS (1)..(1236)

SEQ ID NO: 137290 - protein, 411 aa, Zea mays; identical to SEQ ID NO: 57139

SEQ ID NO: 137291 - DNA, 1263 bp, Pyrococcus abyssi
  CDS (1)..(1263): transl_table=11
atggttgagcaggacccatttgaaattgcggttaagcagcttgagagggctgctcagtacatgaagataagtgaagaggctctcgaattcttaaagaggcctcagagaattgttgaagttaccataccagttgagatggatgatggttctgtaaaggtcttcacaggatttagagtccaatacaactgggctaggggtccaactaagggtggaattaggtggcaccccgaggaaacgctcagcacagttaaggctcttgccgcttggatgacttggaagaccgctgttatggacttaccatacggtggaggtaagggtggaataatagttgatcccaagaagctctcagacagggagaaggagaggctcgcaaggggatacataagggcaatatacgacgtaataagcccatatgaggacatcccagctccagacgtttacaccaacccacagataatggcttggatgatggatgagtacgagacaatagcaaggaggaagacccctgcctttggaataatcacaggaaagccactcagcattggaggatcacttggaaggaacgaggctactgcaaggggagcttcatacacaattagagaggccgcaaaggttcttggatgggatgacctcaagggcaagacaatagcgatccagggttatggtaacgcaggttactatttagctaagataatgagcgaggactacggaatgaaggtcgttgcggtaagcgacagtaagggtggaatctacaacccagatggacttaacgctgatgaggttctcaagtggaagagggagcatggctcagttaaggacttcccaggagccactaacataaccaacgaggagctcctagagcttgaggttgatgttctcgcaccagctgcaattgaggaagtcataaccaagaagaacgctgataacatcaaggctaagatcgttgcagaggtagctaacggtccagtcacaccagaagctgacgagatactcttcgagaagggaatcctccagataccagacttcctatgtaacgcaggtggtgtgacagtcagttacttcgagtgggttcagaacataacgggttactactggacactagaggaggtcagggagaagcttgacaagaagatgaccaaggcattctacgacgtctacaatactgcaaaggagaagaacatccacatgagagatgcagcatacgtcgttgcagtccagagagtctaccaggcaatgcttgaccgtggttgggtcaagcactga

SEQ ID NO: 137292 - protein, 420 aa, Pyrococcus abyssi
MVEQDPFEIAVKQLERAAQYMKISEEALEFLKRPQRIVEVTIPVEMDDGSVKVFTGFRVQYNWARGPTKGGIRWHPEETLSTVKALAAWMTWKTAVMDLPYGGGKGGIIVDPKKLSDREKERLARGYIRAIYDVISPYEDIPAPDVYTNPQIMAWMMDEYETIARRKTPAFGIITGKPLSIGGSLGRNEATARGASYTIREAAKVLGWDDLKGKTIAIQGYGNAGYYLAKIMSEDYGMKVVAVSDSKGGIYNPDGLNADEVLKWKREHGSVKDFPGATNITNEELLELEVDVLAPAAIEEVITKKNADNIKAKIVAEVANGPVTPEADEILFEKGILQIPDFLCNAGGVTVSYFEWVQNITGYYWTLEEVREKLDKKMTKAFYDVYNTAKEKNIHMRDAAYVVAVQRVYQAMLDRGWVKH

SEQ ID NO: 137293 - DNA, 1263 bp, Pyrococcus endeavori; identical to SEQ ID NO: 57140
  CDS (1)..(1263): transl_table=11

SEQ ID NO: 137294 - protein, 420 aa, Pyrococcus endeavori; identical to SEQ ID NO: 57141

SEQ ID NO: 137295 - DNA, 1263 bp, Pyrococcus furiosus; identical to SEQ ID NO: 57142
  CDS (1)..(1263): transl_table=11

SEQ ID NO: 137296 - protein, 420 aa, Pyrococcus furiosus; identical to SEQ ID NO: 57143

SEQ ID NO: 137297 - DNA, 1266 bp, Pyrococcus kodakaraensis
  CDS (1)..(1266): transl_table=11
atggtcgagattgacccgtttgagatggccgtccagcagcttgagagggctgcccagttcatggacataagcgaagaggcccttgagtggctcaagaggcccatgaggattgttgaggttagcgttcccgtcgagatggacgacggttctgtcaaggttttcaccggtttccgtgtccagcacaactgggcccgcggtccgaccaagggtggtataaggtggcacccggccgagaccctcagcaccgttaaggcccttgccacctggatgacctggaaggttgccgtcgttgacctcccctacggtggaggtaagggtggcatcatcgttgacccgaagaagctctccgagagggagcaggagaggctcgctaggagctacataagggccgtctacgacgtcatcggcccgtggacagacatcccggcccctgacgtttacaccaacccgaagatcatggcctggatgatggacgagtacgagaccataatgaggagaaagggcccggccttcggtgtcatcaccggaaagccgccgggagttggcggtatcgtcgccagaatggacgccaccgctcgcggtgctgccttcactatcagggaagccgctaaggccctcggctgggacgacctcaagggcaagaccatagccatccagggctacggtaacgccggctactacctccacaagataatgagtgaggagttcggtatgaaggtcgttgccgtcagcgacagcaagggcggcatctacaacccggacgggctcccgccggctgacgaggtactcaagtggaagaaggagcacggctcagtcaaggacatgcccggaacccagaacatcaccaacgaggagctcctcgagcttgaagtcgacatccttgccccgagcgccatcgagggcgtcataaccaaagagaacgccgacaacgtcaaggccaagatcgtcgccgaggtagccaacggtccggtcaccccggaggccgacgagatactccacgagaagggcatcctccagatcccggacttcctctgtaacgccggtggtgtcaccgtcagctacttcgagtgggtccagaacataaacggcttctactggacggtcgaggagaccaggaagaggctcgacgacaagatgaccaaggcattctgggacgtcttcaacacccacaaggagaagaacatccacatgagggacgctgcctacgtcgttgccgtcagcagggtctacgaggcaatgaagcaccgcggatgggtgaagaagtga

SEQ ID NO: 137298 - protein, 421 aa, Pyrococcus kodakaraensis
MVEIDPFEMAVQQLERAAQFMDISEEALEWLKRPMRIVEVSVPVEMDDGSVKVFTGFRVQHNWARGPTKGGIRWHPAETLSTVKALATWMTWKVAVVDLPYGGGKGGIIVDPKKLSEREQERLARSYIRAVYDVIGPWTDIPAPDVYTNPKIMAWMMDEYETIMRRKGPAFGVITGKPPGVGGIVARMDATARGAAFTIREAAKALGWDDLKGKTIAIQGYGNAGYYLHKIMSEEFGMKVVAVSDSKGGIYNPDGLPPADEVLKWKKEHGSVKDMPGTQNITNEELLELEVDILAPSAIEGVITKENADNVKAKIVAEVANGPVTPEADEILHEKGILQIPDFLCNAGGVTVSYFEWVQNINGFYWTVEETRKRLDDKMTKAFWDVFNTHKEKNIHMRDAAYVVAVSRVYEAMKHRGWVKK

SEQ ID NO: 137299 - DNA, 1239 bp, Solanum lycopersicum; identical to SEQ ID NO: 57144
  CDS (1)..(1239)

SEQ ID NO: 137300 - protein, 412 aa, Solanum lycopersicum; identical to SEQ ID NO: 57145

SEQ ID NO: 137301 - DNA, 1260 bp, Thermococcus litoralis
  CDS (1)..(1260): transl_table=11
atggttgagcaagacccatttgaaattgctgttaagcagcttgaaagagctgcccaatatatggacataagtgaagaggcccttgagtttttaaagaggccacaaagaattgttgaagtcagcattccagttgagatggatgacggttctgtaaaggttttcacaggatttagagtccaatacaactgggctcgcggtccaacaaagggtggtattagatggcaccctgaagaaacacttagcaccgtcaaggctttggccgcttggatgacctggaagactgccgttatggacctcccatatggtggaggtaagggtggtgtcatctgtaatccaaaggaaatgagcgacagagagaaggaaagacttgctagaggatatgtaagagctatctatgatgttataagcccatacaccgatattccagctccagacgtttacactaacccacagatcatggcatggatgatggacgaatatgaaacaatctcaagaaggaaagacccatcctttggtgttatcacgggtaaaccaccaagcgttggtggtatcgtagcaagaatggatgccacagctagaggtgcaagctacacagttagggaagccgcaaaggctcttggaatggacttgaagggcaagacaatagccatccagggttacggtaacgctggatactacatggccaagatcatgagcgaagagtacggaatgaaggttgttgcagtcagcgacacgaagggtggtatatacaacccagatggcctcaacgctgacgaagttcttgcttggaagaagaagaccggtagcgttaaggacttcccaggagcaaccaacataaccaacgaagagctccttgagcttgaggtagatgttcttgcaccatcagctatcgaagaggtcatcacaaagaagaacgccgacaacatcaaggccaagatcgttgccgagcttgcaaacggtccaaccacaccagaggcagacgagattctctacgagaagggcatactcatcatccccgacttcctctgtaacgcaggtggtgttacagtaagctacttcgaatgggtacagaacataaccggtgattactggacagttgaggagacaagggcaaagcttgacaagaagatgaccaaggccttctgggacgtttacaacacccacaaggagaagaacatcaacatgagagacgctgcttacgtagttgcagtcagcagagtctaccaagcaatgaaagaccgcggatggatcaagaagtga

SEQ ID NO: 137302 - protein, 419 aa, Thermococcus litoralis
MVEQDPFEIAVKQLERAAQYMDISEEALEFLKRPQRIVEVSIPVEMDDGSVKVFTGFRVQYNWARGPTKGGIRWHPEETLSTVKALAAWMTWKTAVMDLPYGGGKGGVICNPKEMSDREKERLARGYVRAIYDVISPYTDIPAPDVYTNPQIMAWMMDEYETISRRKDPSFGVITGKPPSVGGIVARMDATARGASYTVREAAKALGMDLKGKTIAIQGYGNAGYYMAKIMSEEYGMKVVAVSDTKGGIYNPDGLNADEVLAWKKKTGSVKDFPGATNITNEELLELEVDVLAPSAIEEVITKKNADNIKAKIVAELANGPTTPEADEILYEKGILIIPDFLCNAGGVTVSYFEWVQNITGDYWTVEETRAKLDKKMTKAFWDVYNTHKEKNINMRDAAYVVAVSRVYQAMKDRGWIKK

SEQ ID NO: 137303 - DNA, 1251 bp, Thermotoga maritima; identical to SEQ ID NO: 57146
  CDS (1)..(1251): transl_table=11

SEQ ID NO: 137304 - protein, 416 aa, Thermotoga maritima; identical to SEQ ID NO: 57147

SEQ ID NO: 137305 - DNA, 1260 bp, Thermococcus profundus; identical to SEQ ID NO: 57148
  CDS (1)..(1260): transl_table=11

SEQ ID NO: 137306 - protein, 419 aa, Thermococcus profundus; identical to SEQ ID NO: 57149

SEQ ID NO: 137307 - DNA, 1308 bp, Halobacterium salinarium; identical to SEQ ID NO: 57152
  CDS (1)..(1308): transl_table=11

SEQ ID NO: 137308 - protein, 435 aa, Halobacterium salinarium; identical to SEQ ID NO: 57153

SEQ ID NO: 137309 - DNA, 1290 bp, Halobacterium salinarium
  CDS (1)..(1290): transl_table=11
atggcccagacaccaccgccggagtccgcgccctccaccgacagcgagcccgagaccgccctggagaccgcacgccgccagctgcaggcggctgccgagcacgtcgacatcgctgacggcgtgatcgagcgactcacccaccctacgcgcgtggtccaggtatcggtgccggtcgagcgcgacgacggcaccgtcacggtatacgacgggtaccgtgcccaacacgacgacgtacgcggtccatacaaaggtgggctccgctaccaccccggtgtgagcgccgaggaatgcgtcggcctctcgatgtggatgacttggaagtgtgccgtcatggacctgccgttcggcggcgcgaaaggcggcgtcgttgtcgatccgaagaccctcagcgccgacgaacacgagcgactgacacggcggttcgcggcggagctccgcgacgaggtcggtcccagccaggacatccccgcgccggacatgggaaccgacgcacagacgatggcctggttcatggacgcctacagcatgcaacagggcgagactgtcccgggcgtcgtcaccgggaagccgccagttgccggtgggagccacggccgcgcggaggcacccggccggagcgtcgccatcgccaccagggaagcgatcaactactacgacatccccatcgacgacgcgaccgtcgccgtccagggatacgggagcgtcggagcgaacgctgcactgctgctcgatgactggggggcacgcgtcgtcgccgtcagcgatgtcaacggtggcgtcctcgacactgatggcctcgatacacacgcgattccgtcgcacgggaaccagccggcggcggtgatgcgacacgacgcgccgaacacactcaccaacgaggagctcctcgaactagacgtcgatgtggtgatcccggctgctgtcggaaacgtaatcaccgctgccaacgccgaccgcattcaggccgacatcgtcgttgagggggccaacggcccgacgacatcggccgccgaccgaatcctcgaggagcgcgccgtgcccgtgatcccggacatcctcgcgaacgccggcggggttacggtgtcgtacttcgagtggctccaggacatcaaccgccggacgtggtcgccggagcgtgttcgcgacgaactcgaatccgagatgctgtccgcatggaacgccgtgcgcagcgaggtggacgacggagacctgagctggcgggacgctgcctacgttgtcgcgctgcaacgcatcggccgtgcgaaggaagcccgtgggctctggccctga

SEQ ID NO: 137310 - protein, 429 aa, Halobacterium salinarium
MAQTPPPESAPSTDSEPETALETARRQLQAAAEHVDIADGVIERLTHPTRVVQVSVPVERDDGTVTVYDGYRAQHDDVRGPYKGGLRYHPGVSAEECVGLSMWMTWKCAVMDLPFGGAKGGVVVDPKTLSADEHERLTRRFAAELRDEVGPSQDIPAPDMGTDAQTMAWFMDAYSMQQGETVPGVVTGKPPVAGGSHGRAEAPGRSVAIATREAINYYDIPIDDATVAVQGYGSVGANAALLLDDWGARVVAVSDVNGGVLDTDGLDTHAIPSHGNQPAAVMRHDAPNTLTNEELLELDVDVVIPAAVGNVITAANADRIQADIVVEGANGPTTSAADRILEERAVPVIPDILANAGGVTVSYFEWLQDINRRTWSPERVRDELESEMLSAWNAVRSEVDDGDLSWRDAAYVVALQRIGRAKEARGLWP

SEQ ID NO: 137311 - DNA, 1374 bp, Agaricus bisporus; identical to SEQ ID NO: 57154
  CDS (1)..(1374)

SEQ ID NO: 137312 - protein, 457 aa, Agaricus bisporus; identical to SEQ ID NO: 57155

SEQ ID NO: 137313 - DNA, 1353 bp, Botrytis cinerea; identical to SEQ ID NO: 57156
  CDS (1)..(1353)

SEQ ID NO: 137314 - protein, 450 aa, Botrytis cinerea; identical to SEQ ID NO: 57157

SEQ ID NO: 137315 - DNA, 1599 bp, Debaryomyces occidentalis
  CDS (181)..(1560)
aatagatgcctcatactattaagctattggtcaaggggttcgcttcctccgatgcatggagatcagaaaactactatataaagtaattcaaaagtaattcaaaatcacttttttttcagaaatcagaaaaattttcagattttttttcatattactaagagacaatagaaatagatagagatgattaaaaatggtcttcctcacgaacctgaattccaacaagcttataacgagttagtctcagctttagaagaatctactttattcaccgaaaagccagaatacaagaaagtcatcccagttgtttcaattccagaaagaattatccaattcagagtcgcatgggaaaacgataacggcgatgttgaagtcaacaacggtttcagagtgcaattcaactcttctttgggtccgtacaagggaggattaagattccacccatcggtcaacttgtccatcttgaaattcttgggatttgaacaaatctttaagaacgccttaaccggtttatccatgggaggtggtaaaggtggttgtgatttcaacccaaagggcagatcagacggtgaaattagaagattctgtgttgcattcatgagacaattagccagatacattggagcagatactgatgttcctgccggtgacattggtgtcggtggtagagaaatcggttacttattcggtgcatacaaacaaatgcaaaacaactggtatggtgttttgaccggtaagggtttaacttggggtggttcattgattcgtccagaagctaccggttacgtgtcgtttactacgttgaaaaaaatgatcgaaaaagctaccaacggtaaggaatctttcaaaggtaaaagagttgaactctctggttccggtaacgttgcacaatacgctgccttaaaggttattgaattaggtggtatcgttgtttctttatccgactctaaaggttcaattgtttctaagaatggtattgtccctgaacaagttcttgaaattgctgccgctaaattaaaattcaaatctttagaagaaattactaaagaatctgttaagctcttctctggagaaaactcagttgaatacttagctggtgttcgtccatgggctaaagttggccatttcgatgttgctttgccatctgccacccaaaaagaagtttctggtgaagaagaagctaaagctttagttgaagctggttgtaaatacattgctgaaggttctaatatgggttctactaaagaagccattgatgttttcgaagccaacagatccaataacgtctggtacgctccaggtaaggccgccaactgtggtggtgttgctgtctctggtttagaaatggcccaaaactcacaaagagttcaatggtctgctgaagaagttgatgctaaattaaagaacatcatgtacacttgttttgacaactgttacgatcctgccatcaaatactctgctgaaaagaacgccgatggcttaccatctttattaaaaggtgctaacattgcttcattcattaaggtcgccgacgctatgttcgatcaaggtgatgtttattagattaggtcattgtaaattttcagttctctataatgaagg

SEQ ID NO: 137316 - protein, 459 aa, Debaryomyces occidentalis; identical to SEQ ID NO: 57159

SEQ ID NO: 137317 - DNA, 1344 bp, Escherichia coli
  CDS (1)..(1344): transl_table=11
atggatcagacatattctctggagtcattcctcaaccatgtccaaaagcgcgacccgaatcaaaccgagttcgcgcaagccgttcgtgaagtaatgaccacactctggccttttcttgaacaaaatccaaaatatcgccagatgtcattactggagcgtctggttgaaccggagcgcgtgatccagtttcgcgtggtatgggttgatgatcgcaaccagatacaggtcaaccgtgcatggcgtgtgcagttcagctctgccatcggcccgtacaaaggcggtatgcgcttccatccgtcagttaacctttccattctcaaattcctcggctttgaacaaaccttcaaaaatgccctgactactctgccgatgggcggtggtaaaggcggcagcgatttcgatccgaaaggaaaaagcgaaggtgaagtgatgcgtttttgccaggcgctgatgactgaactgtatcgccacctgggcgcggataccgacgttccggcaggtgatatcggggttggtggtcgtgaagtcggctttatggcggggatgatgaaaaagctctccaacaataccgcctgcgtcttcaccggtaagggcctttcatttggcggcagtcttattcgcccggaagctaccggctacggtctggtttatttcacagaagcaatgctaaaacgccacggtatgggttttgaagggatgcgcgtttccgtttctggctccggcaacgtcgcccagtacgctatcgaaaaagcgatggaatttggtgctcgtgtgatcactgcgtcagactccagcggcactgtagttgatgaaagcggattcacgaaagagaaactggcacgtcttatcgaaatcaaagccagccgcgatggtcgagtggcagattacgccaaagaatttggtctggtctatctcgaaggccaacagccgtggtctctaccggttgatatcgccctgccttgcgccacccagaatgaactggatgttgacgccgcgcatcagcttatcgctaatggcgttaaagccgtcgccgaaggggcaaatatgccgaccaccatcgaagcgactgaactgttccagcaggcaggcgtactatttgcaccgggtaaagcggctaatgctggtggcgtcgctacatcgggcctggaaatggcacaaaacgctgcgcgcctgggctggaaagccgagaaagttgacgcacgtttgcatcacatcatgctggatatccaccatgcctgtgttgagcatggtggtgaaggtgagcaaaccaactacgtgcagggcgcgaacattgccggttttgtgaaggttgccgatgcgatgctggcgcagggtgtgatttaa

SEQ ID NO: 137318 - protein, 447 aa, Escherichia coli
MDQTYSLESFLNHVQKRDPNQTEFAQAVREVMTTLWPFLEQNPKYRQMSLLERLVEPERVIQFRVVWVDDRNQIQVNRAWRVQFSSAIGPYKGGMRFHPSVNLSILKFLGFEQTFKNALTTLPMGGGKGGSDFDPKGKSEGEVMRFCQALMTELYRHLGADTDVPAGDIGVGGREVGFMAGMMKKLSNNTACVFTGKGLSFGGSLIRPEATGYGLVYFTEAMLKRHGMGFEGMRVSVSGSGNVAQYAIEKAMEFGARVITASDSSGTVVDESGFTKEKLARLIEIKASRDGRVADYAKEFGLVYLEGQQPWSLPVDIALPCATQNELDVDAAHQLIANGVKAVAEGANMPTTIEATELFQQAGVLFAPGKAANAGGVATSGLEMAQNAARLGWKAEKVDARLHHIMLDIHHACVEHGGEGEQTNYVQGANIAGFVKVADAMLAQGVI

SEQ ID NO: 137319 - DNA, 1356 bp, Gibberella fujikuroi; identical to SEQ ID NO: 57160
  CDS (1)..(1356)

SEQ ID NO: 137320 - protein, 451 aa, Gibberella fujikuroi; identical to SEQ ID NO: 57161

SEQ ID NO: 137321 - DNA, 1931 bp, Hebeloma cylindrosporum
  CDS (50)..(1402)
gcagttcctcctccttccgcatccaccacatcctacctcctcttttacaatggtcaagcccttcgaacccgaattccaacaggctttggacgagctcaccaccagcttgcaaccattcttggacgccaacccccagtacaagaaagccctggagatcgtccaggtccccgagcgtgtcttgcaattccgtgttgtctgggaagatgaccaaggggtcgcccaagttaaccatggtttccgtgttcagtacaactctgcccttggtccatacaaaggtggtctccgccttcacccctctgtgaacttgtccattctcaagttcctcggattcgaacaaacattcaagaacgccctcaccggcctcagcatgggtggaggaaagggtggatctgactttgaccccaagggcaagtcggacagcgagatcaggcgtttctgcttttccttcatgggcgagctcttccgccacatcggctcggacaccgatgtcccggccggagatattggaacgggtggtcgcgagatcggtttcttgtttggcgcgtacaagaagctcaggaatgagttcactggtatgctcactggcaagggcctaacatggggaggaagcttcatccgtccggaggctactggatacggcttaatctacttcgtcgagcatatgattgccaaggcttgtcccgagtatagccttgataagccctccacacttgttgccatctccggctctggcaatgttgcccagttcaccgccctcaaggtcatcgagcttggcgccaccgtcctttccctttccgactctaaggggtccctcatctccgacaagggatataccaaggagttcatcaggaaagtcgccgacctcaagttgaagggaggaagccttgcgtctctggctaacgaggagggctacacttatcacgctggtgctcgcccatggaccctcatccccaccatccacatcgcactccccggtgctactcagaacgaggtttccgccgaagaggccgaggcattgctcaaggcgggtgtccgcatcgtcgcggagggctccaacatgggttgcactgccgacgccatcgacatcttcgagtcttcccgtaaagctggtccaggaggagtttggtacgctcccggaaaggcttccaactgcggaggtgtcgctgtgtctggtctcgagatggcccaaaacagtcaacgtctcgcttggaccacacaggaggtcgactctaagttgaaggatatcatggctgagtgctacggaatttgcttgactgcaggaaccaagtggtctggcgaagaactcaccgatgaggtcctccccagcttgctctctggcgctaacgttgccggcttcatcaaagtcgccgatgccatgaaagcccaaggagactggtggtaaatggctcgccctcaaacccaccgattactacccacccgattacccacttacccgcacatcatcaccacccactctactcacacctcctccgcaccgcactccaaaattacggacgatccgcccatgatcgaacacaccggatgcattactcattatttattaccctaatccgcccaacttatatccgccccatccgcccaggatagaatctgctgagcgtgcgggctacgccctcgggaaagttcccggatcctcgagcttgttgaactttgggtcctcacgacactgccttcataggctcccgtttgttatcgtttgctctgctatcgccacgaactatcatcatcctcatcatgaccctcacatccaatcattccccatgcccctgtacttagtatcgagcttgtataccagccccccacacccctgtcattcattacctcaagctgttagaatattcgtaatagttatcacgatgtatttgatgacgttcgacaaataaatctgacacgaatttaaaaaaaaaaaa

SEQ ID NO: 137322 - protein, 450 aa, Hebeloma cylindrosporum; identical to SEQ ID NO: 57163

SEQ ID NO: 137323 - DNA, 1347 bp, Helicobacter pylori J99
  CDS (1)..(1347): transl_table=11
atgtatgttgaaaaaattctccagtctttacagaaaaaatacccttatcaaaaagagttccatcaagccgtctatgaagctatcacttctttaaaaccccttttagacagcgataaaagctatgaaaagcatgcggttttagagcgtttgattgagcctgaaagggagattttttttagggtgtgttggctagatgataaccatcaaatccaagtcaatcgggggtgtagggttgaattcaattcagcgattggcccttataaggggggcttgagattccaccctagcgtgaatgaaagcgtgatcaagtttttaggctttgagcaagtgttgaaaaattcgctcaccactttggctatggggggcgctaagggggggagcgattttgaccctaaagaaaagagcgagcatgagatcatgcgtttttgccaggcgttcatgaatgaattataccgccatattggagccacgactgatgtgccagctggggatattggagtgggcgaaagagagattggctatctgtttgggcaatacaaaaaattagtcaatcgttttgagggcgtattgaccggtaaaggactcacttatggggggagcttgtgcagaaaagaagccaccggttatggttgcgtgtattttgcagaagaaatgctgcaagaaaggaacagctctttagaaggtaaggtttgcagcgtttctgggagcggtaatgtcgctatttataccattgaaaaactgcttcaaataggagccaaaccggtaacggcgagcgattctaatggcatgatttatgataaagacggcattgatttagagcttttgaaagagattaaagaagcgcgtcgtgggaggatcaaagaatacgctttagaaaaaactagcgcaaaatacaccccaacagaaaattaccccaaaggggggaatgccatatggcatgtgccttgttttgcggcttttcctagcgcgactgagaatgaattgagcgttttagacgctaaaaccctcctttctaatgggtgtaaatgcgtggctgaaggggcgaacatgccctcaagcaatgaagcgattgaattgttcttacaggctaagatttcttatggtataggcaaggcggctaatgctgggggggtgagcgtgagcggcttggaaatggcgcaaaacgcgagcatgcacccttggagttttgaagtggtggatgcgaaattacaccatattatgaaagagatttataagaatgtctctcaaaccgctaaagagtttaaagaccctactaatttcgttttaggggctaatatcgctggttttagaaaagtggcgtctgcgatgatagcgcaaggggtttga

SEQ ID NO: 137324 - protein, 448 aa, Helicobacter pylori J99
MYVEKILQSLQKKYPYQKEFHQAVYEAITSLKPLLDSDKSYEKHAVLERLIEPEREIFFRVCWLDDNHQIQVNRGCRVEFNSAIGPYKGGLRFHPSVNESVIKFLGFEQVLKNSLTTLAMGGAKGGSDFDPKEKSEHEIMRFCQAFMNELYRHIGATTDVPAGDIGVGEREIGYLFGQYKKLVNRFEGVLTGKGLTYGGSLCRKEATGYGCVYFAEEMLQERNSSLEGKVCSVSGSGNVAIYTIEKLLQIGAKPVTASDSNGMIYDKDGIDLELLKEIKEARRGRIKEYALEKTSAKYTPTENYPKGGNAIWHVPCFAAFPSATENELSVLDAKTLLSNGCKCVAEGANMPSSNEAIELFLQAKISYGIGKAANAGGVSVSGLEMAQNASMHPWSFEVVDAKLHHIMKEIYKNVSQTAKEFKDPTNFVLGANIAGFRKVASAMIAQGV

SEQ ID NO: 137325 - DNA, 1347 bp, Helicobacter pylori
  CDS (1)..(1347): transl_table=11
atgtatgttgaaaaaattctccagtctttacagaaaaaatacccttatcaaaaagagttccatcaagccgtctatgaagctatcacttctttaaaaccccttttagacagcgataaaagttatgaaaagcatgcgattttagagcgtttgattgagcctgaaagggagattttttttagggtgtgttggctagatgataacaatcaaatccaagtcaatcgggggtgtagggttgagtttaattcggctattggcccttataaggggggtttgagattccaccctagcgtgaatgaaagcgtgatcaagtttttaggctttgagcaagtgttgaaaaattcgctcaccactttggctatggggggcgctaagggggggagcgattttgaccctaaagggaagagcgagcatgagatcatgcgtttttgccaagcgttcatgaatgaattataccgccatattggagccacgactgatgtgccagctggggatattggagtgggcgaaagagagattggctatctgtttgggcaatacaaaaaattagtcaatcgttttgagggcgtattgaccggtaaaggactcacttatggagggagcttgtgcagaaaagaagctaccggttatgggtgcgtgtattttgctgaagaaatgttgcaagaaaggaacagctctttagagggtaaggtttgcagcgtttctgggagcgggaatgtcgcaatttataccattgaaaaattgcttcaaataggagctaaaccggtaacggcgagcgattctaatggcatgatttatgacaaagacggcattgatttagagcttttgaaagaaattaaagaagtgcgtcgtgggaggatcaaagaatacgctttagaaaaaaagagcgcggaatacaccccaacagaaaattaccccaaaggggggaatgcggtgtggcatgtgccttgttttgcggcttttcctagtgcgaccgagaatgaattgagcgttttagacgccaaaaccctcctttctaatgggtgtaaatgcgtggctgaaggggcgaacatgccctcaagcaatgaagcgattggattgtttttgcaggctaagatttcttatggtataggcaaggcggctaatgctgggggggtgagcgtgagcggcttggaaatggcacaaaacgcaagcatgcacccttggagttttgaagtggtggatgcgaaattgcaccatattatgaaagagatttataagaatgtctctcaaaccgctaaagagtttaaagaccctactaattttgtattaggggccaatatcgctggttttagaaaagtagcgtctgcgatgatagcgcaaggggtttga

SEQ ID NO: 137326 - protein, 448 aa, Helicobacter pylori
MYVEKILQSLQKKYPYQKEFHQAVYEAITSLKPLLDSDKSYEKHAILERLIEPEREIFFRVCWLDDNNQIQVNRGCRVEFNSAIGPYKGGLRFHPSVNESVIKFLGFEQVLKNSLTTLAMGGAKGGSDFDPKGKSEHEIMRFCQAFMNELYRHIGATTDVPAGDIGVGEREIGYLFGQYKKLVNRFEGVLTGKGLTYGGSLCRKEATGYGCVYFAEEMLQERNSSLEGKVCSVSGSGNVAIYTIEKLLQIGAKPVTASDSNGMIYDKDGIDLELLKEIKEVRRGRIKEYALEKKSAEYTPTENYPKGGNAVWHVPCFAAFPSATENELSVLDAKTLLSNGCKCVAEGANMPSSNEAIGLFLQAKISYGIGKAANAGGVSVSGLEMAQNASMHPWSFEVVDAKLHHIMKEIYKNVSQTAKEFKDPTNFVLGANIAGFRKVASAMIAQGV

SEQ ID NO: 137327 - DNA, 1640 bp, Laccaria bicolor
  CDS (83)..(1435)
gcacgagccttcgcctctcggctcaccacctagactctcctcctacaactaccaccaccaccaccaccactatccaacagccatggtcctcccagtcgaacctgaatacgagcaagcactctccgaactcccaaacagtttgaagccctttttggcagcgaacccagactacggaaaggccctcgagatcgtcccaattccggagcgtgtgctccaattccgtgtaatttgggaggatgatcagggcaaggcccaagtcaaccgaggattccgcgtccagtataactctgctcttggaccctataaaggaggtctccgacttcatccctccgtcaacctctccatcctcaaattcctcgggttcgaacaaaccttcaagaatgctctgactggcttgagcatgggaggaggaaagggtgggtccgactttgaccccaagggcaagtcggacggcgagatcaggcgtttctgcacttcgttcatgtctgagctgttcaggcatatcggtcaggacactgatgttcccgctggtgacatcggaactggtgctcgggagatcggttacctctttggtgcttacaagaaactccagaacgagttcgtcggcatgctcactggaaagggtctcgcgtggggaggaagcttcatccgtcccgaggcgacaggttacggtctgatctactacgtcgagcacatgatcgccaaagccgccccggagtacagtctctccaagcccgagactcttgttgccatctcaggatcagggaacgtcggccaattcaccgcactcaaagtcatcgagttgggtgctaccgtcctctccctctccgactccaagggttcccttatcgccgagaagggctacaccaaggaattcatcaaggagatcggacaactgaagctcaagggtggcgctcttgaatcgttggctcaaagggagggctacacataccatgctggcaaacgcccatggagccttctccccgttgtccacgttgcgctcccaggcgcgacccaaaatgaagtctccaaaacggaggctgaagacctcatcaaggctggcgtgaggattgtagctgagggctcgaacatgggatgcacggaagacgccatcgccgtcttcgaagaatctcgtaaagctggcgctggcggcgtgtggtacgccccgggcaaagcgtccaactgtggtggtgttgcggtctctggtctggagatggcccagaacagtcagcgactcgcctggacgacggatcaagtcgaccagaagctgaagaaaatcatggctgagtgctatgagatctgtctcagcgcaggcacgaaatggtcgggtgaggagatcaaggacggtgtcctaccaagcttgctctccggcgcgaacgttgctggctttatcaaagttgcggacgcgatgagggagcatggcgactggtggtgagccagtcacactactcaggccctttgtcaagactcacctgaggctcttctgggaacttctatttgctttcttagttccgttttggtttcgatttcctatttacctgtcatcgctatgtccatcgccatacctcttatattcccgcactgtctgtacttatatgtaattcgcactcccccaaaacaatgtatagggttgaccactc

SEQ ID NO: 137328 - protein, 450 aa, Laccaria bicolor; identical to SEQ ID NO: 57165

SEQ ID NO: 137329 - DNA, 1365 bp, Neurospora crassa; identical to SEQ ID NO: 57166
  CDS (1)..(1365)

SEQ ID NO: 137330 - protein, 454 aa, Neurospora crassa; identical to SEQ ID NO: 57167

SEQ ID NO: 137331 - DNA, 1365 bp, Neurospora intermedia; identical to SEQ ID NO: 57168
  CDS (1)..(1365)

SEQ ID NO: 137332 - protein, 454 aa, Neurospora intermedia; identical to SEQ ID NO: 57169

SEQ ID NO: 137333 - DNA, 1365 bp, Neurospora sitophila; identical to SEQ ID NO: 57170
  CDS (1)..(1365)

SEQ ID NO: 137334 - protein, 454 aa, Neurospora sitophila; identical to SEQ ID NO: 57171

SEQ ID NO: 137335 - DNA, 1386 bp, Penicillium chrysogenum; identical to SEQ ID NO: 57172
  CDS (1)..(1386)

SEQ ID NO: 137336 - protein, 461 aa, Penicillium chrysogenum; identical to SEQ ID NO: 57173

SEQ ID NO: 137337 - DNA, 1335 bp, Prevotella ruminicola; identical to SEQ ID NO: 57174
  CDS (1)..(1335): transl_table=11

SEQ ID NO: 137338 - protein, 444 aa, Prevotella ruminicola; identical to SEQ ID NO: 57175

SEQ ID NO: 137339 - DNA, 1347 bp, Psychrobacter sp; identical to SEQ ID NO: 57176
  CDS (1)..(1347): transl_table=11

SEQ ID NO: 137340 - protein, 448 aa, Psychrobacter sp; identical to SEQ ID NO: 57177

SEQ ID NO: 137341 - DNA, 1365 bp, Saccharomyces bayanus; identical to SEQ ID NO: 57178
  CDS (1)..(1365)

SEQ ID NO: 137342 - protein, 454 aa, Saccharomyces bayanus; identical to SEQ ID NO: 57179

SEQ ID NO: 137343 - DNA, 1344 bp, Salmonella typhimurium
  CDS (1)..(1344): transl_table=11
atggatcagacatgttctctggaatcgttcctcaaccatgtacaaaagcgcgacccgcatcaaaccgagttcgcgcaagccgtccgtgaagtcatgaccaccctgtggccgtttcttgaacaaaacccccgttaccgccacatgtctttactggaacgtttggttgaaccagagcgcgtaatccagtttcgcgtagtgtggctggacgacaaaaaccaggtgcaggtaaatcgcgcctggcgcgtgcagttcaactctgctatcggcccctataaaggcggtatgcgcttccatccttcggtaaacctttccatccttaagttcctcggctttgagcaaacctttaaaaatgccctcaccacgttgccgatgggcggcggtaaaggcggcagcgatttcgatccgaaagggaaaagcgaaggcgaagtgatgcgtttctgccaggcgctgatgactgaactgtatcgccatttagggccggataccgacgtgcctgccggggatatcggcgtgggcgggcgcgaagtgggctttatggcgggaatgatgcgcaagctttccaataacagctcctgcgtcttcaccggcaaagggctttccttcggcggcagcctgattcgcccggaggcgacgggctatggcctggtctactttaccgaagcgatgcttaaacgtcatggtctcggtttcgaagggatgcgcgtcgccgtgtccggctccggcaacgtagcgcaatacgccattgagaaagcgatggcctttggcgcgcgcgtggttaccgcgtcggattcgagcgggacggtggtcgatgaaagtggcttcacgccagagaagctggcgcgtctgtgtgaaattaaagccagccgtgacggtcgcgtcgctgactacgcccgtgagtttggcttaacctatctggaaggccagcagccctggagcgtaccggtggatatcgccctgccatgcgcgacgcagaacgaactggacgttgacgccgcgcgcgtactgattgccaatggcgtaaaagccgtggcggaaggggcaaatatgccaaccacgattgaagcgaccgatctcttccttgaagcgggcgtactgtttgcgccgggtaaagccgccaacgcgggcggcgtggcgacatcggggctggaaatggcgcagaacgccgcgcggttgagctggaaagccgagaaagtggacgcccgtctgcatcacattatgctggatatccaccacgcctgtgtcgaatacggcggcgacaataagcataccaactacgttcagggcgccaacatcgccggtttcgtgaaagtcgccgacgccatgctggcgcagggcgtcatttaa

SEQ ID NO: 137344 - protein, 447 aa, Salmonella typhimurium
MDQTCSLESFLNHVQKRDPHQTEFAQAVREVMTTLWPFLEQNPRYRHMSLLERLVEPERVIQFRVVWLDDKNQVQVNRAWRVQFNSAIGPYKGGMRFHPSVNLSILKFLGFEQTFKNALTTLPMGGGKGGSDFDPKGKSEGEVMRFCQALMTELYRHLGPDTDVPAGDIGVGGREVGFMAGMMRKLSNNSSCVFTGKGLSFGGSLIRPEATGYGLVYFTEAMLKRHGLGFEGMRVAVSGSGNVAQYAIEKAMAFGARVVTASDSSGTVVDESGFTPEKLARLCEIKASRDGRVADYAREFGLTYLEGQQPWSVPVDIALPCATQNELDVDAARVLIANGVKAVAEGANMPTTIEATDLFLEAGVLFAPGKAANAGGVATSGLEMAQNAARLSWKAEKVDARLHHIMLDIHHACVEYGGDNKHTNYVQGANIAGFVKVADAMLAQGVI

SEQ ID NO: 137345 - DNA, 1356 bp, Schizosaccharomyces pombe; identical to SEQ ID NO: 57180
  CDS (1)..(1356)

SEQ ID NO: 137346 - protein, 451 aa, Schizosaccharomyces pombe; identical to SEQ ID NO: 57181

SEQ ID NO: 137347 - DNA, 1374 bp, Tuber borchii; identical to SEQ ID NO: 57182
  CDS (1)..(1374)

SEQ ID NO: 137348 - protein, 457 aa, Tuber borchii; identical to SEQ ID NO: 57183

SEQ ID NO: 137349 - DNA, 1236 bp, Oryza sativa; identical to SEQ ID NO: 57196
  CDS (1)..(1236)

SEQ ID NO: 137350 - protein, 411 aa, Oryza sativa; identical to SEQ ID NO: 57197

SEQ ID NO: 137351 - DNA, 1236 bp, Brassica napus; identical to SEQ ID NO: 57200
  CDS (1)..(1236)

SEQ ID NO: 137352 - protein, 411 aa, Brassica napus; identical to SEQ ID NO: 57201

SEQ ID NO: 137353 - DNA, 1239 bp, Glycine max; identical to SEQ ID NO: 57202
  CDS (1)..(1239)

SEQ ID NO: 137354 - protein, 412 aa, Glycine max; identical to SEQ ID NO: 57203

SEQ ID NO: 137355 - DNA, 1236 bp, Brassica napus; identical to SEQ ID NO: 57204
  CDS (1)..(1236)

SEQ ID NO: 137356 - protein, 411 aa, Brassica napus; identical to SEQ ID NO: 57205

SEQ ID NO: 137357 - DNA, 1236 bp, Brassica napus; identical to SEQ ID NO: 57206
  CDS (1)..(1236)

SEQ ID NO: 137358 - protein, 411 aa, Brassica napus; identical to SEQ ID NO: 57207

SEQ ID NO: 137359 - DNA, 1236 bp, Brassica napus; identical to SEQ ID NO: 57208
  CDS (1)..(1236)

SEQ ID NO: 137360 - protein, 411 aa, Brassica napus; identical to SEQ ID NO: 57209

SEQ ID NO: 137361 - DNA, 1236 bp, Brassica napus; identical to SEQ ID NO: 57210
  CDS (1)..(1236)

SEQ ID NO: 137362 - protein, 411 aa, Brassica napus; identical to SEQ ID NO: 57211

SEQ ID NO: 137363 - DNA, 1914 bp, Glycine max; identical to SEQ ID NO: 57212
  CDS (1)..(1914)

SEQ ID NO: 137364 - protein, 637 aa, Glycine max; identical to SEQ ID NO: 57213

SEQ ID NO: 137365 - DNA, 1914 bp, Glycine max; identical to SEQ ID NO: 57214
  CDS (1)..(1914)

SEQ ID NO: 137366 - protein, 637 aa, Glycine max; identical to SEQ ID NO: 57215

SEQ ID NO: 137367 - DNA, 1311 bp, Glycine max
  CDS (1)..(1311)
atgcttcttgacactctcacattatttctaggatccctttttttcatttcacttcacttcatccatctttcagctatgaacgctctagcagccaccaaccgtaacttccgacgtgcagctcacattctcggtttggacactaagcttgagaatagccttctcattcccttcagggaaatcaaagttgaatgcacgatcccaaaagatgacggaacactagtatcatatgtaggattcagaattcaacatgacaatgctcgtggaccgatgaaaggagggattcgttatcacccggaggttgaccctgatgaagtgaatgctctagctcagctaatgacatggaagacagccgtagcagacattccttatggaggagcaaagggtggaattggctgcaacccgagggacctcagcgtcagcgagttagaacgtctaactcgcgttttcacccaaaagattcatgatctcattggtattcagagagatgttcctgcccctgacatgggaactaattcacagacaatggcttggattcttgatgagtattctaagtttcatggacattcaccagcagttgtgactgggaaacctatagatcttggaggttcattgggaagagaggctgccacaggattgggagtgatttttgcaacagaggctttatttgctgaatacgggaaatcaatttctgatatgacatttgtaatccagggatttggaaacgtgggcacttgggctgctaagtcaatttatgagagagggggtaaggtgatagctgtgagtgacatcagtggtgctattagaaacccaaatggaatcgatatacctgctctgctgaaacacaaggaaggcaatggaaatttgaaggaattctcaggagcagatatcatggatcctgatgaattgcttgttcatgaatgtgatgttctcatcccttgtgccttgggaggagttctcaacaaggaaaatgctgctgatgtgaaagcgaaatttataatagaagctgcaaatcatccaactgaccctgatgctgatgagatattgtctaagaaaggagtcatcatattacccgacatatatgctaatgccggtggagtgactgtgagctactttgagtgggttcagaatattcagggatttatgtgggatgaagagaaagtgaaccgtgagctgaaaaagtatatgactaaagccttccgcaacataaaggcaatgtgtcaaattcataactgtgacttgcgaatgggagccttcagtctcggagtgaaccgtgttgctcgagctacacttctcaggggttgggaagcttaa

SEQ ID NO: 137368 - protein, 436 aa, Glycine max; identical to SEQ ID NO: 56897

SEQ ID NO: 137369 - DNA, 1239 bp, Glycine max; identical to SEQ ID NO: 57216
  CDS (1)..(1239)

SEQ ID NO: 137370 - protein, 412 aa, Glycine max; identical to SEQ ID NO: 57217

SEQ ID NO: 137371 - DNA, 1236 bp, Zea mays; identical to SEQ ID NO: 57218
  CDS (1)..(1236)

SEQ ID NO: 137372 - protein, 411 aa, Zea mays; identical to SEQ ID NO: 57219

SEQ ID NO: 137373 - DNA, 1947 bp, Zea mays; identical to SEQ ID NO: 57220
  CDS (1)..(1947)

SEQ ID NO: 137374 - protein, 648 aa, Zea mays; identical to SEQ ID NO: 57221

SEQ ID NO: 137375 - DNA, 1236 bp, Zea mays; identical to SEQ ID NO: 57222
  CDS (1)..(1236)

SEQ ID NO: 137376 - protein, 411 aa, Zea mays; identical to SEQ ID NO: 57223

SEQ ID NO: 137377 - DNA, 1236 bp, Zea mays; identical to SEQ ID NO: 57224
  CDS (1)..(1236)

SEQ ID NO: 137378 - protein, 411 aa, Zea mays; identical to SEQ ID NO: 57225

SEQ ID NO: 137379 - DNA, 1236 bp, Zea mays; identical to SEQ ID NO: 57226
  CDS (1)..(1236)

SEQ ID NO: 137380 - protein, 411 aa, Zea mays; identical to SEQ ID NO: 57227

SEQ ID NO: 137381 - DNA, 24 bp, Artificial sequence
  primer
atgacaagcgaaccagagtttcag

SEQ ID NO: 137382 - DNA, 24 bp, Artificial sequence
  primer
ctaaaaaacgtctccctggtcaag

SEQ ID NO: 137383 - protein, 558 aa, Artificial sequence
  consensus sequence
  Variant (2)..(13): Xaa in position 2 to 13 is any amino acid
  Variant (14)..(37): Xaa in position 14 to 37 is any or no amino acid
  Variant (39)..(39): Xaa in position 39 is any amino acid
  Variant (41)..(43): Xaa in position 41 to 43 is any amino acid
  Variant (44)..(50): Xaa in position 44 to 50 is any or no amino acid
  Variant (52)..(52): Xaa in position 52 is any amino acid
  Variant (54)..(59): Xaa in position 54 to 59 is any amino acid
  Variant (61)..(61): Xaa in position 61 is any amino acid
  Variant (63)..(63): Xaa in position 63 is any amino acid
  Variant (65)..(67): Xaa in position 65 to 67 is any amino acid
  Variant (69)..(69): Xaa in position 69 is any amino acid
  Variant (72)..(72): Xaa in position 72 is any amino acid
  Variant (76)..(76): Xaa in position 76 is any amino acid
  Variant (78)..(78): Xaa in position 78 is any amino acid
  Variant (81)..(81): Xaa in position 81 is any amino acid
  Variant (83)..(89): Xaa in position 83 to 89 is any amino acid
  Variant (91)..(96): Xaa in position 91 to 96 is any amino acid
  Variant (98)..(103): Xaa in position 98 to 103 is any amino acid
  Variant (105)..(105): Xaa in position 105 is any amino acid
  Variant (108)..(108): Xaa in position 108 is any amino acid
  Variant (112)..(115): Xaa in position 112 to 115 is any amino acid
  Variant (117)..(119): Xaa in position 117 to 119 is any amino acid
  Variant (121)..(122): Xaa in position 121 to 122 is any amino acid
  Variant (124)..(125): Xaa in position 124 to 125 is any amino acid
  Variant (127)..(139): Xaa in position 127 to 139 is any amino acid
  Variant (140)..(141): Xaa in position 140 to 141 is any or no amino acid
  Variant (143)..(145): Xaa in position 143 to 145 is any amino acid
  Variant (147)..(147): Xaa in position 147 is any amino acid
  Variant (150)..(150): Xaa in position 150 is any amino acid
  Variant (152)..(165): Xaa in position 152 to 165 is any amino acid
  Variant (167)..(177): Xaa in position 167 to 177 is any amino acid
  Variant (178)..(181): Xaa in position 178 to 181 is any or no amino acid
  Variant (185)..(188): Xaa in position 185 to 188 is any amino acid
  Variant (192)..(193): Xaa in position 192 to 193 is any amino acid
  Variant (195)..(196): Xaa in position 195 to 196 is any amino acid
  Variant (200)..(200): Xaa in position 200 is any amino acid
  Variant (202)..(218): Xaa in position 202 to 218 is any amino acid
  Variant (219)..(238): Xaa in position 219 to 238 is any or no amino acid
  Variant (240)..(244): Xaa in position 240 to 244 is any amino acid
  Variant (245)..(245): Xaa in position 245 is any or no amino acid
  Variant (247)..(247): Xaa in position 247 is any amino acid
  Variant (251)..(261): Xaa in position 251 to 261 is any amino acid
  Variant (262)..(264): Xaa in position 262 to 264 is any or no amino acid
  Variant (266)..(270): Xaa in position 266 to 270 is any amino acid
  Variant (271)..(271): Xaa in position 271 is any or no amino acid
  Variant (274)..(275): Xaa in position 274 to 275 is any amino acid
  Variant (277)..(282): Xaa in position 277 to 282 is any amino acid
  Variant (283)..(287): Xaa in position 283 to 287 is any or no amino acid
  Variant (289)..(322): Xaa in position 289 to 322 is any amino acid
  Variant (323)..(339): Xaa in position 323 to 339 is any or no amino acid
  Variant (341)..(343): Xaa in position 341 to 343 is any amino acid
  Variant (345)..(345): Xaa in position 345 is any amino acid
  Variant (347)..(365): Xaa in position 347 to 365 is any amino acid
  Variant (366)..(369): Xaa in position 366 to 369 is any or no amino acid
  Variant (371)..(371): Xaa in position 371 is any amino acid
  Variant (374)..(374): Xaa in position 374 is any amino acid
  Variant (376)..(379): Xaa in position 376 to 379 is any amino acid
  Variant (381)..(392): Xaa in position 381 to 392 is any amino acid
  Variant (393)..(403): Xaa in position 393 to 403 is any or no amino acid
  Variant (405)..(408): Xaa in position 405 to 408 is any amino acid
  Variant (410)..(410): Xaa in position 410 is any amino acid
  Variant (414)..(415): Xaa in position 414 to 415 is any amino acid
  Variant (417)..(418): Xaa in position 417 to 418 is any amino acid
  Variant (420)..(421): Xaa in position 420 to 421 is any amino acid
  Variant (424)..(428): Xaa in position 424 to 428 is any amino acid
  Variant (429)..(492): Xaa in position 429 to 492 is any or no amino acid
  Variant (494)..(497): Xaa in position 494 to 497 is any amino acid
  Variant (499)..(501): Xaa in position 499 to 501 is any amino acid
  Variant (503)..(505): Xaa in position 503 to 505 is any amino acid
  Variant (507)..(527): Xaa in position 507 to 527 is any amino acid
  Variant (528)..(541): Xaa in position 528 to 541 is any or no amino acid
  Variant (543)..(549): Xaa in position 543 to 549 is any amino acid
  Variant (551)..(552): Xaa in position 551 to 552 is any amino acid
  Variant (554)..(557): Xaa in position 554 to 557 is any amino acid
AXXXXXXXXXXXXXXXXXXXXXXXXXXXXXXXXXXXXPXRXXXXXXXXXXDXGXXXXXXGXRXQXXXAXGPXKGGXRXHPXVXXXXXXXLXXXXXXKXXXXXXPXGGXKGGXXXXPXXXSXXEXXRXXXXXXXXXXXXXXXGXXXDXPAXDXXXXXXXXXXXXXXYXXXXXXXXXXXXXXXTGKXXXXGGSXXRXXATGXGXXXXXXXXXXXXXXXXXXXXXXXXXXXXXXXXXXXXXGXXXXXXGXGNVXXXXXXXXXXXXXXGXXXXXXSDXXGXXXXXXXXXXXGXXXXXXXXXXXXXXXXXXXXXXXXXXXXXXXXXXXXXXXXXXXXXXXXXXXDXXXPXAXXXXXXXXXXXXXXXXXXXXXXXEXANXPXXXXAXXXXXXXXXXXXXXXXXXXXXXXPXXXXNXGGVXXSXXEXXQNXXXXXXXXXXXXXXXXXXXXXXXXXXXXXXXXXXXXXXXXXXXXXXXXXXXXXXXXXXXXXXXXXXXXXWXXXXVXXXLXXXMXXXXXXXXXXXXXXXXXXXXXXXXXXXXXXXXXXXAXXXXXXXVXXAXXXXG

SEQ ID NO: 137384 - protein, 30 aa, Artificial sequence
  protein pattern
  Variant (2)..(2): Xaa in position 2 is any amino acid
  Variant (4)..(8): Xaa in position 4 to 8 is any amino acid
  Variant (11)..(11): Xaa in position 11 is any amino acid
  Variant (15)..(15): Xaa in position 15 is any amino acid
  Variant (17)..(17): Xaa in position 17 is any amino acid
  Variant (19)..(28): Xaa in position 19 to 28 is any amino acid
  Variant (30)..(30): Xaa in position 30 is Ala, Gly or Ser
RXQXXXXXGPXKGGXRXHXXXXXXXXXXLX

SEQ ID NO: 137385 - protein, 25 aa, Artificial sequence
  protein pattern
  Variant (2)..(4): Xaa in position 2 to 4 is any amino acid
  Variant (6)..(6): Xaa in position 6 is Ile or Val
  Variant (9)..(9): Xaa in position 9 is Gly or Pro
  Variant (11)..(11): Xaa in position 11 is Ile, Met or Val
  Variant (12)..(12): Xaa in position 12 is any amino acid
  Variant (13)..(13): Xaa in position 13 is Thr or Val
  Variant (14)..(14): Xaa in position 14 is Asp, Gly, Asn, Ser or Thr
  Variant (15)..(17): Xaa in position 15 to 17 is any amino acid
  Variant (18)..(18): Xaa in position 18 is Ile, Met or Val
  Variant (19)..(19): Xaa in position 19 is Ala, Gly, Asn or Ser
  Variant (20)..(20): Xaa in position 20 is Phe, Trp or Tyr
  Variant (21)..(22): Xaa in position 21 to 22 is any amino acid
  Variant (23)..(23): Xaa in position 23 is Asp or Gly
  Variant (24)..(24): Xaa in position 24 is any amino acid
GXXXDXPAXDXXXXXXXXXXXXXXY

SEQ ID NO: 137386 - protein, 22 aa, Artificial sequence
  protein pattern
  Variant (3)..(3): Xaa in position 3 is Lys or Arg
  Variant (4)..(4): Xaa in position 4 is Ala, Asp, Gly, Pro or Ser
  Variant (5)..(7): Xaa in position 5 to 7 is any amino acid
  Variant (11)..(12): Xaa in position 11 to 12 is any amino acid
  Variant (14)..(15): Xaa in position 14 to 15 is any amino acid
  Variant (18)..(19): Xaa in position 18 to 19 is any or no amino acid
  Variant (21)..(21): Xaa in position 21 is any or no amino acid
TGXXXXXGGSXXRXXATXXGXG

SEQ ID NO: 137387 - DNA, 1581 bp, Saccharomyces cerevisiae
  CDS (1)..(1581)
atgacaatttctaatttgttaaagcagagagttaggtatgctccctatctgaaaaaagttaaggaagctcacgagcttattccattgttcaagaatggtcagtaccttgggtggtccggttttacaggagtgggtactcccaaggcagtgccggaggcactgatagatcacgtggagaagaacaatttacaagggaagttgagattcaacctttttgttggagcttctgctggtccagaggaaaaccgttgggctgaacacgacatgatcattaagagagcccctcatcaagtagggaaacccattgcaaaggcaattaaccagggtagaattgagttctttgataaacatctgtccatgttccctcaggatctgacatacgggttctacaccagggaaagaaaagacaacaaaatccttgattatactataatcgaggcaacggccattaaagaggacgggtctatcgtcccaggtccctctgtcggtggttctccagaattcattacagtcagtgataaagtgattattgaggttaacacggctacgccttcgttcgagggtattcacgatatagacatgcccgtgaacccacctttcaggaaaccatacccatatctgaaagtggacgacaagtgtggtgttgactccatcccggttgatcctgaaaaggttgttgcgattgtggagtccaccatgagggaccaggtcccaccaaatacgccctctgacgacatgtccagggctattgcaggtcatttggtcgagtttttcagaaacgaggtaaaacatggtaggctacctgaaaacctgctgcctttacaaagtggtataggtaacattgctaacgctgtcattgaagggcttgctggcgcccaattcaagcacttgactgtatggacggaagtgctgcaggactcgttcttggatcttttcgagaacggatctttggactacgccactgctacttccgtgagattgactgaaaagggtttcgacagagcctttgcaaactgggaaaatttcaaacacagattgtgtttgagatctcaagttgtctcgaacaatccggaaatgatccgtagattgggtgtcatcgccatgaataccccagtagaagttgacatttacgcgcacgccaattctacaaatgtgaatggttcccgtatgttgaacgggttgggtggatctgctgatttcttgagaaatgcaaagttgtccatcatgcatgccccctctgcaagaccaactaaagtagaccctaccggtatctctaccattgttcctatggcctctcatgtagatcaaactgagcatgacctggacatcttggtcactgaccaaggtttggcggatctaagaggtctatcgcctaaggaaagagcccgtgaaatcatcaacaagtgtgctcatcccgattatcaagctttgttgaccgattacttggacagagcagagcattacgctaaaaagcacaattgcttgcatgaaccacacatgctaaagaatgctttcaagttccacaccaacttagctgaaaagggtacaatgaaggtcgacagctgggaaccagttgactag

SEQ ID NO: 137388 - protein, 526 aa, Saccharomyces cerevisiae
MTISNLLKQRVRYAPYLKKVKEAHELIPLFKNGQYLGWSGFTGVGTPKAVPEALIDHVEKNNLQGKLRFNLFVGASAGPEENRWAEHDMIIKRAPHQVGKPIAKAINQGRIEFFDKHLSMFPQDLTYGFYTRERKDNKILDYTIIEATAIKEDGSIVPGPSVGGSPEFITVSDKVIIEVNTATPSFEGIHDIDMPVNPPFRKPYPYLKVDDKCGVDSIPVDPEKVVAIVESTMRDQVPPNTPSDDMSRAIAGHLVEFFRNEVKHGRLPENLLPLQSGIGNIANAVIEGLAGAQFKHLTVWTEVLQDSFLDLFENGSLDYATATSVRLTEKGFDRAFANWENFKHRLCLRSQVVSNNPEMIRRLGVIAMNTPVEVDIYAHANSTNVNGSRMLNGLGGSADFLRNAKLSIMHAPSARPTKVDPTGISTIVPMASHVDQTEHDLDILVTDQGLADLRGLSPKERAREIINKCAHPDYQALLTDYLDRAEHYAKKHNCLHEPHMLKNAFKFHTNLAEKGTMKVDSWEPVD

SEQ ID NO: 137389 - DNA, 1578 bp, Neurospora crassa
  CDS (1)..(1578)
atggcgtcgcccattgcctcggcggccctcagggcgcgtcaaggcccttccatgctcaagaagctctgcaaccccgaggacatgctccagcacttccccaatggcgcatacatcggctggtccggtttcaccgcgtcggctaccccaagaaggtcctactatctcgctgaccacgtcgagaagaacgcctccaggccagctcaagtacagcctcttcgtcggtgcctccgccggcgccgagaccgagaacgctgggctgctctcgacatgatcgcccatgatcgccgtcgcgctcctcaccaggtcggcaagaacattgccaagggcatcaacgagggccgcatcaacttcttcgacaagcacttgtccatgttccccgttgaccttgtctacggctactacaccaaggaccgccagaacaagaacctcgatgtcgtttgcgttgaagctaccgagatcaaggaggacggttccatcgtcctcggtgcctcggtcggtgccacccccgagctcatccagatggccgacaaggtcatcattgaggtcaacacggccatccccagcttcgacggtctccacgacatcaccttctccgacctccctcccaaccgcaagccctacctcatccagcagtgcagggaccgcatcggtactacttcggtccccgtcgaccccgagaaggttgtcggtatcatcgagtgcaccacccccgatcagaccctccccaactcccccgccgacgaaacggctacggccattgccggccacctgattgagttcttcgagcacgaggtcgcccacggccgtctgcccaagaaccttctccctctgcagtccggtatcggcaacatcgccaacgccgtcattggtggtctcgagacctccaacttcaagaacctcaacgtctggactgaggttatccaggataccttcctcgacctcttcgactccggcaagcttgactttgctaccgccacctcgatccgcttctcgcccaccggcttcgagcgcttctacaagaactgggacaactactatgacaagctcctcctccgctctcagtccgtctccaacgctcccgagatcatccgccgtctcggtgttatcggcatgaacacccccgtcgaagtcgacatctacgcccacgccaactccaccaacgtcatgggctcccgcatgctcaacggtctcggtggttccgccgatttcctccgcaactccaagtactccatcatgcacaccccctccacccgtccctccaagaccgacgcccacggtgtttcgtgcattgtccccatgtgcacccacgtcgaccagaccgagcacgatctcgacgtcatcgttaccgagaacggtctcgccgatgtccgcggcctcagcccccgcgagcgtgcccgcgtcatcattgacaagtgcgcccacgacgtctacaagcccatcctcaaggcctactttgagaaggccgagttcgagtgccttcgcaagggtatgggccacgagccccaccttctcttcaactctttcgacatgcacaaggctcttgtcgaggagggctccatggccaaggtcaagttctaa

SEQ ID NO: 137390 - protein, 525 aa, Neurospora crassa
MASPIASAALRARQGPSMLKKLCNPEDMLQHFPNGAYIGWSGFTASATPRRSYYLADHVEKNASRPAQVQPLRRCLRRRRDRERWAALDMIAHDRRRAPHQVGKNIAKGINEGRINFFDKHLSMFPVDLVYGYYTKDRQNKNLDVVCVEATEIKEDGSIVLGASVGATPELIQMADKVIIEVNTAIPSFDGLHDITFSDLPPNRKPYLIQQCRDRIGTTSVPVDPEKVVGIIECTTPDQTLPNSPADETATAIAGHLIEFFEHEVAHGRLPKNLLPLQSGIGNIANAVIGGLETSNFKNLNVWTEVIQDTFLDLFDSGKLDFATATSIRFSPTGFERFYKNWDNYYDKLLLRSQSVSNAPEIIRRLGVIGMNTPVEVDIYAHANSTNVMGSRMLNGLGGSADFLRNSKYSIMHTPSTRPSKTDAHGVSCIVPMCTHVDQTEHDLDVIVTENGLADVRGLSPRERARVIIDKCAHDVYKPILKAYFEKAEFECLRKGMGHEPHLLFNSFDMHKALVEEGSMAKVKF

SEQ ID NO: 137391 - DNA, 2466 bp, Saccharomyces cerevisiae
  CDS (614)..(2194)
gttagccatcattatcattaaaatatcaacccgaagaacaatgtatacatatacatatacgtacacatatacatatgtacatatgacatacgtattagccgctgaggacgcggacgtataaaaggacaatacttatatggagctaaggggagcagttacgcaactccgtgatcgcgcgccacgggccgtcggcggctgttaattgaagaaaaaaaaaatgaagaaccacaaggggtgatccatataggtgactagcatcatcccctgcgacgcgcggcccgccgggcaaaggcgggcaatgcgcgctgctgattggcctcgaggacaacgccctcaaccacatccgcaacagccaatcccatcggagcgtcaaactaccaaagtagtgattgtatggatcaccactgtattgtggacggtaagcgcttgctggagcaaatgtgtaatcaagttgctgtgtatatatagacgttagatgtgttctaccccttcttttgtcttgtgcccaccgggcttacattagcacacaaagcagcaagagaccgtcttactagacaatagcggcaaaacaaacaacacatttctttttttctttttcacatattgcactaaaatgacaatttctaatttgttaaagcagagagttaggtatgctccctatctgaaaaaagttaaggaagctcacgagcttattccattgttcaagaatggtcagtaccttgggtggtccggttttacaggagtgggtactcccaaggcagtgccggaggcactgatagatcacgtggagaagaacaatttacaagggaagttgagattcaacctttttgttggagcttctgctggtccagaggaaaaccgttgggctgaacacgacatgatcattaagagagcccctcatcaagtagggaaacccattgcaaaggcaattaaccagggtagaattgagttctttgataaacatctgtccatgttccctcaggatctgacatacgggttctacaccagggaaagaaaagacaacaaaatccttgattatactataatcgaggcaacggccattaaagaggacgggtctatcgtcccaggtccctctgtcggtggttctccagaattcattacagtcagtgataaagtgattattgaggttaacacggctacgccttcgttcgagggtattcacgatatagacatgcccgtgaacccacctttcaggaaaccatacccatatctgaaagtggacgacaagtgtggtgttgactccatcccggttgatcctgaaaaggttgttgcgattgtggagtccaccatgagggaccaggtcccaccaaatacgccctctgacgacatgtccagggctattgcaggtcatttggtcgagtttttcagaaacgaggtaaaacatggtaggctacctgaaaacctgctgcctttacaaagtggtataggtaacattgctaacgctgtcattgaagggcttgctggcgcccaattcaagcacttgactgtatggacggaagtgctgcaggactcgttattggatcttttcgagaacggatctttggactactccactgctacttccgtgagattgactgaaaagggtttcgacagagcctttgcaaactgggaaaatttcaaacacagattgtgtttgagatctcaagttgtctcgaacaatccggaaatgatccgtagattccctgtcatcgccatgaataccccagtagaagttgacatttacgcgcacgccaattctacaaatgtgaatggttcccgtatgttgaacgggttgggtggatctgctgatttcttgagaaatgcaaagttgtccatcatgcatgccccctctgcaagaccaactaaagtagaccctaccggtatctctaccattgttcctatggcctctcatgtagatcaaactgagcatgacctggacatcttggtcactgaccaaggtttggcggatctaagaggtctatcgcctaaggaaagagcccgtgaaatcatcaacaagtgtgctcatcccgattatcaagctttgttgaccgattacttggacagagcagagcattacgctaaaaagcacaattgcttgcatgaaccacacatgctaaagaatgctttcaagttccacaccaacttagctgaaaagggtacaatgaaggtcgacagctgggaaccagttgactagtgtttgtgcgcaaaccgagagatgagtatttaacaaaaaaaagaaaggaaatgatatgattatgattttatgtttataaagcttttatccaatgcgttgttttttcttgcatatttataccttttgcgctcatggagggagttaatcaatacgcatgacgtctagttaattcacaggtagtactgtatatttatatgtttacacaataattatgtattaagtagtgattagtaaaaaaaactaagaggttgaaagtcatcaacccttatatt

SEQ ID NO: 137392 - protein, 526 aa, Saccharomyces cerevisiae
MTISNLLKQRVRYAPYLKKVKEAHELIPLFKNGQYLGWSGFTGVGTPKAVPEALIDHVEKNNLQGKLRFNLFVGASAGPEENRWAEHDMIIKRAPHQVGKPIAKAINQGRIEFFDKHLSMFPQDLTYGFYTRERKDNKILDYTIIEATAIKEDGSIVPGPSVGGSPEFITVSDKVIIEVNTATPSFEGIHDIDMPVNPPFRKPYPYLKVDDKCGVDSIPVDPEKVVAIVESTMRDQVPPNTPSDDMSRAIAGHLVEFFRNEVKHGRLPENLLPLQSGIGNIANAVIEGLAGAQFKHLTVWTEVLQDSLLDLFENGSLDYSTATSVRLTEKGFDRAFANWENFKHRLCLRSQVVSNNPEMIRRFPVIAMNTPVEVDIYAHANSTNVNGSRMLNGLGGSADFLRNAKLSIMHAPSARPTKVDPTGISTIVPMASHVDQTEHDLDILVTDQGLADLRGLSPKERAREIINKCAHPDYQALLTDYLDRAEHYAKKHNCLHEPHMLKNAFKFHTNLAEKGTMKVDSWEPVD

SEQ ID NO: 137393 - DNA, 1491 bp, Bradyrhizobium sp. ORS278
  CDS (1)..(1491): transl_table=11
atgagttcttcgcaggtgatgtcgcaggcgctgcgcgccaagatcatgtcggcggatgaggccgccgcactggtcacgccgggcagccatgtcggcatgagcggcttcaccggctcgggctatcccaaggcggtgccgatggcgctggcgcggcgcatcgagcaggcgcatgcgcgcggcgagcccttccgcatcggcgtctggaccggcgcctcgaccgcgcccgaactcgacggcgcgctcgccaaggccaacggcatcgacctgcgcctgccctatcagtccgatccgacaacgcgccagcgcatcaacgccggcagcatcgaatatatcgacctgcatctcagccacgtcgcgcaattcgtatggttcggcttcctcggccatctcgacgtcgcggtgatcgaatgcgccggcatcctgccggacggccggctgatcccgtcgacctcgatcggcaacaacaagacctggctcgatcaggccgatcgcgtgatcatcgaggtcaattcgtggatgaaccccgcgctgctcggcatgcacgatgtctactacggcacccggctgccgccgcatcgcaagccgatccccatcatcgcgcccggcgaccgcatcggcgagaccacctatcgctgcaatccgaacaaggtcatcgccgtcgtcgagacccacgcgccggaccgcaacactaccttcgcgccgccagacgatgtctcgcgcgcgatcgcgggccacatcctggagttcttcgcgcacgaggtgaagcagggccggctgccgcgcagcctgctgccgctgcaatccggtgtcggcaatgtcgccaatgccgtgatggccgggcttgatgacgggcccttcccgcatctgaccgcctacaccgaggtgctgcaggacggcatgctcaacctgctccgctcgggccggatggatctcgcgtcggcgaccgcactgtcgctgagctcggaggccgcgatcgagttcaatcgcgagatcgagtttctgcgcgatcgcatcgtactgcggccgcaggagatctccaaccatcccgaggtgatccgcaggctcggcgtgatcgcgatgaacggcctgatcgaggccgacatctacggcaacgtcaactcgacgcatgtccgcggcagcagcatcatgaacggcatcggcggctccggcgactttgcccgcaacgcctatctgtcgatcttcatgacgccgtcgacggcgaaggccggcaccatctcctgcatcgtgccgatggtgacgcatgtcgaccacaccgagcacgacgtgcagatcctggtcaccgagcgcggcctcgccgatctgcgcggcctgtcgccgaagcagcgcgcccgcacggtgatcgagcaggcagcacatcccaaattccgccctgccctgtcggactatttcgagcgcgcctgccgcgactccaccggcaagcacacgccgcatctgctggaagaggcgttccgcctgctcaggccggagtga

SEQ ID NO: 137394 - protein, 496 aa, Bradyrhizobium sp. ORS278
MSSSQVMSQALRAKIMSADEAAALVTPGSHVGMSGFTGSGYPKAVPMALARRIEQAHARGEPFRIGVWTGASTAPELDGALAKANGIDLRLPYQSDPTTRQRINAGSIEYIDLHLSHVAQFVWFGFLGHLDVAVIECAGILPDGRLIPSTSIGNNKTWLDQADRVIIEVNSWMNPALLGMHDVYYGTRLPPHRKPIPIIAPGDRIGETTYRCNPNKVIAVVETHAPDRNTTFAPPDDVSRAIAGHILEFFAHEVKQGRLPRSLLPLQSGVGNVANAVMAGLDDGPFPHLTAYTEVLQDGMLNLLRSGRMDLASATALSLSSEAAIEFNREIEFLRDRIVLRPQEISNHPEVIRRLGVIAMNGLIEADIYGNVNSTHVRGSSIMNGIGGSGDFARNAYLSIFMTPSTAKAGTISCIVPMVTHVDHTEHDVQILVTERGLADLRGLSPKQRARTVIEQAAHPKFRPALSDYFERACRDSTGKHTPHLLEEAFRLLRPE

SEQ ID NO: 137395 - DNA, 1479 bp, Escherichia coli O157:H7 EDL933
  CDS (1)..(1479): transl_table=11
atggaaactcagtggacaaggatgaccgccgatgaagcggcagaaattatccagcataacgacatggtggcatttagcggctttaccccagcgggttcgccgaaagccctacccaccgcgattgcccgcagagctaacgaacagcatgaggccaaaaagccgtatcaaattcgcctgctgacgggggcgtcaatcagcgccgccgctgacgatgtactttctgacgccgatgctgtttcctggcgtgcgccatatcaaacatcgtccggtttacgtaaaaagatcaatcagggcgcggtgagtttcgttgacctgcatttgagcgaagtggcgcaaatggtcaattacggtttcttcggcgacattgatgttgccgtcattgaagcatcggcactggcaccagatggtcgagtctggttaaccagcgggatcggtaatgcgccgacctggctgctgcgagcgaagaaagtgatcattgaactcaatcactatcacgatccgcgcgttgcagaactggcggatattgtgattcctggcgcgccaccgcggcgcaatagcgtgtcgatcttccatgcaatggatcgcgtcggtacccgctatgtgcaaatcgatccgaaaaagattgtcgccgtcgtggaaaccaacttgcccgacgccggtaatatgctggataagcaaaatcccatgtgccagcagattgccgataacgtggtcacgttcttattgcaggaaatggcgcatgggcgtattccgccggaatttctgccgctgcaaagtggcgtgggcaatatcaataatgcggtaatggcgcgtctgggggaaaacccggaaattcctccgtttatgatgtattcggaagtgctacaggaatcggtggtgcatttactggaaaccggcaaaatcagcggggccagcgcctccagcctgacaatctcggccgattccctgcgcaagatttacgacaatatggattactttgccagccgcattgtgttgcgtccgcaggagatttccaataacccggaaatcatccgtcgtctgggcgtcatcgctctgaacgtcggcctggagtttgatatttacgggcatgccaactcaacgcacgtagccggggtcgatctgatgaacggcatcggcggcagcggtgattttgaacgcaacgcgtatctgtcgatctttatggctccgtcgattgctaaagaaggcaagatctcaaccgtcgtgccaatgtgcagccatgttgatcacaacgaacacagcgtcaaagtgatcatcaccgaacaagggatcgccgatctgcgcggtctttccccgcttcaacgcgcccgcactatcattgataattgtgcacatcctatgtatcgggattatctgcatcgctatctggaaaatgcgcccggcggacatattcaccacgatcttagccacgtcttcgacttacaccgtaatttaattgcaaccggctcgatgctgggttaa

SEQ ID NO: 137396 - protein, 492 aa, Escherichia coli O157:H7 EDL933
METQWTRMTADEAAEIIQHNDMVAFSGFTPAGSPKALPTAIARRANEQHEAKKPYQIRLLTGASISAAADDVLSDADAVSWRAPYQTSSGLRKKINQGAVSFVDLHLSEVAQMVNYGFFGDIDVAVIEASALAPDGRVWLTSGIGNAPTWLLRAKKVIIELNHYHDPRVAELADIVIPGAPPRRNSVSIFHAMDRVGTRYVQIDPKKIVAVVETNLPDAGNMLDKQNPMCQQIADNVVTFLLQEMAHGRIPPEFLPLQSGVGNINNAVMARLGENPEIPPFMMYSEVLQESVVHLLETGKISGASASSLTISADSLRKIYDNMDYFASRIVLRPQEISNNPEIIRRLGVIALNVGLEFDIYGHANSTHVAGVDLMNGIGGSGDFERNAYLSIFMAPSIAKEGKISTVVPMCSHVDHNEHSVKVIITEQGIADLRGLSPLQRARTIIDNCAHPMYRDYLHRYLENAPGGHIHHDLSHVFDLHRNLIATGSMLG

SEQ ID NO: 137397 - DNA, 1413 bp, Agrobacterium tumefaciens str. C58
  CDS (1)..(1413): transl_table=11
atgacggtgggcatgagcggttttacgcgcgccggtgaagccaaggcagtgccgctggcgctggccgagcgcgccaagaccaaccccatgaaaatcaccctgatgaccggcgcctccctcggcaacgatctcgacaagaccatggtcgaggccggcatgctggcgcgccgcatgccgttccagtccgatccggctttgcgcaaggcgatcaatgacggcagggtgatgttcatcgatcagcatctttccgaaacggtcgagcaattgcgcggcggtcagatccatggcgttgatatcgccattgtcgaggcggtggcaatcacggcggaaggcggcatcgtacccaccacctcggttggtaattccgcaagtttcgccattctggccgataaggtcatcgtcgagatcaacctgtcgcagcccgaggtgctggaagggctgcatgatatcttcattcccgccaagcgcccgacccgtatgcccatccccgtcgtggcgacggatagccgtgtcggcctgcctttcattccggtgccgccggaaaagatcgctgccattgtgctgagcgacaagagcgacagtttttcgacagtgctgccgccggatgacgagacgaaggcgattgccggccatctcaccgaattcctgctgaatgaggtccgtcatggccgcatgacgcatgaactccagccgttgcaggcaggcatcggcaccatcgccaatgccgtgatgcacgggttcatcgatacgccgtttcacgatctcaaaatgtattcggaggtcctgcaggattcgaccttcgaactgttcgatgcgggcaagctgaccttcgcctccggttcgtcaatcacgctctcctccgccatgaacgagcaggtcatgccacgattgtccgagtataagagcagactgatccttcgcccgcaggaggtcagcaaccatccggaagtcatccgccgcctcggcatcatcggcatcaacacagctctggaattcgatatttacggaaatgtcaattccactcatgtcggtggcactcacatgatgaacggcatcggcggttcgggtgattttgcccgcaacgcttacatgtccatcttcgtgacgaaatccatcgccaagggcggtgccatttccagcgtcgtgcccatggtcagccatgtcgaccataccgaacacgatgtcgatattctcgtcacagaaacgggcctagccgatctgcgcggtctggccccgcgcgagcgcgcagcggtcatcatcgcaaactgcgtgcatcccagctatcgcgatgcgctgacggattattaccagcgagcagcggcgcggggcgggcacacgccgcatctcatcgaagaagcgctgtcatggcacaatgcgcttcgggaaagaggcaccatgctgccgcagcgatag

SEQ ID NO: 137398 - protein, 470 aa, Agrobacterium tumefaciens str. C58
MTVGMSGFTRAGEAKAVPLALAERAKTNPMKITLMTGASLGNDLDKTMVEAGMLARRMPFQSDPALRKAINDGRVMFIDQHLSETVEQLRGGQIHGVDIAIVEAVAITAEGGIVPTTSVGNSASFAILADKVIVEINLSQPEVLEGLHDIFIPAKRPTRMPIPVVATDSRVGLPFIPVPPEKIAAIVLSDKSDSFSTVLPPDDETKAIAGHLTEFLLNEVRHGRMTHELQPLQAGIGTIANAVMHGFIDTPFHDLKMYSEVLQDSTFELFDAGKLTFASGSSITLSSAMNEQVMPRLSEYKSRLILRPQEVSNHPEVIRRLGIIGINTALEFDIYGNVNSTHVGGTHMMNGIGGSGDFARNAYMSIFVTKSIAKGGAISSVVPMVSHVDHTEHDVDILVTETGLADLRGLAPRERAAVIIANCVHPSYRDALTDYYQRAAARGGHTPHLIEEALSWHNALRERGTMLPQR

SEQ ID NO: 137399 - DNA, 1545 bp, Caulobacter crescentus CB15
  CDS (1)..(1545): transl_table=11
atgcgggtgaagcaagcgcgtggggcgagcatgagcggatcacggatcgggctggacgcgctgaaggccaaggtgatgtcgcccgaggacgcggcggcgctgatcggtccaggcgagaccgtcggcatgagcggcttcaccggatcgggctatcccaaggccgttcccacagccctggcgcgccgcatcgaggccgagcacgccgctgggcgtcccttcaagctgcgcgtctggaccggcgcctcgacgggacccgagctggacggggccctggccaaggccaacggcatcgagttccgcctaccctacaattccgaccctatcgcccgggaaatgatcaatcgcggcgagatggactatttcgacatgcacctgtcgcaggtggcgccgatggcctggcaaggctttctgggtccgctcgacaccgccctgatcgaggtcaccgggatccggtcggacggttcgctgatcccgtcctcgtccgtgggcaacaacaagacctggatcgaacgggcctcgaaagtgatccttgaggtgaaccgttggcagaaccccgccttggaggggatgcacgatatctattacggcacggccttgccgccggaccggcgccctattccgttgacgcgaccggaccagcggatcggcgagccatatttccggtgcgacccggcgaaggtcgtggcggtggtcgaaaccgacacccccgatcgcaatctgccgttcgatgcgccgggcgaggatcaccgcgccatcgccggccaccttctggagtttttccgccacgaggtggcgcggggtcgcctgccggccaacctgctgccgctgcagtcgggcgtcggcaacatcgccaatgcggtgatgttcggcctggtcgatgggccgttcgagggtacgaccgcctttaccgaggtcctgcaggatgggatgctggcgctgctggagtcgggcaggctgctcagcgcctcggccacggccttctctctcagccccgaggccgcccatacgctgaacgccgacctcgacaaactccgcgaccgcctggtcctgcgaccgcaggagatcagcaatcaccccgagctgatccgacgcctgggctgcctcgccatgaacggcatgatcgaggccgacatccacggggcggtgaactcgacccacctgatgggctcgcgcatccagaacggcatcggcggcagcggcgacttcgcccgcaacgcctatgtctcgattttcatggccccctcgacggccaagggcggcaagatctcgaccattgtgcccaagaccccgcacgtcgatcacatcaaccaggacgtccaggtcctggtcaccgagcagggcctggccgatctgcgggccctgtcgccgcggcagcgggccgaggtgatcatcgagaactgcgcccatccagactatcgaccggccttgaaggactatctgacccgcgcccgccgcgactcctacggccagcagtcgccgaccctgctgatggaagccttcgcctggcaccagcggtttatcgagaccggcgatatgcgcgggtga

SEQ ID NO: 137400 - protein, 514 aa, Caulobacter crescentus CB15
MRVKQARGASMSGSRIGLDALKAKVMSPEDAAALIGPGETVGMSGFTGSGYPKAVPTALARRIEAEHAAGRPFKLRVWTGASTGPELDGALAKANGIEFRLPYNSDPIAREMINRGEMDYFDMHLSQVAPMAWQGFLGPLDTALIEVTGIRSDGSLIPSSSVGNNKTWIERASKVILEVNRWQNPALEGMHDIYYGTALPPDRRPIPLTRPDQRIGEPYFRCDPAKVVAVVETDTPDRNLPFDAPGEDHRAIAGHLLEFFRHEVARGRLPANLLPLQSGVGNIANAVMFGLVDGPFEGTTAFTEVLQDGMLALLESGRLLSASATAFSLSPEAAHTLNADLDKLRDRLVLRPQEISNHPELIRRLGCLAMNGMIEADIHGAVNSTHLMGSRIQNGIGGSGDFARNAYVSIFMAPSTAKGGKISTIVPKTPHVDHINQDVQVLVTEQGLADLRALSPRQRAEVIIENCAHPDYRPALKDYLTRARRDSYGQQSPTLLMEAFAWHQRFIETGDMRG

SEQ ID NO: 137401 - DNA, 1497 bp, Agrobacterium tumefaciens str. C58
  CDS (1)..(1497): transl_table=11
atgcttgaaaagcgtatccgcaacgcgtccctcttgaacaggatcgtcagcgccgaagaggccgccagtctcattcaggatggcatgacggtgggcatgagcggttttacgcgcgccggtgaagccaaggcagtgccgctggcgctggccgagcgcgccaagaccaaccccatgaaaatcaccctgatgaccggcgcctccctcggcaacgatctcgacaagaccatggtcgaggccggcatgctggcgcgccgcatgccgttccagtccgatccggctttgcgcaaggcgatcaatgacggcagggtgatgttcatcgatcagcatctttccgaaacggtcgagcaattgcgcggcggtcagatccatggcgttgatatcgccattgtcgaggcggtggcaatcacggcggaaggcggcatcgtacccaccacctcggttggtaattccgcaagtttcgccattctggccgataaggtcatcgtcgagatcaacctgtcgcagcccgaggtgctggaagggctgcatgatatcttcattcccgccaagcgcccgacccgtatgcccatccccgtcgtggcgacggatagccgtgtcggcctgcctttcattccggtgccgccggaaaagatcgctgccattgtgctgagcgacaagagcgacagtttttcgacagtgctgccgccggatgacgagacgaaggcgattgccggccatctcaccgaattcctgctgaatgaggtccgtcatggccgcatgacgcatgaactccagccgttgcaggcaggcatcggcaccatcgccaatgccgtgatgcacgggttcatcgatacgccgtttcacgatctcaaaatgtattcggaggtcctgcaggattcgaccttcgaactgttcgatgcgggcaagctgaccttcgcctccggttcgtcaatcacgctctcctccgccatgaacgagcaggtcatgccacgattgtccgagtataagagcagactgatccttcgcccgcaggaggtcagcaaccatccggaagtcatccgccgcctcggcatcatcggcatcaacacagctctggaattcgatatttacggaaatgtcaattccactcatgtcggtggcactcacatgatgaacggcatcggcggttcgggtgattttgcccgcaacgcttacatgtccatcttcgtgacgaaatccatcgccaagggcggtgccatttccagcgtcgtgcccatggtcagccatgtcgaccataccgaacacgatgtcgatattctcgtcacagaaacgggcctagccgatctgcgcggtctggccccgcgcgagcgcgcagcggtcatcatcgcaaactgcgtgcatcccagctatcgcgatgcgctgacggattattaccagcgagcagcggcgcggggcgggcacacgccgcatctcatcgaagaagcgctgtcatggcacaatgcgcttcgggaaagaggcaccatgctgccgcagcgatag

SEQ ID NO: 137402 - protein, 498 aa, Agrobacterium tumefaciens str. C58
MLEKRIRNASLLNRIVSAEEAASLIQDGMTVGMSGFTRAGEAKAVPLALAERAKTNPMKITLMTGASLGNDLDKTMVEAGMLARRMPFQSDPALRKAINDGRVMFIDQHLSETVEQLRGGQIHGVDIAIVEAVAITAEGGIVPTTSVGNSASFAILADKVIVEINLSQPEVLEGLHDIFIPAKRPTRMPIPVVATDSRVGLPFIPVPPEKIAAIVLSDKSDSFSTVLPPDDETKAIAGHLTEFLLNEVRHGRMTHELQPLQAGIGTIANAVMHGFIDTPFHDLKMYSEVLQDSTFELFDAGKLTFASGSSITLSSAMNEQVMPRLSEYKSRLILRPQEVSNHPEVIRRLGIIGINTALEFDIYGNVNSTHVGGTHMMNGIGGSGDFARNAYMSIFVTKSIAKGGAISSVVPMVSHVDHTEHDVDILVTETGLADLRGLAPRERAAVIIANCVHPSYRDALTDYYQRAAARGGHTPHLIEEALSWHNALRERGTMLPQR

SEQ ID NO: 137403 - DNA, 1509 bp, Corynebacterium glutamicum ATCC 13032
  CDS (1)..(1509): transl_table=11
atgtctgatcgcattgcttcagaaaagctgcgctccaagctcatgtccgccgacgaggcggcacagtttgttaaccacggtgacaaggttggtttctccggcttcaccggcgctggctacccaaaggcactgcctacggcaatcgctaaccgggctaaagaagcacacggtgcaggcaacgactacgcaatcgacctgttcactggcgcatcgaccgcccctgactgcgatggcgtacttgcagaagctgacgctatccgctggcgcatgccatacgcatctgatccaatcatgcgtaacaagatcaactccggctccatgggatactccgatatccacctgtcccactccggccagcaggttgaagagggcttcttcggccagctcaacgtagctgtcattgaaatcacccgcatcactgaagagggctacatcatcccttcttcctccgtgggtaacaacgttgagtggctcaacgctgcagagaaggtcatcctcgaggttaactcttggcagtctgaagacctcgaaggtatgcacgacatctggtctgttcctgccctgccaaaccgcattgccgtgccaatcaacaagccaggcgaccgcatcggtaagacctacatcgagttcgacaccgacaaggttgttgctgttgttgagaccaacaccgcagaccgcaacgcaccattcaagcctgtcgacgacatctctaagaagatcgctggcaacttcctcgacttcctggaaagcgaagttgctgcaggtcgcctgtcctacgacggctacatcatgcagtccggcgtgggcaacgtgccaaacgcggtgatggcaggcctgctggaatccaagtttgagaacatccaggcctacaccgaagttatccaggacggcatggtggacctcatcgacgccggcaagatgaccgttgcatccgcaacttccttctccctgtctcctgagtacgcagagaagatgaacaacgaggctaagcgttaccgcgagtccattatcctgcgcccacagcagatctctaaccacccagaggtcatccgccgcgttggcctgatcgccaccaacggtctcatcgaggctgacatttacggcaacgtcaactccaccaacgtttctggctcccgcgtcatgaacggcatcggcggctccggcgacttcacccgtaacggctacatctccagcttcatcaccccttcagaggcaaagggcggcgcaatctctgcgatcgttcctttcgcatcccacatcgaccacaccgagcacgatgtcatggttgttatctctgagtacggttacgcagaccttcgtggtctggctccacgtgagcgcgttgccaagatgatcggcctggctcaccctgattaccgcccactgctcgaggagtactacgctcgcgcaacctccggtgacaacaagtacatgcagacccctcatgatcttgcaaccgcgtttgatttccacatcaacctggctaagaacggctccatgaaggcataa

SEQ ID NO: 137404 - protein, 502 aa, Corynebacterium glutamicum ATCC 13032
MSDRIASEKLRSKLMSADEAAQFVNHGDKVGFSGFTGAGYPKALPTAIANRAKEAHGAGNDYAIDLFTGASTAPDCDGVLAEADAIRWRMPYASDPIMRNKINSGSMGYSDIHLSHSGQQVEEGFFGQLNVAVIEITRITEEGYIIPSSSVGNNVEWLNAAEKVILEVNSWQSEDLEGMHDIWSVPALPNRIAVPINKPGDRIGKTYIEFDTDKVVAVVETNTADRNAPFKPVDDISKKIAGNFLDFLESEVAAGRLSYDGYIMQSGVGNVPNAVMAGLLESKFENIQAYTEVIQDGMVDLIDAGKMTVASATSFSLSPEYAEKMNNEAKRYRESIILRPQQISNHPEVIRRVGLIATNGLIEADIYGNVNSTNVSGSRVMNGIGGSGDFTRNGYISSFITPSEAKGGAISAIVPFASHIDHTEHDVMVVISEYGYADLRGLAPRERVAKMIGLAHPDYRPLLEEYYARATSGDNKYMQTPHDLATAFDFHINLAKNGSMKA

SEQ ID NO: 137405 - DNA, 1515 bp, Xanthomonas campestris pv. campestris str. ATCC 33913
  CDS (1)..(1515): transl_table=11
atgtccgacgaacgcatcctcaacgcgccgctgcgcgaccacctggtctctgccgaggccgctgctgcgctgatccagcccggcgagaccgtggcgatgagcggcttcaccgggtcgggttatcccaaggcagtgccgatggcgctggcgcagcgcatcgaagcggcgcacctgcagggcgaagcgttccagatcaagctgatgaccggcgcctccaccgcgcccgagctcgatggcgcgctggccaaggccgacggcatcgccatgcgcatgccgttccagtccgacccggatgcgcgccaacgcatcaatgccggcacgctggactacatcgatatccatctgagccacgttgcccagcacgtgtggttcggcttctacgggcagatcgacaccgcggtggtggaagtgtcggcgatccgcgccgatggcagcctggtgccgtccacctccatcggtaacaacaagacctggctggacctggccaggaaagtgatcatcgaggtcaacgactggcaaccggccggcctggatggcatgcacgatgtgtattacggcaccgcgctgccaccgcaccgcaaaccgattccgctgctgcacggcgacgaccgcatcggcgagcccagcctgcgctgcgacccggacaagatcgtggccgtggtgcgtacgcatggcccggaccgcaacagcccgtttgccgctgccgatgacagcagcgagcgcatcgccgaacacctgatcgccttcctgcgacacgaggtgagcaagggccggctgccggcgaacctgctgccgctgcaatcgggcgtgggcaatattcccaatgcggtgctggccggcctggcacgtagcggtttccgcgacctggaagccttcaccgaagtgatccaggacggcatgctggcgctgctgcgcgatggcgtcttgcgttatgcctcgtgcaccggttttgcgctcagcccggaaggcaacgaagaattcaagcgcaacatcgatttctaccggcagcgcatcgtgatgcgcacgcaggagatctccaaccatcccgagctggtgcggcggctgggctgcatcggcatgaacggcatgatcgaggccgacctgtacggcaacgtcaattccacccatgtcatgggcagccgcatcatgaacggcatcggcggctccggcgatttcgcgcgcaacgggttcctgtcgatcttcctcagccccagcatcgccaaggccggcagtatttcctcaatcgtgccgatggtcagccatgtcgaccacaccgaacacgacgtctcagtgatcgtgaccgaacaaggcctggccgacctgcgcggcctgacgcccaagcaacgtgcacgccagctgctagagcactgcgtgcatccgcgttaccgcgacgcgctggaagactacgtggcacgtgccaatcgcgacagctatggcaagcacacgccgcatctgctgaccgaagcattggcgtggcaccagcggtggctggagactggagatatgttggggtga

SEQ ID NO: 137406 - protein, 504 aa, Xanthomonas campestris pv. campestris str. ATCC 33913
MSDERILNAPLRDHLVSAEAAAALIQPGETVAMSGFTGSGYPKAVPMALAQRIEAAHLQGEAFQIKLMTGASTAPELDGALAKADGIAMRMPFQSDPDARQRINAGTLDYIDIHLSHVAQHVWFGFYGQIDTAVVEVSAIRADGSLVPSTSIGNNKTWLDLARKVIIEVNDWQPAGLDGMHDVYYGTALPPHRKPIPLLHGDDRIGEPSLRCDPDKIVAVVRTHGPDRNSPFAAADDSSERIAEHLIAFLRHEVSKGRLPANLLPLQSGVGNIPNAVLAGLARSGFRDLEAFTEVIQDGMLALLRDGVLRYASCTGFALSPEGNEEFKRNIDFYRQRIVMRTQEISNHPELVRRLGCIGMNGMIEADLYGNVNSTHVMGSRIMNGIGGSGDFARNGFLSIFLSPSIAKAGSISSIVPMVSHVDHTEHDVSVIVTEQGLADLRGLTPKQRARQLLEHCVHPRYRDALEDYVARANRDSYGKHTPHLLTEALAWHQRWLETGDMLG

SEQ ID NO: 137407 - DNA, 1515 bp, Oceanobacillus iheyensis HTE831
  CDS (1)..(1515): transl_table=11
atggaagaaaaattaaagcgcatacaaaacaaggaattagggcaaaaagtggtaactgcagcagaagcagcttcttggattaaagatggtatgacattggggcttagtggatttacacgtgcgggagatgcaaaggcggttccgactgcgctggtgaaaagagcggaagcgggagaatccctcaaagtcaatgtatacacaggggcatctttaggatctaatatcgataagctgtttgcagaagcaggaatcgttaataaaagaattccatttcaggctgagccatctatgcgtaaggcaataaatgctggggaacatttatttgtcgaccaacacctttcacacacatcagaaatgcttcgtggtgatgcgatggaggctgtcgattatgccataatagaagcaatttctgtaacagaaaatggttatattattccaagtacatcagtaggtaactcagttgcatttgctgaaactgccgataacattattattgaactcaatactgcgcaaccaatggaattagaaggaatgcatgatatttatggtcctgggaaacaaggagatcgtgatccgattccattaaaagaggtcgatcagcgtattggtaaggtcggtattcaggttgatacggataaaattaaggggatagtttttacgcatcaacctgattcagcttcgacaattgttccgccagatgaggagacgcaacaaattgcgaaccatctactgaatttctttagggaggagattcaggcaggacgattaacagagaagcttatgccattgcagtccggaataggttctgttgctaatgccgtattacatggtatgctagactctgagtttaaagatttgacggtttattctgaagtgcttcaagatgctgtcttcgatttgattgatgcaggtaaagtgagctttgcttctgcatgttccattacgttatcagaagacaagatgaagcatgtgtttagtaatctagcggaatatcagagtaagcttgtcttacgtccgcaagaaatctcgaatcatccagaaatcattcgtcgactgggtctaattgcgattaacacagcattagaatttgatatttacggcaatgtgaactctacacacgttggcggaacgaaaatgatgaacggtattggtggttcaggcgattttgctagaaatgctagattggggatttttgttacaaagtcgattgcgaaaaatggcgatatatctagtatcgttccatatgtatcgcatacagatcataccgaacacgatgtagatgtaattgttacggaacaaggttatgcagaccttcgtggattagcaccacgagaacgagtgccgcaaattattgaaaattgtgtgcatcctttatataaggaagcgttatgggagtattaccaagaagcgctagaacggggtgggcagactccgcatgttctagaaaaagctttttcttggcatgctaacttccgagagcatggaacaatgctgccggcagtgccacaagtgtaa

SEQ ID NO: 137408 - protein, 504 aa, Oceanobacillus iheyensis HTE831
MEEKLKRIQNKELGQKVVTAAEAASWIKDGMTLGLSGFTRAGDAKAVPTALVKRAEAGESLKVNVYTGASLGSNIDKLFAEAGIVNKRIPFQAEPSMRKAINAGEHLFVDQHLSHTSEMLRGDAMEAVDYAIIEAISVTENGYIIPSTSVGNSVAFAETADNIIIELNTAQPMELEGMHDIYGPGKQGDRDPIPLKEVDQRIGKVGIQVDTDKIKGIVFTHQPDSASTIVPPDEETQQIANHLLNFFREEIQAGRLTEKLMPLQSGIGSVANAVLHGMLDSEFKDLTVYSEVLQDAVFDLIDAGKVSFASACSITLSEDKMKHVFSNLAEYQSKLVLRPQEISNHPEIIRRLGLIAINTALEFDIYGNVNSTHVGGTKMMNGIGGSGDFARNARLGIFVTKSIAKNGDISSIVPYVSHTDHTEHDVDVIVTEQGYADLRGLAPRERVPQIIENCVHPLYKEALWEYYQEALERGGQTPHVLEKAFSWHANFREHGTMLPAVPQV

SEQ ID NO: 137409 - DNA, 1491 bp, Brucella suis 1330
  CDS (1)..(1491): transl_table=11
atgttggaagcacgtatccgtaacagttcactgcgaaacaaggttatcactgcggagcaagcggcaagctttatcaaggatggcatgattgttggcatgagcggctttacgcgcgcgggcgatgccaaggccgttccggtcgccatggccgcgcgggcggcaaccgatccattccagatcaccctgattacaggggcctccctcggacatgacgtcgataaactgttgaccgaagcgcatattctttctcgccgtatgccgtttcaggccgaccgcacattgcgcagcgcgatcaaccgcggcgaagtcatgtttatcgaccagcatctttccgaaacagtcgagcaacttcgttccaaccagatcggccccatcgactgtgccgtggtagaggcattggcgattaccgaaagcggcggaatcatcccgacgacttcggtcggcaattcggccagcctcgccattcttgccgaaaaggttatcgtcgaggtcaatctgaaccagcccatggcgctggaaggcctgcacgatatttatataccgacgaagcgcccttcccgcgatcctatcccgatcatggcttgcgatagccggatcggactgccctatattcccatcgcgccggaaaaaatcgccggtatcgtcatcacgcaggaaaatgacagtgcgtcacctgtcgagcccgcagatcacgaaacggttgcgattgccgggcatctgatcgaattcttcaagggggaagtcgtaaagggtcgtctggatctggcgcttaatccattgcaggcgggcatcggcaccattgccaatgcggttttgaccggctttgcagatagtcctttccacaatctgcgcatgtatagcgaggtattgcaggatagcacgttcgatctgttcgatgcgggcaagctggattttgcctccggctcatcgatcactctcagccccgcttgcggcgagcgcgttttcaataatatagaccgctatcgtgacaggcttgtcctgcgcccgcaggaaatcagcaaccatccggaagtcatccgccgtcttggtattatcggcatcaataccgcactcgaattcgatatctacggcaacgtcaactcaacccatgttgatggaaccaatatgatgaacggcattggcggttccggcgattttgcgcgcaacgcctatatttcgatcttcgtcagcaagtcggaagccaagaatggcgcgatctcctcggtcgtgcccatggtaacacatgtggaccacacggaacatgacgtggatatcctcgtgacggaacagggacttgccgatttgcgcgggcttgcaccacgcgagcgagcgcccgttatcattgaaaattgcgcacatcccgattaccgggaccagctcatggattattacgagcgagcctgcaaacgcggcggccacacgcctcatcttctggaagaggcattcagttggcacctgcgccgtcaggaaaatggcagtatgcgcaaataa

SEQ ID NO: 137410 - protein, 496 aa, Brucella suis 1330
MLEARIRNSSLRNKVITAEQAASFIKDGMIVGMSGFTRAGDAKAVPVAMAARAATDPFQITLITGASLGHDVDKLLTEAHILSRRMPFQADRTLRSAINRGEVMFIDQHLSETVEQLRSNQIGPIDCAVVEALAITESGGIIPTTSVGNSASLAILAEKVIVEVNLNQPMALEGLHDIYIPTKRPSRDPIPIMACDSRIGLPYIPIAPEKIAGIVITQENDSASPVEPADHETVAIAGHLIEFFKGEVVKGRLDLALNPLQAGIGTIANAVLTGFADSPFHNLRMYSEVLQDSTFDLFDAGKLDFASGSSITLSPACGERVFNNIDRYRDRLVLRPQEISNHPEVIRRLGIIGINTALEFDIYGNVNSTHVDGTNMMNGIGGSGDFARNAYISIFVSKSEAKNGAISSVVPMVTHVDHTEHDVDILVTEQGLADLRGLAPRERAPVIIENCAHPDYRDQLMDYYERACKRGGHTPHLLEEAFSWHLRRQENGSMRK

SEQ ID NO: 137411 - DNA, 1494 bp, Pseudomonas putida KT2440
  CDS (1)..(1494): transl_table=11
atgtaccgtgatcgtatccgcttgtcctccctgcacagcaaggtaatgagtgcggctgatgccgctggtctgatcgaggacggcatgactgtcggcatgagcggcttcacccgcgccggcgaagccaaggccgtaccgcatgcattggccgaacgtgccaagcaatcgccactgaaaatcagcctgatgaccggcgccagcctgggcaatgacctggacaaacaactgaccgaggccggtgtgttggcccgccgcatgccgttccaggtcgacagcaccctgcgcaaagccatcaatgacggccaggtgatgttcattgaccagcacctgtcggaaaccgtcgagcaactgcgcaaccagcagctgaagctgccggacatcgcggtcatcgaagccgtggccatcaccgagcaaggccacatcgtgccaaccacttcggtgggcaactcggccagcttcgcgatcttcgccaagcaggtgattgtggagatcaacctctcgcacaacaccaacctcgaaggcctgcacgacatctatatcccaacctaccgcccgactcgcacgccaatcccgctggtcaaggtagacgaccgtatcggcagcaccgcgatcccgatcgatccggccaagatcgtcggtatcgtcatcagcgaccagccggactcgccgtccactgtgctgccgccagatgatgaaacacagggcatcgccgaccacctgatcaacttcctcaagaaggaagtggatgcaggccgtatgaccaacaagctcggcccgctgcaagccggcattggcagcattgccaatgcggtgatgtgcggcctgatcgagtcgccgttcgaagacctgaccatgtactccgaagtgctgcaggactccaccttcgacctgatcgatgccggcaagcttagcttcgcatccggcagctcgatcaccctgtcgacgcgccgcaatgccgatgtgttcggcaacctggagcgctacaaggacaagctggtgctacgcccgcaggaaatctccaaccacccggaagtggtacgtcgcctgggcatcatcggtatcaacaccgcactggagttcgatatctacggcaacgtcaactccacccacgtctgtggcaccaggatgatgaacggcatcggtggctccggcgacttcgcccgtaacgcccacctggcagtgttcgtcaccaagtcgattgccaaaggcggggcgatttccagcgtggtgccaatggtcagccatgtcgaccacaccgagcacgacgtggacatcctggtcaccgagcagggcttggcggacctgcgtggcctggcgccgcgcgaacgggcgcgagcgatcatcgacaactgtgtgcacccagactatcgcgctgcgctgaacgactacttcgaccgcgcctgccagcgtggcggccataccccgcacatcctgcgcgaagccctgagctggcacgaaaacctggaagaaaccgggcgcatgctggccagctga

SEQ ID NO: 137412 - protein, 497 aa, Pseudomonas putida KT2440
MYRDRIRLSSLHSKVMSAADAAGLIEDGMTVGMSGFTRAGEAKAVPHALAERAKQSPLKISLMTGASLGNDLDKQLTEAGVLARRMPFQVDSTLRKAINDGQVMFIDQHLSETVEQLRNQQLKLPDIAVIEAVAITEQGHIVPTTSVGNSASFAIFAKQVIVEINLSHNTNLEGLHDIYIPTYRPTRTPIPLVKVDDRIGSTAIPIDPAKIVGIVISDQPDSPSTVLPPDDETQGIADHLINFLKKEVDAGRMTNKLGPLQAGIGSIANAVMCGLIESPFEDLTMYSEVLQDSTFDLIDAGKLSFASGSSITLSTRRNADVFGNLERYKDKLVLRPQEISNHPEVVRRLGIIGINTALEFDIYGNVNSTHVCGTRMMNGIGGSGDFARNAHLAVFVTKSIAKGGAISSVVPMVSHVDHTEHDVDILVTEQGLADLRGLAPRERARAIIDNCVHPDYRAALNDYFDRACQRGGHTPHILREALSWHENLEETGRMLAS

SEQ ID NO: 137413 - DNA, 1515 bp, Bacillus cereus ATCC 14579
  CDS (1)..(1515): transl_table=11
atggagaacaatttagatagaatcagagatcaacgtctaaaagatcgggtagttacacctgaagaagcagcttcctggattcaaagtggaatgactttaggcttaagtgggtttacacgtgcaggtgatgtaaaagcagtcccatttgcgcttgtaaaccgagttaagaatgatgaatcttttaaagtaaatgtttatactggggcttctttaggatcggatgtagacaaattatttgctgaggcaggaattttagggaaaagattacctttccaagctgacgctactatgcgaaaaggaattaataacggagactttttatttgtggatcaacacttgtctcatacagcagagttactccgtgctgacgttctggatatagatttcgctattttggaagcggttgcgattacagaggacggaatgattattccaaccacttcaattggaaattccttagcgttttccttaaatgctaagtctattattattgaaatgaatatggctcaatccgcgcaattagaggggctacatgatctatatgaaccaggtaaacaaggggagaggcttccaattccgcttgtgaaaacagatgaccgaattggaacaatcggtattccaattgatcctgaaaaagtaaagggaattgtgtttacgaatcaattggattcgccatcgacaattgttcctccggatgaagaaactgttattatggcacagcatttaatagaattccttcgagaagaagtcaaagtaggccgattaacaaatcgtttagcgccgttacaatcaggaattggttcagtggctaacgccgtattgcatggaatgttagattcagaatttgaagatttagaagtatattccgaggttttacaagatgcagtttttgatcttatggatgctggaaaagtcaattttgcttcttgttgttctatcacgctttctgaagagaaaatgcaacaagtattttctaactttgaaaaatatcgtgacaaattaatgatgcgtccacaagagatttccaatcatcctgaaattattcgtcgccttggattaatctcaattaatactgcattagaattagatatatacggaaatgttaactctactcacgttttaggtacaaaaatgatgaatggtattggtgggtctggtgattttgcaagaaatgctcgcctagctatctttgttactaaatcgattgcgaaaggtggtaacatttcaagtatcgttcctttcgtttctcatgtagaccatactgaacatgatgtagatgttatcgtcactgaacagggatatgccgacttaaggggacttgcgccaagagaaagagtggaacttattattgagaattgcgcacatccaatgtatcgtgaacagctacgagcttattacgaagaagcaaaaataagaggtggacaaactcctcatattttagaaaaagctttttcttggcatacgaactatgctaaaaatggaacaatgcttgaagcggtagtagaaactgtatag

SEQ ID NO: 137414 - protein, 504 aa, Bacillus cereus ATCC 14579
MENNLDRIRDQRLKDRVVTPEEAASWIQSGMTLGLSGFTRAGDVKAVPFALVNRVKNDESFKVNVYTGASLGSDVDKLFAEAGILGKRLPFQADATMRKGINNGDFLFVDQHLSHTAELLRADVLDIDFAILEAVAITEDGMIIPTTSIGNSLAFSLNAKSIIIEMNMAQSAQLEGLHDLYEPGKQGERLPIPLVKTDDRIGTIGIPIDPEKVKGIVFTNQLDSPSTIVPPDEETVIMAQHLIEFLREEVKVGRLTNRLAPLQSGIGSVANAVLHGMLDSEFEDLEVYSEVLQDAVFDLMDAGKVNFASCCSITLSEEKMQQVFSNFEKYRDKLMMRPQEISNHPEIIRRLGLISINTALELDIYGNVNSTHVLGTKMMNGIGGSGDFARNARLAIFVTKSIAKGGNISSIVPFVSHVDHTEHDVDVIVTEQGYADLRGLAPRERVELIIENCAHPMYREQLRAYYEEAKIRGGQTPHILEKAFSWHTNYAKNGTMLEAVVETV

SEQ ID NO: 137415 - DNA, 1518 bp, Bordetella bronchiseptica RB50
  CDS (1)..(1518): transl_table=11
atgcatctcgaacgtattcgccatcccggcctgcgcgcccggttggcttccccccaggaagcggcccggctggtccacgacggcatgaccgtcggcatgagcgggttcacgcgcgcgggcgactgcaaatcggtgccggcggcgctggccgaaagagccgccgccgagccgctgcgcatcacgctgctgaccggcgcctcgctggggcatgacaccgacaagctgctggcgcaggccggcgttctggcgcgccgcatgccgttccaggtcgacaccacgctgcggcgcaagatcaaccagggcgagatcgcctttgtcgaccagcacttgtccgaaaccgtcgagcagttgcgcgccggccatatcggccccatcgacatcgccatcgtcgaggcggctgccatcaccgaagacggcggcatcgtgccgaccatgtcggtcggcaactcggcctcgttcgtcgagcaggcccgcctggtcatcgtcgagctcaatctcggcgtgcccgcggccatcgaaggcctgcacgacatcgtgatcccgggcgcgcggcccggccgccagcccctgccgctggtgtcggtcgaccagcgcatcggcgcgccctgcatcgcggtggaccccgacaagatcgccgccatcgtcgtcaccaacgaaccggacagtccctcaaacgccttgccgcccgacgaggagaccggcgccatcgccggccacatcgtcggcttcctgcgccaggaagtgaaccaggggcgcctgagccgctcgctgctgcccctgcaggccggcatcggcacgatcgccaatgccgtgctgcacgggttcggcgagtcggaattcgaggggctcaccatgtattcggaagtgctgcaggacagcgcgatcgaactcctggaccagggcaagctgagtttcgcctcggcctcgtccatcacggtctcgctgccggtgtacgaacgcatcctgggcaacctcgagcactaccgccagcgcatcgtgctgcgcccgcaggaaatcagcaacgcgcccgagctggtgcgccgcctgggcgtgatcgccatcaacacggcgctggagttcgacatctacggcaacgtcaactccacccatgtgggcggcacccatatgatgaacggcatcggcggttcgggggactttgcgcgcaacgcgcacctgtccatcttcgtgaccaagtccatggccaggaacggcgatatttccagcgtggtgcccatggtctcgcatgtggaccacaacgagcacgacgtcgatatcctggtgaccgagtgcgggctggcggacctgcgcggcctggcgccgcgcgagcgcgctcgcgccatcatcgcccattgcgtgcatccctcgtaccgcgatgcgctgcgcgattacttcgagcgcgcctgcaggcgcggcgggcaaacgccccatctgctggaggaggccttctcctggcaccagcgctacaacgaaaccgacacgatgcggctggcggcgccggcggcccggcgcgtggcctga

SEQ ID NO: 137416 - protein, 505 aa, Bordetella bronchiseptica RB50
MHLERIRHPGLRARLASPQEAARLVHDGMTVGMSGFTRAGDCKSVPAALAERAAAEPLRITLLTGASLGHDTDKLLAQAGVLARRMPFQVDTTLRRKINQGEIAFVDQHLSETVEQLRAGHIGPIDIAIVEAAAITEDGGIVPTMSVGNSASFVEQARLVIVELNLGVPAAIEGLHDIVIPGARPGRQPLPLVSVDQRIGAPCIAVDPDKIAAIVVTNEPDSPSNALPPDEETGAIAGHIVGFLRQEVNQGRLSRSLLPLQAGIGTIANAVLHGFGESEFEGLTMYSEVLQDSAIELLDQGKLSFASASSITVSLPVYERILGNLEHYRQRIVLRPQEISNAPELVRRLGVIAINTALEFDIYGNVNSTHVGGTHMMNGIGGSGDFARNAHLSIFVTKSMARNGDISSVVPMVSHVDHNEHDVDILVTECGLADLRGLAPRERARAIIAHCVHPSYRDALRDYFERACRRGGQTPHLLEEAFSWHQRYNETDTMRLAAPAARRVA

SEQ ID NO: 137417 - DNA, 1560 bp, Rhodopseudomonas palustris CGA009
  CDS (1)..(1560): transl_table=11
atggtcaacgccgagcgcatccttgctcctcacctccgctccaaggtcatgaccgcagctgacgctgccgcgctgattccgtccggcgcgcatgtcggcatgagcggcttcaccggcgccggttatccgaagctgctgccgctggcgctcgccgagcgcatcaacgcgcatcacgcccgcggccagaagttcaaggtcagcgtctggactggcgcctcgacggcgcccgagctcgacggcgcactcgccaaggtcgacggcatcgagatgcggctgccttatcagtccgacccgacctgccgtaagcgcatcaacgccgggcggatggaatacatcgacatccatctgtcccacgtcgctcagcacgcctggttcggcttcctcggtaagctcgacattgctgtggtcgaagtcgccggcatccgcgaggacggcagcctgatcccgtcgtcgtcgatcggcaacaacaagacctggctcgatctcgccgacaaggtcatcctcgaggtcaacgcttggcaggacatccgcctcgaaggcatgcacgacgtctattacggcacgcagctgccgccgaaccgcaagccgattccgatcatcgcctccggtgaccgcatcggtgagcagtatctgcgctgcgattccgccaagatcgtcgcgatcgtcgagaccaacctgcccgatcgcaactcggcgttctcgccgcccgacgacacctcgcaggcgatcgccggccacatcctggatttcctcggccacgaggtgaagaagggccggctgccgcacaacctgttgccgttgcaatcgggcgtcggcaacgtcgccaatgcggtgatggccggcctcgaagatggcccgttcgacaatctcaccgcctataccgaagtgctgcaggacggcatgctgcacctgttgcgcaagggaaagctggctcacgcctcggcgaccgcgttgtcgctgtcaccggaaggctacgatgaattcctgcgcaatctcgacttctatcgcgagcgcatcgtgctgcgtcagcaggagatttccaaccatccggaagtgatccgccggctcggcgtgatcgccatgaacggcatgatcgaggccgacatctacggcaacgtcaactcgacccacgtgatgggcaccagcatcatgaacggcatcggcggctccggcgacttcgcccgcaacagcttcctgtcgttctttatgacgccgtcagccgccaagggcggcaagatctcgtgcatcgtgccgatgacctcgcatgtcgaccacaccgagcacgacgttcaggtgatcgtcaccgagcaggggctcgccgatctgcgcggcctgtcgccgaagcagcgtgccaaggtgatcatcgagaactgcgcgcacccgaccttccggccggccttgaaggaatacttcaagcgcgcgctggaatattctccgggcctgcacaccccgcacattctcgacgaagcgctgactttcctgccaaactggatggccaacaaggccgcccgcgaagcctggcgcgacgacgccgtggtgcaggcagacgcctggcggtag

SEQ ID NO: 137418 - protein, 519 aa, Rhodopseudomonas palustris CGA009
MVNAERILAPHLRSKVMTAADAAALIPSGAHVGMSGFTGAGYPKLLPLALAERINAHHARGQKFKVSVWTGASTAPELDGALAKVDGIEMRLPYQSDPTCRKRINAGRMEYIDIHLSHVAQHAWFGFLGKLDIAVVEVAGIREDGSLIPSSSIGNNKTWLDLADKVILEVNAWQDIRLEGMHDVYYGTQLPPNRKPIPIIASGDRIGEQYLRCDSAKIVAIVETNLPDRNSAFSPPDDTSQAIAGHILDFLGHEVKKGRLPHNLLPLQSGVGNVANAVMAGLEDGPFDNLTAYTEVLQDGMLHLLRKGKLAHASATALSLSPEGYDEFLRNLDFYRERIVLRQQEISNHPEVIRRLGVIAMNGMIEADIYGNVNSTHVMGTSIMNGIGGSGDFARNSFLSFFMTPSAAKGGKISCIVPMTSHVDHTEHDVQVIVTEQGLADLRGLSPKQRAKVIIENCAHPTFRPALKEYFKRALEYSPGLHTPHILDEALTFLPNWMANKAAREAWRDDAVVQADAWR

SEQ ID NO: 137419 - DNA, 1563 bp, Geobacter sulfurreducens PCA
  CDS (1)..(1563): transl_table=11
gtgtcggaattgcacagaagaatcaggaagacgaatctccatgagcggatcaggacggtagaagaggtcatccccctcttccaggacggcatgaacctgggctggtcgggcttcacccccgccggctaccccaaggcggtacccatcgccctggcggaccatgtggagaagaacgggctgcaggggaagctgcgcttcaacctcttcatcggcgcctccgtgggcgtcgagacggaagaccgctgggcctccctggacatgatcgaccgccgctggccctaccagaccggcaagaacatccaggccggcatcaactccggccgcatccgcatgggtgaccgccacctctcaatgttcgcccaggatttggggtacggcttctacaccaaggagaacggcggccggctggatctggccatcatcgagtgctccgccatcaccgagaacggcggtctggtgctgaccgcctcctgcggcgccgtccccgagatcgtccagatcgccgacaagatcatcatcgagatcaacaccgccatccccaactatgaaggcctgcacgacatcatcgaacccgtcagccctcccaaccggctcccctacctcatcagccgggtggatgaccgggccggatctccctacgtccgcgtcgataccgacaagatcgtcgccatcgtcgagtccacccatccggacaacggccgcgcttttgccgagcaggacgacacctccgaggccattgccaacaatatcctggacttcttccaggcagaggtgaaggcgggacgcctccccaagaacctgctgccgctccagtccggcgtcggctccatcgccaacgccgttatcggcggtctggccaagggccccttctccggcctgagggtctggaccgaggtactgcaggacaccatgcttgacctcttcgactccggcaagctcgatttcgcctccaccgtctccctctccttctccgtggacggcttcaagcgcttctacggcgactgggacaagtacagcgacaaggtcatcatgcgccccctctccatcgccaaccacccggagcccatccggcgcctgggatgcattgccatgaacactcccgtggagttcgacatctacgcccacgccaactccaccctggtcggcggcacgcgcatgatcaacggcatcggcggctccggcgatttcctgcgcaacgcctacctctccatcatgcacaccccgtcggcccgccccaccaagaccgaccccaccggcatcacctgcgtcgtgccccacgtcccgcacgttgaccataccgagcacgaccttgacgtgctggtcaccgagcagggcctagccgacctgcggggcctggcccccaaggaccgcgcccgcgagatcatcgccaagtgcgcccacccggactacaagcccctcctcaccgagtacctggagatggccaccagggactgcatggcccgcaaggcggggcatgagccccagttgctggaccgggtgttcaagatgcaggtgaacctggccaagaacggaacaatgaagatcgacaactgggatatctag

SEQ ID NO: 137420 - protein, 520 aa, Geobacter sulfurreducens PCA
MSELHRRIRKTNLHERIRTVEEVIPLFQDGMNLGWSGFTPAGYPKAVPIALADHVEKNGLQGKLRFNLFIGASVGVETEDRWASLDMIDRRWPYQTGKNIQAGINSGRIRMGDRHLSMFAQDLGYGFYTKENGGRLDLAIIECSAITENGGLVLTASCGAVPEIVQIADKIIIEINTAIPNYEGLHDIIEPVSPPNRLPYLISRVDDRAGSPYVRVDTDKIVAIVESTHPDNGRAFAEQDDTSEAIANNILDFFQAEVKAGRLPKNLLPLQSGVGSIANAVIGGLAKGPFSGLRVWTEVLQDTMLDLFDSGKLDFASTVSLSFSVDGFKRFYGDWDKYSDKVIMRPLSIANHPEPIRRLGCIAMNTPVEFDIYAHANSTLVGGTRMINGIGGSGDFLRNAYLSIMHTPSARPTKTDPTGITCVVPHVPHVDHTEHDLDVLVTEQGLADLRGLAPKDRAREIIAKCAHPDYKPLLTEYLEMATRDCMARKAGHEPQLLDRVFKMQVNLAKNGTMKIDNWDI

SEQ ID NO: 137421 - DNA, 1596 bp, Geobacter sulfurreducens PCA
  CDS (1)..(1596): transl_table=11
atgtcagagtacggcacactgcaggaccgcgtacgttgcaagtcactgctcaacaaggttatgtcggccgaggagactatccagttcttcaagccgggcatgaaccttggctggtccggcttcaccccggcaggttatcctaaggcagtgcccatcgcactggcagatcacgttgagaagaacagcctgcagggcaagatgaagttcaacctcttcatcggcgcctccgtcggggccgaaaccgaagaccgctgggccactctcgacatgatcgaccgtcgctggccgtatcagaccggtaagaacatcgccgccggcatcaacgagggccgcatccggatgggtgacaagcacctctccctctttgcccaggatctgggctacggcttctacaccaaggacagcgaaaccggcaagcttgacctcgccatcatcgaggtttccgccatcaccgaagacggcggactggtccccaccacctcttgcggcgttattcccgagatcctcatgatctgcgacaagatcatcgtggaagtgaacaccggtcagccctccttcgaggggatgcacgacatcgtcgtctgcaaccaccccccgaagcgccagattctgggcatcacccatgccggtgagcggatcggtacaacctacgtaccgtgcgacccgagcaagatcatcgccgtggttgagtccaagtaccgtgacaaggggcgtgccttctccgagcaggacgacacctccgaggccattgccaacaacatcatcgacttcttcagccatgaagtaaagatgggtcgtctgcccaagaacctgcttccgctccagtcaggcgtcggttccatcgccaacgctgtaatcggcggcctggccaagggtcctttctccaacctgaccgtttacaccgaagttctccaggacaccatgctcgacctgttcgattcgggcaagctggatgccgcttcctcctgctccctctctctctccgagaccccgggcttcccccgtttcttcgagaactgggagaagtacttcgacaagatcaccctgcgtccgctctccatctccaacgcaccggagccgatccgccgtctcgggtgcatcgccatgaacaccccggtcgagatcgacatctatgcccacgccaactccacgctggtcggcggcacacggatgatcaacggcctcggcggttccggcgacttccttcgcaacggcttcttgaagatcatgcacactccgtcgagccgtccatccaagaccgacccgaccggtatctcctgcgtggtgccgcactgctcccacatcgaccacaccgagcacgatctggactgcgtggtcaccgagcagggtctggccgacctccgtggtctggcaccgaaggatcgcgcaaagcggattatcgagaagtgcgcccacccggactacaagccgattctcagcgagtacttggcaatcgccagtgccgattgcctcaagcgcaaggtgggccacgagccgcaactgtgggaccgcgccttcaagatgcacctcaacctggagcgcaacggcaccatgaagatcaagaactgggacgtgaaggtcgatctctgcgagtaa

SEQ ID NO: 137422 - protein, 531 aa, Geobacter sulfurreducens PCA
MSEYGTLQDRVRCKSLLNKVMSAEETIQFFKPGMNLGWSGFTPAGYPKAVPIALADHVEKNSLQGKMKFNLFIGASVGAETEDRWATLDMIDRRWPYQTGKNIAAGINEGRIRMGDKHLSLFAQDLGYGFYTKDSETGKLDLAIIEVSAITEDGGLVPTTSCGVIPEILMICDKIIVEVNTGQPSFEGMHDIVVCNHPPKRQILGITHAGERIGTTYVPCDPSKIIAVVESKYRDKGRAFSEQDDTSEAIANNIIDFFSHEVKMGRLPKNLLPLQSGVGSIANAVIGGLAKGPFSNLTVYTEVLQDTMLDLFDSGKLDAASSCSLSLSETPGFPRFFENWEKYFDKITLRPLSISNAPEPIRRLGCIAMNTPVEIDIYAHANSTLVGGTRMINGLGGSGDFLRNGFLKIMHTPSSRPSKTDPTGISCVVPHCSHIDHTEHDLDCVVTEQGLADLRGLAPKDRAKRIIEKCAHPDYKPILSEYLAIASADCLKRKVGHEPQLWDRAFKMHLNLERNGTMKIKNWDVKVDLCE

SEQ ID NO: 137423 - DNA, 1581 bp, Magnaporthe grisea 70-15
  CDS (1)..(1581)
atggcgagccccgtggcgtcggcggccctcaaggccaggatccgaagtccaccgatgctcaagaagctctgccgtcccgaggacatgcttcatcactttcccaacggagcttacattggctggtccggcttcactggtgttggatacccaaaaaagactcccactttcctagccgatcatgtcgaaaagaacaaccttcagggcaagatgaaatactctctatttgttggtgcctcgtccggaaccgagaccgaggacaggtgggcgagccttgacatgatcaacaggcgaagccctcaccaagtcggcaagaacatcgccaagggaatcaacagtggcaagatcaactttttcgacaagcacctctccatgttccccgtggacttggtatacggcttttacacaaaggataggccacacaacaaccttgatgtcacggtggtagaggcaacagaaattctcgaggacggcagcattgttccgggtgcctcggttggagcaactccggagcttatacagatggccgacaagatcatcatcgaagtcaacacagctttgccgagcatggagggacttcacgatattaccatgacagacctgcccccgcaccgcaagccctacttgatccagggcgtggaggaccgtattggcactacctcgattcctatcgacccgtcaaaggttattggtgttatcgagtcggactaccaggataagacggcgcccaacacgccggccgatgagggctccgccatgattgccaaccacttgatcgagtactttgagcacgaggtcaagcacggccgcatgcccaagaacctgctgccgctccagtcgggcattggaaacattgccaacgccgtcattggaggtcttgccaactccaaattcgagaacttgaaggtttggaccgaggtcatccaggacacatttttggaccttttcgactcgggcagcttgtcctacgccacggccacatcggtgcgcttttcgcccgagggattcgagcgcttttacaacaactttgacagatacaaggagaggattctgttgcgatcgcagtcggtgtccaacgcccccgagatcatccgccgtctgggcgtcatcggcatgaacacccccgtcgaggttgacatctacgcccacgccaacagcacctgcgtcatgggctcgcgcatgctgaacggcctgggcggttcggccgacttcctccggtccgcaaagtacagcatcatgcacacgccgtcgacgcggccgagcaagactgacccccacggcgtcagctgcatcgtccccatgtgcacgcacatcgaccagacggagcacgacctcgacgtcgtcgtcacggagaacggcttggcggacgtcaggggtctgtccccacgggagagggcgcgggttatcattaggcaatgcgcccacccggtctaccgcccgatcctggaggcttactttgagaaggccgagtttgagtgcttgcgcaagggcatgggccacgagccgcacctccttttcaacacttttgacatgcacaaggcgctacaggaggagggaagcatgcagaaggtcaagagctggtag

SEQ ID NO: 137424 - protein, 526 aa, Magnaporthe grisea 70-15
MASPVASAALKARIRSPPMLKKLCRPEDMLHHFPNGAYIGWSGFTGVGYPKKTPTFLADHVEKNNLQGKMKYSLFVGASSGTETEDRWASLDMINRRSPHQVGKNIAKGINSGKINFFDKHLSMFPVDLVYGFYTKDRPHNNLDVTVVEATEILEDGSIVPGASVGATPELIQMADKIIIEVNTALPSMEGLHDITMTDLPPHRKPYLIQGVEDRIGTTSIPIDPSKVIGVIESDYQDKTAPNTPADEGSAMIANHLIEYFEHEVKHGRMPKNLLPLQSGIGNIANAVIGGLANSKFENLKVWTEVIQDTFLDLFDSGSLSYATATSVRFSPEGFERFYNNFDRYKERILLRSQSVSNAPEIIRRLGVIGMNTPVEVDIYAHANSTCVMGSRMLNGLGGSADFLRSAKYSIMHTPSTRPSKTDPHGVSCIVPMCTHIDQTEHDLDVVVTENGLADVRGLSPRERARVIIRQCAHPVYRPILEAYFEKAEFECLRKGMGHEPHLLFNTFDMHKALQEEGSMQKVKSW

SEQ ID NO: 137425 - DNA, 1581 bp, Gibberella zeae PH-1
  CDS (1)..(1581)
atggcttctcctgttgcttctgccgccctcaaggcgcgtgtgcgcaatcccgctctcctcaagaagcttgcgcgacctgaggatctcatgcaccactttcccaatggttcttatatcggctggtctggatttaccgctgtcggatacccaaagaaggtccctgccgccatggccgactatgtcgagcagaacaacctccagagcaagatgaagtactccctctttgtcggcgcctcggcaggttccgagacggagaaccgatgggctgctctcgacatgatcaacaggcgaagccctcaccaggtcggcaaggacattgccaagggaatcaactctggtcgcatcaacttcttcgacaagcatctgtccatgttcccttcggatcttgtctacggtttttacacaaaggaccgtcaaaacagcaaccttgatgttactgttgttgaggctactgacattcttgaggatggcagcttcgtccctggtgcctctgttggtgccactcccgagttgatccaaatggccgacaaggtcatcatcgaggtcaacactgctatcccctccttcaagggtctccacgatattacctttaccgacgtccctccccaccgcacaccttacaacatcaccgccgttgaggaccgcattggttccacttcggtcaaggttgatccctccaaggtcgtcgctatcgtcgagtccgactactgggatgccaccggccccaacgccgccatggacgacacctctcgccagattgccggccacttgattgagttcttcgagcacgaggttgctcacggtcgcatgcccgccaaccttttgcctcttcaatccggtatcggcaacgtcgccaacgctattgtcggtggtctgaacgagtccaagttcaagaacctcaaggtctggaccgaggtcatccaggacactttcctcgatctcttcgactctggcaagctcgactatgctaccgccacctctactcgcttctctcccgacggtttcaagcgcttctacgacaactgggacgcctacgccgacaagatcctcctccgaagccaggctgtctccaacgctcccgagatcatcaagcgtcttggtgttatcggcatgaacacccctgttgaggtcgacatttatgcccacgccaactctacttgtgttagcggaacccgtatgctcaacggtcttggtggatcagccgatttcctccgtaacgccaagtactctatcatgcacactccctccagccgaccttccaagaccgatccccacggtgtctcttgcattgtccccatgtgcactcacattgaccagaccgagcacgacctcgatgtcattgtgactgagcagggtcttgctgatgtccgcggtctttctccccgcgagcgcgcccgcgtcatcatcaacaagtgtgctcaccccaagtaccagcctatcctgacacactactacgagaaggccgagagtgagggtctcaagaagggtatgggccacgagcctcacctcctcttcaacgctttcgatctccacaaggctcttgctgaggagggcagcatgctcaaggtcaagccttggtaa

SEQ ID NO: 137426 - protein, 526 aa, Gibberella zeae PH-1
MASPVASAALKARVRNPALLKKLARPEDLMHHFPNGSYIGWSGFTAVGYPKKVPAAMADYVEQNNLQSKMKYSLFVGASAGSETENRWAALDMINRRSPHQVGKDIAKGINSGRINFFDKHLSMFPSDLVYGFYTKDRQNSNLDVTVVEATDILEDGSFVPGASVGATPELIQMADKVIIEVNTAIPSFKGLHDITFTDVPPHRTPYNITAVEDRIGSTSVKVDPSKVVAIVESDYWDATGPNAAMDDTSRQIAGHLIEFFEHEVAHGRMPANLLPLQSGIGNVANAIVGGLNESKFKNLKVWTEVIQDTFLDLFDSGKLDYATATSTRFSPDGFKRFYDNWDAYADKILLRSQAVSNAPEIIKRLGVIGMNTPVEVDIYAHANSTCVSGTRMLNGLGGSADFLRNAKYSIMHTPSSRPSKTDPHGVSCIVPMCTHIDQTEHDLDVIVTEQGLADVRGLSPRERARVIINKCAHPKYQPILTHYYEKAESEGLKKGMGHEPHLLFNAFDLHKALAEEGSMLKVKPW

SEQ ID NO: 137427 - DNA, 1578 bp, Aspergillus nidulans FGSC A4
  CDS (1)..(1578)
atgtcggcttccgccctgctcaggagccgtgtccgacggccctcgtaccttaacaagatcgccaaggctgaggaccttattgatctcttccccaatggctcgtatatcggctggtccggtttcacaggtgttgggtatccgaagaaagtccccacggcgctggctgaccacgtcgagaagaatggccttgagggcaagctcaagtacacactcttcgtcggagcttcatctggtgcagagactgaaaaccgctgggcgagactgaacatgatcgaccgccgaagccctcaccaggtcggcaaggagattgccaagggtatcaacaacggtcagatcaaattctttgataagcatctcagcatgttcccgtccgatcttacctacggctggtacacactgaacaagcctaaaaaccgtattgatgttgctgtcatcgaagcctccgccatcacagaggacggtggtatcattcctggagcttcagtcggcgcatcgcccgagctcgtgcagatggcggacaaggtcattattgaggtcaacaccgccagcccttccttcgagggtctgcacgacattaccatgtccgagctccccccgaaccgcaagccttacctgatcctccagcccgaagaccgtatcggtacccctcacatccccgtcgaccctgagaaggtcgttgccattgtcgaatccgactaccctgaccagactcagcccaactctcctgaagacgccaactcccaggccatcgcctccaacctcattgaattcctgaagcatgaagtcaagcatggccgtctcccccccaaccttcttcccatccaatccggtattggaaacattgccaacgccgtcattggcggcctcagcaagggtggcgcagactttaccaacctcaaggtatggaccgaggtcctccaagactctttcctcgacctcttcgacagcggcaacctcgacttcgcgacggcgacttccatccgcttctcccccgatggcttcaagcgcttctacgacaactgggagcgctatgctggcaagcttctcctgcgctctcaacaggtttccaactctcctgagatcatccgtcgtctgggctgcatcggcatgaacactcccgttgaagtcgacatctacgcccacgctaacagcacgtgcgtcatgggctcgcgcatgctcaacggtctcggcggctctgccgatttcctgcgttcttccaagtacagtatcatgcacacccctagtgtccggccctccaagacagaccccaccggtgtctcctgcatcgttcccttcgctacacacattgaccagaccgagcacgatctcgatgtgattgttacagagcaaggtcttgctgatgtgcgtggcttgagtccccgtgagcgtgcacgtgtcattatcaagaagtgctctcaccccgactacacaccaatcctgacagattacctggaccgtgctgagttcgagtgcttgaagaagggcatggctcacgagccccacctgctcttcaacgcgttcaagatgcacaagaacctccaggagaacggaacgatgaagatttctaactgggactaa

SEQ ID NO: 137428 - protein, 525 aa, Aspergillus nidulans FGSC A4
MSASALLRSRVRRPSYLNKIAKAEDLIDLFPNGSYIGWSGFTGVGYPKKVPTALADHVEKNGLEGKLKYTLFVGASSGAETENRWARLNMIDRRSPHQVGKEIAKGINNGQIKFFDKHLSMFPSDLTYGWYTLNKPKNRIDVAVIEASAITEDGGIIPGASVGASPELVQMADKVIIEVNTASPSFEGLHDITMSELPPNRKPYLILQPEDRIGTPHIPVDPEKVVAIVESDYPDQTQPNSPEDANSQAIASNLIEFLKHEVKHGRLPPNLLPIQSGIGNIANAVIGGLSKGGADFTNLKVWTEVLQDSFLDLFDSGNLDFATATSIRFSPDGFKRFYDNWERYAGKLLLRSQQVSNSPEIIRRLGCIGMNTPVEVDIYAHANSTCVMGSRMLNGLGGSADFLRSSKYSIMHTPSVRPSKTDPTGVSCIVPFATHIDQTEHDLDVIVTEQGLADVRGLSPRERARVIIKKCSHPDYTPILTDYLDRAEFECLKKGMAHEPHLLFNAFKMHKNLQENGTMKISNWD

SEQ ID NO: 137429 - DNA, 1575 bp, Candida albicans SC5314
  CDS (1)..(1575): transl_table=12
atgtcagctattttaaaacaaagagttaaatatgctccatatctcaagaaattaagaactggtgagcaatgtattgatttattcaagcacggtcaatatttaggttggtccggtttcactggtgttggggcaccaaaagtcattcctactacattagtggatcacgttgaaaaaaataatttacaaggtaaattgggattccatttatttgttggggccagtgctggacctgaagaaagtagatgggccgaaaataatatgattttaactagagctcctcatcaagttggtaaaccaattgctgctgctatcaatgatggtagaactcaattttttgataaacatttgtcaatgttccctcaagatttaacttatggattctacaccaaagataaaccaaatggatctaatttggattatactattattgaagccactgctatcactgaagatggatccattgttcctggtccagctgttggtgcctctccagaaatgatctctgtttctgataaaatcattattgaagtcaacaccaaaactccatcttttgaaggtattcacgatattgatatgccagtgaatcccccattcagacaaccttatcctcacacatcggctgatttcaagattggtaaaactgctattcctgttgacccagaaaaagttgttgccattgttgaaagtactagtggtgataaagtcccaccaaacactcccagtgacgaacaatcaagaggtattgccaaccatttgattgagttcttggaacacgaagtcaaacaaggtagattgccagccaatttgcacccattacaatctggtattggtaacattgccaatgctgttgttgaaggattggcttcatcaaatttcaaaaacttgactgtgtggactgaagtcttgcaagattcatttttggatttctttgaatctggttcattggattacgccactgcaacttcaattagattgaccaatgatggttttaagaaattttatgacaattgggatacttattctaagaaattatgtcttagatctcaagttgtttccaactcaccagaaatcattagaagattgggtgttattgctatgaacaccccagttgaagttgatatctatggtcatgccaattctaccaatgtcatgggatcaagaatgttgaatggtttgggtggttctgctgatttccttagaaacgccaaattgtcaattatgcatacaccatctgctagaccatctaaagttgatccaactggtctttcatgtattgttccaatggcttctcatgttgatcaaacagaacacgatttagatgttgttgttactgaacaaggtttggctgatcttagaggattagctccaaaagccagagccaaggtgatcattgataaatgttctcatcctgattataaaccacaattgcaagaatactatgatagatcagtattctatgccaccaagaaaaagactttacacgaaccacacattttgagagacgtgtttaagatgcatttgaacttccaagaaaatggtaccatgaaattagattcttgggatcaaaaattttaa

SEQ ID NO: 137430 - protein, 524 aa, Candida albicans SC5314
MSAILKQRVKYAPYLKKLRTGEQCIDLFKHGQYLGWSGFTGVGAPKVIPTTLVDHVEKNNLQGKLGFHLFVGASAGPEESRWAENNMILTRAPHQVGKPIAAAINDGRTQFFDKHLSMFPQDLTYGFYTKDKPNGSNLDYTIIEATAITEDGSIVPGPAVGASPEMISVSDKIIIEVNTKTPSFEGIHDIDMPVNPPFRQPYPHTSADFKIGKTAIPVDPEKVVAIVESTSGDKVPPNTPSDEQSRGIANHLIEFLEHEVKQGRLPANLHPLQSGIGNIANAVVEGLASSNFKNLTVWTEVLQDSFLDFFESGSLDYATATSIRLTNDGFKKFYDNWDTYSKKLCLRSQVVSNSPEIIRRLGVIAMNTPVEVDIYGHANSTNVMGSRMLNGLGGSADFLRNAKLSIMHTPSARPSKVDPTGLSCIVPMASHVDQTEHDLDVVVTEQGLADLRGLAPKARAKVIIDKCSHPDYKPQLQEYYDRSVFYATKKKTLHEPHILRDVFKMHLNFQENGTMKLDSWDQKF

SEQ ID NO: 137431 - DNA, 1545 bp, Clostridium difficile 630
  CDS (1)..(1545): transl_table=11
atgaataatgaaggagcatttgaagaattaagtggaagattaagaaataaagaattgtgtgatttaataatgaatgcagatgaagctgctaaaattatagaggatggcatggttattggagttagtggatttacaccttcaggctatccaaaagcagtaccattagcagtttcagaaagagctaaaagtggagaaaagataaaattaaccgtatattcaggagcatctttaggtccagaagttgatggagcatggtcagaagcaggtataattgaaagaagacttccttatcaaactaattcaatacttagaaataatattaataaaggtgttgttgattatatagatatgcacctaagtcattctactcaatttttaaattatggaactatacctaaagtagatgtagctatagtagaagcacttgcaataactgaagaagggaatattataccaactagtgggataggtaattctccatcttttataaaaagtgcagataaagtaatagtagagataaatcttgcaaaaccaatggaaatggaaggtatggcagatatatatattacggaaaatccaccaaatagaaaaccaatagaaataaatcatcctaaggatagaattggaacaacatatataccttgtggtttggataaaattgcaggagtagtaattaccaatatgcaagataagacccgtccattgggggttgtagatgaagcttcgaaaaaaatatcaaataatattattgcttttttaagagaagaagtaaagtcaggcagattatcaaagaatttacttcctcttcaatctggtgtaggaagtgtagcaaatgcagtattatatggattatgtgaatctgaatttgaaaatttaacttgttatacagaggttgtacaggactctatgttggatttaataagaatgggtaaagttacaatggcatctactacatctgtaagtccatctccagaaggattaataaaatttgaaaaagatattgatttttttaaggataagattatattaagacctcaagaaattagtaacaatccagaaatagccagaagaattggtgtaattgcaatgaacactgcaattgaagttgatatttatggaaatgtaaattctactcacataatggggtcaaagatgatgaatggaattggaggttctggtgattttgctagaaatggagcaataactatatttagtactgagtcaattgcaaaaaatggtgatatatcatcaatagtacctatggtatctcacgtagaccacactgaacatgatgtaatggtaattgtaacagaacaaggatatgctgatttaagaggtctcgcacctagagaaagagctataaaaataatagaaaattgtgcccatccagattataaagaacaacttagggattatttaaatagagcttgtaaaagtggagcaaaacaaacacctcacatattggacgaagctttatcatggcatagtaaatttatgagtacaggtacaatgaaaaaggctgaaacttttaaaagtgcattataa

SEQ ID NO: 137432 - protein, 514 aa, Clostridium difficile 630
MNNEGAFEELSGRLRNKELCDLIMNADEAAKIIEDGMVIGVSGFTPSGYPKAVPLAVSERAKSGEKIKLTVYSGASLGPEVDGAWSEAGIIERRLPYQTNSILRNNINKGVVDYIDMHLSHSTQFLNYGTIPKVDVAIVEALAITEEGNIIPTSGIGNSPSFIKSADKVIVEINLAKPMEMEGMADIYITENPPNRKPIEINHPKDRIGTTYIPCGLDKIAGVVITNMQDKTRPLGVVDEASKKISNNIIAFLREEVKSGRLSKNLLPLQSGVGSVANAVLYGLCESEFENLTCYTEVVQDSMLDLIRMGKVTMASTTSVSPSPEGLIKFEKDIDFFKDKIILRPQEISNNPEIARRIGVIAMNTAIEVDIYGNVNSTHIMGSKMMNGIGGSGDFARNGAITIFSTESIAKNGDISSIVPMVSHVDHTEHDVMVIVTEQGYADLRGLAPRERAIKIIENCAHPDYKEQLRDYLNRACKSGAKQTPHILDEALSWHSKFMSTGTMKKAETFKSAL

SEQ ID NO: 137433 - DNA, 1515 bp, Burkholderia vietnamiensis G4
  CDS (1)..(1515): transl_table=11
atgtcttcttcacgcatccttgctcccgctttgcgttcgctcgtccgcaccgccgacgaagccgccgcgatgatccgtcccggcatgaccgtcgcgatgagcggcttcaccggctccggctatccgaaggccgtgccggccgcgctcgccgcgcacatcgaggcggcccacgcccgcggcgaaacgttccggatcaacgtgctgacgggcgcgtcgaccgcgcctgaactcgacggcgcgctcgcccgcaccgacggcatctcgatgcgtctgccgtaccagtccgacccgacgctgcgcgacaagatcaacaacggcgaagtcgattaccaggacgtccacctgagccacgtcgcccagtacgcatggttcggcctgtacggcgatctcgacgtcgcgatcgtcgaagtcgcgggcatccgcgaggacggcctgctgattccgtccgcgtcgatcggcaacaacaagacgtggctggagcaagccaagcacgtgatcctcgaagtcaactcgcgccagccgctcggcctggacgggatgcacgacgtctattacggcaccgcgctgccgccgcaccgcaagccgattccgctcacgaagagcgacgaccgcatcggcgaaccgtacctgcgctgcccggccgagaagatcgtcgcgatcgtcgaaaccgacgcgcccgatcgcagcaacgcgttctccgcaccggacgccacgtcgaagcagatcgcgacgcaactgatcgacttcctgcgtcatgaagtgaagcgcggccggctgccggaaaacctgctgccgctgcagtcgggcgtcggcaacatcaccaacgcggtgctcgccgaactgagcacggccggcttctcgaacctcaccgcgtacaccgaggtgatccaggacggcatgctcgacctgctcgacgacggcacgctgagcttcgcgtcggccaccgcgctgtcgctgagcccgccggccgtgcagcgtttcgccgacgagatcgcgacgttccgcgaaaagatcctgctgcgtccgcaggagatcagcaaccatccggaactcgtgcgccgcctcggctgcatcgcgatgaacgggatgatcgaagccgacatctacggcaacgtgaactcgacgcacgtgatgggcacgaagatccagaacggcatcggcggctcgggcgacttcgcgcgcaacggctatctgtcgtgcttcatgtcggccagtaccgcgaagggcggcgcgatctcgcggatcgtgccgatggcgagccacgtcgatcataccgagcacgacgtcgcggtggtcgtcaccgagcagggcctcgccgatctgcgcggcctgtcgccgaagcagcgcgcgcgcaagatcatcgcgaactgcgcgcacccggattaccggccgatgctcgaggactacttcgagcgcgcgtcgcgcgagagcttcggcaagcacacgccgcatctgctcgccgagtcgctgtcgtggcacgagcgcttcgtgcgcaccggctcgatgaaggtctga

SEQ ID NO: 137434 - protein, 504 aa, Burkholderia vietnamiensis G4
MSSSRILAPALRSLVRTADEAAAMIRPGMTVAMSGFTGSGYPKAVPAALAAHIEAAHARGETFRINVLTGASTAPELDGALARTDGISMRLPYQSDPTLRDKINNGEVDYQDVHLSHVAQYAWFGLYGDLDVAIVEVAGIREDGLLIPSASIGNNKTWLEQAKHVILEVNSRQPLGLDGMHDVYYGTALPPHRKPIPLTKSDDRIGEPYLRCPAEKIVAIVETDAPDRSNAFSAPDATSKQIATQLIDFLRHEVKRGRLPENLLPLQSGVGNITNAVLAELSTAGFSNLTAYTEVIQDGMLDLLDDGTLSFASATALSLSPPAVQRFADEIATFREKILLRPQEISNHPELVRRLGCIAMNGMIEADIYGNVNSTHVMGTKIQNGIGGSGDFARNGYLSCFMSASTAKGGAISRIVPMASHVDHTEHDVAVVVTEQGLADLRGLSPKQRARKIIANCAHPDYRPMLEDYFERASRESFGKHTPHLLAESLSWHERFVRTGSMKV

SEQ ID NO: 137435 - DNA, 1515 bp, Acinetobacter sp. ADP1
  CDS (1)..(1515): transl_table=11
atgtctttagatcgtattcgattagcctcattacatgacaaagtgatcagcgcagatgctgctgctgcatttatccaagacggtatgacagtcggtatgagcggttttactcgtgcgggagaagcaaaagctgtcccacaagctttagttgaacgtgcaaaacaaaacccgttaaaaattacattaattacgggtgcgagcttagggaatgatctcgacaaacagttaacagaagcaggtgtgctcgcacgccgccttcctttccaagttgacaatactttacgtcgcgctatcaacaacggcgaagtcatgtttattgaccagcacttgtctgaaacagttgaacaaatgcgtaatttacagcttaaacgcccagacgttgctgtaatcgaagcgattgcaattactgaagatggcggcattattccaaccacatctgtaggtaactcagccagttttgccatctttgcagaaaaagtaattgttgaaatcaatacttctttgagcgaagcattcgaaggcttacacgatatttatattccgtcttaccgtccaacgcgccagccaattccattaactaaagtggacgagcgcattggaacaaccgctattcagattgatcctgcaaaaattgtcgggattgtgtttaacgacaccgcagattcaccatcgaccgtcacgcttccagatgatgaaacacaaggtattgccaatcacctgatcgcgttctttgaaaaagaagttgcagaaggtcgtttgcctcaaaatcttggacctttacaggcgggcattggctctattgccaatgcagtactcacaggtcttaaagattcaaattttgaagatttagtgatgtattccgaagtacttcaagactgtacttttgaattgattgatgcaggtaaaatgaaatttgcatcgggcagctcaattacactttctgcaaaatgcggtgaaaaagtatttggcaatattgaagcctacaaagacaagttggtacttcgtccgcaagaaatctcaaaccaccctgagctggtgcgtcgtttagggattattggtatcaacactgcacttgagtttgatatttacggaaacgttaactcaacgcatgtgtgtggaaccaaaatgatgaacggcattggtggttctggtgactttgcacgtaatgcacacctcgccatctttgtcaccaagtcgattgcaaaaggtggtgatatttcatcgatcgtaccaatggtttctcacgttgaccattctgagcacgatgttgatattctggtgacagaacaaggtcttgcagatcttcgtggtcttgcacctcgtgaacgtgctcgtgcagtcatcgatcactgtgtacatccattgtataaagatgctttaaacgattacttctcacgtgcgagtgcgaaaggtgggcacacccctcacctgctacgtgaggcattgtcttggcatgtaaattttgaagaaaatggccacatgcttgccattgagcctgaagctaaatctgcttaa

SEQ ID NO: 137436 - protein, 504 aa, Acinetobacter sp. ADP1
MSLDRIRLASLHDKVISADAAAAFIQDGMTVGMSGFTRAGEAKAVPQALVERAKQNPLKITLITGASLGNDLDKQLTEAGVLARRLPFQVDNTLRRAINNGEVMFIDQHLSETVEQMRNLQLKRPDVAVIEAIAITEDGGIIPTTSVGNSASFAIFAEKVIVEINTSLSEAFEGLHDIYIPSYRPTRQPIPLTKVDERIGTTAIQIDPAKIVGIVFNDTADSPSTVTLPDDETQGIANHLIAFFEKEVAEGRLPQNLGPLQAGIGSIANAVLTGLKDSNFEDLVMYSEVLQDCTFELIDAGKMKFASGSSITLSAKCGEKVFGNIEAYKDKLVLRPQEISNHPELVRRLGIIGINTALEFDIYGNVNSTHVCGTKMMNGIGGSGDFARNAHLAIFVTKSIAKGGDISSIVPMVSHVDHSEHDVDILVTEQGLADLRGLAPRERARAVIDHCVHPLYKDALNDYFSRASAKGGHTPHLLREALSWHVNFEENGHMLAIEPEAKSA

SEQ ID NO: 137437 - DNA, 1515 bp, Propionibacterium acnes KPA171202
  CDS (1)..(1515): transl_table=11
atgtcagagcggattgccaacgcagccctgcgtcagaaagtgatgagcgcggacgacgcggctgccctcatccatgacggcgaccagatcggattcggtggattcactgggtcgggctaccccaaggaacttccaggcgcactggccaagcgcatccaagagtcccacggccgtggtgagaagttcaccgtcaacgtcttcaccggagcctcgaccgctcctgaactcgacggcgccctcgcctctgtcgacggcatcggctggcgtatgccgtaccagtccgatccccagatgcgaagcaagatcaacgacggcacctccttctataccgacatccatctgtcggagtcgggcatgatggtgcgtcagggcttctttggcaaggtcgacttcgccgtcatcgaggccacacgaatcaccgcggacggggatgtcgtcctcacctcgtcggttggcaacaacgcggtctactgtgacaccgccgagaaagtcatcatcgaggtaaattcgtggcagtccgaggacctcgaaggaatgcacgacatctacggtggttttgcgcttcctccgaaccgggtgccgatcccgattacccatcccggtgaccggatcggtgacaagttcctccacatcccccagaacaagattgtggcgatcatcgagaccgcaggccccgaccgcaacaccccgttcaagccgatcgacgacgactctcgcaagatcgccggattcctgctcgacttttatgacaacgaggtcaagcagggacgcatccccaagaacctgctgccgctccagtccggcgtcggcaacatcccgaacgccgttcttgacggcctgcttcactccgacctggagcatctgacctcgtacaccgaggtgatccaggacggcatgatcgacctcatcgacgccggcaagcttgacgtcgcctccgctaccgccttctcgctgtcgcctgactatgcgcacaagatgaacgagaatgcagccttctaccgcgatcacatcattttgcgcccgcaggaaatttcgaaccaccccgaggtcattcgccgcctcggcgtcatcggcgctaacggcatgatcgaggccgacatctatggcaatgtcaactcgacccatgtcatgggctcgcggatgatgaacggcatcggtggatccggcgacttcacccgcaatgcctacatttcggccttcgtgtccccatcgacagccaagggtggcgccatctcggcgatcgtcccgatggtctcccacgtcgaccacaccgagcacgacggcatggttatcatcaccgagcaaggcatcgctgatctgcgtggcctggccccacgccagcgcgcccggaagatcatcgagaactgtgcccacccggactaccgtccgatgctgctcgactactacgagcgtgcgctgcgcgactgcaagttcaagcacaccccgcacctgctgggtgaggcgtactcatggcacacccggttcctcgagaccggcaccatgaagaaggactga

SEQ ID NO: 137438 - protein, 504 aa, Propionibacterium acnes KPA171202
MSERIANAALRQKVMSADDAAALIHDGDQIGFGGFTGSGYPKELPGALAKRIQESHGRGEKFTVNVFTGASTAPELDGALASVDGIGWRMPYQSDPQMRSKINDGTSFYTDIHLSESGMMVRQGFFGKVDFAVIEATRITADGDVVLTSSVGNNAVYCDTAEKVIIEVNSWQSEDLEGMHDIYGGFALPPNRVPIPITHPGDRIGDKFLHIPQNKIVAIIETAGPDRNTPFKPIDDDSRKIAGFLLDFYDNEVKQGRIPKNLLPLQSGVGNIPNAVLDGLLHSDLEHLTSYTEVIQDGMIDLIDAGKLDVASATAFSLSPDYAHKMNENAAFYRDHIILRPQEISNHPEVIRRLGVIGANGMIEADIYGNVNSTHVMGSRMMNGIGGSGDFTRNAYISAFVSPSTAKGGAISAIVPMVSHVDHTEHDGMVIITEQGIADLRGLAPRQRARKIIENCAHPDYRPMLLDYYERALRDCKFKHTPHLLGEAYSWHTRFLETGTMKKD

SEQ ID NO: 137439 - DNA, 1533 bp, Psychrobacter arcticus 273-4
  CDS (1)..(1533): transl_table=11
atgacatcactgaatcatgaaggtcgtgtacttcacgacggtctaagcaaaaaaatcatgtctgctgatcaagcagcagcgttcatcaaaaacgacatgaatgtcggtatgagtggctttaccggtgcaggttatccaaaagcgataccagctgcgcttgccaaacatatagaagcggctcatgctcgcggtgaagactttcaaattggtttattgactggtgcgtctactgcaacggaatgtgatggcgtattggcagaagcgaacggcatcaagtggcgcacgccgtatcaatcagagcctgcactacgtaagcaaatcaatgcgggtgaagcgcattattttgatgtgcatttatcgcatgtggcgcagcagagcaccattggtttttatggcaagatgcatatggctgtcgttgaggtatctggtattttgccagatggtcgcctgattccatcgacctctatcggtaacaacaatgcatggctagaaaatgcagacaaaatcattttagaagtgaacgcgcagcaaagcttgatgttagaaggtatgcatgatgtctataatgatatcggtatgccgccaaatcgtaagcctattccacttgtgaccccaggcggacgtattggtgtgccatatctacattgtgacttggataaagtggttgccgttgtcttaacgaattcgccagatcgcaacagcaagtttgcagaccctgatgaatcttcaaacaaaatcgccagtcatatcattgatttcttccatgatgaagtcaaaaaaggtcgcatgccagaaagtttattgccaatccaatctggtgtgggtaacgtagccaatgcagtattggcaggactacaaaacagcccgtttgagaatttgacaggctacactgaagtattgcaagacggcatgttagaccttattatgtctggtaaaatgaccatggcttcggccactgcactgtcattgagcccagatgcgctagaacgatttaatgccaatatcgaagatttgcgtgcgcgtatcgtattgcgcccacaagaaatcaccaaccatcctgaagtggcgcgtcgcttaggcgtattggcaattaatgccatgattgagtgcgacttatatggtaacgtcaactcaacccacgtcatgggcaccaatatgatgaatggcttgggcggttcgggtgatttcgctcgtaacgcttatacttcattctttgtatcaccatcagtggcaaaagatggtgctatctcttgtatcacgccgatggtatcgcatcatgaccatactgagcatgatgtgatggtcattgtcacagagcaagggttggcagatttgcgtggtctatctccgcgtcaacgtgcaaaagcgattatcgataactgcgcccatcctgactatcgcccaatgctgcaagattattttgatcgtgcttcagacactgctggtatgcaaacaccacatatcttggacgaagcattatcatggcatcagcgttatgttgaaaccggtgatatgcgtataaaaaaaggctga

SEQ ID NO: 137440 - protein, 510 aa, Psychrobacter arcticus 273-4
MTSLNHEGRVLHDGLSKKIMSADQAAAFIKNDMNVGMSGFTGAGYPKAIPAALAKHIEAAHARGEDFQIGLLTGASTATECDGVLAEANGIKWRTPYQSEPALRKQINAGEAHYFDVHLSHVAQQSTIGFYGKMHMAVVEVSGILPDGRLIPSTSIGNNNAWLENADKIILEVNAQQSLMLEGMHDVYNDIGMPPNRKPIPLVTPGGRIGVPYLHCDLDKVVAVVLTNSPDRNSKFADPDESSNKIASHIIDFFHDEVKKGRMPESLLPIQSGVGNVANAVLAGLQNSPFENLTGYTEVLQDGMLDLIMSGKMTMASATALSLSPDALERFNANIEDLRARIVLRPQEITNHPEVARRLGVLAINAMIECDLYGNVNSTHVMGTNMMNGLGGSGDFARNAYTSFFVSPSVAKDGAISCITPMVSHHDHTEHDVMVIVTEQGLADLRGLSPRQRAKAIIDNCAHPDYRPMLQDYFDRASDTAGMQTPHILDEALSWHQRYVETGDMRIKKG

SEQ ID NO: 137441 - DNA, 1512 bp, Dechloromonas aromatica RCB
  CDS (1)..(1512): transl_table=11
atgggtggagcatcccgcatccttaacaccgctttgcgcagcaagatcatgtcggccagcgaggcagccagcctcattccctcgggggtcaatgtcggcatgagcggttttaccggtgccggttatcccaaggaggtgccgaccgaactggccaagcgcatcatggatgccaacctgcatggccgcaagttcaagatcggcgtgtggaccggcgcgtcgaccgcccctgaactggatggcgccctggccatggtcgatggcgtcgaaatgcgtctgccttaccagtccgatccgacctgccgcaagcgcatcaacgccggtgagatggaatacatcgacatccatctttcccacgtcgcgcagttcgtctggttcggttttctcggcaagctcgatgtcgccgtggtcgaagtctccggcatcctggaagacgggcggctgattccgtcgtcgtccatcggcaacaacaagacctggctggatcaggccgacaagatcatcctcgaagtcaattcgtggcagaacccgctgctggaggggatgcacgacatttactacggcaccaacctgccgccctatcgtcagcctatccctctggttcgcaccggcgaccgtatcggtgagccgtatttgaagatcgatccgaacaaggtcatcgcggtggttgaaaccaacagcccggaccgcaactcggccttttctgcgccggaccagaattcgcgcaagatcgccggccacatccttgagttcctcgaacatgaggtcaagaaggggcgcttgcccaaagatctgctgccgctgcaatccggtgtcggcaacattgccaatgctgttctggccggcctcaacgacgggccgttcgagaacctgaccgcctatactgaagtgctgcaggacggcatgctggaaatgatcaagtccggcaagctcagcatggcctcggctaccgccttttcattgtcgccgtcggcactgaccgagttgaatgccgatctggctcgcttcaaggacagcatcatcctgcgtccgcaggaaatctcgaaccatccggaagtcatccgccgcttgggggtgatcgccatgaacggcatgatcgaggccgacatctacggcaacgtcaattcgacccatgtgatgggcacccagatcatgaacggcatcggcggttccggcgactttgcccgcaatgcctatatttcgatcttcatgacaccatcgcaagccaagggcgggcagatttcctgcatcgtgccgatggcttcgcacgttgatcacaccgaacacgacgttcaggtgctggtcacggaacaaggcctggccgacctgcgcggcctgtcacccaagcaacgggccaaggtgattatcgagaactgtgcccatccgaatttcaagccgttgctgatggattactacaagcgctcgcttaacctgtcaccgggcaaacaaacgccccatctgctcgacgaggcgctcagctggcacctgaactatctgcgcaaaggcagcatgtga

SEQ ID NO: 137442 - protein, 503 aa, Dechloromonas aromatica RCB
MGGASRILNTALRSKIMSASEAASLIPSGVNVGMSGFTGAGYPKEVPTELAKRIMDANLHGRKFKIGVWTGASTAPELDGALAMVDGVEMRLPYQSDPTCRKRINAGEMEYIDIHLSHVAQFVWFGFLGKLDVAVVEVSGILEDGRLIPSSSIGNNKTWLDQADKIILEVNSWQNPLLEGMHDIYYGTNLPPYRQPIPLVRTGDRIGEPYLKIDPNKVIAVVETNSPDRNSAFSAPDQNSRKIAGHILEFLEHEVKKGRLPKDLLPLQSGVGNIANAVLAGLNDGPFENLTAYTEVLQDGMLEMIKSGKLSMASATAFSLSPSALTELNADLARFKDSIILRPQEISNHPEVIRRLGVIAMNGMIEADIYGNVNSTHVMGTQIMNGIGGSGDFARNAYISIFMTPSQAKGGQISCIVPMASHVDHTEHDVQVLVTEQGLADLRGLSPKQRAKVIIENCAHPNFKPLLMDYYKRSLNLSPGKQTPHLLDEALSWHLNYLRKGSM

SEQ ID NO: 137443 - DNA, 1500 bp, Rhodobacter sphaeroides 2.4.1
  CDS (1)..(1500): transl_table=11
atgctcgacggtgtggagaacgacaggatccggcatgtcggcctgcgcgagcgcgtgaccagcgcggatgaggctgcggccctgatcgaagacggcatgacggtcggcatgtcgggcttcacccgcgctggcgaggccaaggcggtgccgatggcgctcgcggcccgggcgcggcagcatccgctgaagatcacgctgatgaccggcgcctcgctcggcaacgatctcgacaagacgctggccgaggcccatgtcctcgcccgccgcatcccgttccagtccgatcccgcgctccgcaaggcgatcaaccgcggcgaggtgatgttcatcgaccagcatctctccgagacggtcgagatgctgcgcacccgccagctgccgcgcgtcgatgtggccgtggtcgaggcggtggccatcaccgagaacggcggcatcgtgcccacgacctcggtcggcaactccgcctccttcgccatcctcgccgagaaggtcatcgtcgagatcaacctcagccagccggccgagctcgaggggctgcacgacatctacatccccacctaccggccgaaccggatgccgatcccggtggtcacgcccgagagccgggtcggcctgcccttcatcccgatcccgcccgagaagatcgcggccatcgtcgtgaccgagaagctcgacagctcggccacgatcctcgaccccgacgccgacacccgggccatcgcgggccatctgaccgagttcctgctgcacgaggtgcgcgcaggacggctcgatcacacgctccagccgctgcaggccgggatcggcaccatcgcgaacgcggtgctgcacgggttcatcgacacgccgttccacgatctgaaaatgtattccgaggtcctgcaggactcgaccttcgacctgttcgacgcaggcaagatgcgcttcgcctcgggctcgtcgatcaccctctcggcgcagaaataccagcaggtgctgccgcggcttgtcgaatacaagccgcgcctgatcctgcgcccgcaggagatctcgaaccaccccgaggtcgtccggcgcttgggcctcatctgcatcaacaccgcgctcgagttcgacatctacggcaacgtgaactccacccatgtggggggcacgcagatgatgaacgggatcggcggctcgggcgatttcgcgcgcaacgcctatctctcggtcttcgtgacgaaatcggtggccaagcacggggctgtctcctccgtcgtgccgatggtgagccacgtcgaccataccgagcatgacgtggacatcctcgtgaccgaagtgggccttgccgatctgcgcggcctcgccccccgcgagcgggccgccacgatcatcgccaactgcgtgcacccggactaccggccgatgctgcgcgactattacgaccgcgcctgccagcgcggcggccacacgccgcatgtgctggaagaggcgctgtcctggcatgtccggctcgccgaaaccggccggatgatctga

SEQ ID NO: 137444 - protein, 499 aa, Rhodobacter sphaeroides 2.4.1
MLDGVENDRIRHVGLRERVTSADEAAALIEDGMTVGMSGFTRAGEAKAVPMALAARARQHPLKITLMTGASLGNDLDKTLAEAHVLARRIPFQSDPALRKAINRGEVMFIDQHLSETVEMLRTRQLPRVDVAVVEAVAITENGGIVPTTSVGNSASFAILAEKVIVEINLSQPAELEGLHDIYIPTYRPNRMPIPVVTPESRVGLPFIPIPPEKIAAIVVTEKLDSSATILDPDADTRAIAGHLTEFLLHEVRAGRLDHTLQPLQAGIGTIANAVLHGFIDTPFHDLKMYSEVLQDSTFDLFDAGKMRFASGSSITLSAQKYQQVLPRLVEYKPRLILRPQEISNHPEVVRRLGLICINTALEFDIYGNVNSTHVGGTQMMNGIGGSGDFARNAYLSVFVTKSVAKHGAVSSVVPMVSHVDHTEHDVDILVTEVGLADLRGLAPRERAATIIANCVHPDYRPMLRDYYDRACQRGGHTPHVLEEALSWHVRLAETGRMI

SEQ ID NO: 137445 - DNA, 1596 bp, Geobacter metallireducens GS-15
  CDS (1)..(1596): transl_table=11
atggcaaaatacggaacactgcaggagcgcgtgcgctgcacgtcattgctgggcaaagtcatgaaggcggaagaaaccatccccttcttcaagaacgggatgaacctcggctggtcgggcttcacccccgccgggtatcccaaagcggtccccatcgccctcgccgaccatgtggagaagaacaacctccaggggaaactgcgcttcagcatcttcaccggggcatcggtcggggccgaaacggaagaccgctgggcgaccctggacatgatcgaccgccgctggccgtaccagaccggcaagaacatcgccgcagggatcaatgagggacgtatccggatgggggacaaacacctctccctcttcgcccaggatctcggttacggcttttacacaaaggacaccccgagcggcaagctggatctggcgattatcgaggtgtcggcaattacggaggacggcgggctcgtgccgacctcttccggcggtgtcatccccgaaatcctcatgatgtgcgaccacgtcatcgtcgaggtcaatgtcgggcagccctccttcgaggggatgcatgacaacatcatctgcgacaacccgccgaacaggcaggtcctgaacatcacgagggcagattcccggatcggcaccaccgctgtcccgtgcgatccatccaagatcattgccgttgtggagtcggagtatcgggacaacggccgggccttttccgaacaggacgagacatccgaggccatagccaaccacatcatcgacttcttcagccacgaagtgaaggccggccgcctgccgaaaaatctcctgccgctccagtcgggggtcggctccatcgccaacgccgtcatcggcggcctggccaaggggccattcagcgatctcagcgtctacaccgaggtgttgcaggataccatgctcgacctgatcgattcgggcaagctcaactgcgcctcgtcctgctcgctctccctttccaaggatgaggggttcccgcgcttctttgccaacatggacaagtatgcgaacaaaatcctgctccgtccgctttccatctccaacgcaccggaacccatccggcgactcggtgttatcgccatgaacaccccggtggagatcgatatctacgcccacgccaactcgaccctcgtcggtgggacgaggatgatcaacggtatcggcggctccggtgatttcctccgcaacggctatctcaagatcatgcacaccccgtcgagccgccccaccaagaccgatcccaccggcatcacctgtgtcgtgccccactgctcccacatcgaccacacggagcacgacctcgattgcgtggtgaccgagcagggtcttgccgatctgcgggggctggcgccgaaggagcgcgcccggcgcattatcgagaagtgcgcccatcccgactacaagccgatcctcttcgcgtatctggaaattgcgaccaaggagtgcatggcgcggaaggtgggccacgagccccaggtgtgggatcgcgccttcaaaatgcagctgaatctggcccagaacggcaccatgaagatcaaaaactgggatatgaagatagacctgtgtgaataa

SEQ ID NO: 137446 - protein, 531 aa, Geobacter metallireducens GS-15
MAKYGTLQERVRCTSLLGKVMKAEETIPFFKNGMNLGWSGFTPAGYPKAVPIALADHVEKNNLQGKLRFSIFTGASVGAETEDRWATLDMIDRRWPYQTGKNIAAGINEGRIRMGDKHLSLFAQDLGYGFYTKDTPSGKLDLAIIEVSAITEDGGLVPTSSGGVIPEILMMCDHVIVEVNVGQPSFEGMHDNIICDNPPNRQVLNITRADSRIGTTAVPCDPSKIIAVVESEYRDNGRAFSEQDETSEAIANHIIDFFSHEVKAGRLPKNLLPLQSGVGSIANAVIGGLAKGPFSDLSVYTEVLQDTMLDLIDSGKLNCASSCSLSLSKDEGFPRFFANMDKYANKILLRPLSISNAPEPIRRLGVIAMNTPVEIDIYAHANSTLVGGTRMINGIGGSGDFLRNGYLKIMHTPSSRPTKTDPTGITCVVPHCSHIDHTEHDLDCVVTEQGLADLRGLAPKERARRIIEKCAHPDYKPILFAYLEIATKECMARKVGHEPQVWDRAFKMQLNLAQNGTMKIKNWDMKIDLCE

SEQ ID NO: 137447 - DNA, 1563 bp, Geobacter metallireducens GS-15
  CDS (1)..(1563): transl_table=11
atgtctgaattgctcaacaggataagaagaaagagtctgcacgacagaatcaggaaggtcgaagaggtcattcccctgttcaagcacgggatgaatctcggctggtcaggcttcacccctgccggctacccgaaagcaatacccatcgcccttgcggattacgtggagaagaaccagctccaggggaagatgagattcaacctcttcatcggcgcctccgtcggcgtcgagaccgaagaccgctgggcatcccttgacatgatcgaccgccgctggccctaccagaccggcaaaaacatccaggccggcatcaacgaagggcgcatccgcatgggggacaagcacctctccatgttcgcccaagacttgggctacggcttctacaccaaggacaatggcggccgtctcgacatcggcatcatcgaatgttccgccatcaccgaggacggcggcctcgtcctgaccgcctcctgcggcgccgtgccggagatcgtgcagattgccgaccggctcattatcgagatcaacaccgccatcccgaactacgaagggctccacgacatcatcgacccggtcaatccccccaaccgcctcccctacctcctcagccgggttgacgaccgtgccggctcgccctatgtccggatcgacaccgacaaaatcgtcgccatcgtcgaatcgcagcaccccgacaacggtcgtgccttcagcgagcaagacgacacctccgcggccatcgccaacaacatcctcgacttcttccagttcgaggtaaaggaaggccgcctgccgaagaacctcctgccgctccagtctggcgtgggttccatcgccaacgccgtcatcggtggcttggccaagggaccgttctcgggtctcaaggtctggaccgaagtgctgcaggacaccatgctcgacctcttcgattcggggaaactggattttgcctccacggtctccctctccttctcggtcgatggctttaagcgcttctacggcaactgggagaagtacagcaacaaggtgatcatgcgtcccctctccgtcgccaaccaccccgagccgatccggcgcctgggttgcatcgccatgaacacccccgtggaattcgacatctacgcccacgccaactccaccctcgtggggggaacccggatgattaacggcatcggcggctccggcgacttcctgcgcaacgcctatctctccatcatgcacacgccgtcggcccgccccagcaagaccgacccgaccggcatcacctgcgtggtgccgcacgtgccgcacgttgaccacaccgagcacgacctcgacgtgctagtcacggagcaggggcttgccgacctgaggggactcgatccgaaaagccgcgccaagctcatcatcgacaagtgcgcccacccggactacaagccgctgctccgtgagtacctcgaaatcgcgacgaaagagtgtttggcccgcaaagccggccacgaaccgcaactccttgaccgggtcttcaagatgcaggtgaacctggccaagaacggcaccatgaagatcgcaaactgggatatctga

SEQ ID NO: 137448 - protein, 520 aa, Geobacter metallireducens GS-15
MSELLNRIRRKSLHDRIRKVEEVIPLFKHGMNLGWSGFTPAGYPKAIPIALADYVEKNQLQGKMRFNLFIGASVGVETEDRWASLDMIDRRWPYQTGKNIQAGINEGRIRMGDKHLSMFAQDLGYGFYTKDNGGRLDIGIIECSAITEDGGLVLTASCGAVPEIVQIADRLIIEINTAIPNYEGLHDIIDPVNPPNRLPYLLSRVDDRAGSPYVRIDTDKIVAIVESQHPDNGRAFSEQDDTSAAIANNILDFFQFEVKEGRLPKNLLPLQSGVGSIANAVIGGLAKGPFSGLKVWTEVLQDTMLDLFDSGKLDFASTVSLSFSVDGFKRFYGNWEKYSNKVIMRPLSVANHPEPIRRLGCIAMNTPVEFDIYAHANSTLVGGTRMINGIGGSGDFLRNAYLSIMHTPSARPSKTDPTGITCVVPHVPHVDHTEHDLDVLVTEQGLADLRGLDPKSRAKLIIDKCAHPDYKPLLREYLEIATKECLARKAGHEPQLLDRVFKMQVNLAKNGTMKIANWDI

SEQ ID NO: 137449 - DNA, 1506 bp, Rhodospirillum rubrum ATCC 11170
  CDS (1)..(1506): transl_table=11
atgtatcgggaccgtatccgtcacccctccttgtttggcaaggtggtcagcgccgaagaagccgctagcctgatcaaagatgggatgaccgttggcatgagcggtttcacccgttcgggtgaggccaaggccgtcccctttgctttggccgaacgggccaagaccgatcctctcaagattaccctgttgaccggcgcctcgctcggcaacgatctggacaagaccctggtcgaggccggtgttctggcccgccgcctgccgtttcaggccgatccggccctgcgcaaggccatcaaccggggcgaggtgatgttcatcgatcagcatctctcggaaaccgtcgagatgctgcgtacccgccagcttggccccatcgatgtcgcggtggtggaagcggtggcgatcaccgaggacggcggcatcatccccacgacctcggtcggcaattcggcgaccttcgccatcctcgccgaaaaggtcatcatcgagatcaatctgtcccagcccgtcgagcttgaagggctgcacgacatctatattccgacgcgccgccccttccgcgagccgattcccatcgtggcttgcgaaagccgggtcggcctgccgttcatccccatcgatccgagcaagatcgccgcgatcgtcgtcaccgaaaagaaagacagcgccgccaccgtggcgccgcccgatgccgatacccgcgccatcgccggccatctgatcgagttcctgcgccacgaggtcagcctggggcgcctcagcaataccttgcagccgctgcaggcgggcatcgggtcgatcgccaacgccgtgctgcacggcctgatcgagtcgcccttccacagcctgaagatgtattcggaagtgctgcaagacagcaccttcgatctgttcgatgccggcaagctgctgttcgcctcgggctcgtcgatcacgctgtcggaggaaaaataccgggcggtcctacccaatctccccagctacaagaaccgcatcttgttgcggccccaggagatcagcaaccaccccgagatcatccgccgccttggcctgatcggcattaataccgctctggaattcgacctttacggcaatgtcaattccacccatgtcggcggcacgatgatgatgaacggcatcggcggatcgggagacttcgcgcgcaactgctatctgtcggtgttcgtcaccaagtcgatcgccaagaacggggcgatttccagcgtggtgccgatggtcagccatgtcgatcataccgagcatgacgtggatatcctgatcaccgaaatcggtctggccgatctgcgcggtctggcgccgcgcgagcgggccaaggtggtgatcgataactgcgtccacccggcctatcgcgatcaactggccgattactatcgccgggccctgacccggggcggccataccccccatctgatcgaagaggccttctcgtggcatgtgcgggcggccaagaccggttcgatgcgcgaagccgtggccgccgactga

SEQ ID NO: 137450 - protein, 501 aa, Rhodospirillum rubrum ATCC 11170
MYRDRIRHPSLFGKVVSAEEAASLIKDGMTVGMSGFTRSGEAKAVPFALAERAKTDPLKITLLTGASLGNDLDKTLVEAGVLARRLPFQADPALRKAINRGEVMFIDQHLSETVEMLRTRQLGPIDVAVVEAVAITEDGGIIPTTSVGNSATFAILAEKVIIEINLSQPVELEGLHDIYIPTRRPFREPIPIVACESRVGLPFIPIDPSKIAAIVVTEKKDSAATVAPPDADTRAIAGHLIEFLRHEVSLGRLSNTLQPLQAGIGSIANAVLHGLIESPFHSLKMYSEVLQDSTFDLFDAGKLLFASGSSITLSEEKYRAVLPNLPSYKNRILLRPQEISNHPEIIRRLGLIGINTALEFDLYGNVNSTHVGGTMMMNGIGGSGDFARNCYLSVFVTKSIAKNGAISSVVPMVSHVDHTEHDVDILITEIGLADLRGLAPRERAKVVIDNCVHPAYRDQLADYYRRALTRGGHTPHLIEEAFSWHVRAAKTGSMREAVAAD

SEQ ID NO: 137451 - DNA, 1515 bp, Burkholderia xenovorans LB400
  CDS (1)..(1515): transl_table=11
atgagctcccctcgcattctttcttctgcgcttcttgcgcgcgtctgcagcgccgaccaggcggcttcgttcattcagccggacatgaccgtcgccatgagcggctttacgggagcgggctatcccaaagcggtgcctggcgcgctggcaggtcgcatcgaagccgcgcatgcgcgtggcgaggcattccggatcaacgtgctgacgggagcgtcgaccgcgccggaactggatggcgtactggcacgcgcaaacggcatcaccatgcggctgccgtatcagtcggatcccttgttgcgcgacaaaatcaacgcgggcgagatggaatacctcgatcttcatctgagccacgtcgcccagcacgcgtggttcggtttcttcggaaagatagacgtcgccattgtcgaagtgagcggcatccgcgaagacggactgctggttccgtcgtcatctgtcggcaacaacaagacatggctcgaactggccgataaagtgattctggaagtcaactcgcgtcagccggccgggctggatggcatgcacgacatttactacggcacggcactgccacctcaccgcgtacccattccgttactcacgcccggcgacaggatcggcgagacctacctgcgttgcgatccggacaaggtcgtcgcgatcgtcgaaaccgatgcgccggaccggagcaacagtttctccccacccgacgccacgtcgaagcagattgccgggcacctgatcgaattcctgcgtcatgaagtggctcacggcaggctgcctgcggggctgttgccactgcaatccggcgtgggcaacatcacgaatgccgtgctggcggaactggcggaagccggcttcaaaggactgactgcgttcaccgaagtgattcaggacgccatgctcgatttgctcgagaacggcacactcagcgtcgcctcggccaccgcgctttcgttgagcccgccggcgacgctgcgttttgctgaggaaatcgaccgtttgcgcgagcgcatcgtcctgcggccgcaggaaatcagcaatcacccggaactcgtcaggcgcctcggttgcattgccatgaacggcatgatcgaagcggacatctacggcaacgtcaattcgactcacgtaatgggaagccgcatccagaacggcatcggtggctcgggcgacttcgcccgcaatggttatctcgcctgtttcatgtccgccagcaccgcgaagggcggcgacatttcccggatcgtgccgatggcgagccacatcgaccataccgaacacgacgtctcggtgatcgtgaccgagcggggtcttgccgatttgcgcggcctgtcgccgaagcagcgcgcgcgtcaggtgattgcgaactgcgcgcacccggactatcgtccgcttctcgaagactacttccagcgcgcctgctccagcagcttcggcaagcacactccgcaccttctggatgaatcgctcgcgtggcatgagcgatatatccgcacgggttccatgaagccctga

SEQ ID NO: 137452 - protein, 504 aa, Burkholderia xenovorans LB400
MSSPRILSSALLARVCSADQAASFIQPDMTVAMSGFTGAGYPKAVPGALAGRIEAAHARGEAFRINVLTGASTAPELDGVLARANGITMRLPYQSDPLLRDKINAGEMEYLDLHLSHVAQHAWFGFFGKIDVAIVEVSGIREDGLLVPSSSVGNNKTWLELADKVILEVNSRQPAGLDGMHDIYYGTALPPHRVPIPLLTPGDRIGETYLRCDPDKVVAIVETDAPDRSNSFSPPDATSKQIAGHLIEFLRHEVAHGRLPAGLLPLQSGVGNITNAVLAELAEAGFKGLTAFTEVIQDAMLDLLENGTLSVASATALSLSPPATLRFAEEIDRLRERIVLRPQEISNHPELVRRLGCIAMNGMIEADIYGNVNSTHVMGSRIQNGIGGSGDFARNGYLACFMSASTAKGGDISRIVPMASHIDHTEHDVSVIVTERGLADLRGLSPKQRARQVIANCAHPDYRPLLEDYFQRACSSSFGKHTPHLLDESLAWHERYIRTGSMKP

SEQ ID NO: 137453 - DNA, 1533 bp, Ralstonia metallidurans CH34
  CDS (1)..(1533): transl_table=11
atgtaccgcgatcgcattcgcctggcagacctgcagaacaggatcatgtcggccgatcaagctgcagcactgattcaggatggcatgacggtagggatgagcgggttcacccgcgcaggcgactgcaaggccgtaccggtggcgctggcgcgccgcgctgccaccgatccgctgcagatcacgctgatcacgggcgcatctctcggtaacgacaccgacaagatcctggcggagagcaatgtgcttgcccgccgcctgcctttccagtccgactccacgctgcgccgcaagatcaacgacggcgaggtgatgtttatcgaccagcatctgggtgaaaccgtcgagcaactgcgcagcggccagatcgcacccgtcgatatcgcggttatcgaagccacggctatcaccgagacgggtggcatcgtgcccaccacgtcggtcggcaactccgccagcttcgcgatgatggcgaagaaggtgatcgtcgaactgaacctgaacatgccgaccgggctggagggactgcatgacatcgcgttcccggtacaacgcccatatcgccagccgattccattgatcgccgtcgagcaacgcatcggcctgccgtacatccccgtcgatccgtcgcgcatcgccgcgatcgtgatcacccagcgcgacgacagcccatcgaacgcgctgccgcccgatggcgaaacgcgccagatcgccggacacctgaatgcgctgctcgatcgtgaagtgcgcgccggacggctctcgacgtcgctgcagccgctgcaggccggtattggcacgatcgccaacgccgtgctgcacgggctggccgactcgccgttccacgacctgaccatgtattcggaagtcctgcaggacagcaccattgcgctgatcgacgcgggcaagctgcgcttcgcctcggcatcgtcgatgacgctgtcggcacccgtgtatcgtcgcgtgctcgatgatatcgagcgctacaaatcgcgtctgatcctgcgcccgcaagagatcagcaatcaccccgaagtgctgcgccgcctgggcctgatcacgatcaataccgcgctcgagtgcgacatctatggcaacgtgaactcgacgcacgttggcggcacgcacatgatgaacggtatcggcggctcgggcgatttcgcgcgcaatgcgtacctgtcggtgttcgtcaccaaatcggtggccaaggacggcaagatctccagcatcgtgccgatggtctcgcacgtcgacaacagcgagcacgacgtcgatatcctcgtcacggaacacgggctggccgacctgcgcggactggcaccgcgcgagcgagcgctgcaggtcatcaacaactgcgccgaccccgcctaccgcgacgggctgctcgactacttccgccgcgcctgcctccgtggaggccagacgcctcatctgctcgaggaagcgttcgcctggcatatcaactaccgcgaacaaggcacgatgcagccgcagggccacgttggcaaggccgccatcgaagcgctggcagcctaa

SEQ ID NO: 137454 - protein, 510 aa, Ralstonia metallidurans CH34
MYRDRIRLADLQNRIMSADQAAALIQDGMTVGMSGFTRAGDCKAVPVALARRAATDPLQITLITGASLGNDTDKILAESNVLARRLPFQSDSTLRRKINDGEVMFIDQHLGETVEQLRSGQIAPVDIAVIEATAITETGGIVPTTSVGNSASFAMMAKKVIVELNLNMPTGLEGLHDIAFPVQRPYRQPIPLIAVEQRIGLPYIPVDPSRIAAIVITQRDDSPSNALPPDGETRQIAGHLNALLDREVRAGRLSTSLQPLQAGIGTIANAVLHGLADSPFHDLTMYSEVLQDSTIALIDAGKLRFASASSMTLSAPVYRRVLDDIERYKSRLILRPQEISNHPEVLRRLGLITINTALECDIYGNVNSTHVGGTHMMNGIGGSGDFARNAYLSVFVTKSVAKDGKISSIVPMVSHVDNSEHDVDILVTEHGLADLRGLAPRERALQVINNCADPAYRDGLLDYFRRACLRGGQTPHLLEEAFAWHINYREQGTMQPQGHVGKAAIEALAA

SEQ ID NO: 137455 - DNA, 1530 bp, Myxococcus xanthus DK 1622
  CDS (1)..(1530): transl_table=11
atgaccgtgacgagcacgctgaaggaccgcatcgagaacaccgagttgctggcgaaggtcgtccccgtcgaagaggcggtgaagcacgtcgtccacggcaacaccgtggccatcagcggcttcaccaagtcgggtgagccgaagacgttcctgccggcgcttgcctggcacttctcccagacggcaccggacgcccgcatcaccctgctgtccggcgcgtccctgtccgaggatgtggagggccccatggcgcccttcatcgccaagcgcggtccgtacatgtcctcgcctgcctcgcggcgccgcatccatgccggagagatggacttcacggacgtccacctgtccgccttcgcgcgcaacctgatgtatggcttctacggcgacatcgacgtggccgtcgtcgaggtgtcgcgcatccggaagaacggcagcgtcgtcctcacgtcgtcggtgggaatcagcgcggaggcgctggcccgcgcgaagaagatcgtcctcgaggtcaacacctccgggccggactacacgggcttccacgacatcgtcctgcccgccgtccatccgcacgtgggctggccgctgccgctggtgaacgtgagggaccgcatcggcaacccctacgtggagctcgacctgagcaaggtggtggcggtggtggagtcccgcacgcccgaccacccggtgcccttcaaggcggcggatgacaccgccaagcgcatcgccgagcacgtcatcgacttcctgatgcgctgccgtgagcagtaccagtggggcaagcgcctgccgcccatccagtccggcgtgggcaacgtggccaacgccatcatcagccagctctacgactctcccttccagaaaatccgcttctggaccgaggtcttccaggacgggatgttgcgctacgtggaggacgacgcaaagttcgaatacgcgtccgccaccgcggtgtccttctcctctgagggccgccagcgcttcctcgacatgttcgagcggagcaaggaccggctggtgctgcggcccatgtggctgtccaacagccccgaaatcatctctcgcctcttcgtcatcgcgatgaacacccccatcgaggtggacatctacgggcacgtcaactccacgcacatcgacggttcgcgcatcgtcaacggcctgggcggctcgggtgacttcttccgcaacgcgtacctgagcatcgtccacacgccgtccacgcgaaagctgcgggatggccgcaccgtgagctgtgtcatgccgtacgtgcggcacatcgaccacaccgagcacgacatcaagtgcgtcgtcaccgagcagggctacgcgctcaacatggacatccgctcgcccaagcggcgcgcccaggacatcatcgaccgctgcgcgcacccctacttccggccgctgctgcacgcgtacctggacatggcgggccctggcgacgagccgcgcgccaccgacatgaaggtgctccagggctggtgggcggactacgacgcggcgacgcgtgccttcccccagaacggctga

SEQ ID NO: 137456 - protein, 509 aa, Myxococcus xanthus DK 1622
MTVTSTLKDRIENTELLAKVVPVEEAVKHVVHGNTVAISGFTKSGEPKTFLPALAWHFSQTAPDARITLLSGASLSEDVEGPMAPFIAKRGPYMSSPASRRRIHAGEMDFTDVHLSAFARNLMYGFYGDIDVAVVEVSRIRKNGSVVLTSSVGISAEALARAKKIVLEVNTSGPDYTGFHDIVLPAVHPHVGWPLPLVNVRDRIGNPYVELDLSKVVAVVESRTPDHPVPFKAADDTAKRIAEHVIDFLMRCREQYQWGKRLPPIQSGVGNVANAIISQLYDSPFQKIRFWTEVFQDGMLRYVEDDAKFEYASATAVSFSSEGRQRFLDMFERSKDRLVLRPMWLSNSPEIISRLFVIAMNTPIEVDIYGHVNSTHIDGSRIVNGLGGSGDFFRNAYLSIVHTPSTRKLRDGRTVSCVMPYVRHIDHTEHDIKCVVTEQGYALNMDIRSPKRRAQDIIDRCAHPYFRPLLHAYLDMAGPGDEPRATDMKVLQGWWADYDAATRAFPQNG

SEQ ID NO: 137457 - DNA, 1611 bp, Rhodococcus sp. RHA1
  CDS (1)..(1611): transl_table=11
gtgaacatcacgatctgtcggggtggtcgcgtcacgtggcccactcctacactggccgccgtgagcctccagatcagtgattccgcgtccccggtgcagtcgagccggattcgtcactcggccttccagcagaaggtgacgtcggcggaggaagcggtgaaggccatcggtccgggtgacaccgtcgctgtcagcggtttcgccagtgccgggacacccaaggcggtcatcccggccttggctgaccggattcacgccgcccgggcggctggcgcgaatttcaccatcgacctgctgaccggggcgtccgtgtcgacggagaccgagaggatgctcgccgagatcgacggaatcgccctgcggatgccctaccaggcggaatccacggcacggcagaagatcaaccaggggcgcatggattacgtcgacatccacctctcgcacgtggcccagcaggtgtgggagggctactacggtgtggtgaacgtcgcggtcgtcgaggtttccggcatcaccgagaccggtgagctgatcccctccgcgtcggtcggaaacaacaagacctggctcgacgtcgcggaaaaagtcattctcgaggtcaactcgtgggtcccggacgccatggatggtatccatgacatctactacggcacagctctgcccccgcaccgccgaccgatcgaactcaccggcgtcgaggaccgcatcgggcaaccgcattaccgggtggacccggccaaggttgttgcggtggtggagacgaacgcccccgacagtgcgagcgcgcttaccgctccggatgcggtcagtgaggcgatcgcggcccacgtgctggacttcttcgaccacgaggtgaggcgtggccgactcccggagaacaccctgctgccactgcaggcgggcgtcggaaacgtggccaatgccgtcctcgggggactcgatcgcggcccgtatcggggtttgacctgctattccgaggttatccaggacgggatgctgcacttgatcaagcacggcaccgtccggttcgcgtcggctaccgcgctggcactctcggaggccgggatcgaggagttgacctccaacatcgacttctaccggcagcacatccggctccgtccgcaggaaatcagcaaccaccccgaggtggtccgccgattgggaatcatcgcgatgaacgggatgctggaggccgacatctacgggaacgtcaattcgacccacgtgatgggcaccaagatcatgaacggcgtcggcggatccggggacttcgcgcgcaacgggtacctgtcgatgttcctcagcccgtccacggcgaagaacggagcgatctcgtcgatcgtcccgatgaccccgcacgtcgaccacaccgagcacgacacccaggtattggtcaccgagcagggccttgcggacgtgcgggggttgtcgccgcgtcgtcgggcacgggtcatcatcgagcgctgcgcgcatccggaattccggccgctgctcaccgactacgtcgagcgggcgacggccactgcgggagccggccagacgccgcacctgcttggggaggcgttctcgttccaccagcggtacctggagtccggctcgatgcgactctag

SEQ ID NO: 137458 - protein, 536 aa, Rhodococcus sp. RHA1
MNITICRGGRVTWPTPTLAAVSLQISDSASPVQSSRIRHSAFQQKVTSAEEAVKAIGPGDTVAVSGFASAGTPKAVIPALADRIHAARAAGANFTIDLLTGASVSTETERMLAEIDGIALRMPYQAESTARQKINQGRMDYVDIHLSHVAQQVWEGYYGVVNVAVVEVSGITETGELIPSASVGNNKTWLDVAEKVILEVNSWVPDAMDGIHDIYYGTALPPHRRPIELTGVEDRIGQPHYRVDPAKVVAVVETNAPDSASALTAPDAVSEAIAAHVLDFFDHEVRRGRLPENTLLPLQAGVGNVANAVLGGLDRGPYRGLTCYSEVIQDGMLHLIKHGTVRFASATALALSEAGIEELTSNIDFYRQHIRLRPQEISNHPEVVRRLGIIAMNGMLEADIYGNVNSTHVMGTKIMNGVGGSGDFARNGYLSMFLSPSTAKNGAISSIVPMTPHVDHTEHDTQVLVTEQGLADVRGLSPRRRARVIIERCAHPEFRPLLTDYVERATATAGAGQTPHLLGEAFSFHQRYLESGSMRL

SEQ ID NO: 137459 - DNA, 1521 bp, Rhizobium leguminosarum bv. viciae 3841
  CDS (1)..(1521): transl_table=11
atgttcagggaccgtctccgaagcgcgaagctctgggatcgcattgtcagtgccgatgaagcggcgcgtctgatcacggatgggatgaccgtcggcatgagcggctttacgcgggccggcgaggctagagccgtgccgctggctctggcggaaagggcaaggcgcgatccgctgaagatcacgctgatgactggcgcctcgcttggccacaatctcgatagaactctcgtcgaggcgcatgtcatcgcgcggcgcatgcctttccagtcggatcctgtcatgcgcgaggcgatcaatgccggcgaggtgatgttcatcgaccagcatctttccgagaccgtcgagtccctgcgcagcggacaagtcccgccagtcgacgtcgccgtcgtcgaagcaacggcgattacagaagatggcggcatcgtaccgaccacctccgtcggaaattcggcgagtttcgcgattctcgccccgaaagtgatcgtcgagatcaacctctctcagccggaagcactcgaggggctccacgacatctacattccgaccaatcggccgagccgcgaggcaatcccgatcgtggcacccgactgccgcatcggcgtgccgttcattcctatccctgcggaaaagatcgcggcaatcgtcatcacgcagagcagcgacagtgcctctacggtggagccgccggatgccgagaccaacgcgatcgccggtcatctgaccgaattcctgttgaacgaggtgcggcgtggccggctgacggaaaggctgcagccgctgcaggccggcatcgggacgatcgccaatgccgtgctttatggcttcaccgcgacgcccttccacgatctcaccctctattccgaggtgctgcaagattcgaccttcgacctgatcgatgccggtaagctcgcctttgcttccggatcctccatgacactctcgacgcaaaggcatcgcagcgtgctttccgggatcgagcactacaaacagcggctggtgctgcgaccgcaggaaatcagcaaccatcccgaagtcatccgccggctcggtatcattgcgatcaacacggcattggaattggacatctacggcaacgttaactcgacccatgtcggcggcacgcacatgatgaacggcatcggcggctccggcgatttcgcccgcaacgcctatatgtcgatcttcgtgacgaaatcgcttgccaaggacggggcgatctcacgcgtcgtgccgatggtcagccatgtcgatcataccgagcatgatgtcgatattctcgttaccgaaatcggtcttgccgatcttcgcggactggcgccacgagaacgcgccaaagtcattattgccaattgcgtgcacccaagctaccgggagatgctcgcggaatattaccggcgggcgctgttgcgcggcgggcatacgccgcatctgatcgaagaagccctcggatggcacgataaccttcgccgaacgggacggatgacgacggcgacggcaagcgccatcagcggctgcaggtag

SEQ ID NO: 137460 - protein, 506 aa, Rhizobium leguminosarum bv. viciae 3841
MFRDRLRSAKLWDRIVSADEAARLITDGMTVGMSGFTRAGEARAVPLALAERARRDPLKITLMTGASLGHNLDRTLVEAHVIARRMPFQSDPVMREAINAGEVMFIDQHLSETVESLRSGQVPPVDVAVVEATAITEDGGIVPTTSVGNSASFAILAPKVIVEINLSQPEALEGLHDIYIPTNRPSREAIPIVAPDCRIGVPFIPIPAEKIAAIVITQSSDSASTVEPPDAETNAIAGHLTEFLLNEVRRGRLTERLQPLQAGIGTIANAVLYGFTATPFHDLTLYSEVLQDSTFDLIDAGKLAFASGSSMTLSTQRHRSVLSGIEHYKQRLVLRPQEISNHPEVIRRLGIIAINTALELDIYGNVNSTHVGGTHMMNGIGGSGDFARNAYMSIFVTKSLAKDGAISRVVPMVSHVDHTEHDVDILVTEIGLADLRGLAPRERAKVIIANCVHPSYREMLAEYYRRALLRGGHTPHLIEEALGWHDNLRRTGRMTTATASAISGCR

SEQ ID NO: 137461 - DNA, 1494 bp, Pseudomonas aeruginosa UCBPP-PA14
  CDS (1)..(1494): transl_table=11
atgtaccgtgatcgcgtgcgcctgccctccctgctcgacaaggtgatgagtgcggccgaagccgccgacctgatccaggacggcatgaccgtcggcatgagcggtttcacccgcgccggcgaggccaaggccgtaccccaggcgctggccatgcgcgccaaggaacgtccgctgcgtatcagcctgatgaccggcgccagcctcggcaacgacctcgacaagcagctcaccgaggccggcgtgctcgcccggcgcatgccgttccaggtcgacagcaccctgcgcaaggcgatcaacgccggcgaagtgatgttcatcgaccagcacctctcggaaaccgtcgagcagttgcgcaaccaccagctgaagctgccggacatcgccgtcatcgaagccgccgcgatcaccgagcagggccacatcgtgccaaccacctcggtgggcaactcggcgagcttcgcgatcttcgccaagcaggtcatcgtcgagatcaacctggcccacagcaccaacctggaaggcctgcacgacatctatatcccgacctaccggccgacccgcacgccgatcccgctgacccgcgtcgacgaccgcatcggcagcacggcgatcccgatcccgccggagaagatcgtcgccatcgtcatcaacgaccagccggactcgccatccaccgtgctgccgccggacggcgagacccaggccatcgccaaccacctgatcgatttcttcaagcgcgaggtcgacgccggacgcatgagcaacagcctcggcccgctgcaggccggtatcggcagcatcgccaacgcggtgatgtgcggcctgatcgagtcaccgttcgagaacctgaccatgtactccgaagtgctgcaggactcgaccttcgacctgatcgacgccggcaagctgcgcttcgcctcgggcagctcgatcaccctgtcgccgcggcgcaacgccgacgtgttcggtaacctggagcgttacaaggacaagctggtgctgcgcccgcaggaaatctccaaccaccccgaggtggtccgtcgcctgggcatcatcggcatcaatacggcgctggagttcgacatctacggcaacgtcaactcgacccacgtcggcggcaccaagatgatgaacggcatcggcggctccggcgacttcgcccgcaacgcgcacctggcgatcttcgtcaccaagtcgatcgccaagggcggcaacatttccagcgtggtgccgatggtcagccacgtcgaccacaccgagcacgacgtcgacatcctcgtcaccgagcagggcctcgccgacctgcgcggcctggcgcctcgcgaacgggcccgggtgatcatcgagaactgtgtccacccgtcctaccaggcaccgctgctggactacttcgaggcggcttgcgcgaaaggcggccacacgccgcatctgttgcgcgaggcgctggcctggcacctgaacctggaagaacgtggacacatgctggccggctga

SEQ ID NO: 137462 - protein, 497 aa, Pseudomonas aeruginosa UCBPP-PA14
MYRDRVRLPSLLDKVMSAAEAADLIQDGMTVGMSGFTRAGEAKAVPQALAMRAKERPLRISLMTGASLGNDLDKQLTEAGVLARRMPFQVDSTLRKAINAGEVMFIDQHLSETVEQLRNHQLKLPDIAVIEAAAITEQGHIVPTTSVGNSASFAIFAKQVIVEINLAHSTNLEGLHDIYIPTYRPTRTPIPLTRVDDRIGSTAIPIPPEKIVAIVINDQPDSPSTVLPPDGETQAIANHLIDFFKREVDAGRMSNSLGPLQAGIGSIANAVMCGLIESPFENLTMYSEVLQDSTFDLIDAGKLRFASGSSITLSPRRNADVFGNLERYKDKLVLRPQEISNHPEVVRRLGIIGINTALEFDIYGNVNSTHVGGTKMMNGIGGSGDFARNAHLAIFVTKSIAKGGNISSVVPMVSHVDHTEHDVDILVTEQGLADLRGLAPRERARVIIENCVHPSYQAPLLDYFEAACAKGGHTPHLLREALAWHLNLEERGHMLAG

SEQ ID NO: 137463 - DNA, 1533 bp, Azoarcus sp. BH72
  CDS (1)..(1533): transl_table=11
atgtccaactcgctttccaacccgaacgccgaccgcgtcctctcgccgcgtctgcgcaacaagatcatgtccgccgaggccgccgccgccctcatcccgtccggggtgaatgtcggcatgagcggcttcaccggcgccggctaccccaaggcggtgccggccgcgctcgccaagcgcatcatggatgccaacctcaacggcaagaacttcaagatcggcgtatggaccggcgcctccaccgcgcccgaactcgacggcgcgctcgcgatggtcgacggcgtggagctgcgcctgccctaccagtccgaccccacctgccgcaagcgcatcaatgccggcgagatggaatacctcgacatgcacctgtcgcaggtcgcgcagttcgtctggttcggcttcctcggcaagctcgacgtggcggtggtggaagtggcgggcatcctggaggacggccgcctggtgccgtcgtcctcggtgggtaacaacaagacctggctggatcaggccgacaaggtcatcctggaagtgaacagctggcagaacccggcgctggaagggatgcacgacatctactacggcaccgcgctgccgccgtaccgcaagccgatcccgctgctgaagaccgacgaccgcatcggcgaaccttatctgcgttgcgacccggacaagatcatcgcggtggtcgaaacccataccccggaccgcaactcggcgttttccgcgccggacgagaactcccgccgcatcgccggtcacatcctcgaattcctcgagcacgaggtgaagaagggccgcctgccgcccaacctgctgccgctgcagtcgggcgtgggcaacattgccaacgcggtgatggcggggctcaacgagggcccgttcgacaacctcaccgcctacaccgaggtgctgcaggacggcatgctcgacctgatcaagtcgggcaagctcagctgcgcttccgccaccgcgttttcgctgtcgccggccgcgctgtccgaactcaatgccgacctcgcgcgctaccgcgagcgcatcatcctgcgcccgcaggagatctcgaatcatccggagctgatccgccgcctcggcgtgatcgcgatgaacggcatgatcgaggccgacatctacggcaacgtgaactccacccatgtgatgggcacgcggatcatgaacggcatcggcggctcgggcgatttcgcgcgcaacgcctacatctcgatcttcatgacgccgtcgcaggccaagggcggcgacatctcctgcatcgtgccgatggcgtcgcacgtggaccacaccgagcacgacgtgcaggtactggtgaccgagcagggcctggccgacctgcgcgggctgtcgcccaagcagcgcgcgcgcgtgatcatcgacaactgtgcgcacccgcacttccgcccggcgctgatggattactacaagcgctcgctgatgcactccgaaggcaagcagacgccgcacctgctggacgaggcgctgtcctggcacctgaagtacctgcgcggcggccagatgttgtaa

SEQ ID NO: 137464 - protein, 510 aa, Azoarcus sp. BH72
MSNSLSNPNADRVLSPRLRNKIMSAEAAAALIPSGVNVGMSGFTGAGYPKAVPAALAKRIMDANLNGKNFKIGVWTGASTAPELDGALAMVDGVELRLPYQSDPTCRKRINAGEMEYLDMHLSQVAQFVWFGFLGKLDVAVVEVAGILEDGRLVPSSSVGNNKTWLDQADKVILEVNSWQNPALEGMHDIYYGTALPPYRKPIPLLKTDDRIGEPYLRCDPDKIIAVVETHTPDRNSAFSAPDENSRRIAGHILEFLEHEVKKGRLPPNLLPLQSGVGNIANAVMAGLNEGPFDNLTAYTEVLQDGMLDLIKSGKLSCASATAFSLSPAALSELNADLARYRERIILRPQEISNHPELIRRLGVIAMNGMIEADIYGNVNSTHVMGTRIMNGIGGSGDFARNAYISIFMTPSQAKGGDISCIVPMASHVDHTEHDVQVLVTEQGLADLRGLSPKQRARVIIDNCAHPHFRPALMDYYKRSLMHSEGKQTPHLLDEALSWHLKYLRGGQML

SEQ ID NO: 137465 - DNA, 1521 bp, Acidovorax sp. JS42
  CDS (1)..(1521): transl_table=11
gtgtccacctcgtcgtccccccgtatccagcaccccggtctggcccagaaaatcatgagcgcggccgaagccgcggccctgatcccggccggcgccaatatcggcatgagcggcttcaccggcgcgggctatcccaagcaggtgccccaggcgctggccgcgcgcatcgaggccgagcatgcagcaggccggccgttccaggtcaacgtgtggacgggcgcctccaccgcgcccgagctggacggcgcgctggccaaggtgaacggcatccaccagcgcctgccgttccagtcggacccgatctgccgcgacaagatcaacgcgggcgaggtgcactacctggacatccacctctcgcacgtggcgcagcatgcgtggttcggcttcctgggccccatgcaggtggctgtggtggaggtgctgggtatcctgcccgacggccggctgatcccctcgtccgccgtgggcaacaacaagacctggctggagatcgccgacaaggtgatcctcgaggtgaactcgctgcccccgatcgagatggagggcatgcacgacatctactacggcacggccatcccgccgcgccgccagcctatccacctgacgcaggccaccgagcgcatcggcgagccctacctgcgcgtggacccgtccaaggtgatcgcggtggtccagacgcaccagcgcgaccgcgatacggccttcgccaagcccgacgcagtctccaaccagatcgccgcgcacatcatcgacttcctggcccacgaggtgaaggtgggccgcctgcccaagaacatgctgccgctgcagtcgggcgtgggcaacgtggccaacgcggtgctggccgggctgctggacggcccgttcgacgaactgctgggcttcaccgaggtgctgcaggacggcatgctggagctgatcaagcgcggcaagatgaccgcggcgtcggccaccgcgatctcgctgagcagcgaggcgctgaaggacttcaacgagcacattgccttctaccgcgaccgcatcgtgctgcgcccgcaggagatcagcaaccaccccgagctggtgcggcgcctgggcgtgatcgccatgaacgccatgatcgaggccgacatctacggcaacatcaattccacgcacgtgatgggctcggccatgatgaacggcatcggtggctcgggcgactatgcgcgcaacggctacctgtcgttcttcgtcacgccctcggtggccaagggcggcaaggtgagctgcatcgtgcccatggtctcgcacgtggaccacaccgagcacgacacgcagatcatcgtcaccgagcagggcctggccgacctgcgcggcctgtcgccccgccagcgcgcgcaggtcatcatcgacaagtgcgcgcacccggacttccgcccgctgctgcaggactatttcgaccgcgcgcgcagcaagggcgcgcagcacacgccccacatcctgggcgaggccttgtcctggcacgagcgctgcctggccacgggcagcatgctgccctga

SEQ ID NO: 137466 - protein, 506 aa, Acidovorax sp. JS42
MSTSSSPRIQHPGLAQKIMSAAEAAALIPAGANIGMSGFTGAGYPKQVPQALAARIEAEHAAGRPFQVNVWTGASTAPELDGALAKVNGIHQRLPFQSDPICRDKINAGEVHYLDIHLSHVAQHAWFGFLGPMQVAVVEVLGILPDGRLIPSSAVGNNKTWLEIADKVILEVNSLPPIEMEGMHDIYYGTAIPPRRQPIHLTQATERIGEPYLRVDPSKVIAVVQTHQRDRDTAFAKPDAVSNQIAAHIIDFLAHEVKVGRLPKNMLPLQSGVGNVANAVLAGLLDGPFDELLGFTEVLQDGMLELIKRGKMTAASATAISLSSEALKDFNEHIAFYRDRIVLRPQEISNHPELVRRLGVIAMNAMIEADIYGNINSTHVMGSAMMNGIGGSGDYARNGYLSFFVTPSVAKGGKVSCIVPMVSHVDHTEHDTQIIVTEQGLADLRGLSPRQRAQVIIDKCAHPDFRPLLQDYFDRARSKGAQHTPHILGEALSWHERCLATGSMLP

SEQ ID NO: 137467 - DNA, 1509 bp, Magnetospirillum magnetotacticum MS-1
  CDS (1)..(1509): transl_table=11
atgtatcgggacagaatcggactgacctccctgtggggcaaggtggtgggcgccgaagaggcggccatgcatatcaaggacggcatggtggtgggcatgagcggcttcacccgcgccggagacgccaaggtagtgcccatggccctggccgagcgggccaccgaggaaaagctgaagatcaccctgatgaccggcgcaagcctgggcagcgacatcgaccgcaccctggcccaggcgggctgcctgtcgcgccgcatccccttccaggccgatcccaccttgcgcaaatccatcaatgcgggcgaggtgatgttcgtcgaccagcatctgtccgagacggtggagatgctgcgctcgcgccagatggcacccatcgacgtggcggtgatcgaggcggtggccatcaccccggaaggcggcatcatccccaccacctccatcggcaattcggcctccttcgccatcctggccgaaaagatcatcgtcgagatcaacctgcatcagagcctggacctgatcggcctgcacgacgtctatatcccgacgcggcggccgcaccgcgaggccatccccatcacctcgcccagcgatcgggtggggctgccctatattccggtggacccgtccaagatcgccgccatcgtcatcaccgagaagctggacagctcggccaatatcgcgccgcccgatgccgagacctcggccatcgccgatcatctcgtgcagttcttccggggcgaggtgaggaagggccgcatcggcacctcgctcctgccgcttcaggcgggtatcggctccatcgccaatgccgtgctgcacggcttcatcgactcgcccttccacgacctcaccatgtattccgaggtcttgcaggattccaccttcgagctgttcgacgccgataagctggccttcgcctcgggttcgtccatgacgctctcgggtcccaagggcaaggaggtgttcgccgacatcaaccgctacaaggaccggctggttctgcggccccaggagatcagcaaccaccccgaagtcatccgccgcctcggcatcatcgccatcaacacagcgctggaagccgatatctacggcaacgtcaactccacccatgtgaatgcctccatgatgatgaacggcatcggcggttcgggcgacttcgcccgcaacgcctatctgtcggtgttcgtcaccaagtcggtggccaaggacggccgcatctcctccatcgtccccatggtcacccatgtggatcactgcgaacacgacgtggacatcatcgtcaccgaacgcggcctggccgatctgcgcggcctggcgccccgcgaacgggcccatctggtcattaaccactgcatgcatcccgactatcaggacctggccagggactacctcaaggacgccttggcgcgcggcggccacacgccccacgtcatggagcgcgcctttgaatggcatctggccttccagcaaagcggctccatgctgcccctggccaaggcggcggaataa

SEQ ID NO: 137468 - protein, 502 aa, Magnetospirillum magnetotacticum MS-1
MYRDRIGLTSLWGKVVGAEEAAMHIKDGMVVGMSGFTRAGDAKVVPMALAERATEEKLKITLMTGASLGSDIDRTLAQAGCLSRRIPFQADPTLRKSINAGEVMFVDQHLSETVEMLRSRQMAPIDVAVIEAVAITPEGGIIPTTSIGNSASFAILAEKIIVEINLHQSLDLIGLHDVYIPTRRPHREAIPITSPSDRVGLPYIPVDPSKIAAIVITEKLDSSANIAPPDAETSAIADHLVQFFRGEVRKGRIGTSLLPLQAGIGSIANAVLHGFIDSPFHDLTMYSEVLQDSTFELFDADKLAFASGSSMTLSGPKGKEVFADINRYKDRLVLRPQEISNHPEVIRRLGIIAINTALEADIYGNVNSTHVNASMMMNGIGGSGDFARNAYLSVFVTKSVAKDGRISSIVPMVTHVDHCEHDVDIIVTERGLADLRGLAPRERAHLVINHCMHPDYQDLARDYLKDALARGGHTPHVMERAFEWHLAFQQSGSMLPLAKAAE

SEQ ID NO: 137469 - DNA, 1527 bp, Xanthobacter autotrophicus Py2
  CDS (1)..(1527): transl_table=11
atgcctcacgcgcgtatccgcctctcttccctcgccgataaaatcgtctccgccgaggaagcggccgcccacatccaggacgggatgatcgtgggcatgagcgggttcacccgcgccggcgaggccaaagcggtgcccatggcgctcgccgcccgcgccaaggaagcccacgccgccggccagcccctgaagatcacgctcatcaccggcgcctcgctgggcaacgacctcgacaagcagatggcggaagcccacctgctctcgcgccgcatcccgttccagtccgacccagcgctgcgcaaggccatcaatgccggcgaggtcatgttcgtggaccagcacctgtcggagacggtggagcacctgcgcaccaaccagcttggcccggtggatgtggcggtgatcgaggcggtgggcatcaccgcgcagggcggcatcattcccaccacctcggtgggcaattcggccaccttcgccatcctcgccaagaaggtgatcgtcgagatcaatctcacccagcccatggagctggaggggctgcacgatatctacatccccacccgccggccgttccgcgagccgatcccggtggtggcgccggaaagccgggtgggactgcccttcatcccgattccggcggagaagatcgcggccatcgtcatcacccagaagctggacagcgcctccaacgtgctgccgccggaccacgagacggcggccatcgcctcccacctcatggagttcctgaagcacgaggtgaagatcggccggctcaccaaccgtctgcagccgctgcaggccggcatcggcaccatcgccaacgcggtgatgcacggcttcatcgagagcccgttctcagacctcaccatgtattcggaggtgctgcaggattccaccttcgacctgttcgacgccggcaagctgaacttcgcctcgggctcgtccgtcaccctgtccaaggccaagcacgaccaggtgatgccgcgcatcgccgactataaatcccggctcatcctgcgcccgcaggagatctccaaccatccggagatcatccgccggctcggcctcatcggcatcaacacggcgctggaattcgacatcttcggcaatgtgaactccacccacgtgggcggcaccggcatgatgaacggcatcggtggctcgggggatttcgcccgcaacgcctatctgtcggtgttcgtcaccaagtccatcgccaagggcggcgcgctgtcttccgtggtgcccatggtgagccatgtggaccacaccgagcacgacgtggacatcctcgtcaccgagcagggcctggccgacctgcgcgagctggcaccgcgcgagcgggcgcgggtgatcatcgacaattgcgtccacccgctctatcgcgacgccctggacgactatttcgcccggggttgcgcgcgtggcggccacaccccgcacatcatcgaggaagccctctcctggcatgtgaaggcgcgcgagaccggctccatgctgcccgggcaggacctgaagatcgcctga

SEQ ID NO: 137470 - protein, 508 aa, Xanthobacter autotrophicus Py2
MPHARIRLSSLADKIVSAEEAAAHIQDGMIVGMSGFTRAGEAKAVPMALAARAKEAHAAGQPLKITLITGASLGNDLDKQMAEAHLLSRRIPFQSDPALRKAINAGEVMFVDQHLSETVEHLRTNQLGPVDVAVIEAVGITAQGGIIPTTSVGNSATFAILAKKVIVEINLTQPMELEGLHDIYIPTRRPFREPIPVVAPESRVGLPFIPIPAEKIAAIVITQKLDSASNVLPPDHETAAIASHLMEFLKHEVKIGRLTNRLQPLQAGIGTIANAVMHGFIESPFSDLTMYSEVLQDSTFDLFDAGKLNFASGSSVTLSKAKHDQVMPRIADYKSRLILRPQEISNHPEIIRRLGLIGINTALEFDIFGNVNSTHVGGTGMMNGIGGSGDFARNAYLSVFVTKSIAKGGALSSVVPMVSHVDHTEHDVDILVTEQGLADLRELAPRERARVIIDNCVHPLYRDALDDYFARGCARGGHTPHIIEEALSWHVKARETGSMLPGQDLKIA

SEQ ID NO: 137471 - DNA, 1578 bp, Aspergillus oryzae
  CDS (1)..(1578)
atgtctgcttctgctcttctaagaagtcgtgttaggcggccttcctacctcaagaagctagccaaggcagaggatctcatcgaattctttcctcatggctcttacatcggctggtccggatttacgggtgttgggtaccccaagaaagttccaacggcactggccgaccatgtcgagaagaatggacttgaaggaaagctgcagtacaccttgtttgtcggtgcttcatctggcgccgagacggagaaccgctgggctagactgaatatgatcgagcgtcggagtcctcaccaggtcggcaaggagattgccaagggtatcaactccggacagatcaaattcttcgataagcatctgagcatgttcccctcagatctggtttatggctggtacacactgaacaagcctaagaataggctggatgtcgccgtcattgaggcatccgccatcaccgaggatggtggtatcatccctggtgcttccgtcggtgcttcaccggaattggttcagatggcagataaggtcatcattgaagtgaacaccgccagcccttcattcgagggcctccacgatatcaccatgtctgagcttcctccgagacgcaagccttacctcatccttcagcccgaggaccgcatcggaactcctcacattcctgttgaccccgagaaggttgttgctatcgttgagtcggattatcccgaccagacccagcccaacgccccggaggacgcgacttcgcaggccattgcgaccaatttgattgaattcctgaagcacgaggtcaaccatggccgcctgccccagaacctgttgccgatccagtctggcattggaaacattgccaacgctgtcatcggtggcttgagcaagggtggtgctgatttcaccaacctgaaggtctggactgaggtgctgcaggattctttcctggacttgttcgatagcggcaacctggacttcgccacggcgacttcgattcgtttctctcccgatggattcaagcgtttctacgacaactgggagcgctatgccggcaagcttctcctccgctctcagcaggtgtccaactcccccgagatcatccgtcgcttgggctgcattggcatgaacacccccgttgaggtggatatctacgcccatgccaacagcacctgtgtcatgggttcccgcatgctgaacggtcttggtggctccgccgatttcctccgcagctcgaaatacagtatcatgcacactcctagtacccgccctagcaaggttgatcccaccggtgtcagctgtattgtgcctttctgcacacacattgaccagactgagcacgatctggatgtcgtcgttactgaacagggtcttgccgacgtgcgtggtctgtctcctcgcgagcgtgctcgtgtcattatcgacaagtgctctcaccccgactacaagccaattctcacggactacctcgaccgggccgagtacgagtgcttgaagaagggtatgggccacgagcctcacctgctcttccaggccttcaagatgcaccagaacctggctgagaagggaactatgaagatcaacggctgggactaa

SEQ ID NO: 137472 - protein, 525 aa, Aspergillus oryzae
MSASALLRSRVRRPSYLKKLAKAEDLIEFFPHGSYIGWSGFTGVGYPKKVPTALADHVEKNGLEGKLQYTLFVGASSGAETENRWARLNMIERRSPHQVGKEIAKGINSGQIKFFDKHLSMFPSDLVYGWYTLNKPKNRLDVAVIEASAITEDGGIIPGASVGASPELVQMADKVIIEVNTASPSFEGLHDITMSELPPRRKPYLILQPEDRIGTPHIPVDPEKVVAIVESDYPDQTQPNAPEDATSQAIATNLIEFLKHEVNHGRLPQNLLPIQSGIGNIANAVIGGLSKGGADFTNLKVWTEVLQDSFLDLFDSGNLDFATATSIRFSPDGFKRFYDNWERYAGKLLLRSQQVSNSPEIIRRLGCIGMNTPVEVDIYAHANSTCVMGSRMLNGLGGSADFLRSSKYSIMHTPSTRPSKVDPTGVSCIVPFCTHIDQTEHDLDVVVTEQGLADVRGLSPRERARVIIDKCSHPDYKPILTDYLDRAEYECLKKGMGHEPHLLFQAFKMHQNLAEKGTMKINGWD

SEQ ID NO: 137473 - DNA, 1857 bp, Clostridium thermosaccharolyticum
  CDS (1)..(1497): transl_table=11
atgaattttgaagagcggattagatgcaatataattaaaaataaagtaatgtcggcagaagaagcagctttattgataaaagatggtatgacaataggtacaagtggttttgtaacaggtggtcctaaagctgtaccattggcaattgctgaaagatataaaaatgaaaagataaagttaaatctttatacaggtgctatagtaggtgatgaattagatggtgctttcgcacgggaaggtttagtcaataaaagaattccgtatcaaacaaataaagacatgagaaatgctataaataatggttcagttaaatttattgatatgcatctaagtcatatgccacagcaaataagatatggttttttaggaaaaattgatatcgccattattgaagcaactgctataacagaagatggaggcattattcctaccatgtctgtcggtaattcaccgacatttgtaaatatggccgataaagtcatagtagaaataaatacatcacagcctattgaacttgaaggaatgcacgatatatacgagccaaaagatccaccatatagagagccgataccaatatcgaaagttagtgataggataggtgttccgtatattccatgcaatccagataaaatagctgcagttgtattttcagatatgaaagatacaacgttacaacttacaagtataaatgaaacatcaaaaaagatttcagattatcttatagattttcttcaaactgaaataaaacacggaagacttcctaaaacatttcttccattgcagtcaggtattggaaatgtagccaatgctgtactaggcggttttattgaattaaaatacaacaacttgaatttatattctgaagtaatacaagatgctgttctcgatttgatagatgctgataaggtagaaaaagtatcaggaactgcattgaccctttcagaagaaggacttaagagattttataccaatataaataaatataaagacaaaataatattgcgtccacaagagctcagtaataatcctgaaataatcagaagattaggagttatatcaattaacacagcaatagaagtggatatatacggtaatgtaaattctacacatatattaggcacaaaaatgatgaacggcataggtggttcagcagattttactagaaatgcttatatatcaatttttgctacgccatcaacagcaaaagatgataatatttcatgcatagtgccgatggtatcacatgtagatcatacagagcatgatgtcatggtggtagtaactgagcaaggactggctgatttaagaggtttaagtccgaaggaaagagctatagcaattataaaaaattgtgcacatcccgactataaagacgttttaatggagtattatgaaagagcgattaaaaaacatggcgctgtgcaaacaccgaatttactcgatgaagcatttttatggcatacaagatattcaaatacaggtagtatgaaaatatgataaatttatattattacctgaaaattatagttgttagtcttcatttctaaattaaagtgaattatatttttataaaagattttaaaaaacttttatcgtaaaagcataaaagagagagtcaaccagtttaatacggatgaagttgatttccatgtaagtcgtgacaaaaaattgaataatgataaaaaaatataaagaagcttagaataagaaaattactgaactatctacgatagatatttgatttctttataaatattttttaacaaaaggcttgaaagaagtctcccatcctccataggtgggagatgaatttctatattttttgtagggaaggttcctcccgaagttacgcctatg

SEQ ID NO: 137474 - protein, 498 aa, Clostridium thermosaccharolyticum
MNFEERIRCNIIKNKVMSAEEAALLIKDGMTIGTSGFVTGGPKAVPLAIAERYKNEKIKLNLYTGAIVGDELDGAFAREGLVNKRIPYQTNKDMRNAINNGSVKFIDMHLSHMPQQIRYGFLGKIDIAIIEATAITEDGGIIPTMSVGNSPTFVNMADKVIVEINTSQPIELEGMHDIYEPKDPPYREPIPISKVSDRIGVPYIPCNPDKIAAVVFSDMKDTTLQLTSINETSKKISDYLIDFLQTEIKHGRLPKTFLPLQSGIGNVANAVLGGFIELKYNNLNLYSEVIQDAVLDLIDADKVEKVSGTALTLSEEGLKRFYTNINKYKDKIILRPQELSNNPEIIRRLGVISINTAIEVDIYGNVNSTHILGTKMMNGIGGSADFTRNAYISIFATPSTAKDDNISCIVPMVSHVDHTEHDVMVVVTEQGLADLRGLSPKERAIAIIKNCAHPDYKDVLMEYYERAIKKHGAVQTPNLLDEAFLWHTRYSNTGSMKI

SEQ ID NO: 137475 - DNA, 1971 bp, Ashbya gossypii
  CDS (400)..(1971)
atgcgccggtccgcccggacgcgtagcgtgcatacatacatacatataactactgccgaactccgcgacgcatcgctcgcgcttcggcgcgtggctggtcgccgatcgttttggtgcgcttggggaagctcttgcattcccgttgtgccggcgcccccggattccaacaaccccgtcatgcgactgtctaaacgcatgactgccatcagatggtacagtatagcgcgtgataccgcgagcgtatccattttgccgtcccgggagctgacggtggcaatagctccaacaaccggcggcattgtggttatacgagttcaacagtataaaaggggccgcggtggcaaatggtacgatcgggtttttgcgtgggcgttgtgtaagcggcaacggacataccgaatgacagtttcgcagcttttgaaacagagggtccggtacgccccatacctatccaaagtacggagagcagaggagctgttgcctctgtttaagcatgggcagtatatcgggtggtccgggttcacgggcgtgggcgcgcccaaagtgatccccacggcgcttgcagaccatgtggagaagaacgggctacagggccagctggcattcaatcttttcgtgggcgcgtcggctgggccggaggagaacaggtgggcggacctggacatgattttgcggcgcgcgccgcaccaggtcggcaagccgatcgcgcgcgcgatcaacgatgggcgcatcaagttcttcgacaagcacctgtcgatgtttccgcaggacctgacgtacgggtactacacccgggagcggacggacggcaagatcctggactacgcgatcgtggaagcgacggcgatcaaggaggacggctcgattgtgctgggcccgtcggtgggcggctcgccggagttcatgtctgcggcggacaagctgatcgtggaggtcaacaccgcgacgccgtcgttcgaggggctgcatgacatcgacatgccggtgctgccaccgcaccgcgtgccgtacccatacacgcgggtggacgagcgcagcgggctggacgcggtgccggtggaccctgcgcgcgtggtcgcgctagtggagagcaccgagcgcgacaaggtggggcccaacacgccctcggacgaggggtcgcgcgcgattgcggggcatctggtggagttcttcgagaacgaggtcaggcacgggcggctgccagccaacctgctgccgctgcagagcggcatcggcaacattgcgaacgcggtgatcgaggggcttgcaggcgcctcattccggaacctgacagtttggaccgaggtgttgcaggactcgttcctggatctgttcgagaacggctccctagaattcgcgaccgccaccagtatccgcctgaccgaggccggcttcgagaagttctttgccaactgggacgaatactcctccaagctgtgcttgcgctcccaggtcgtgtccaacagcccagagatgatccgccggctcggtgtcatcgcaatgaatacgcctgtggaggtcgacatctacgcgcacgcgaactcgaccaacgtgtctggctctcggatgctcaacgggctcggcggctccgcggacttcctccggaacgcaaagctgtccatcatgcatgcgccttctgccagacctagcaagaccgatcctaccggcatctcgaccatcgtgcccatggcatcccatgtcgaccagcttgagcatgacctagacgtcctagtcacggatcagggtctggccgacctgcgtggtctctgtccgcgggagcgcgcgcgcgagattatccgccagtgcgcacatccagactacaagccaattttgactgactacctagacagagctgagcattatgcgcagcgctcgcgctcgatgcacgagcctcatattttgcagcaagctctcagattccatacccatctcgctgaaaaaggcaccatgaaggtcccttcgtgggactaa

SEQ ID NO: 137476 - protein, 523 aa, Ashbya gossypii
MTVSQLLKQRVRYAPYLSKVRRAEELLPLFKHGQYIGWSGFTGVGAPKVIPTALADHVEKNGLQGQLAFNLFVGASAGPEENRWADLDMILRRAPHQVGKPIARAINDGRIKFFDKHLSMFPQDLTYGYYTRERTDGKILDYAIVEATAIKEDGSIVLGPSVGGSPEFMSAADKLIVEVNTATPSFEGLHDIDMPVLPPHRVPYPYTRVDERSGLDAVPVDPARVVALVESTERDKVGPNTPSDEGSRAIAGHLVEFFENEVRHGRLPANLLPLQSGIGNIANAVIEGLAGASFRNLTVWTEVLQDSFLDLFENGSLEFATATSIRLTEAGFEKFFANWDEYSSKLCLRSQVVSNSPEMIRRLGVIAMNTPVEVDIYAHANSTNVSGSRMLNGLGGSADFLRNAKLSIMHAPSARPSKTDPTGISTIVPMASHVDQLEHDLDVLVTDQGLADLRGLCPRERAREIIRQCAHPDYKPILTDYLDRAEHYAQRSRSMHEPHILQQALRFHTHLAEKGTMKVPSWD

SEQ ID NO: 137477 - DNA, 1581 bp, Candida glabrata
  CDS (1)..(1581)
atgactgtctctaaacttttaaaagagagagttagatacgctccatatttggctaaggtcaagaccccagaagagctgattccattgtttaagaatggtcagtacttgggttggtctggtttcactggtgttggtacaccaaaggctgtgcctgatgctttgattaagcatgttgaggacaataatctgcaaggcaagctaagatttaacttatttgttggtgcatctgctggtccagaagaaaacaaatgggctgaacatgacatgatcatcagaagagctcctcatcaagttggtaagccaattgcaaaggccattaacaacggtaagattcagttcttcgacaagcacttgtctatgttcccacaagatctaacatacggttactacacgagggacagaaccgatggtaagattcttgactacatgattattgaagccaccgccattaaggaagatggttccatcgttccgggtccatctgttggtggttctccagaattcatctctgtcagtgataaagttatcattgaagtgaacacggctactccatcattcgaaggtgttcatgacattgacatgcccgtaaatcctcctcacagagttccatacccatacaccaaggttgaccaaaagattggtgtagactccatccctgttgacccagagagagtcattgctatcgttgaatctaagacccgtgaccaagttggtccaaacactccatccgacgatatgtctaaggctattgctggtaacctaattgaattctttagaaatgaagttaagcatggtagattaccagaaaacttgctacctctacaaagtggtattggtaatattgctaatgcagtcattgagggtttgaccgacgctaactttaagcacctgaatgtctggaccgaagtcttgcaagactcattcttggatctatttgaaaatggttcccttgactacgcaactgctacatccattagattgactgagccaggctttgaaagagttttcaagaactgggatttctacaagtctagattatgtttgagatctcaagttgtatcaaataacccagaattaattcgtagattgggtgtgattgctatgaacactcctgttgaggctgacatttacgcacacgctaactccacaaacgtgaatggttcccgtatgctaaatggtttaggtggctctgctgacttcttgagaaatgctaagctgtccattatgcattgtccagcagccagaccaactaaggttgacccaactggtatttccagtattgttcctatggtttcccatgttgatcaaacagaacacgacttggatgtcttggtcactgaccaaggtctagcagatttgagaggtctatcaccaagagagagagcccgtgagattatcaacaaatgtgctcatccagactacaagccattgctacaagactacttggacagagctgaacattatgctactaagcatggttgtctacatgaacctcatatgttgaagaatgctttcaagttccataccaacttagctgaaaagggtaccatgaaagttgagtcttgggaccctgttgaatag

SEQ ID NO: 137478 - protein, 526 aa, Candida glabrata
MTVSKLLKERVRYAPYLAKVKTPEELIPLFKNGQYLGWSGFTGVGTPKAVPDALIKHVEDNNLQGKLRFNLFVGASAGPEENKWAEHDMIIRRAPHQVGKPIAKAINNGKIQFFDKHLSMFPQDLTYGYYTRDRTDGKILDYMIIEATAIKEDGSIVPGPSVGGSPEFISVSDKVIIEVNTATPSFEGVHDIDMPVNPPHRVPYPYTKVDQKIGVDSIPVDPERVIAIVESKTRDQVGPNTPSDDMSKAIAGNLIEFFRNEVKHGRLPENLLPLQSGIGNIANAVIEGLTDANFKHLNVWTEVLQDSFLDLFENGSLDYATATSIRLTEPGFERVFKNWDFYKSRLCLRSQVVSNNPELIRRLGVIAMNTPVEADIYAHANSTNVNGSRMLNGLGGSADFLRNAKLSIMHCPAARPTKVDPTGISSIVPMVSHVDQTEHDLDVLVTDQGLADLRGLSPRERAREIINKCAHPDYKPLLQDYLDRAEHYATKHGCLHEPHMLKNAFKFHTNLAEKGTMKVESWDPVE

SEQ ID NO: 137479 - DNA, 1572 bp, Debaryomyces hansenii
  CDS (1)..(1572)
atgtcatccattttaaagcaaagggttagatacgccccatatttacagaaattaagaactgcagagcaatgtgttgaattattcaaacacggtcaatatcttggttggtcaggattcactggtgtcggggcgccaaaggtcgttccagatgccatagctgaccacgttgaaaagaacaatttgcaaggaaaattgggattcaacttgttcgttggtgcttcggctggacctgaagaaggcagatgggcggaaaacgatatgcttttgagaagatcccctcatcaagttggtaagccaattgctaaagccatcaacacagggaagaccaaatttttcgacaagcacttgtcgatgttcccacaggatttgacttacgggttctacaccagagagaaggaaaacgatttgttagactacaccatcatcgaggccaccgccatcactgaggacgggtcaattgtccccggtcctgctgtcggtgcatctccagaaatgatttcagtttctgacaagattattatcgaagtgaacaccgtcacaccatctttcgaaggtttacacgacattgacatgccagtgaaccctcctttcagacaaccatacccacacacgactgtcgactacagaactgggttaaccgctattccagtcgatccatctaaggttgttgccattgttgaatcccagaccagagataaggttcctccaaacaccccatccgacgaaacttctcgtaacattgctaacaacttacttgagttctttgaacatgaagctaaattaggtagattacctgaaaacttacacccattacaatctggtattggtaacattgctaacgctgtcgtcgaaggtttagctgactctaagttcaagaacttgactgtttggaccgaagtcttacaagattcattcttagacttctttgaaagtggttcattagactttgccacagccacctccattagattgactgaagctggtttcgacaagttctacgaaaattgggacacctactcaaagaaattatgcttgagatctcaagtcgtttctaactcgccagaaatcattagaagattaggtaccattgccatgaacacccctgttgaagttgatatttacgcccatgcaaactctactaacgtcatgggttcaaggatgttgaacggtttaggtggttccgctgatttcttgagaaactccaagttatcagttatgcataccccatctgcaagaccaagtaagaccgacaagaccggtgtttcatgtattgttccattcgctactcatgttgatcaaaccgagcacgatttagatattgttgtcaccgatcaaggtttagctgatttaagaggtttatctccaaaggaaagagccagagaaattattacgaagacttctcaccctgactacagagatcaattgactgattatctcgacagagctaccttctatgctgaaaaaagcaagtgcttgcatgaacctcatatcttacaagatgctttcaagatgcatctcaacttccaagaaaacggaaccatgaagttagattcctgggataagaagttttaa

SEQ ID NO: 137480 - protein, 523 aa, Debaryomyces hansenii
MSSILKQRVRYAPYLQKLRTAEQCVELFKHGQYLGWSGFTGVGAPKVVPDAIADHVEKNNLQGKLGFNLFVGASAGPEEGRWAENDMLLRRSPHQVGKPIAKAINTGKTKFFDKHLSMFPQDLTYGFYTREKENDLLDYTIIEATAITEDGSIVPGPAVGASPEMISVSDKIIIEVNTVTPSFEGLHDIDMPVNPPFRQPYPHTTVDYRTGLTAIPVDPSKVVAIVESQTRDKVPPNTPSDETSRNIANNLLEFFEHEAKLGRLPENLHPLQSGIGNIANAVVEGLADSKFKNLTVWTEVLQDSFLDFFESGSLDFATATSIRLTEAGFDKFYENWDTYSKKLCLRSQVVSNSPEIIRRLGTIAMNTPVEVDIYAHANSTNVMGSRMLNGLGGSADFLRNSKLSVMHTPSARPSKTDKTGVSCIVPFATHVDQTEHDLDIVVTDQGLADLRGLSPKERAREIITKTSHPDYRDQLTDYLDRATFYAEKSKCLHEPHILQDAFKMHLNFQENGTMKLDSWDKKF

SEQ ID NO: 137481 - DNA, 1572 bp, Kluyveromyces lactis
  CDS (1)..(1572)
atgacagtttccagattgttgaaagatagagttagatatgctccatatttgaagaaagttaagccagtagaagagctgattccattgtttaaggatggtcaatacattggttggtctggtttcaccggtgtcggtgctccaaaagctgttccagaagctttgatcaaacatgttgaggaaaataacttgcaaggtaagcttagattcaaccttttcgtcggtgcttctgctggtccagaagaatgtaaatgggccgaacatgatatgatcttgagaagagcccctcatcaagtcggtaagccaatcgccaaggctattaacgatggtagaatccaatttttcgacaagcatttgtccatgtttccacaagatttgacctacggttactatagcaggaacagaaccgatggtaagatcttggattacaccatcattgaagcaactgccattaaagaagatgggtctattgttccaggtccttctgtcggtggttctccagaatttatttctgtttctgataaaattattatcgaagttaacactgctactccatcgttcgaaggtctacacgatattgatatgcctgttaacccaccattcagacaaccatacccatacaccgctgtggaccaaaagaacggtcttgattctatcccagtggaccctgaacgtgttgttgctgtggttgaatctactcaaagggatgtcgttggtccaaacactccatctgatgctacatctcaatccatcgctcgtcacttggtcgagttcttcgaaaatgaagtgagacatggtagactacctgaaaacttgcatccattgcaatccggtatcggtaacatcgctaacgccgtgattgaaggtttgactgactcctccttcaagaacttgactgtgtggactgaagtcttgcaagattcattcttggatttgttcgaaaacggtgccttggattacgccactgctacctctatcagattgaccgaagctggtttccaaaagtttttcgataactgggatgatttctcaaagaagctatgtttaagatcccaagttgtttctaacaacccagaattgatccgtcgtctaggtgttatcgctatgaacacccctgtcgaagttgacatttacgcacacgctaactccaccaacgtctctggttctcgtatgttgaacggtttgggtggttctgctgatttcttgagaaacgctaagttgtctatcatgcacgctccagctgcaagacctacaaagactgacccaactggtatctctaccattgtcccaatggcttctcatgtcgatcaaactgaacacgatttggatgtcttagtcaccgatcaaggtttggctgacttaagaggtctatctccaagagaaagagcaagagaaatcattaagaactgtgctcatccagattaccaaccaatcttaactgactacttggacagatcagaacattatgccaagttgcacaagtgcatgcacgaacctcacatgttaaagaatgcattcaaattccacttgaacttgtctgaaaagggtaccatgaaagtcgataactgggattaa

SEQ ID NO: 137482 - protein, 523 aa, Kluyveromyces lactis
MTVSRLLKDRVRYAPYLKKVKPVEELIPLFKDGQYIGWSGFTGVGAPKAVPEALIKHVEENNLQGKLRFNLFVGASAGPEECKWAEHDMILRRAPHQVGKPIAKAINDGRIQFFDKHLSMFPQDLTYGYYSRNRTDGKILDYTIIEATAIKEDGSIVPGPSVGGSPEFISVSDKIIIEVNTATPSFEGLHDIDMPVNPPFRQPYPYTAVDQKNGLDSIPVDPERVVAVVESTQRDVVGPNTPSDATSQSIARHLVEFFENEVRHGRLPENLHPLQSGIGNIANAVIEGLTDSSFKNLTVWTEVLQDSFLDLFENGALDYATATSIRLTEAGFQKFFDNWDDFSKKLCLRSQVVSNNPELIRRLGVIAMNTPVEVDIYAHANSTNVSGSRMLNGLGGSADFLRNAKLSIMHAPAARPTKTDPTGISTIVPMASHVDQTEHDLDVLVTDQGLADLRGLSPRERAREIIKNCAHPDYQPILTDYLDRSEHYAKLHKCMHEPHMLKNAFKFHLNLSEKGTMKVDNWD

SEQ ID NO: 137483 - DNA, 1566 bp, Schizosaccharomyces pombe
  CDS (1)..(1566)
atgccgtctcttctgagttcacgcattcgcaatgccgaatttgccaaaaaaattgttacggatcctgccaagttggttccgtactttaaaaatggggactatgttggttggtctggttttactggtgtcggttatcctaaaatgattccaaacgcgttagcaagacatgtcgaagagaacaatttgcaaggaaaattgcgttttaaattgttcgttggtgcctcgggaggtgctgatacggaatgcaagtgggctgaattgaatatgattgagcgccggtgtcctcatcaagtaggaaagccaatttctaaaggaattaactctggcagaattcagtttttcgacaagcatttatccatgtttccccaagatttactttatggctactatactcgtaatcgtgaaagtaatacaattgacacagccattattgaggccacagccattaccgaggacggcggaattgttcccggcgcatcagttggtgcgagtccggaacttatgcaacttgcggaaaagattatcatcgaggtgaacactgccattccttcttttgaaggacttcatgacattgtcgaaattcccaaccccccacatcgtactccaataaacatcaatcgagttgacgatcgtattggaaagccatacatcaaagtggatcccaaaaaggttattggaatagtggaggctgattatggagacatcacatgcgctaactctccgcaagatgagacttcgcaggctattgcaggccatttagttgactttttccatcatgaagtatctgtagggcgtcttcccaaaaatcttcatcctttgcaatccggtattggaaacattgccaacgctattatcggtggtcttgcccattctccctttaaagatctcgaagtgtggacagaagtcttacaagatactttcttgcctctctttgactctgaaaagttacgttttgctactgctacctcaacccgtttttctcctcagggatttgaaaaattctactcaaactatgattactacaaggaaagaattttgttacgccctcaagtaatttccaatcaccctgaaattatccgccgtcttggttgcatcgctatgaatactcctgtggaagccgatatttacgctcatgccaatagtacaaatgttttgggaagcagaatgttgaacggtttaggtggttctgctgatttcttgcgtaatgcgaaattaagtattatgcatacaccatcggttcgtccttcgaagaaggatcctactggtatcacttgtattgttcctatggctacccatgttgaccaaaccgaacatgatttggatattttggttacagagcaaggattggctgatttacgaggcttgtctcctaccgaacgtgctcgtgaggttattgacaagtgtgctcatcctgactataagcctctgctcagagagtatttcgatattgccgaaaactactgtttagctagaggagctggtcatgaaccccatattcttgccaatgctttcaagatgcagctcaaccttttagaaaaaggaacgatgaagatcgatcattggtaa

SEQ ID NO: 137484 - protein, 521 aa, Schizosaccharomyces pombe
MPSLLSSRIRNAEFAKKIVTDPAKLVPYFKNGDYVGWSGFTGVGYPKMIPNALARHVEENNLQGKLRFKLFVGASGGADTECKWAELNMIERRCPHQVGKPISKGINSGRIQFFDKHLSMFPQDLLYGYYTRNRESNTIDTAIIEATAITEDGGIVPGASVGASPELMQLAEKIIIEVNTAIPSFEGLHDIVEIPNPPHRTPININRVDDRIGKPYIKVDPKKVIGIVEADYGDITCANSPQDETSQAIAGHLVDFFHHEVSVGRLPKNLHPLQSGIGNIANAIIGGLAHSPFKDLEVWTEVLQDTFLPLFDSEKLRFATATSTRFSPQGFEKFYSNYDYYKERILLRPQVISNHPEIIRRLGCIAMNTPVEADIYAHANSTNVLGSRMLNGLGGSADFLRNAKLSIMHTPSVRPSKKDPTGITCIVPMATHVDQTEHDLDILVTEQGLADLRGLSPTERAREVIDKCAHPDYKPLLREYFDIAENYCLARGAGHEPHILANAFKMQLNLLEKGTMKIDHW

SEQ ID NO: 137485 - DNA, 1575 bp, Yarrowia lipolytica
  CDS (1)..(1575)
atgtctgccgttctcaaacagcgaattcgatacaagccctacttggacaagatccgaactgccgcccagtgcgtcgatctgtttggcgcaaagcccaaccagtacattggatggtccggtttcaccggagtcggagcccccaaggttgtccccgatgctgtctccaagcacgttgaggagaacaacctgcagggacacgagaactggcgatacaacctgttcgtcggcgcctctgccggtatggagatcgaatctcgatgggccaacaacaacatgattgcccgaagatctccccatcaggtcggaaaaccaatcgctgctgccatcaacgagggtcgaaccgacttcttcgacaagcatctgtccatgtgggcccaggatctcacctacggcttctacacccgagataagaaggagaactctctagacatcgctgtcattgaggccaccgccatcactgaggacggtcatctgatccctggtcccgccgttggtgcctcccctgagattgtccacatggctgacaagatcatcattgagctcaacaccaagactccttccttcgagggtcttcacgacatcaacatgcctgtcctgcctcccttccgacagccttaccagatcaccgacgtttcccagaagatgggaactccttacatccctcttgacccctccaaggtcgttgccatcgtcgagtctgagtttgctgatgttgttggtgccaactctcctgccgatgagggctctaaggccattgctgccaacctcattgagctcttccagcaggaggtcaaggccggccgactgcccgaaaacctgctgcctctccagtccggtatcggtaacattgccaacgccgtcgtcgagggtctggctgatgcctccttcaaggaccttaacgtctggaccgaggtgctgcaggattccttcctggacttcttcgagtccggcaacctcaacttcgccactgccacctccatccgtctgaccgaggacggcttcaagcgattcttcgacaactgggacgagttctccaagaagctgctgctgcgatcccaggttgtgtccaacaaccccgagatcatccgacgactcggtgtcatcgccatgaacacccccgtcgaggttgacatctacgcccacgccaactccacttgtgtcaacggctccaagatgctgcatggtctgggaggctccggtgatttcctccgaaacgctaagctctccatcatgcacactccctccgctcgaccctccaagaccgatcccctcggtatctcttgcattgtccccttcgccacccacatcgaccagaccgagcacgatctggacattgtcgttactgagcagggtctggccgatctcagaggcctctctcccaaggagcgatctcgagagatgatcaacaagtgtgcccacccctcctaccgagaccagctgcttgcttatgtcgagcaggccgagtttgagtgcgccaagagccgatctctccacgagccccacgttctcaagaacgccttcaagatgcatactaaccttgccgagaacggaaccatgcgtctcgacaagtggtaa

SEQ ID NO: 137486 - protein, 524 aa, Yarrowia lipolytica
MSAVLKQRIRYKPYLDKIRTAAQCVDLFGAKPNQYIGWSGFTGVGAPKVVPDAVSKHVEENNLQGHENWRYNLFVGASAGMEIESRWANNNMIARRSPHQVGKPIAAAINEGRTDFFDKHLSMWAQDLTYGFYTRDKKENSLDIAVIEATAITEDGHLIPGPAVGASPEIVHMADKIIIELNTKTPSFEGLHDINMPVLPPFRQPYQITDVSQKMGTPYIPLDPSKVVAIVESEFADVVGANSPADEGSKAIAANLIELFQQEVKAGRLPENLLPLQSGIGNIANAVVEGLADASFKDLNVWTEVLQDSFLDFFESGNLNFATATSIRLTEDGFKRFFDNWDEFSKKLLLRSQVVSNNPEIIRRLGVIAMNTPVEVDIYAHANSTCVNGSKMLHGLGGSGDFLRNAKLSIMHTPSARPSKTDPLGISCIVPFATHIDQTEHDLDIVVTEQGLADLRGLSPKERSREMINKCAHPSYRDQLLAYVEQAEFECAKSRSLHEPHVLKNAFKMHTNLAENGTMRLDKW

SEQ ID NO: 137487 - DNA, 27 bp, Artificial sequence
  primer
atgacaatttctaatttgttaaagcag

SEQ ID NO: 137488 - DNA, 23 bp, Artificial sequence
  primer
ctagtcaactggttcccagctgt

SEQ ID NO: 137489 - protein, 524 aa, Artificial sequence
  consensus sequence
  Variant (2)..(22): Xaa in position 2 to 22 is any amino acid
  Variant (23)..(25): Xaa in position 23 to 25 is any or no amino acid
  Variant (27)..(29): Xaa in position 27 to 29 is any amino acid
  Variant (31)..(31): Xaa in position 31 is any amino acid
  Variant (36)..(37): Xaa in position 36 to 37 is any amino acid
  Variant (39)..(39): Xaa in position 39 is any amino acid
  Variant (40)..(40): Xaa in position 40 is any or no amino acid
  Variant (42)..(43): Xaa in position 42 to 43 is any amino acid
  Variant (45)..(45): Xaa in position 45 is any amino acid
  Variant (49)..(62): Xaa in position 49 to 62 is any amino acid
  Variant (63)..(68): Xaa in position 63 to 68 is any or no amino acid
  Variant (72)..(79): Xaa in position 72 to 79 is any amino acid
  Variant (80)..(80): Xaa in position 80 is any or no amino acid
  Variant (82)..(86): Xaa in position 82 to 86 is any amino acid
  Variant (87)..(91): Xaa in position 87 to 91 is any or no amino acid
  Variant (93)..(93): Xaa in position 93 is any amino acid
  Variant (95)..(95): Xaa in position 95 is any amino acid
  Variant (97)..(104): Xaa in position 97 to 104 is any amino acid
  Variant (107)..(107): Xaa in position 107 is any amino acid
  Variant (109)..(113): Xaa in position 109 to 113 is any amino acid
  Variant (115)..(115): Xaa in position 115 is any amino acid
  Variant (119)..(126): Xaa in position 119 to 126 is any amino acid
  Variant (128)..(131): Xaa in position 128 to 131 is any amino acid
  Variant (132)..(139): Xaa in position 132 to 139 is any or no amino acid
  Variant (141)..(141): Xaa in position 141 is any amino acid
  Variant (143)..(144): Xaa in position 143 to 144 is any amino acid
  Variant (146)..(148): Xaa in position 146 to 148 is any amino acid
  Variant (150)..(152): Xaa in position 150 to 152 is any amino acid
  Variant (154)..(156): Xaa in position 154 to 156 is any amino acid
  Variant (158)..(159): Xaa in position 158 to 159 is any amino acid
  Variant (161)..(161): Xaa in position 161 is any amino acid
  Variant (163)..(170): Xaa in position 163 to 170 is any amino acid
  Variant (172)..(172): Xaa in position 172 is any amino acid
  Variant (174)..(174): Xaa in position 174 is any amino acid
  Variant (176)..(176): Xaa in position 176 is any amino acid
  Variant (178)..(178): Xaa in position 178 is any amino acid
  Variant (180)..(185): Xaa in position 180 to 185 is any amino acid
  Variant (186)..(186): Xaa in position 186 is any or no amino acid
  Variant (189)..(189): Xaa in position 189 is any amino acid
  Variant (193)..(198): Xaa in position 193 to 198 is any amino acid
  Variant (199)..(199): Xaa in position 199 is any or no amino acid
  Variant (201)..(201): Xaa in position 201 is any amino acid
  Variant (203)..(203): Xaa in position 203 is any amino acid
  Variant (205)..(212): Xaa in position 205 to 212 is any amino acid
  Variant (214)..(214): Xaa in position 214 is any amino acid
  Variant (216)..(224): Xaa in position 216 to 224 is any amino acid
  Variant (226)..(227): Xaa in position 226 to 227 is any amino acid
  Variant (229)..(229): Xaa in position 229 is any amino acid
  Variant (231)..(235): Xaa in position 231 to 235 is any amino acid
  Variant (237)..(244): Xaa in position 237 to 244 is any amino acid
  Variant (246)..(250): Xaa in position 246 to 250 is any amino acid
  Variant (253)..(257): Xaa in position 253 to 257 is any amino acid
  Variant (259)..(261): Xaa in position 259 to 261 is any amino acid
  Variant (264)..(265): Xaa in position 264 to 265 is any amino acid
  Variant (268)..(271): Xaa in position 268 to 271 is any amino acid
  Variant (272)..(272): Xaa in position 272 is any or no amino acid
  Variant (274)..(274): Xaa in position 274 is any amino acid
  Variant (278)..(278): Xaa in position 278 is any amino acid
  Variant (280)..(280): Xaa in position 280 is any amino acid
  Variant (282)..(283): Xaa in position 282 to 283 is any amino acid
  Variant (288)..(289): Xaa in position 288 to 289 is any amino acid
  Variant (291)..(295): Xaa in position 291 to 295 is any amino acid
  Variant (296)..(297): Xaa in position 296 to 297 is any or no amino acid
  Variant (299)..(300): Xaa in position 299 to 300 is any amino acid
  Variant (302)..(305): Xaa in position 302 to 305 is any amino acid
  Variant (308)..(308): Xaa in position 308 is any amino acid
  Variant (311)..(314): Xaa in position 311 to 314 is any amino acid
  Variant (316)..(318): Xaa in position 316 to 318 is any amino acid
  Variant (319)..(319): Xaa in position 319 is any or no amino acid
  Variant (321)..(324): Xaa in position 321 to 324 is any amino acid
  Variant (326)..(332): Xaa in position 326 to 332 is any amino acid
  Variant (334)..(352): Xaa in position 334 to 352 is any amino acid
  Variant (353)..(353): Xaa in position 353 is any or no amino acid
  Variant (356)..(356): Xaa in position 356 is any amino acid
  Variant (358)..(359): Xaa in position 358 to 359 is any amino acid
  Variant (362)..(362): Xaa in position 362 is any amino acid
  Variant (365)..(366): Xaa in position 365 to 366 is any amino acid
  Variant (371)..(371): Xaa in position 371 is any amino acid
  Variant (373)..(374): Xaa in position 373 to 374 is any amino acid
  Variant (376)..(378): Xaa in position 376 to 378 is any amino acid
  Variant (380)..(380): Xaa in position 380 is any amino acid
  Variant (384)..(386): Xaa in position 384 to 386 is any amino acid
  Variant (390)..(390): Xaa in position 390 is any amino acid
  Variant (392)..(392): Xaa in position 392 is any amino acid
  Variant (394)..(397): Xaa in position 394 to 397 is any amino acid
  Variant (400)..(400): Xaa in position 400 is any amino acid
  Variant (404)..(404): Xaa in position 404 is any amino acid
  Variant (407)..(407): Xaa in position 407 is any amino acid
  Variant (410)..(412): Xaa in position 410 to 412 is any amino acid
  Variant (414)..(418): Xaa in position 414 to 418 is any amino acid
  Variant (420)..(426): Xaa in position 420 to 426 is any amino acid
  Variant (427)..(430): Xaa in position 427 to 430 is any or no amino acid
  Variant (432)..(433): Xaa in position 432 to 433 is any amino acid
  Variant (436)..(438): Xaa in position 436 to 438 is any amino acid
  Variant (440)..(440): Xaa in position 440 is any amino acid
  Variant (442)..(442): Xaa in position 442 is any amino acid
  Variant (447)..(450): Xaa in position 447 to 450 is any amino acid
  Variant (454)..(454): Xaa in position 454 is any amino acid
  Variant (463)..(463): Xaa in position 463 is any amino acid
  Variant (464)..(464): Xaa in position 464 is any or no amino acid
  Variant (466)..(467): Xaa in position 466 to 467 is any amino acid
  Variant (470)..(471): Xaa in position 470 to 471 is any amino acid
  Variant (474)..(474): Xaa in position 474 is any amino acid
  Variant (475)..(475): Xaa in position 475 is any or no amino acid
  Variant (477)..(477): Xaa in position 477 is any amino acid
  Variant (480)..(480): Xaa in position 480 is any amino acid
  Variant (482)..(484): Xaa in position 482 to 484 is any amino acid
  Variant (486)..(487): Xaa in position 486 to 487 is any amino acid
  Variant (489)..(491): Xaa in position 489 to 491 is any amino acid
  Variant (493)..(497): Xaa in position 493 to 497 is any amino acid
  Variant (498)..(504): Xaa in position 498 to 504 is any or no amino acid
  Variant (507)..(507): Xaa in position 507 is any amino acid
  Variant (509)..(510): Xaa in position 509 to 510 is any amino acid
  Variant (512)..(514): Xaa in position 512 to 514 is any amino acid
  Variant (516)..(518): Xaa in position 516 to 518 is any amino acid
  Variant (519)..(521): Xaa in position 519 to 521 is any or no amino acid
  Variant (523)..(523): Xaa in position 523 is any amino acid
RXXXXXXXXXXXXXXXXXXXXXXXXGXXXGXSGFTXXGXXKXXPXALAXXXXXXXXXXXXXXXXXXXXGASXXXXXXXXXAXXXXXXXXXXRXPXQXXXXXXXXINXGXXXXXDXHLSXXXXXXXXGXXXXXXXXXXXXDXAXXEXXXIXXXGXXXPXXSXGXXXXXXXXAXKXIXEXNXXXXXXXEGXHDIXXXXXXXPXRXPXXXXXXXXRXGXXXXXXXXXKXXAXVXXXXXDXXXXXXXXDXXXXXIAXXXXXFXXXEVXXGRXXXXXLXPLQXGXGXXANAVXXGXXXXXXXFXXLXXXXEVXQDXXXXLXXXXGXXXXAXXXXXXXSXXXXXXXXXXXXXXXXXXXXLRXQXXSNXPEXXRRLGXIXXNXXXEXDIYXXXNSTXVXGXXXXNGXGGSXDFXRNXXXSXXXXXSXXXXXXXXXXXSXXVPXXXHXDXTEHDXXXXVTEXGLADLRGLXXPXXRAXXIIXXCXHPXYXXXLXXYXXXAXXXXXXXXXXXXPHXLXXAXXXHXXXXXXGXM

SEQ ID NO: 137490 - protein, 60 aa, Artificial sequence
  protein pattern
  Variant (3)..(3): Xaa in position 3 is Pro, Gln or Ser
  Variant (5)..(5): Xaa in position 5 is any amino acid
  Variant (6)..(6): Xaa in position 6 is Ile, Leu or Val
  Variant (9)..(9): Xaa in position 9 is any amino acid
  Variant (12)..(12): Xaa in position 12 is Ile, Leu, Met or Val
  Variant (13)..(13): Xaa in position 13 is Ala, Ile, Leu or Val
  Variant (16)..(16): Xaa in position 16 is Ile, Leu or Val
  Variant (18)..(18): Xaa in position 18 is any amino acid
  Variant (19)..(19): Xaa in position 19 is Ile or Leu
  Variant (20)..(20): Xaa in position 20 is Ala, Cys, Gly, Ser or Thr
  Variant (21)..(21): Xaa in position 21 is any amino acid
  Variant (23)..(23): Xaa in position 23 is Ala, Gly, Thr or Val
  Variant (24)..(24): Xaa in position 24 is any amino acid
  Variant (25)..(25): Xaa in position 25 is Ile, Leu or Val
  Variant (27)..(27): Xaa in position 27 is any amino acid
  Variant (29)..(29): Xaa in position 29 is Ile or Leu
  Variant (30)..(30): Xaa in position 30 is Phe, His or Tyr
  Variant (31)..(31): Xaa in position 31 is Ala or Gly
  Variant (32)..(32): Xaa in position 32 is any amino acid
  Variant (33)..(33): Xaa in position 33 is Ala, Ile or Val
  Variant (37)..(37): Xaa in position 37 is any amino acid
  Variant (38)..(38): Xaa in position 38 is Ile, Leu or Val
  Variant (39)..(39): Xaa in position 39 is any amino acid
  Variant (40)..(40): Xaa in position 40 is Ala or Gly
  Variant (41)..(41): Xaa in position 41 is Ser, Thr or Val
  Variant (42)..(42): Xaa in position 42 is any amino acid
  Variant (43)..(43): Xaa in position 43 is Ile, Leu, Met or Val
  Variant (44)..(45): Xaa in position 44 to 45 is any amino acid
  Variant (47)..(47): Xaa in position 47 is Ile, Leu or Val
  Variant (51)..(51): Xaa in position 51 is Ala or Gly
  Variant (53)..(53): Xaa in position 53 is Phe or Tyr
  Variant (54)..(54): Xaa in position 54 is any amino acid
  Variant (56)..(56): Xaa in position 56 is Asn or Ser
  Variant (57)..(57): Xaa in position 57 is Ala, Cys, Gly or Ser
  Variant (58)..(59): Xaa in position 58 to 59 is any amino acid
  Variant (60)..(60): Xaa in position 60 is Ala, Gly, Ser or Thr
LRXQXXSNXPEXXRRXGXXXXNXXXEXDXXXXXNSTXXXXXXXXXGXGGSXDXXRXXXXX

SEQ ID NO: 137491 - protein, 29 aa, Artificial sequence
  protein pattern
  Variant (3)..(3): Xaa in position 3 is any amino acid
  Variant (4)..(4): Xaa in position 4 is Ala, Cys, Thr or Val
  Variant (5)..(5): Xaa in position 5 is Pro, Ser or Thr
  Variant (7)..(7): Xaa in position 7 is any amino acid
  Variant (9)..(9): Xaa in position 9 is any amino acid
  Variant (14)..(16): Xaa in position 14 to 16 is any amino acid
  Variant (17)..(17): Xaa in position 17 is Ile, Leu or Val
  Variant (18)..(18): Xaa in position 18 is Ile or Val
  Variant (20)..(20): Xaa in position 20 is Asp or Glu
  Variant (21)..(21): Xaa in position 21 is any amino acid
  Variant (23)..(23): Xaa in position 23 is any amino acid
  Variant (26)..(26): Xaa in position 26 is Leu or Val
  Variant (28)..(28): Xaa in position 28 is Glu or Gly
VPXXXHXDXTEHDXXXXXTXXGXADXRXL

SEQ ID NO: 137492 - protein, 17 aa, Artificial sequence
  protein pattern
  Variant (2)..(2): Xaa in position 2 is Ile or Leu
  Variant (4)..(4): Xaa in position 4 is Ala or Ser
  Variant (6)..(6): Xaa in position 6 is Ile or Val
  Variant (8)..(8): Xaa in position 8 is Asn, Ser or Thr
  Variant (9)..(9): Xaa in position 9 is Ile or Val
  Variant (14)..(14): Xaa in position 14 is Ile, Leu, Met or Val
  Variant (15)..(15): Xaa in position 15 is any amino acid
  Variant (17)..(17): Xaa in position 17 is Phe, Leu or Met
PXQXGXGXXANAVXXGX

SEQ ID NO: 137493 - protein, 16 aa, Artificial sequence
  protein pattern
  Variant (2)..(2): Xaa in position 2 is any amino acid
  Variant (3)..(3): Xaa in position 3 is Asp, Glu, Gln, Arg or Ser
  Variant (6)..(7): Xaa in position 6 to 7 is any amino acid
  Variant (8)..(8): Xaa in position 8 is any or no amino acid
  Variant (10)..(11): Xaa in position 10 to 11 is any amino acid
  Variant (12)..(12): Xaa in position 12 is any or no amino acid
  Variant (14)..(14): Xaa in position 14 is any amino acid
PXXRAXXXIXXXCXHP

SEQ ID NO: 137494 - protein, 21 aa, Artificial sequence
  protein pattern
  Variant (2)..(5): Xaa in position 2 to 5 is any amino acid
  Variant (8)..(8): Xaa in position 8 is Ile or Leu
  Variant (11)..(11): Xaa in position 11 is Ala, Gly, Ser or Thr
  Variant (12)..(12): Xaa in position 12 is any amino acid
  Variant (13)..(13): Xaa in position 13 is Phe, Ile or Leu
  Variant (14)..(14): Xaa in position 14 is any amino acid
  Variant (16)..(16): Xaa in position 16 is Phe, Ile, Leu or Met
  Variant (17)..(18): Xaa in position 17 to 18 is any amino acid
  Variant (19)..(19): Xaa in position 19 is Asp, Glu or Gly
  Variant (20)..(20): Xaa in position 20 is any amino acid
  Variant (21)..(21): Xaa in position 21 is Leu, Met or Val
LXXXXEVXQDXXXXLXXXXXX

SEQ ID NO: 137495 - protein, 18 aa, Artificial sequence
  protein pattern
  Variant (2)..(2): Xaa in position 2 is any amino acid
  Variant (7)..(7): Xaa in position 7 is any amino acid
  Variant (8)..(8): Xaa in position 8 is Ala, Ser or Val
  Variant (10)..(10): Xaa in position 10 is any amino acid
  Variant (11)..(11): Xaa in position 11 is Ala, Cys, Pro or Val
  Variant (13)..(14): Xaa in position 13 to 14 is any amino acid
  Variant (16)..(17): Xaa in position 16 to 17 is any amino acid
  Variant (18)..(18): Xaa in position 18 is Ile, Leu, Met or Val
GXSGFTXXGXXKXXPXXX

SEQ ID NO: 137496 - protein, 14 aa, Artificial sequence
  protein pattern
  Variant (3)..(3): Xaa in position 3 is Ala, Asp, Glu, Asn, Gln or Ser
  Variant (5)..(9): Xaa in position 5 to 9 is any amino acid
  Variant (11)..(11): Xaa in position 11 is any amino acid
INXGXXXXXDXHLS

SEQ ID NO: 137497 - protein, 18 aa, Artificial sequence
  protein pattern
  Variant (3)..(4): Xaa in position 3 to 4 is any amino acid
  Variant (5)..(5): Xaa in position 5 is Phe, Ile, Leu or Val
  Variant (6)..(6): Xaa in position 6 is any amino acid
  Variant (7)..(7): Xaa in position 7 is Ala, Asp, Glu, Gly, Asn or Gln
  Variant (9)..(11): Xaa in position 9 to 11 is any amino acid
  Variant (14)..(15): Xaa in position 14 to 15 is any amino acid
  Variant (18)..(18): Xaa in position 18 is Ile, Leu or Met
IAXXXXXFXXXEVXXGRX

SEQ ID NO: 137498 - DNA, 132 bp, Saccharomyces cerevisiae
  CDS (1)..(132)
atgtacaatcagataataaacacttttattgatgattgtcttttcttgcaaaccccaatgttacaatcgcccattagttctaagattgtgttgtcctttttcttacgaaatttttttccctcccttttttga

SEQ ID NO: 137499 - protein, 43 aa, Saccharomyces cerevisiae
MYNQIINTFIDDCLFLQTPMLQSPISSKIVLSFFLRNFFPSLF

SEQ ID NO: 137500 - DNA, 30 bp, Artificial sequence
  primer
atgtacaatcagataataaacacttttatt

SEQ ID NO: 137501 - DNA, 27 bp, Artificial sequence
  primer
tcaaaaaagggagggaaaaaaatttcg

SEQ ID NO: 137502 - DNA, 1647 bp, Saccharomyces cerevisiae
  CDS (1)..(1647)
atgtacttcccctttttaggcagattatcgataacagattacattatagtcgtcttggtatacatagaaagcattatttcatcagtccttaaacttataccacaaccaatgattaaccttttcgaatggctaataaatttctcaacgtcctccgatgacaataccatcgaagaaaagttaaggtcagctccaactatccatgaaatgtgtgcaatttttgatatatctgtcgaggatcatttggtaagaactgaagacaattatatcttgacactgcatagaatcccaccgatttctaaaaacagatttaacaataaagtggtatacttacatcacggtcttttgatgtgttctgatgtttggtgttgcaatattgaaagacataaaaacttaccgtttgtattgcatgatttaggttacgacgtctggatgggaaataatagaggtaataaatattcaactgcccacttgaacaaaccaccaaaatcgaacaagttttgggatttttctatcgacgaatttgcgttctttgacattccaaactcaattgaattcatcttagatataacaaaagtggacaaggtcatctgcatcggattctctcaaggctctgctcaaatgtttgctgcattttcgttgagtgaaaaattgaatcgaaaagtctcccattttatagccatagcacccgctatgactccaaaggggttgcacaacagaattgtcgataccttggccaaatcatcgcccggctttatgtatcttttctttggtaggaaaattgtgttaccttcagctgtcatttggcaaagaactttacatccaacacttttcaatttgtgtatcgatatcgcaaacaagatactgttcaattggaagtcgtttaacattctaccgagacaaaagattgcttcttacgcaaaactttattcaacgaccagtgtaaaatccattgttcactggttccaaatattaagatctcagaaatttcaaatgtttgaagagtctgataacatgctaaattccttaactaggccttaccaaattgctaattttcctactagaacaaatatcaagattcccattcttttaatttatggtggcatagattctttagttgatattgatgtgatgaaaaaaaatctacccttcaactccgtctttgatgttaaagttgacaattatgaacacctggatttgatttggggcaaagatgccgataccttggtcattgctaaagtcttgaggtttattgaattttttaaccctggtaatgtttcagtgaagactaaccagttactaccatcagcaagtctggttgaggaattaccaagcacgacatggaagacaactcatccaacgcatggtctcagttatagaactcactcggcagaccgttctccgttgtctgtacaagctgatgaagcggatgaggtccacaatgctgacaattcaaggttcttaagacgagtgttttctactagtgccatagacgaggacaacgaaaatgagcaccaggatgatacagaagatcaaatccataaggagcagcaaagacggttaagtgcctatctggaatcatccaaagatttacgacaactagatgccaactcttcgacaactgcgctggatgctctaaataaagaatga

SEQ ID NO: 137503 - protein, 548 aa, Saccharomyces cerevisiae
MYFPFLGRLSITDYIIVVLVYIESIISSVLKLIPQPMINLFEWLINFSTSSDDNTIEEKLRSAPTIHEMCAIFDISVEDHLVRTEDNYILTLHRIPPISKNRFNNKVVYLHHGLLMCSDVWCCNIERHKNLPFVLHDLGYDVWMGNNRGNKYSTAHLNKPPKSNKFWDFSIDEFAFFDIPNSIEFILDITKVDKVICIGFSQGSAQMFAAFSLSEKLNRKVSHFIAIAPAMTPKGLHNRIVDTLAKSSPGFMYLFFGRKIVLPSAVIWQRTLHPTLFNLCIDIANKILFNWKSFNILPRQKIASYAKLYSTTSVKSIVHWFQILRSQKFQMFEESDNMLNSLTRPYQIANFPTRTNIKIPILLIYGGIDSLVDIDVMKKNLPFNSVFDVKVDNYEHLDLIWGKDADTLVIAKVLRFIEFFNPGNVSVKTNQLLPSASLVEELPSTTWKTTHPTHGLSYRTHSADRSPLSVQADEADEVHNADNSRFLRRVFSTSAIDEDNENEHQDDTEDQIHKEQQRRLSAYLESSKDLRQLDANSSTTALDALNKE

SEQ ID NO: 137504 - DNA, 1404 bp, Schizosaccharomyces pombe 972h-
  CDS (1)..(1404)
atgattcagttaccgtttattcagcgtctaaaatgggaagagtatatggccctatttttggggtttttctttgtaatctttgaaaaattactttcatgcctggccttcatgattcacaatacgctaggcttgttttatcgatcagtagttcgaaatgagattaaaaaacgttcaaagaaaagatcaaggtcgagaagcgttagccttcaaagggcaaaggcaattcacgatgcagctgacatacgagaaatgtgcaaaatttctgggtattatgttgaggaccatctcgttagaacagaggatgattacatactttgtattcataggatatcgaaggattcccctggaagaattggttctcctcatcccaaaaagcttccggtcgtttactgtcatcacggtcttttgatgaattcggaagtctgggtttgtaatgtagaccccagaaattgcctagtatttgatctcgtaaataaaggatacgatgtttggctcggaaataatcgaggaaataaatacagtcgtcaacatcttcgcttcgactctactgacaaggaattttgggactttagcattgacgattttgctcaatacgatattcccgataccattgactatattctaaaaacttctgggcaaacaaagctcacttatataggattttctcagggcactgctcaagcttttgcttctttgagtatccatcccctgttgaatgacaaaatcaactctttgatagcgttagcacctgcaattagtccaaaaggtttacataacagagttgtagatgcctttgtaaaagccagaccttccatattatttttccttttcggacgaaaatctattttgccgtctgccggattctggcaaagctttttagctccaaaattttttgatgcagtccttgcatactgtttgtctcagttatttaactggtcttgccaaaacatttcttcctatcaacgcttggtttcattcgcccatttgtattcatatactagtgtaaagtgccttgtgcattggtttcaaatcatgagaagcgcagaatttagaatgtatgataatgaccagcttggtcatgactatttcctcaaatattacaaagctgccaaattccctacaaataatattcgcacccctatttatcttatttggggaggcagcgactcactcgttgatatccaagcgatgttgaatgctttgcctgcggaggtggagcatgttaaggttgatagctatgaacacttggacatgatttgggcagacacagttaaagattatgttatacctcctgtactacgaaggcttcgtgacattcaccatccaccagagcatgaggagaatgataaagaaaatcgtgaaatccaaaaaaatcatatcgctcctaggaataaaccaatttaa

SEQ ID NO: 137505 - protein, 467 aa, Schizosaccharomyces pombe 972h-
MIQLPFIQRLKWEEYMALFLGFFFVIFEKLLSCLAFMIHNTLGLFYRSVVRNEIKKRSKKRSRSRSVSLQRAKAIHDAADIREMCKISGYYVEDHLVRTEDDYILCIHRISKDSPGRIGSPHPKKLPVVYCHHGLLMNSEVWVCNVDPRNCLVFDLVNKGYDVWLGNNRGNKYSRQHLRFDSTDKEFWDFSIDDFAQYDIPDTIDYILKTSGQTKLTYIGFSQGTAQAFASLSIHPLLNDKINSLIALAPAISPKGLHNRVVDAFVKARPSILFFLFGRKSILPSAGFWQSFLAPKFFDAVLAYCLSQLFNWSCQNISSYQRLVSFAHLYSYTSVKCLVHWFQIMRSAEFRMYDNDQLGHDYFLKYYKAAKFPTNNIRTPIYLIWGGSDSLVDIQAMLNALPAEVEHVKVDSYEHLDMIWADTVKDYVIPPVLRRLRDIHHPPEHEENDKENREIQKNHIAPRNKPI

SEQ ID NO: 137506 - DNA, 1383 bp, Schizosaccharomyces pombe 972h-
  CDS (1)..(1383)
atgactctgaatggaaatataatgaaatattgcttagaaaagggggaaattttaatcagttttttactgattgcgttggagagcatgtttcgaatatgtacagttattttacctagtccacttcggaattggttttatgagcaatcaaaaaaagtatactcgtactttttgcctgaattgttggtagatgataacgcgaataaattaactgatgcaagagataccatcgatttatgtgcacttcatgggtatgatctggaagaacactttgttcgtacaactgatggctacttgcttggcttgcatcgggtgtataaaaagaaaaaaggaaaaattgaagagttaaattatctcccacctgtattatttattcatgggctaatgatgaactctgaaagttgggtctgcaacttgaaaaaggaagatgccattccatttgctcttgtggaacaaggatacgatgtttggcttggaaacttacgaggaaacaaatatagtataaagaatatcaaattcagctctcaaaatccaaagttttgggatttcagtcttgatagtatcgctatttttgacataccttccattgttaaatatatactgtccgttaacagttttgattctataagccttgttggattttctcagggcgctatattagcatttgcagcgctgtctattgatactgaacttcgcaattccgtacgagcatttattgctctagctcctgcaattgctcctaaaaagtatagtggtagaaccgttaaatctattattcacgctaatagccaacttctttacctaatgttcggtcgaaattccatgcttggttctgctgtgttttggcaagcagttttatatccgccagtttttgcaaaaattgttgatctgtttcttcgcttttttctgagctggaccggaaaaaatatttccgaaactcagaaaatcgttgcatactcccatctatattcctttacttctgtcaaatgctttgtacattgggctcaaattacgcgtcgcaaagtattacaaatgtacgatgacagtccaggatttaagccaagttactatacaaatcttaaccgaattgctcgctatccgattgaaaatatacgtctacctattactttagtttatggcagtaacgataacatggtggacattgaaacactcaagacccaacttccaccattatctcaatgcattcagattcctaactatgagcatctcgacatcatcatgggagatacgaaaaaggacatagtaattcagcaagtcgtagaacaactaaatcatgtcattgctggagattactttgaaagcataaaagaagaatttggacttgacacagaattggttgacggcgttatgaaccatacaatatag

SEQ ID NO: 137507 - protein, 460 aa, Schizosaccharomyces pombe 972h-
MTLNGNIMKYCLEKGEILISFLLIALESMFRICTVILPSPLRNWFYEQSKKVYSYFLPELLVDDNANKLTDARDTIDLCALHGYDLEEHFVRTTDGYLLGLHRVYKKKKGKIEELNYLPPVLFIHGLMMNSESWVCNLKKEDAIPFALVEQGYDVWLGNLRGNKYSIKNIKFSSQNPKFWDFSLDSIAIFDIPSIVKYILSVNSFDSISLVGFSQGAILAFAALSIDTELRNSVRAFIALAPAIAPKKYSGRTVKSIIHANSQLLYLMFGRNSMLGSAVFWQAVLYPPVFAKIVDLFLRFFLSWTGKNISETQKIVAYSHLYSFTSVKCFVHWAQITRRKVLQMYDDSPGFKPSYYTNLNRIARYPIENIRLPITLVYGSNDNMVDIETLKTQLPPLSQCIQIPNYEHLDIIMGDTKKDIVIQQVVEQLNHVIAGDYFESIKEEFGLDTELVDGVMNHTI

SEQ ID NO: 137508 - DNA, 1332 bp, Schizosaccharomyces pombe 972h-
  CDS (1)..(1332)
atgtcaggattcaataaaaatcaaatatattggggagactatgttggcgtaattgcagctttcgtcggtgtgtataccgaattagtagcacgaatatttatttacatgatacctgagcgagtcagggaatggtttcgtgtacgtataattgttctgtatcattactacataagctctaaaactacggatggaatgaccgatgcggttcaaaagtgtcgaaacatttatgaaatatgcgaagcctttgggtatcgggttgaagaacaccttgtgcgaactcaagacaactttatactatgtctacatagaattacacatcctaagcaaagccaacataagcgtgaagtagtttattgtcaccatgggctcatgacaaattctgaattatgggttgcagttaatgaatccgagagaagtcttccttttgttttaattgaatctggatatgatgtttggttgggcaacaatcgaggaaacaagtatagcaggaaacacattacttacaaaccgaaggacgaagaattttggaacttctcgttagatgatatggccatgtttgatattcccgatactgttgattacatcttgagggaaacaggaagagaaaaactaaactatattggcttttctcaaggaactgctcaagcaatggctgcacttagcattaatccggatttgaatgacaaagtaaatattttcatagggttagcgcctgcttatgctcccaaaggcttttcaaattacttcgttgactatattgtcaaagttaatccaaaaattatgtatcatctttttgggcgccgttgtcttttaccttcagtcactttttggcaaaatatatgttatcccccaatttttgtaaaaattgtcgatgtatcccttaaaattttattcaactgggacctatccaacatttctcttaatcaaaaactttgcggttatgcacatctttactctttttcaagtgtaaagagtgttgttcactggcttcagattataaaaaactgtactttccagctttatgacgacgatatggctcttctagctggatatggttcacgccattaccaagttcctctgtttcctacgaataatatcaaatgcccaatgctgatactatggggaggtaaagatactttgatcaatatggaagtaatgagaactgctcttcctccccatgcaaaggaagtttcgattgctcattatgaacatcttgactttctatggggccaggatgttaaagaggaagtgttcccagttgtaatagatgcccttaagcatcattcattaggcaaagccaaacatttcgttaaacaaaacggttttcattaa

SEQ ID NO: 137509 - protein, 443 aa, Schizosaccharomyces pombe 972h-
MSGFNKNQIYWGDYVGVIAAFVGVYTELVARIFIYMIPERVREWFRVRIIVLYHYYISSKTTDGMTDAVQKCRNIYEICEAFGYRVEEHLVRTQDNFILCLHRITHPKQSQHKREVVYCHHGLMTNSELWVAVNESERSLPFVLIESGYDVWLGNNRGNKYSRKHITYKPKDEEFWNFSLDDMAMFDIPDTVDYILRETGREKLNYIGFSQGTAQAMAALSINPDLNDKVNIFIGLAPAYAPKGFSNYFVDYIVKVNPKIMYHLFGRRCLLPSVTFWQNICYPPIFVKIVDVSLKILFNWDLSNISLNQKLCGYAHLYSFSSVKSVVHWLQIIKNCTFQLYDDDMALLAGYGSRHYQVPLFPTNNIKCPMLILWGGKDTLINMEVMRTALPPHAKEVSIAHYEHLDFLWGQDVKEEVFPVVIDALKHHSLGKAKHFVKQNGFH

SEQ ID NO: 137510 - DNA, 1761 bp, Magnaporthe grisea 70-15
  CDS (1)..(1761)
atgccgttgcctttcctggggcgactgaatattcccgaatatgtcgcccttcttggttcattctttctcgtcgggctcgaggcctttattcgtgtaatcacattagcgctgcctgtgtctacttcgattcgagatgcatccgattttgtcgaactttgcgccctgaacggctaccaggctgaagaacatgttgtccagaccaaagatggctatctactcggcttgcatcgcctcgcctggaggaaaggggaggaagaccagagagtcaacagcggcccgaacagcgtccagaagcgtgtggtgtacttgcaccacggtttgctcatgaacagtgaggtctgggtctgccagacggacacaaaccgatcgctcgcgttcgtgctggtggatcaaggcttcgatgtctggaggtatatatggcagcttggaaacaaccgcggcaacaagtactcgaagaagagtatcaaccattcacctgcttccacagccttttggaatttctccattgacgaatttgctttccacgacattccggatagtatcgcgtacatcctcgagactacggacgaaaagtcgttgtcgtacattggcttctcgcaaggaacagcccaggcctttgccagtttggccgtcaatccaagacttaaccagcaagtcaacgtgtttatcgccctcgcgccagccatgtcaccggcgggactttccaacagagtagtggatgctctgatcaaatcgtcgccttcggttctttttctgctctttggtcgccgggcgatcctcagctctgctaccatgtgggagaccatattgtatcctccgatctttatcaaggtcatagatgttgctgtgtctttcctatttggttggaaaaccagaaacatctcgacaagccagaagctggctgcttatccccacttgtactcgttcaccagcaccaagtcggtggtacattggttccaaatcatccgtaccaagagctttcagatgtacgatgatgatgtccagcaaccattgtcgctgagcacaagctccaggttcacgaaagtggctaagtatcctacgcgaaacatcaagacaccgatagttctagtctatggcggttccgattcactggtggatatcaaagtcatgcttcgccagctgccgcctcagaccgtcgccaccgagatcccgcgctacgaacatatcgactttttgtgggcgcgcgacgttgacgcacaagtattccgccacgtatttgacgcgctggactcattcactggtgcggaacataccaaggaagagtacaatcggtataggactgctcgctcgtccagcatcagtgccagcgtgaacttcaggcgacacgctcatcatgatagtgtcgacactcaggcagatgtgacagatgagaccaccgcgacaaccaccgaggcggaaagcgactcgggtgacaggactctcgtcaacggtcgaggcggatcgaggtctagacttcgacaccaggccacagagggcttgcgcaggccttcaaggggctctgaggtctcggtaggcccggccagtggtggcttgaatactgatggtacagtagcctccgatggtgaaagctcctcgggttcgcccgcaaggcgaagggcaggcattcaacgccataccagcggtgtgagcgtcgactctctacgtcaaggccgtggaattagggtgggtgccagtcgggccgtagggggtgtcactgctgcgatcgccggcggcaactctcccagtagcgggacggattag

SEQ ID NO: 137511 - protein, 586 aa, Magnaporthe grisea 70-15
MPLPFLGRLNIPEYVALLGSFFLVGLEAFIRVITLALPVSTSIRDASDFVELCALNGYQAEEHVVQTKDGYLLGLHRLAWRKGEEDQRVNSGPNSVQKRVVYLHHGLLMNSEVWVCQTDTNRSLAFVLVDQGFDVWRYIWQLGNNRGNKYSKKSINHSPASTAFWNFSIDEFAFHDIPDSIAYILETTDEKSLSYIGFSQGTAQAFASLAVNPRLNQQVNVFIALAPAMSPAGLSNRVVDALIKSSPSVLFLLFGRRAILSSATMWETILYPPIFIKVIDVAVSFLFGWKTRNISTSQKLAAYPHLYSFTSTKSVVHWFQIIRTKSFQMYDDDVQQPLSLSTSSRFTKVAKYPTRNIKTPIVLVYGGSDSLVDIKVMLRQLPPQTVATEIPRYEHIDFLWARDVDAQVFRHVFDALDSFTGAEHTKEEYNRYRTARSSSISASVNFRRHAHHDSVDTQADVTDETTATTTEAESDSGDRTLVNGRGGSRSRLRHQATEGLRRPSRGSEVSVGPASGGLNTDGTVASDGESSSGSPARRRAGIQRHTSGVSVDSLRQGRGIRVGASRAVGGVTAAIAGGNSPSSGTD

SEQ ID NO: 137512 - DNA, 1689 bp, Magnaporthe grisea 70-15
  CDS (1)..(1689)
atgacgcgcagcgaggttactatcctgtttgctcggtccactgtgtctacttcgattcgagatgcatccgattttgtcgaactttgcgccctgaacggctaccaggctgaagaacatgttgtccagaccaaagatggctatctactcggcttgcatcgcctcgcctggaggaaaggggaggaagaccagagagtcaacagcggcccgaacagcgtccagaagcgtgtggtgtacttgcaccacggtttgctcatgaacagtgaggtctgggtctgccagacggacacaaaccgatcgctcgcgttcgtgctggtggatcaaggcttcgatgtctggaggtatatatggcagcttggaaacaaccgcggcaacaagtactcgaagaagagtatcaaccattcacctgcttccacagccttttggaatttctccattgacgaatttgctttccacgacattccggatagtatcgcgtacatcctcgagactacggacgaaaagtcgttgtcgtacattggcttctcgcaaggaacagcccaggcctttgccagtttggccgtcaatccaagacttaaccagcaagtcaacgtgtttatcgccctcgcgccagccatgtcaccggcgggactttccaacagagtagtggatgctctgatcaaatcgtcgccttcggttctttttctgctctttggtcgccgggcgatcctcagctctgctaccatgtgggagaccatattgtatcctccgatctttatcaaggtcatagatgttgctgtgtctttcctatttggttggaaaaccagaaacatctcgacaagccagaagctggctgcttatccccacttgtactcgttcaccagcaccaagtcggtggtacattggttccaaatcatccgtaccaagagctttcagatgtacgatgatgatgtccagcaaccattgtcgctgagcacaagctccaggttcacgaaagtggctaagtatcctacgcgaaacatcaagacaccgatagttctagtctatggcggttccgattcactggtggatatcaaagtcatgcttcgccagctgccgcctcagaccgtcgccaccgagatcccgcgctacgaacatatcgactttttgtgggcgcgcgacgttgacgcacaagtattccgccacgtatttgacgcgctggactcattcactggtgcggaacataccaaggaagagtacaatcggtataggactgctcgctcgtccagcatcagtgccagcgtgaacttcaggcgacacgctcatcatgatagtgtcgacactcaggcagatgtgacagatgagaccaccgcgacaaccaccgaggcggaaagcgactcgggtgacaggactctcgtcaacggtcgaggcggatcgaggtctagacttcgacaccaggccacagagggcttacgcagcccttcaaggggctctgaggtctcggtaggcccggccagtggtggcttgaatacaaatggtacagtagcctccgatggtgaaagctcctcgggttcgcccgcaaggcgaagggcaggcattcaacgccataccagcggtgtgagcgtcgactctctacgtcaaggccgtggaattagggtgggtgccagtcgggccgtagggggtgtcactgctgcgatcgccggcggcaactctcccagtagcgggacggattag

SEQ ID NO: 137513 - protein, 562 aa, Magnaporthe grisea 70-15
MTRSEVTILFARSTVSTSIRDASDFVELCALNGYQAEEHVVQTKDGYLLGLHRLAWRKGEEDQRVNSGPNSVQKRVVYLHHGLLMNSEVWVCQTDTNRSLAFVLVDQGFDVWRYIWQLGNNRGNKYSKKSINHSPASTAFWNFSIDEFAFHDIPDSIAYILETTDEKSLSYIGFSQGTAQAFASLAVNPRLNQQVNVFIALAPAMSPAGLSNRVVDALIKSSPSVLFLLFGRRAILSSATMWETILYPPIFIKVIDVAVSFLFGWKTRNISTSQKLAAYPHLYSFTSTKSVVHWFQIIRTKSFQMYDDDVQQPLSLSTSSRFTKVAKYPTRNIKTPIVLVYGGSDSLVDIKVMLRQLPPQTVATEIPRYEHIDFLWARDVDAQVFRHVFDALDSFTGAEHTKEEYNRYRTARSSSISASVNFRRHAHHDSVDTQADVTDETTATTTEAESDSGDRTLVNGRGGSRSRLRHQATEGLRSPSRGSEVSVGPASGGLNTNGTVASDGESSSGSPARRRAGIQRHTSGVSVDSLRQGRGIRVGASRAVGGVTAAIAGGNSPSSGTD

SEQ ID NO: 137514 - DNA, 1872 bp, Gibberella zeae PH-1
  CDS (1)..(1872)
atggctattccctttattgggaggcttcgcccctacgagtattttgccctcgtgggctcatttattctcgtcggtctcgaggcagtcattcgcgtcttgacgttggcattgccgatatccacttcagttcgagatgcagcagactttgtcgagctatgtcgcatctggggttatgaggcagaagaacacattgctcaaaccaaggatggatatcttctaggtcttcatagactccagtggagaaagggtgaagaaggccagaaggtaaactacggaccaacaagtctgaaaaagaaggtcatatacatgcatcatggtcttctcatgaattcagaggtttgggtatctcttaccaatgagcagcgatgtcttccattcgaactggtagaaaagggatacgatgtttggtttggcaacaaccgaggaaacaagtactccaagaaatcgattcaccactccccaacttctaacgctttctgggatttctccatcgacgaattcgccttccatgacatcccagacagcattagctacatcctcgataccacccagcaggaaagtctttcgtacattggcttctcacagggtacggcgcaggcctttgccagcttggctattcatcccaagcttaacaaccaggtcaatgtcttcattgctctcgcccctgcaatggcgccagccggcttgtctaacggaattgtcgacgcgcttgtcacggcatcaccctctgttttgttcctgctatttggtcgtcgctctattcttagttctgcaaccatgtgggaaaccattctatacccgcccatcttcagcaaacttatcgatatgggactttcgttcttattcaactggcaaactctcaatatctcggccagtcagaaattggctgcgtaccctcatttatactcattcacaagtacaaaaagtgtcgttcattggttccagatcattcgaaacaaatgttttcagatgtacgacgacgatgttcaccagccgatcagtgtcacctcgactagaaaatactcaaaggtggccaagtacccgacccggaatatcaagactcctatcgttctcgtatacggaggcagtgactccctggtggatattaaggtgatgctgaaagaactgccacctcagactgtcgcaaccgaaattccccactacgagcaccttgacttcctctgggcaagagatgtggatacacaggtcttccagcacgtctttgatgcgcttgacagtttcaccgacgctgagcatacaaaggaggagtatgatcgatactatgtcagccgacaagagagtctactaggttcgggatatgcttatgcacgttctcaagctcacctaggtagcgagagcgagtcttcaactcttactccaagtcttgaaggaacaaacagcatccagctcgcgcccgcccctcaacctcaccgagcaagagagactgcatccggaatcccatcgccaaagaacacaacgcggcacagggtgaattactctattgacaagataggagacccgccagtgaccccaacattccagaccgaacccgccgagcctcctgcaggtcaagaacagtcagaggagggtgtccagactgaacccactgaaccgtctgcaggtcaagaacagttggacgagggtgttcggactcctatagcggcgagggtcaaagctggtgttacgcgcagcggaagtgtgggaagcaacatcagcctggacggcatgcgagaaggtcgaggcatcaccatcggagcgagtagagccatcggtggtgtggtgaccaaaagcggcgccagcggaaccaacggcgagggcagccctggaagagacagtggctcggaaaataaaaagaacaagaagaacaagtag

SEQ ID NO: 137515 - protein, 623 aa, Gibberella zeae PH-1
MAIPFIGRLRPYEYFALVGSFILVGLEAVIRVLTLALPISTSVRDAADFVELCRIWGYEAEEHIAQTKDGYLLGLHRLQWRKGEEGQKVNYGPTSLKKKVIYMHHGLLMNSEVWVSLTNEQRCLPFELVEKGYDVWFGNNRGNKYSKKSIHHSPTSNAFWDFSIDEFAFHDIPDSISYILDTTQQESLSYIGFSQGTAQAFASLAIHPKLNNQVNVFIALAPAMAPAGLSNGIVDALVTASPSVLFLLFGRRSILSSATMWETILYPPIFSKLIDMGLSFLFNWQTLNISASQKLAAYPHLYSFTSTKSVVHWFQIIRNKCFQMYDDDVHQPISVTSTRKYSKVAKYPTRNIKTPIVLVYGGSDSLVDIKVMLKELPPQTVATEIPHYEHLDFLWARDVDTQVFQHVFDALDSFTDAEHTKEEYDRYYVSRQESLLGSGYAYARSQAHLGSESESSTLTPSLEGTNSIQLAPAPQPHRARETASGIPSPKNTTRHRVNYSIDKIGDPPVTPTFQTEPAEPPAGQEQSEEGVQTEPTEPSAGQEQLDEGVRTPIAARVKAGVTRSGSVGSNISLDGMREGRGITIGASRAIGGVVTKSGASGTNGEGSPGRDSGSENKKNKKNK

SEQ ID NO: 137516 - DNA, 1686 bp, Candida glabrata CBS 138
  CDS (1)..(1686)
atgatattcaacagcttcacgatcacggactatgtgatcgttctgctcgtttacctcgagtccatggtggctttcttcctgaagctggtgcctcagcccataatatcgctgctggagtggttcatcgactactcgttcagcgaggacaacacctcgttcgaggagcgtctccgcaccgcggttaccatccatgacatgtgccgcttgttcgggatagaggtcgaggaccacctggtgcgtaccgaggacgactacatcctgaccctgcaccgcatcccgccaagagaaggtaccgctaacggcaagacagtctacctgcaccacggcctgctgatgtgctccgatgtctgggtctgccacgtcgagagacacaagaacttgccctttgtgcttcacgacctgggcttcgacgtctggatgggcaacaacagaggtaacaagtactccacagcacatttgtacaaacagcctaagtccaaggagttctgggacttctccatcgacgagttcgcattcttcgacattccaaactccatccagttcgtcctcgacagatgcaagattgaccagctgatatgtatcgggttctctcagggctccgcccagatgtttgccgcgctaagtatcagcgaggacctgaacaagaaagtgtcccatttcatcgccatcgccccagccatgactccaaagggtctgcacaacagaatcgtggacactctcgccaagtcctctccgactctgatgtacttgttcttcggacgcaacatcatcttgccctcggctgtggtctggcagaagactatacaccctaagcttttcaacttcttcatcgatttcggtaacagaatcctgttcaactggaaagctctgaacatcactcagaagcaaaagatggctgcttactcgaaactttactctacaaccagcgtgaagtccatcgtgcattggttccaaatccttagagcacagaaattccaaatgtttgaagaacaggacgacatgtttaactccttgactagaccatacaagatcccaaggttcccaacaaagactaacatcaagacccctatcttgctaatatacggcggtgtcgactcgttggttgacatcaatgtcatgaggaataacctgcccttaacaaatgtctttgacataaaagtggacctacatgaacatcttgacctgatctggggcaaagataccgatacgctcgtgattgccaaagtattgagattcatagagttcttcagcggcgagaaactactacagtccactacactttctcttggcgagccagaaagactcatgcctgttaagacgccaatcagccaacacactagcagaagaaacagcaacagtagcgttggcacagaaaatgcgactccttcaacgtttaacgttcgtaagactacgacgccctctaactacaggtacgaacaaacggaaagcccaaccgcccaatacggtttagagaagttgaactctctgtactccaacgttggaagggggctagaagatattgacgagaaggaggccttcctggactacaataccggcgacaagatggacgaaatccaaaagacgaactcaatcaaccaacgcagactgagcgagtacctggactcatccacagacttgaaacaaatggacagcaatgctaccaccaccgtcaacactcccaactaa

SEQ ID NO: 137517 - protein, 561 aa, Candida glabrata CBS 138
MIFNSFTITDYVIVLLVYLESMVAFFLKLVPQPIISLLEWFIDYSFSEDNTSFEERLRTAVTIHDMCRLFGIEVEDHLVRTEDDYILTLHRIPPREGTANGKTVYLHHGLLMCSDVWVCHVERHKNLPFVLHDLGFDVWMGNNRGNKYSTAHLYKQPKSKEFWDFSIDEFAFFDIPNSIQFVLDRCKIDQLICIGFSQGSAQMFAALSISEDLNKKVSHFIAIAPAMTPKGLHNRIVDTLAKSSPTLMYLFFGRNIILPSAVVWQKTIHPKLFNFFIDFGNRILFNWKALNITQKQKMAAYSKLYSTTSVKSIVHWFQILRAQKFQMFEEQDDMFNSLTRPYKIPRFPTKTNIKTPILLIYGGVDSLVDINVMRNNLPLTNVFDIKVDLHEHLDLIWGKDTDTLVIAKVLRFIEFFSGEKLLQSTTLSLGEPERLMPVKTPISQHTSRRNSNSSVGTENATPSTFNVRKTTTPSNYRYEQTESPTAQYGLEKLNSLYSNVGRGLEDIDEKEAFLDYNTGDKMDEIQKTNSINQRRLSEYLDSSTDLKQMDSNATTTVNTPN

SEQ ID NO: 137518 - DNA, 1389 bp, Debaryomyces hansenii CBS767
  CDS (1)..(1389)
atggcagctgtcaaaaagttgactataggaaacactatcttgaatgttagcttcctcttacttggtatagctatatctattttgtacaagctcgtaaaaaagtttcttggtttagattttgatgctgcagatgttgacaaggataaaaaatcaacgatctacgaacggattttaaggtcaaaggatataacagagattgcagaaatatacgggtatattgttagggaacatgttattacaacagaagatgagtatgtgctcgttatacataagcttgaaaaaagaggaatacggtctattccccatggaaaaatagcgtattttcaccatgggttgctcacaaactcagagttattcttgcttggtggtacaaaagatcggattttaccgtttttattggtggatatggggtatgacgtctggttgggaaataatcggggtaacaaatattctatgaaacacactaaattgtcaatcgatgattctaaattctgggatttctccttggatgaatatgcgttatacgatattcctaactcgattgattatatattatcgcactataaaccatcggataaaataacatatattgggttctcacagggttgctctcaactatttgctagtttaagtttgaagccagaattgaattccaagttgaatttattcgtcggactatcgcctgcaataatccccagaaatttaaaccaccctgttttcaaagcgattgttgtacagtctgctaacaataatgagtttttatatagcgtgttcggaaataaagctatacttccatctgttgcattctggagctatttcttaggctcaacactatatgaaaaggtggtagatacgtcacttgtctatttatttgggtggaccggaaagaacttgacaaaatctcagaaaataatagggtatccccatatgttttccaattcgtctgtcaaatcattggtacattggttccaaatcattaacagtaaacgatttcagatgtttgacgaaacctgcaacattggaatgaccaagttatcgaatctttcgagtgtgtcgaggtctaagagcaatagggttgctcctttccccatatcccaccatttgaacgttcctacgcttttggtttatggggatagtgacatattgattgatatggaaaatacaaagaaattaatactagatgctaacgatagaatgaaaaacaaccttatcgatatagtaaattgtccagggtatgaacatatggatacattatggggtaaggacgtcgtggatgatgtattcacgaaagtcatagacacaatggaatcgcttactcacgagtcgaaagttagtggagtaatggtaactctgaaaaccctagatgaaagtagctgtgaaagcttgtga

SEQ ID NO: 137519 - protein, 462 aa, Debaryomyces hansenii CBS767
MAAVKKLTIGNTILNVSFLLLGIAISILYKLVKKFLGLDFDAADVDKDKKSTIYERILRSKDITEIAEIYGYIVREHVITTEDEYVLVIHKLEKRGIRSIPHGKIAYFHHGLLTNSELFLLGGTKDRILPFLLVDMGYDVWLGNNRGNKYSMKHTKLSIDDSKFWDFSLDEYALYDIPNSIDYILSHYKPSDKITYIGFSQGCSQLFASLSLKPELNSKLNLFVGLSPAIIPRNLNHPVFKAIVVQSANNNEFLYSVFGNKAILPSVAFWSYFLGSTLYEKVVDTSLVYLFGWTGKNLTKSQKIIGYPHMFSNSSVKSLVHWFQIINSKRFQMFDETCNIGMTKLSNLSSVSRSKSNRVAPFPISHHLNVPTLLVYGDSDILIDMENTKKLILDANDRMKNNLIDIVNCPGYEHMDTLWGKDVVDDVFTKVIDTMESLTHESKVSGVMVTLKTLDESSCESL

SEQ ID NO: 137520 - DNA, 1554 bp, Debaryomyces hansenii CBS767
  CDS (1)..(1554)
atgtatgttccattaataggtagattggctttaagagaatggttactccttacattatcgttttctttaacatggctcgagttcataatatcaataattactcaatttttgccgtcactagtcatccaattctttaccagcaccacgttggtgttgtatagattcacgtctaatccggtcaacttgatctactctatgactaaggggaataatgttgatgatgcagaaaaagctcaatataaagttttgaattaccacaatacatctagcgtgactagagaaagttatgaccagatgatagatttattgaatagcaataatataaatgaaatgtgccaattttttggctacgatgtggagagtagaatcttaaagaccgatgataactatttcttgactgtccaaaggatatgcaaacctggttccgttaccaagaggaacggtaaggtagtctacttgcaccatggactattaatgagcagtgaaatttgggttacaatgttagataagaatcataacttaccatttttgctctatgatttgggatacgatgtctggctaggtaataacagaggtaacaaatattcgcagaagcacttgttccatgccattgactcggagaaattttgggacttttctatggacgaatttgctttattcgacatccctaacactattaactttatcttagaagttactgggaaagagaaactcacgtatattggtttttcacaaggtacagcccaggcatttgcaagtgtatcaatcaacccggaattaaatgataagattgacaaaatcattgctatctctcctgcgactactccacatggcctttactctaaatttttggatatttttttgaaagcttcgccgcatgttgtattcttattattctccagaaagatcttaatgccgtctgtcttgttttggagcagaattatgtatcctccactatttgacacctcgattgatgtgtccaactatttgttattcaactggagatccgagaatataacaaaaatacaaaaattgagctcgtatgcccatttgtatctgacaacatcggtcaaaacagttgtgcattggtttcaaatcatgtcatccaaaaacttccagatgtatcatgaatctaagtcctcaggcatattccccatgtcgtatccattgaaaactatacgtgtacccattcatctcatatatggaacgatcgattcgctagtcgacattgatgtcatgaagggccaattacccgagaaatatactacaactcagcctgtcaataaccacgagcatttagacaacatctggggctttgatataggtgaaaaggtattcaaatatgtcttacaatatcttgaacagcccaatgtatttgatgttcctttaatcgaatataagtcccaaacgaattacttacaggcttcgcctaatataacgcaagactttgaagacgacacaggaagcacccttataggtaactcttattcagaagaaagagaagtcgatatcagtcgtagaagaccctccacaggtggtagtgtgtttatataa

SEQ ID NO: 137521 - protein, 517 aa, Debaryomyces hansenii CBS767
MYVPLIGRLALREWLLLTLSFSLTWLEFIISIITQFLPSLVIQFFTSTTLVLYRFTSNPVNLIYSMTKGNNVDDAEKAQYKVLNYHNTSSVTRESYDQMIDLLNSNNINEMCQFFGYDVESRILKTDDNYFLTVQRICKPGSVTKRNGKVVYLHHGLLMSSEIWVTMLDKNHNLPFLLYDLGYDVWLGNNRGNKYSQKHLFHAIDSEKFWDFSMDEFALFDIPNTINFILEVTGKEKLTYIGFSQGTAQAFASVSINPELNDKIDKIIAISPATTPHGLYSKFLDIFLKASPHVVFLLFSRKILMPSVLFWSRIMYPPLFDTSIDVSNYLLFNWRSENITKIQKLSSYAHLYLTTSVKTVVHWFQIMSSKNFQMYHESKSSGIFPMSYPLKTIRVPIHLIYGTIDSLVDIDVMKGQLPEKYTTTQPVNNHEHLDNIWGFDIGEKVFKYVLQYLEQPNVFDVPLIEYKSQTNYLQASPNITQDFEDDTGSTLIGNSYSEEREVDISRRRPSTGGSVFI

SEQ ID NO: 137522 - DNA, 1710 bp, Yarrowia lipolytica CLIB122
  CDS (1)..(1710)
atgcacgtccccgttctaggacgtctcgagctgtcacattggcccatgctgtttgtgtcgctcttcctcgtctgcctcgagtttctcgtgagcttcatcaccgctctgctccccaacttcttcattgaatggtgccacgacaaggtcgagattctgcaggtctacttccccagcaccggcgaggttgctctcagaaagtctcccgagcagctcgaaaccgtcaacgctctgctcaaggcccgagactttgttgaaatctgcgatttccatggctaccaggccgaagaacatgtggttcagaccaaggatggatttctgctaggagtgcaccgaatcctgcccaagaaccctgctgctctgctcaccgacgaccccgaagtcctcagcacccccgcccctcccccggccttcctggctggaaacctcgaagtctactcttcgccccccaaaagaggctccaagcgaagtgtgtcctccaaactgatcacccgacccgttgtctaccttcaccatggtctgctgatgaactcggaggtctgggttgtgaacacggacgccaaaaagtcgattgcttttgctctggccgacctgggatttgacgtctggctcggaaacaacagaggcaacaagtactcgcgaaaacacatgaaatacaaccccgagtcgcgcgagttctgggatttctgtctcgacgactttgcgctgtttgatatccccgattccattgactatattctgtctgtgaccaaacagaagtctctgtcttacattggattctcccagggttcagcccaggcatttgcatctctggctatccgacctcctctcaacgataaggtcaacctattcattgccgttgcccccgccatgtctcctcctggcctgagatccaagattgtcaactccctcatgagagcttctccacagctgctgttcctctgctttggtcgaagagctatcttgtcatcctctcccttctgggagtcggttctggacgcaaaactgtatgctcgaatcatcgatgctgcctgcagaatgctgtttgactggtacggagagaacatcacctggccccagaagattgcagcctaccaccacctgtactcgtacacctctgtcaagtccgtcgtgcattggttccagatcatccgagcagcctccttccacatgtttgaggatgtcatcaactctcccctggaccctcatctgtgcaagtactccactgtcacccgataccccaccgagaacattcggacacccattgctctgatctacggcaagaccgactcgctggtggacattgaccagatgctgtctactctaccctcatccactattgcatttggagtccccaaacatgagcatctcgatcttctgtggggagacgaagccgacactctggttatccccaagattgtcgctctgctcgattattacacacctgtgcccagaagtaacaagagcagcagtgaccatatcagcgagcgtctatttgagcctgctaactccaaggtctcgggtctgggactcagccaggacctcaagtcgccattgtctttgaaaaagagatctctctccaactcctcatcgatccaggactctcataaggtcggaggagacacagactcggttctaagtctccgaaacctcactcccaaggggtacgctcttggaagtgccaagccagtgagtggcactctcaacccttga

SEQ ID NO: 137523 - protein, 569 aa, Yarrowia lipolytica CLIB122
MHVPVLGRLELSHWPMLFVSLFLVCLEFLVSFITALLPNFFIEWCHDKVEILQVYFPSTGEVALRKSPEQLETVNALLKARDFVEICDFHGYQAEEHVVQTKDGFLLGVHRILPKNPAALLTDDPEVLSTPAPPPAFLAGNLEVYSSPPKRGSKRSVSSKLITRPVVYLHHGLLMNSEVWVVNTDAKKSIAFALADLGFDVWLGNNRGNKYSRKHMKYNPESREFWDFCLDDFALFDIPDSIDYILSVTKQKSLSYIGFSQGSAQAFASLAIRPPLNDKVNLFIAVAPAMSPPGLRSKIVNSLMRASPQLLFLCFGRRAILSSSPFWESVLDAKLYARIIDAACRMLFDWYGENITWPQKIAAYHHLYSYTSVKSVVHWFQIIRAASFHMFEDVINSPLDPHLCKYSTVTRYPTENIRTPIALIYGKTDSLVDIDQMLSTLPSSTIAFGVPKHEHLDLLWGDEADTLVIPKIVALLDYYTPVPRSNKSSSDHISERLFEPANSKVSGLGLSQDLKSPLSLKKRSLSNSSSIQDSHKVGGDTDSVLSLRNLTPKGYALGSAKPVSGTLNP

SEQ ID NO: 137524 - DNA, 1398 bp, Aspergillus nidulans FGSC A4
  CDS (1)..(1398)
atggcccgcgttccatttattggacgacttttctggtttgaataccttactttgttcgggtcgttgattctggtgcttctggaatggatcattcatatcattaccttctgtcttcctgagctaatcatcaacttttgctatgagcggtcgaagactatcttcaacttggtcataacccctgagagaccagagaagcaggggaggaggaaacggcgtgcaagtgccgttgcccacgcctctgatttcgcggaaatatgctccatttatggttatgaggcggaggagcacatcgttcaaactggagacggatatctgctgggtctccaccgactaccgcatcgcaaaggcgaggagtctcaaactgtcaaccaaggcgaagggagcacaaagaagaaagtcgtatatctccaccatggcttgatgatgtgcagcgaggtttgggtctgcttgactgatgaggagcgctgtcttccttttcagttagtggaaagagggtacgacgtctggttgggaaacaaccgggggaataaatattccaagaagtctaccagacattctccgctatcaaacgaattctgggacttttccattgaccagttcgcttttcacgatattccggacagcatcaattacattcttgatctgacagggcagccctctttgtcatatatcggcttttctcagggaacggctcaagccttcgcaactctttcgattcacccccagttgaaccagaaaattgacgtcttcgttgcccttgcacctgcaatggcccccgcgcgcatctccaatcctgtcgttgattcccttatgaaagcttcgccaaacttcctgtttttactcttcggccgacgcagtattcttagctcaaccacaatgtggcagaccatcctttacccgccaatattcatgcggattattgacacgtcgctctccttcctcttcaattggaagtgcaagaatatcagccatgatcaaaagttggcaggttatctccacctcttctcattcactagtaccaagtctgtggtacactggtttcagataatccgcaataggaacttccagttctacgatgacgagatatatgcaccattcagcatcgtggcaagtgagcgattctacaagccagtcaagtatcccacgaagaatatcaaaacgccaattgtcttgttgtacggcggcagcgatagccttgtcgatatcgatgtgatgcagaaagaacttccgcgtggaacaacggccaagataattacgaagtacgagcacttggattttctctgggccagtgatgtgtccgagttggtttttggccatgtgttcgaagctctggatcgatatggccccacaaaaaggcttccggatgggagtgttaatgggcttatcaatggcgcctga

SEQ ID NO: 137525 - protein, 465 aa, Aspergillus nidulans FGSC A4
MARVPFIGRLFWFEYLTLFGSLILVLLEWIIHIITFCLPELIINFCYERSKTIFNLVITPERPEKQGRRKRRASAVAHASDFAEICSIYGYEAEEHIVQTGDGYLLGLHRLPHRKGEESQTVNQGEGSTKKKVVYLHHGLMMCSEVWVCLTDEERCLPFQLVERGYDVWLGNNRGNKYSKKSTRHSPLSNEFWDFSIDQFAFHDIPDSINYILDLTGQPSLSYIGFSQGTAQAFATLSIHPQLNQKIDVFVALAPAMAPARISNPVVDSLMKASPNFLFLLFGRRSILSSTTMWQTILYPPIFMRIIDTSLSFLFNWKCKNISHDQKLAGYLHLFSFTSTKSVVHWFQIIRNRNFQFYDDEIYAPFSIVASERFYKPVKYPTKNIKTPIVLLYGGSDSLVDIDVMQKELPRGTTAKIITKYEHLDFLWASDVSELVFGHVFEALDRYGPTKRLPDGSVNGLINGA

SEQ ID NO: 137526 - DNA, 1623 bp, Candida albicans SC5314
  CDS (1)..(1623): transl_table=12
atgacgattccacttattggtagactcagtttactggattggccattgattattatctccttcactttggcatgggtcgagtttattatttcattgataacaactcttttgccaagtaaattcatcgatttttgtacatttgtcaccaaacaagtgtacaagttcacaccaaatccaatcaccctaattatcaaacagaaaaagattgatataaacgatgaagagaacattaaatatctgtatataaaatccgatattcccaagttcaccaagaagagttacgatttgactattgaattattgaattcggaaaatattgaacagatggtcagtttatttggatacgaaatagagagcagaatagtcagaactcaggatgattatcttttgaccatccatagaataaaaggtaagaatagaccatctaacgggaaagttatatatttacatcacggtttattgatgtgcagtgaaatatgggttactatgattgacaagtaccagaacttaccatttatattgtatgatttgggttatgatgtttggttgggcaataatcgtggtaataagtacagccaaaaacacttgttttacaatttgaattccaccaaatattgggatttttcaattgatgaatttgctttatttgatatccccgacactattgattacattttacaaaccaccaagaaatccaaattgacttatatcgggttcagtcaaggcagtgcccaagcctttgctagtgtatccgttaattccgatttgacggacaaaatcgatcagttgattgccatatccccagcaacaacaccgcacggtttgtattcaaaattcttagatattttgttgaaatcgtcgcccaatgtgatttacttgttgttcagtcgaagagtgttgatgccatcatgtattttttgggagagaataatgtacccaccattgtttgataatatgattgacatagccaactatttattatttaattggcgagccacaaatattaccaaattacagaaattaagtagctatgcacacttgtattctacaacaagtgtcaaatgtgttgttcattggtttcaggttatgtcttcaaaaaatttccaaatgtaccatgattcaaattcgaatttgtcgggattaaagccaataagttaccctttgaaaaacattcaagtccctatacgtttaatttacggaacaacagattcattggtggacatagacgtcatgaaatcacaattgcctaagctgacaacgaaagcttatcctgttgagaatcacgaacatttggataatttatggggtaatgatgtttacgaagtagtcttcaaaaaagtattgagatttttaggggaagacactgataaagtatatgcaaggttgttccgtcaaagtgaggacactaagtttattgaagatataattcagaccgatgagtcatttacagttgatgacggagaaacgttgaacaacagcagcggtaatgtcaatcaatcgtacctcaaatcagctggcaatgctagatcggcaagcaacagtggtaatattcaagttgagtcagatatagtaatagattatgaacgacaacaatcaataggaggcaccagtatatttttatag

SEQ ID NO: 137527 - protein, 540 aa, Candida albicans SC5314
MTIPLIGRLSLSDWPLIIISFTLAWVEFIISLITTLLPSKFIDFCTFVTKQVYKFTPNPITLIIKQKKIDINDEENIKYSYIKSDIPKFTKKSYDLTIELLNSENIEQMVSLFGYEIESRIVRTQDDYLLTIHRIKGKNRPSNGKVIYLHHGLLMCSEIWVTMIDKYQNLPFILYDLGYDVWLGNNRGNKYSQKHLFYNLNSTKYWDFSIDEFALFDIPDTIDYILQTTKKSKLTYIGFSQGSAQAFASVSVNSDLTDKIDQLIAISPATTPHGLYSKFLDILLKSSPNVIYLLFSRRVLMPSCIFWERIMYPPLFDNMIDIANYLLFNWRATNITKLQKLSSYAHLYSTTSVKCVVHWFQVMSSKNFQMYHDSNSNLSGLKPISYPLKNIQVPIRLIYGTTDSLVDIDVMKSQLPKSTTKAYPVENHEHLDNLWGNDVYEVVFKKVLRFLGEDTDKVYARLFRQSEDTKFIEDIIQTDESFTVDDGETLNNSSGNVNQSYLKSAGNARSASNSGNIQVESDIVIDYERQQSIGGTSIFL

SEQ ID NO: 137528 - DNA, 1626 bp, Pichia guilliermondii
  CDS (1)..(1626)
atgaacttggttcatttttttggtgtactaatttttggcgggctggtttgtttcctgcagtacgatcctcatgtgattctgaaaaccagctgcaaacgagcaaccatgtatatcccacttttaggaagaatatcaatattggaatggccggtgattattatatcgtttattctatcatggctcgagtatgtcgtatccacaattacaaacattcttcctcgagaagtgatcgatttttttacagctaccgtttcgttgttatataaattgacaccaaatcccataactttaatactgtcttcccaaaaagaatcgagagatggtcaggtatcatacaaatacttctataagcgtgcacctgcggtccataaaggagaacatgaacgaatggtggatattcttaatgctgcggacgtgcaagaaatgtgtcaaatccatggttatgacgtggaaaaccgcatagttcgtacgaaggatgactacttgttgaccatccagcggataatcaaacctggggagcccaaaagaaggtcgaatggaagggtggtatacttccaccatggactattaatgagctgtgaagtatgggttaccatggttcagacccaccaaaacttgccgtttttgctttatgatttggggtatgatgtgtggttgggcaacaatcgaggaaacaagtattgtcagaaacatttaattttccccatcaaatcggaacgattctggaatttttccatcgatgaatttgccatgttcgatattcccaattccatcgactacatcctcaacgagacaggtgcaaagaccctcacgtatattggcttctctcagggaacagcccaagcttttgctgccgtttcgatcaacccagatttgaacaagaaagtggaacaaatcattgcaatatcccctgctacaacaccacatggcctctattcacggttccttgatatcctcctcaaatcgtcaccaaatattgtgtatctcttgttttcaagaaaaacgcttatgccatcagtattcttttggcaacaaatcatgtatccgccattttttgacacaatgatcgacatatccaactatatcttgttcaactggagggcacataacattaccaagcttcaaaagctctgttcttacgcacacttgtactcgacaacttcggtgaaaactgtggttcattggttccaaatcatcggctcaaagaaatttcacatgtaccgagacaacgcatcgacaattggcggatccacctcgataacgtacccgctcaaaagcataaaaataccgattcatttgatatacggaaccacagattcactagtcgatatcgatgtgatgttgagccagcttcccaatgaaaataccactgcgcagcccgtagaaaaccacgaacatttggacaacatatggggttacgatgtcaagcaaaaagtgtttactcatgttttgaattaccttgacgaggctttacacgcatcacctccactgcccgtagaacgtattgagcagtcgtatttaaaggcaattggaagtggagatgaatcttctacgcttcacaatgatatcaaagaggtggaattgagctaccgaaagccgtctgcgagtggatcattgtttctttag

SEQ ID NO: 137529 - protein, 541 aa, Pichia guilliermondii
MNLVHFFGVLIFGGLVCFLQYDPHVILKTSCKRATMYIPLLGRISILEWPVIIISFILSWLEYVVSTITNILPREVIDFFTATVSLLYKLTPNPITLILSSQKESRDGQVSYKYFYKRAPAVHKGEHERMVDILNAADVQEMCQIHGYDVENRIVRTKDDYLLTIQRIIKPGEPKRRSNGRVVYFHHGLLMSCEVWVTMVQTHQNLPFLLYDLGYDVWLGNNRGNKYCQKHLIFPIKSERFWNFSIDEFAMFDIPNSIDYILNETGAKTLTYIGFSQGTAQAFAAVSINPDLNKKVEQIIAISPATTPHGLYSRFLDILLKSSPNIVYLLFSRKTLMPSVFFWQQIMYPPFFDTMIDISNYILFNWRAHNITKLQKLCSYAHLYSTTSVKTVVHWFQIIGSKKFHMYRDNASTIGGSTSITYPLKSIKIPIHLIYGTTDSLVDIDVMLSQLPNENTTAQPVENHEHLDNIWGYDVKQKVFTHVLNYLDEALHASPPLPVERIEQSYLKAIGSGDESSTLHNDIKEVELSYRKPSASGSLFL

SEQ ID NO: 137530 - DNA, 1842 bp, Magnaporthe grisea
  CDS (1)..(1842)
atgccgttgcctttcctggggcgactgaatattcccgaatatgtcgcccttcttggttcattctttctcgtcgggctcgaggcctttattcgtgtaatcacattagcgctgccctcgacactaatatccctgttatatggcgtctcgagacgaatcttcaaccgatattccacacctaagcagaagatagccgtggaaaagcagaaacctgtgtctacttcgattcgagatgcatccgattttgtcgaactttgcgccctgaacggctaccaggctgaagaacatgttgtccagaccaaagatggctatctactcggcttgcatcgcctcgcctggaggaaaggggaggaagaccagagagtcaacagcggcccgaacagcgtccagaagcgtgtggtgtacttgcaccacggtttgctcatgaacagtgaggtctgggtctgccagacggacacaaaccgatcgctcgcgttcgtgctggtggatcaaggcttcgatgtctggcttggaaacaaccgcggcaacaagtactcgaagaagagtatcaaccattcacctgcttccacagccttttggaatttctccattgacgaatttgctttccacgacattccggatagtatcgcgtacatcctcgagactacggacgaaaagtcgttgtcgtacattggcttctcgcaaggaacagcccaggcctttgccagtttggccgtcaatccaagacttaaccagcaagtcaacgtgtttatcgccctcgcgccagccatgtcaccggcgggactttccaacagagtagtggatgctctgatcaaatcgtcgccttcggttctttttctgctctttggtcgccgggcgatcctcagctctgctaccatgtgggagaccatattgtatcctccgatctttatcaaggtcatagatgttgctgtgtctttcctatttggttggaaaaccagaaacatctcgacaagccagaagctggctgcttatccccacttgtactcgttcaccagcaccaagtcggtggtacattggttccaaatcatccgtaccaagagctttcagatgtacgatgatgatgtccagcaaccattgtcgctgagcacaagctccaggttcacgaaagtggctaagtatcctacgcgaaacatcaagacaccgatagttctagtctatggcggttccgattcactggtggatatcaaagtcatgcttcgccagctgccgcctcagaccgtcgccaccgagatcccgcgctacgaacatatcgactttttgtgggcgcgcgacgttgacgcacaagtattccgccacgtatttgacgcgctggactcattcactggtgcggaacataccaaggaagagtacaatcggtataggactgctcgctcgtccagcatcagtgccagcgtgaacttcaggcgacacgctcatcatgatagtgtcgacactcaggcagatgtgacagatgagaccaccgcgacaaccaccgaggcggaaagcgactcgggtgacaggactctcgtcaacggtcgaggcggatcgaggtctagacttcgacaccaggccacagagggcttacgcagcccttcaaggggctctgaggtctcggtaggcccggccagtggtggcttgaatacaaatggtacagtagcctccgatggtgaaagctcctcgggttcgcccgcaaggcgaagggcaggcattcaacgccataccagcggtgtgagcgtcgactctctacgtcaaggccgtggaattagggtgggtgccagtcgggccgtagggggtgtcactgctgcgatcgccggcggcaactctcccagtagcgggacggattag

SEQ ID NO: 137531 - protein, 613 aa, Magnaporthe grisea
MPLPFLGRLNIPEYVALLGSFFLVGLEAFIRVITLALPSTLISLLYGVSRRIFNRYSTPKQKIAVEKQKPVSTSIRDASDFVELCALNGYQAEEHVVQTKDGYLLGLHRLAWRKGEEDQRVNSGPNSVQKRVVYLHHGLLMNSEVWVCQTDTNRSLAFVLVDQGFDVWLGNNRGNKYSKKSINHSPASTAFWNFSIDEFAFHDIPDSIAYILETTDEKSLSYIGFSQGTAQAFASLAVNPRLNQQVNVFIALAPAMSPAGLSNRVVDALIKSSPSVLFLLFGRRAILSSATMWETILYPPIFIKVIDVAVSFLFGWKTRNISTSQKLAAYPHLYSFTSTKSVVHWFQIIRTKSFQMYDDDVQQPLSLSTSSRFTKVAKYPTRNIKTPIVLVYGGSDSLVDIKVMLRQLPPQTVATEIPRYEHIDFLWARDVDAQVFRHVFDALDSFTGAEHTKEEYNRYRTARSSSISASVNFRRHAHHDSVDTQADVTDETTATTTEAESDSGDRTLVNGRGGSRSRLRHQATEGLRSPSRGSEVSVGPASGGLNTNGTVASDGESSSGSPARRRAGIQRHTSGVSVDSLRQGRGIRVGASRAVGGVTAAIAGGNSPSSGTD

SEQ ID NO: 137532 - DNA, 1929 bp, Phaeosphaeria nodorum
  CDS (1)..(1929)
atggcgctccacatcccctttctctcgcgcctgcatatccgcgaatatgtggcgctggtgttgtccatgatccttatcggcctcgagtcctttatcgccgtcatcacccttgccctgcctacgcccatcatcaatctctgctaccgcctcacgcgccgcatatggaaccagctatcgtcgccgtcctcgaagcgatcccgccaacgcaaaaagggcgtatggagtgccattgccaacgccagcgacttcaccgagctgtgtgagctgtatggctactactgcgaagagcacatcgtgcagacaggggatggctacctcctgggcctacaccgactgggatggaagtcaggggaagagggaacgcgggtgaatagtggtcgagaaggaggcgtcaagaagaaggtcgtgtacctgcatcacggtctgatgatgaacagcgaagtctgggtgtgtctaacggaacgcgaacgatgcctgccgttcgagctggtcgagaggggctacgacgtgtggctcggcaacaaccgcggaaacaagtactccaagaagagcgtacacactgcaccgacatcgagtgccttctggaacttcagcatggaccagttcgctttccacgacatccccgactcgatcgcctacatcctcgagaccacccatcagccgtcgctgtcgtacattggcttctcccagggcactgcgcaagcatttgcgactctttcaatacacccgacgttgaatgacaaggtggacgtcttcattgcactggcaccagcaatgtcacccaagggcgtcgcgtctggaaccgtcgactcgttcgtcaaggcgtcgcccgacattctttacctcgcattcggacgcaaggcgattctaccatctgccaccatgtggcagtcgatcctttacccacccattttcgttcgccttatcgacacctcgctacgctttctgtttgggtggcatgcaaccaatatctcgccgcaccaaaagcttgccgcgtacccgcatctctactcgttcacgtcaacgaagagtgttgtacattggttccagatcatccgcaatggcgtcttccagatgtacgatgacgaagcgcccaatcctgtcatgtcaaatcgctccaagtactacaaagtcgccaagtttcccacaaagaacatcaagacgccaattgtgctggtctatggcggctctgacagtctagtcgacatcaatataatgctcaaggagctacctagccatacggtggcaaaggagatcccgcattacgaacatctcgacttcttgtgggcacagtcagtcaacgaacttgttttcccacatgtcttcgaggccctggaacaacacgcaggcgctgatccggcgaagcgagatcgatggcagtctcctgcacgcttccgtggccttctgcctagcccggaagacacatccagtccccaagacgaagagggcgaaagttcttccagccctgccgcgcttcgcgtcaagaaggtctcacagacaacgaggagatcaccctacaccgatggcgctctagaggatgcggccagcttgcatacgccctctccgaagacttcgcgcctgccacagctgaggtcagctaacgcatcagctagcgatcacaggcgaccatcatcacaaagtcctgcctcgcgccccaagatcaccctccgctctcccacaaatgtaaaccaatcgccagcaccatcgcttgacgcatctcagctcacgaatcaaacctcaacctcacgtcctgagggctggtggtcgtctgacgaagtagccggcaccgagcattcccacccttcgaccccaaagacgcctgtcaacgataagaacagaagccctagcagagcaagctttgaacacgtacacgcagctccgggtcgaagatcggaacaggacgattcggagaaaagggcattagtttag

SEQ ID NO: 137533 - protein, 642 aa, Phaeosphaeria nodorum
MALHIPFLSRLHIREYVALVLSMILIGLESFIAVITLALPTPIINLCYRLTRRIWNQLSSPSSKRSRQRKKGVWSAIANASDFTELCELYGYYCEEHIVQTGDGYLLGLHRLGWKSGEEGTRVNSGREGGVKKKVVYLHHGLMMNSEVWVCLTERERCLPFELVERGYDVWLGNNRGNKYSKKSVHTAPTSSAFWNFSMDQFAFHDIPDSIAYILETTHQPSLSYIGFSQGTAQAFATLSIHPTLNDKVDVFIALAPAMSPKGVASGTVDSFVKASPDILYLAFGRKAILPSATMWQSILYPPIFVRLIDTSLRFLFGWHATNISPHQKLAAYPHLYSFTSTKSVVHWFQIIRNGVFQMYDDEAPNPVMSNRSKYYKVAKFPTKNIKTPIVLVYGGSDSLVDINIMLKELPSHTVAKEIPHYEHLDFLWAQSVNELVFPHVFEALEQHAGADPAKRDRWQSPARFRGLLPSPEDTSSPQDEEGESSSSPAALRVKKVSQTTRRSPYTDGALEDAASLHTPSPKTSRLPQLRSANASASDHRRPSSQSPASRPKITLRSPTNVNQSPAPSLDASQLTNQTSTSRPEGWWSSDEVAGTEHSHPSTPKTPVNDKNRSPSRASFEHVHAAPGRRSEQDDSEKRALV

SEQ ID NO: 137534 - DNA, 1416 bp, Aspergillus oryzae
  CDS (1)..(1416)
atggcgcgtgtccctgtgattggacggctgttttggttcgagtatttggctctgtttgcctctttgattttggtgctgctcgaatgggtcatacatattattacattttgtcttcctgaaacggtaatcaagttcttctacgaccggtcgaaaactattttcaacctatttataactcctgaggatgaaggcaagcgcagtaaagaagaacggatcgccaccgcagtcgcacaggcctccgacttcgtagatatatgcgctctgttcggttaccagactgaggagcatattgtccagaccggcgatggctacctgctcggcctccaccgtttggcctaccggagaggcgaggagaagatgcgcgtcaaccaagggaaagggggcgttcggaagaaggtcgtcttcctccaccatgggctcatgatgtgcagtgaggtttgggtgtgtttgtccgaagaacaacggtgtcttccctttcaattagtggaaaggggctatgacgtgtggtttggaaacaatcgcggcaacaaatactcgaaaaagtccgtgcggttctcgcccggatctaacgaattctgggacttctccatcgatcagtttgcctttcacgatatccccgacagcattaattatgtcttggaagtcacgggccagccttctctgtcgtatgttggattctcacagggcaccgctcaagcctttgcgacactatctatccacccgctgctgaaccagaaggtcgatgttttcgtggctcttgcgcccgcaatggcgcctacgggcttgccaaaccatttcgtcgactcactgatgaaggcctcgccgaatttcttgttccttctcttcggccgacgtagcatcctcagttcgacgacgatgtggcagacggtcctctacccgcctatcttcgttcagatcatcgacaagtgtcttgacgggctcttcaattggaaatgccggaatatcagtcgttggcaaaagctagcgggctacctacatctattctccttcaccagcaccaaatccgtggttcactggtttcagatcatccgacataagaactttcaattctacgatgacgaggtccacgctccgttcagcattgtcgctagcgagcgattctataagccggtcaagtaccctaccaggaacatcaagacgcccattgtgctactgtacgggggcaatgacagccttgtagacattaacgtgatgctgaaggagcttcctcgcgggatcacagccaagatcatcccgaagtacgaacacctcgatttcttgtgggcgacggatgtcgagcaacaggtgttcagccatgtcttcgaggctcttgaacagtacagtggcatcacccagcttgagggggcggtaacgggcctgatcaatggagatgcgggacatgcgatcgcggtttag

SEQ ID NO: 137535 - protein, 471 aa, Aspergillus oryzae
MARVPVIGRLFWFEYLALFASLILVLLEWVIHIITFCLPETVIKFFYDRSKTIFNLFITPEDEGKRSKEERIATAVAQASDFVDICALFGYQTEEHIVQTGDGYLLGLHRLAYRRGEEKMRVNQGKGGVRKKVVFLHHGLMMCSEVWVCLSEEQRCLPFQLVERGYDVWFGNNRGNKYSKKSVRFSPGSNEFWDFSIDQFAFHDIPDSINYVLEVTGQPSLSYVGFSQGTAQAFATLSIHPLLNQKVDVFVALAPAMAPTGLPNHFVDSLMKASPNFLFLLFGRRSILSSTTMWQTVLYPPIFVQIIDKCLDGLFNWKCRNISRWQKLAGYLHLFSFTSTKSVVHWFQIIRHKNFQFYDDEVHAPFSIVASERFYKPVKYPTRNIKTPIVLLYGGNDSLVDINVMLKELPRGITAKIIPKYEHLDFLWATDVEQQVFSHVFEALEQYSGITQLEGAVTGLINGDAGHAIAV

SEQ ID NO: 137536 - DNA, 25 bp, Artificial sequence
  primer
atgtacttcccctttttaggcagat

SEQ ID NO: 137537 - DNA, 25 bp, Artificial sequence
  primer
tcattctttatttagagcatccagc

SEQ ID NO: 137538 - protein, 411 aa, Artificial sequence
  consensus sequence
  Variant (2)..(4): Xaa in position 2 to 4 is any amino acid
  Variant (7)..(8): Xaa in position 7 to 8 is any amino acid
  Variant (10)..(10): Xaa in position 10 is any amino acid
  Variant (12)..(12): Xaa in position 12 is any amino acid
  Variant (14)..(14): Xaa in position 14 is any amino acid
  Variant (16)..(16): Xaa in position 16 is any amino acid
  Variant (18)..(18): Xaa in position 18 is any amino acid
  Variant (20)..(20): Xaa in position 20 is any amino acid
  Variant (22)..(23): Xaa in position 22 to 23 is any amino acid
  Variant (26)..(36): Xaa in position 26 to 36 is any amino acid
  Variant (37)..(79): Xaa in position 37 to 79 is any or no amino acid
  Variant (83)..(83): Xaa in position 83 is any amino acid
  Variant (88)..(88): Xaa in position 88 is any amino acid
  Variant (90)..(90): Xaa in position 90 is any amino acid
  Variant (93)..(93): Xaa in position 93 is any amino acid
  Variant (96)..(103): Xaa in position 96 to 103 is any amino acid
  Variant (105)..(105): Xaa in position 105 is any amino acid
  Variant (107)..(107): Xaa in position 107 is any amino acid
  Variant (109)..(111): Xaa in position 109 to 111 is any amino acid
  Variant (113)..(113): Xaa in position 113 is any amino acid
  Variant (117)..(117): Xaa in position 117 is any amino acid
  Variant (118)..(122): Xaa in position 118 to 122 is any or no amino acid
  Variant (132)..(132): Xaa in position 132 is any amino acid
  Variant (134)..(143): Xaa in position 134 to 143 is any amino acid
  Variant (146)..(146): Xaa in position 146 is any amino acid
  Variant (149)..(149): Xaa in position 149 is any amino acid
  Variant (151)..(151): Xaa in position 151 is any amino acid
  Variant (154)..(155): Xaa in position 154 to 155 is any amino acid
  Variant (159)..(160): Xaa in position 159 to 160 is any amino acid
  Variant (162)..(162): Xaa in position 162 is any amino acid
  Variant (166)..(172): Xaa in position 166 to 172 is any amino acid
  Variant (173)..(173): Xaa in position 173 is any or no amino acid
  Variant (175)..(175): Xaa in position 175 is any amino acid
  Variant (183)..(183): Xaa in position 183 is any amino acid
  Variant (189)..(195): Xaa in position 189 to 195 is any amino acid
  Variant (198)..(203): Xaa in position 198 to 203 is any amino acid
  Variant (206)..(207): Xaa in position 206 to 207 is any amino acid
  Variant (210)..(211): Xaa in position 210 to 211 is any amino acid
  Variant (213)..(213): Xaa in position 213 is any amino acid
  Variant (215)..(220): Xaa in position 215 to 220 is any amino acid
  Variant (222)..(226): Xaa in position 222 to 226 is any amino acid
  Variant (229)..(232): Xaa in position 229 to 232 is any amino acid
  Variant (233)..(235): Xaa in position 233 to 235 is any or no amino acid
  Variant (237)..(237): Xaa in position 237 is any amino acid
  Variant (241)..(243): Xaa in position 241 to 243 is any amino acid
  Variant (245)..(245): Xaa in position 245 is any amino acid
  Variant (247)..(249): Xaa in position 247 to 249 is any amino acid
  Variant (251)..(255): Xaa in position 251 to 255 is any amino acid
  Variant (257)..(258): Xaa in position 257 to 258 is any amino acid
  Variant (260)..(263): Xaa in position 260 to 263 is any amino acid
  Variant (265)..(269): Xaa in position 265 to 269 is any amino acid
  Variant (272)..(272): Xaa in position 272 is any amino acid
  Variant (274)..(276): Xaa in position 274 to 276 is any amino acid
  Variant (279)..(281): Xaa in position 279 to 281 is any amino acid
  Variant (284)..(286): Xaa in position 284 to 286 is any amino acid
  Variant (288)..(288): Xaa in position 288 is any amino acid
  Variant (293)..(293): Xaa in position 293 is any amino acid
  Variant (296)..(296): Xaa in position 296 is any amino acid
  Variant (298)..(299): Xaa in position 298 to 299 is any amino acid
  Variant (306)..(310): Xaa in position 306 to 310 is any amino acid
  Variant (314)..(327): Xaa in position 314 to 327 is any amino acid
  Variant (328)..(342): Xaa in position 328 to 342 is any or no amino acid
  Variant (344)..(345): Xaa in position 344 to 345 is any amino acid
  Variant (346)..(346): Xaa in position 346 is any or no amino acid
  Variant (349)..(350): Xaa in position 349 to 350 is any amino acid
  Variant (353)..(353): Xaa in position 353 is any amino acid
  Variant (355)..(355): Xaa in position 355 is any amino acid
  Variant (358)..(359): Xaa in position 358 to 359 is any amino acid
  Variant (366)..(367): Xaa in position 366 to 367 is any amino acid
  Variant (369)..(371): Xaa in position 369 to 371 is any amino acid
  Variant (374)..(384): Xaa in position 374 to 384 is any amino acid
  Variant (385)..(392): Xaa in position 385 to 392 is any or no amino acid
  Variant (395)..(395): Xaa in position 395 is any amino acid
  Variant (397)..(398): Xaa in position 397 to 398 is any amino acid
  Variant (400)..(406): Xaa in position 400 to 406 is any amino acid
  Variant (408)..(410): Xaa in position 408 to 410 is any amino acid
CXXXGYXXEXHXVXTXDXYXLXXHRXXXXXXXXXXXXXXXXXXXXXXXXXXXXXXXXXXXXXXXXXXXXXXXXXXXXXXVVYXHHGLXMXSEXWVXXXXXXXXLXFXLXXXGXDVWXXXXXXGNNRGNKYSXKXXXXXXXXXXFWXFSXDXFAXXDIPXXIXYILXXXXXXXXLXYIGFSQGXAQAFAXXXXXXXLNXXXXXXIAXXPAXXPXGXXXXXXDXXXXXSPXXXXXXXLXFGRXXXLXSXXXWXXXXXPXXFXXXXDXXXXXLFXWXXXNIXXXQKXXXYXHLYSXTSXKXXVHWFQIXXXXXFQMXXXXXXXXXXXXXXXXXXXXXXXXXXXXXPXXXNIXXPIXLXYGXXDSLVDIXXMXXXLPXXXXXXXXXXXXXXXXXXXEHXDXXWXXXXXXXVXXXV

SEQ ID NO: 137539 - protein, 44 aa, Artificial sequence
  protein pattern
  Variant (7)..(7): Xaa in position 7 is Cys or Ser
  Variant (8)..(16): Xaa in position 8 to 16 is any amino acid
  Variant (17)..(17): Xaa in position 17 is Asp or Ser
  Variant (18)..(19): Xaa in position 18 to 19 is any amino acid
  Variant (20)..(20): Xaa in position 20 is Phe or Tyr
  Variant (22)..(22): Xaa in position 22 is Asp or Asn
  Variant (24)..(24): Xaa in position 24 is Cys or Ser
  Variant (25)..(25): Xaa in position 25 is Ile, Leu or Met
  Variant (27)..(27): Xaa in position 27 is Asp, Glu or Gln
  Variant (30)..(30): Xaa in position 30 is any amino acid
  Variant (31)..(31): Xaa in position 31 is Phe, His or Tyr
  Variant (35)..(35): Xaa in position 35 is Asp or Asn
  Variant (36)..(36): Xaa in position 36 is Ser or Thr
  Variant (38)..(38): Xaa in position 38 is Ala, Asp, Glu, Asn, Gln or Ser
  Variant (39)..(39): Xaa in position 39 is Phe or Tyr
  Variant (40)..(40): Xaa in position 40 is Ile or Val
  Variant (42)..(43): Xaa in position 42 to 43 is any amino acid
  Variant (44)..(44): Xaa in position 44 is Cys, Ser or Thr
NRGNKYXXXXXXXXXXXXXXWXFXXDXFAXXDIPXXIXXXLXXX

SEQ ID NO: 137540 - protein, 57 aa, Artificial sequence
  protein pattern
  Variant (2)..(6): Xaa in position 2 to 6 is any or no amino acid
  Variant (8)..(8): Xaa in position 8 is any amino acid
  Variant (9)..(9): Xaa in position 9 is Ala, Cys, Gly or Ser
  Variant (10)..(12): Xaa in position 10 to 12 is any amino acid
  Variant (15)..(15): Xaa in position 15 is Asp, Gly or Asn
  Variant (17)..(19): Xaa in position 17 to 19 is any amino acid
  Variant (22)..(24): Xaa in position 22 to 24 is any amino acid
  Variant (27)..(27): Xaa in position 27 is Ile, Leu or Met
  Variant (28)..(28): Xaa in position 28 is Ala, Cys or Ser
  Variant (29)..(29): Xaa in position 29 is Ala, Gly or Ser
  Variant (31)..(31): Xaa in position 31 is any amino acid
  Variant (32)..(32): Xaa in position 32 is His or Lys
  Variant (34)..(34): Xaa in position 34 is Phe or Tyr
  Variant (35)..(36): Xaa in position 35 to 36 is any amino acid
  Variant (37)..(37): Xaa in position 37 is Ser or Thr
  Variant (39)..(39): Xaa in position 39 is Thr or Val
  Variant (41)..(41): Xaa in position 41 is Cys, Ser or Thr
  Variant (42)..(42): Xaa in position 42 is Ile or Val
  Variant (46)..(46): Xaa in position 46 is Phe or Leu
  Variant (48)..(48): Xaa in position 48 is Ile or Val
  Variant (49)..(49): Xaa in position 49 is Ile, Leu or Met
  Variant (50)..(53): Xaa in position 50 to 53 is any amino acid
  Variant (55)..(55): Xaa in position 55 is any amino acid
  Variant (56)..(56): Xaa in position 56 is Phe, Leu or Met
  Variant (57)..(57): Xaa in position 57 is Phe or Tyr
IXXXXXDXXXXXLFXWXXXNIXXXQKXXXYXXLXXXXSXKXXVHWXQXXXXXXFXXX

SEQ ID NO: 137541 - protein, 58 aa, Artificial sequence
  protein pattern
  Variant (7)..(7): Xaa in position 7 is Ser or Thr
  Variant (10)..(10): Xaa in position 10 is any amino acid
  Variant (11)..(11): Xaa in position 11 is Phe or Met
  Variant (13)..(13): Xaa in position 13 is Ala, Ser or Thr
  Variant (14)..(14): Xaa in position 14 is Phe, Leu or Val
  Variant (15)..(15): Xaa in position 15 is Ala or Ser
  Variant (16)..(16): Xaa in position 16 is Ile, Leu or Val
  Variant (17)..(17): Xaa in position 17 is any amino acid
  Variant (18)..(18): Xaa in position 18 is Glu, Pro or Ser
  Variant (19)..(19): Xaa in position 19 is any amino acid
  Variant (21)..(21): Xaa in position 21 is Asn or Thr
  Variant (22)..(23): Xaa in position 22 to 23 is any amino acid
  Variant (24)..(24): Xaa in position 24 is Ile or Val
  Variant (25)..(25): Xaa in position 25 is Asp, Glu, Asn or Ser
  Variant (26)..(26): Xaa in position 26 is any amino acid
  Variant (27)..(27): Xaa in position 27 is Phe, Ile or Leu
  Variant (28)..(28): Xaa in position 28 is Ile or Val
  Variant (29)..(29): Xaa in position 29 is Ala or Gly
  Variant (30)..(30): Xaa in position 30 is Ile, Leu or Val
  Variant (31)..(31): Xaa in position 31 is Ala or Ser
  Variant (34)..(34): Xaa in position 34 is any amino acid
  Variant (35)..(35): Xaa in position 35 is Ala, Ser or Thr
  Variant (37)..(38): Xaa in position 37 to 38 is any amino acid
  Variant (39)..(39): Xaa in position 39 is Phe, Ile, Leu or Val
  Variant (40)..(40): Xaa in position 40 is any amino acid
  Variant (41)..(41): Xaa in position 41 is Asn or Ser
  Variant (42)..(43): Xaa in position 42 to 43 is any amino acid
  Variant (44)..(44): Xaa in position 44 is Leu or Val
  Variant (45)..(45): Xaa in position 45 is Asp or Asn
  Variant (46)..(46): Xaa in position 46 is any amino acid
  Variant (47)..(47): Xaa in position 47 is Phe, Ile or Leu
  Variant (48)..(49): Xaa in position 48 to 49 is any amino acid
  Variant (50)..(50): Xaa in position 50 is Ala, Ser or Val
  Variant (51)..(51): Xaa in position 51 is Asn, Arg or Ser
  Variant (53)..(56): Xaa in position 53 to 56 is any amino acid
  Variant (57)..(57): Xaa in position 57 is any or no amino acid
IGFSQGXAQXXAXXXXXXXLXXXXXXXXXXXPAXXPXXXXXXXXXXXXXXXPXXXXXL

SEQ ID NO: 137542 - protein, 30 aa, Artificial sequence
  protein pattern
  Variant (2)..(3): Xaa in position 2 to 3 is any amino acid
  Variant (4)..(4): Xaa in position 4 is any or no amino acid
  Variant (9)..(9): Xaa in position 9 is any or no amino acid
  Variant (11)..(11): Xaa in position 11 is any amino acid
  Variant (12)..(12): Xaa in position 12 is any or no amino acid
  Variant (14)..(14): Xaa in position 14 is Asp or Glu
  Variant (15)..(15): Xaa in position 15 is Ile, Leu or Val
  Variant (17)..(17): Xaa in position 17 is Cys or Val
  Variant (18)..(18): Xaa in position 18 is Ala, Cys, Ser, Thr or Val
  Variant (19)..(20): Xaa in position 19 to 20 is any amino acid
  Variant (21)..(21): Xaa in position 21 is Asp, Glu or Asn
  Variant (22)..(24): Xaa in position 22 to 24 is any amino acid
  Variant (25)..(25): Xaa in position 25 is Cys, Asn or Ser
  Variant (26)..(26): Xaa in position 26 is Ile or Leu
  Variant (27)..(27): Xaa in position 27 is Ala, Pro or Val
  Variant (29)..(29): Xaa in position 29 is any amino acid
VXXXHHGLXMXXSXXWXXXXXXXXXXXFXL

SEQ ID NO: 137543 - protein, 36 aa, Artificial sequence
  protein pattern
  Variant (2)..(10): Xaa in position 2 to 10 is any or no amino acid
  Variant (12)..(14): Xaa in position 12 to 14 is any amino acid
  Variant (15)..(15): Xaa in position 15 is Asp or Gly
  Variant (16)..(18): Xaa in position 16 to 18 is any amino acid
  Variant (20)..(20): Xaa in position 20 is Asp, Glu, Asn or Ser
  Variant (21)..(21): Xaa in position 21 is His or Arg
  Variant (22)..(22): Xaa in position 22 is Phe, Ile, Leu or Val
  Variant (23)..(23): Xaa in position 23 is Leu or Val
  Variant (24)..(24): Xaa in position 24 is any amino acid
  Variant (26)..(26): Xaa in position 26 is any amino acid
  Variant (28)..(28): Xaa in position 28 is Asp, Gly or Asn
  Variant (29)..(29): Xaa in position 29 is Phe or Tyr
  Variant (30)..(30): Xaa in position 30 is Phe, Ile or Leu
  Variant (32)..(32): Xaa in position 32 is Cys, Gly or Thr
  Variant (33)..(33): Xaa in position 33 is Ile, Leu or Val
  Variant (34)..(34): Xaa in position 34 is any amino acid
  Variant (36)..(36): Xaa in position 36 is Ile, Leu or Val
IXXXXXXXXXCXXXXXXXEXXXXXTXDXXXLXXXRX

SEQ ID NO: 137544 - protein, 26 aa, Artificial sequence
  protein pattern
  Variant (2)..(3): Xaa in position 2 to 3 is any amino acid
  Variant (6)..(6): Xaa in position 6 is any amino acid
  Variant (8)..(8): Xaa in position 8 is Ile, Leu or Val
  Variant (11)..(12): Xaa in position 11 to 12 is any amino acid
  Variant (14)..(14): Xaa in position 14 is Asn or Ser
  Variant (15)..(15): Xaa in position 15 is Leu or Met
  Variant (19)..(20): Xaa in position 19 to 20 is any amino acid
  Variant (21)..(21): Xaa in position 21 is Leu or Met
  Variant (22)..(23): Xaa in position 22 to 23 is any amino acid
  Variant (24)..(24): Xaa in position 24 is Glu, Asn, Gln or Thr
IXXPIXLXYGXXDXXVDIXXXXXXLP

SEQ ID NO: 137545 - protein, 28 aa, Artificial sequence
  protein pattern
  Variant (2)..(6): Xaa in position 2 to 6 is any or no amino acid
  Variant (8)..(8): Xaa in position 8 is Ile or Leu
  Variant (10)..(10): Xaa in position 10 is any amino acid
  Variant (11)..(11): Xaa in position 11 is Ile or Leu
  Variant (13)..(13): Xaa in position 13 is Ala or Gly
  Variant (14)..(14): Xaa in position 14 is any amino acid
  Variant (15)..(15): Xaa in position 15 is Asp, Ser or Thr
  Variant (16)..(17): Xaa in position 16 to 17 is any amino acid
  Variant (18)..(18): Xaa in position 18 is Ala, Asp, Glu, Gln or Thr
  Variant (19)..(19): Xaa in position 19 is any amino acid
  Variant (21)..(21): Xaa in position 21 is Phe or Ile
  Variant (22)..(23): Xaa in position 22 to 23 is any amino acid
  Variant (25)..(25): Xaa in position 25 is Phe, Ile or Leu
  Variant (26)..(26): Xaa in position 26 is Asp, Glu, Asn, Gln or Arg
  Variant (27)..(27): Xaa in position 27 is any amino acid
  Variant (28)..(28): Xaa in position 28 is Ile or Leu
EXXXXXHXDXXWXXXXXXXVXXXVXXXX

SEQ ID NO: 137546 - protein, 13 aa, Artificial sequence
  protein pattern
  Variant (2)..(2): Xaa in position 2 is Asn or Arg
  Variant (3)..(4): Xaa in position 3 to 4 is any amino acid
  Variant (5)..(5): Xaa in position 5 is Ile, Leu, Met or Val
  Variant (7)..(7): Xaa in position 7 is Gly, Pro or Ser
  Variant (9)..(9): Xaa in position 9 is Ala, Ser, Thr or Val
  Variant (10)..(10): Xaa in position 10 is Ala, Gly, Pro, Thr or Val
  Variant (11)..(11): Xaa in position 11 is Phe, Ile, Met or Val
  Variant (13)..(13): Xaa in position 13 is Glu, Gln or Ser
GXXXXLXSXXXWX

SEQ ID NO: 137547 - DNA, 1239 bp, Saccharomyces cerevisiae
  CDS (1)..(1239)
atgacaaagattaaggtagctaaccccattgtggaaatggacggcgatgagcaaacaagaataatctggcatttaatcagggacaagttagtcttgccctatcttgacgttgatttgaagtactacgatctttccgtggagtatcgtgaccagactaatgatcaagtaactgtggattctgccaccgcgactttaaagtatggagtagctgtcaaatgcgcgactattacacccgatgaggcaagggtcgaggaatttcatttgaaaaagatgtggaaatctccaaatggtactattagaaacattttgggtggtacagtgttcagagaacctattattatccctagaattccaaggctagttcctcaatgggagaagcccatcatcattgggagacacgcattcggcgatcagtacaaagctaccgatgtaatagtccctgaagaaggcgagttgaggcttgtttataaatccaagagcggaactcatgatgtagatctgaaggtatttgactacccagaacatggtggggttgccatgatgatgtacaacactacagattcgatcgaagggtttgcgaaggcctcctttgaattggccattgaaaggaagttaccattatattccactactaagaatactattttgaagaagtatgatggtaaattcaaagatgttttcgaagccatgtatgctagaagttataaagagaagtttgaatcccttggcatctggtacgagcaccgtttaattgatgatatggtggcccaaatgttgaaatctaaaggtggatacataattgccatgaaaaattacgacggtgacgtagaatcagatattgttgcacaaggatttggctccttggggttaatgacatctgtgttgattaccccggacggtaaaacctttgaaagcgaagccgcccacggtacagtaacaagacattttagacagcatcagcaaggaaaggagacgtcaacaaattccattgcatcaattttcgcgtggactagaggtattattcaaaggggtaaacttgataatactccagatgtagttaagttcggccaaatattggaaagcgctacggtaaatacagtgcaagaagatggaatcatgactaaagatttggcgctcattctcggtaagtctgaaagatccgcttatgtcactaccgaggagttcattgacgcggtggaatctagattgaaaaaagagttcgaggcagctgcattgtaa

SEQ ID NO: 137548 - protein, 412 aa, Saccharomyces cerevisiae
MTKIKVANPIVEMDGDEQTRIIWHLIRDKLVLPYLDVDLKYYDLSVEYRDQTNDQVTVDSATATLKYGVAVKCATITPDEARVEEFHLKKMWKSPNGTIRNILGGTVFREPIIIPRIPRLVPQWEKPIIIGRHAFGDQYKATDVIVPEEGELRLVYKSKSGTHDVDLKVFDYPEHGGVAMMMYNTTDSIEGFAKASFELAIERKLPLYSTTKNTILKKYDGKFKDVFEAMYARSYKEKFESLGIWYEHRLIDDMVAQMLKSKGGYIIAMKNYDGDVESDIVAQGFGSLGLMTSVLITPDGKTFESEAAHGTVTRHFRQHQQGKETSTNSIASIFAWTRGIIQRGKLDNTPDVVKFGQILESATVNTVQEDGIMTKDLALILGKSERSAYVTTEEFIDAVESRLKKEFEAAAL

SEQ ID NO: 137549 - DNA, 1434 bp, Oryza sativa; identical to SEQ ID NO: 122230
  CDS (71)..(1360)

SEQ ID NO: 137550 - protein, 429 aa, Oryza sativa; identical to SEQ ID NO: 122231

SEQ ID NO: 137551 - DNA, 2071 bp, Glycine max; identical to SEQ ID NO: 122232
  CDS (305)..(1555)

SEQ ID NO: 137552 - protein, 416 aa, Glycine max; identical to SEQ ID NO: 122233

SEQ ID NO: 137553 - DNA, 2345 bp, Glycine max; identical to SEQ ID NO: 122234
  CDS (93)..(1505)
  misc_feature (2288)..(2288): n is a, g, c or t
  misc_feature (2289)..(2289): n is a, g, c or t
  misc_feature (2290)..(2290): n is a, g, c or t
  misc_feature (2291)..(2291): n is a, g, c or t

SEQ ID NO: 137554 - protein, 470 aa, Glycine max; identical to SEQ ID NO: 122235

SEQ ID NO: 137555 - DNA, 1794 bp, Oryza sativa
  CDS (100)..(1338)
cccgcgtccgcttcttcttcttcttcttcctcaagactaccaatccaatctcctcctcgccgccatcgcgatctccgccgccgcccgcctgtcgcggccatggcatccaccaagatcaaggtcgccaaccccattgtcgagatggacggtgatgagatgactcgagtattctggaaatctatcaaggacaagcttatcttcccgttcttggagttggacattaagtactttgatctcggacttccataccgtgatcaaaccgacgataaagtcacagtggaggcagcagaggctaccctcaagtacaatgtggccatcaagtgtgcaaccattacaccagatgaagcaagggttaaagagttcagcctaaaatccatgtggaagagcccaaacggcacaattagaaatatcctaaatggcactgtgttcagagaaccaataatctgcaaaaacatccctcggcttgttccaggatggactaagcccatttgcattggaaggcacgcatttggtgatcagtaccgtgcaacggatgcagttatcaagggacctggcaagcttaaattggtttatgagggaaaagatgaggagattgagctggaggtgttcaacttcactggtgctggaggagtggcacagtctatgtacaacactgacgagtccatccgttcctttgctgaggcctctatggccactgcttatgagaagaaatggccattgtacctcagcaccaaaaacacaattttgaagaaatatgatggcaggttcaaagatatctttcaggaggtatatgaaacaaaatggagagccaagtttgatgatgcaggaatatggtacgaacatcggctgattgatgatatggttgcctatgcccttaagagtgaaggaggctatgtttgggcttgcaagaactatgatggagatgtgcagagcgatctaattgcacaaggttttggatcattgggtttaatgacatcagttctggtatgccctgatgggaaaaccattgaagctgaagctgcccatgggactgtcacccgccattacagtgttcaccaaaaaggtggtgaaactagcacaaatagcattgcctcaatatttgcctggacaagaggacttgcacacagggcaaagctagatgacaatgctaggctactggacttcactcagaagcttgaagctgcctgcattggcgctgtcgagtctgggaagatgaccaaggaccttgctctgcttgttcacggatcttcaaatgtcacgaggagtcattacctgaacactgaagagttcatcgatgctgttgctgacgagctcagatcaaggctggcagccaactaaagctaatcaaatcaagtgattttgctgttattgatgtgatccgatgcacttcgattatacatttctagaaccgcatcattcgacgttacaaatattttttttctttgaattttgaatcacttggtaggcgcagctatcaataaatatcttggtatttataaagtttgaacttttattcgtgagaaagctccattataactactttgatgattaaatcatggccgtgtagcttagttcttctatgccaaaagagcaagtagaactatcctaaaggtacccaccacaagtggtgtttgtgctttgtaccatacaaacaagactgtttatttactacagtatatagcttggaataaaaaagcaggtgcaaaaaagttggtaaaaactcgtgccgagggtcagcccggggatccattcaagcttccgaagggtggaatgggaggcatagctctttgatag

SEQ ID NO: 137556 - protein, 412 aa, Oryza sativa
MASTKIKVANPIVEMDGDEMTRVFWKSIKDKLIFPFLELDIKYFDLGLPYRDQTDDKVTVEAAEATLKYNVAIKCATITPDEARVKEFSLKSMWKSPNGTIRNILNGTVFREPIICKNIPRLVPGWTKPICIGRHAFGDQYRATDAVIKGPGKLKLVYEGKDEEIELEVFNFTGAGGVAQSMYNTDESIRSFAEASMATAYEKKWPLYLSTKNTILKKYDGRFKDIFQEVYETKWRAKFDDAGIWYEHRLIDDMVAYALKSEGGYVWACKNYDGDVQSDLIAQGFGSLGLMTSVLVCPDGKTIEAEAAHGTVTRHYSVHQKGGETSTNSIASIFAWTRGLAHRAKLDDNARLLDFTQKLEAACIGAVESGKMTKDLALLVHGSSNVTRSHYLNTEEFIDAVADELRSRLAAN

SEQ ID NO: 137557 - DNA, 1227 bp, Bombyx mori; identical to SEQ ID NO: 122246
  CDS (1)..(1227)

SEQ ID NO: 137558 - protein, 408 aa, Bombyx mori; identical to SEQ ID NO: 122247

SEQ ID NO: 137559 - DNA, 1245 bp, Oryza sativa (japonica cultivar-group); identical to SEQ ID NO: 122468
  CDS (1)..(1245)

SEQ ID NO: 137560 - protein, 414 aa, Oryza sativa (japonica cultivar-group); identical to SEQ ID NO: 122469

SEQ ID NO: 137561 - DNA, 1239 bp, Oryza sativa (japonica cultivar-group); identical to SEQ ID NO: 122470
  CDS (1)..(1239)

SEQ ID NO: 137562 - protein, 412 aa, Oryza sativa (japonica cultivar-group); identical to SEQ ID NO: 122471

SEQ ID NO: 137563 - DNA, 1437 bp, Oryza sativa (japonica cultivar-group); identical to SEQ ID NO: 122472
  CDS (1)..(1437)

SEQ ID NO: 137564 - protein, 478 aa, Oryza sativa (japonica cultivar-group); identical to SEQ ID NO: 122473

SEQ ID NO: 137565 - DNA, 1239 bp, Oryza sativa (japonica cultivar-group); identical to SEQ ID NO: 122474
  CDS (1)..(1239)

SEQ ID NO: 137566 - protein, 412 aa, Oryza sativa (japonica cultivar-group); identical to SEQ ID NO: 122475

SEQ ID NO: 137567 - DNA, 1308 bp, Bombyx mori; identical to SEQ ID NO: 122248
  CDS (1)..(1308)

SEQ ID NO: 137568 - protein, 435 aa, Bombyx mori; identical to SEQ ID NO: 122249

SEQ ID NO: 137569 - DNA, 1212 bp, Mesorhizobium loti MAFF303099; identical to SEQ ID NO: 122250
  CDS (1)..(1212): transl_table=11

SEQ ID NO: 137570 - protein, 403 aa, Mesorhizobium loti MAFF303099; identical to SEQ ID NO: 122251

SEQ ID NO: 137571 - DNA, 1251 bp, Arabidopsis thaliana; identical to SEQ ID NO: 122252
  CDS (1)..(1251)

SEQ ID NO: 137572 - protein, 416 aa, Arabidopsis thaliana; identical to SEQ ID NO: 122253

SEQ ID NO: 137573 - DNA, 1233 bp, Arabidopsis thaliana; identical to SEQ ID NO: 122254
  CDS (1)..(1233)

SEQ ID NO: 137574 - protein, 410 aa, Arabidopsis thaliana; identical to SEQ ID NO: 122255

SEQ ID NO: 137575 - DNA, 1458 bp, Arabidopsis thaliana; identical to SEQ ID NO: 122256
  CDS (1)..(1458)

SEQ ID NO: 137576 - protein, 485 aa, Arabidopsis thaliana; identical to SEQ ID NO: 122257

SEQ ID NO: 137577 - DNA, 1200 bp, Thermotoga maritima MSB8; identical to SEQ ID NO: 122258
  CDS (1)..(1200): transl_table=11

SEQ ID NO: 137578 - protein, 399 aa, Thermotoga maritima MSB8; identical to SEQ ID NO: 122259

SEQ ID NO: 137579 - DNA, 1368 bp, Agrobacterium tumefaciens str. C58; identical to SEQ ID NO: 122264
  CDS (1)..(1368): transl_table=11

SEQ ID NO: 137580 - protein, 455 aa, Agrobacterium tumefaciens str. C58; identical to SEQ ID NO: 122265

SEQ ID NO: 137581 - DNA, 1215 bp, Sinorhizobium meliloti 1021; identical to SEQ ID NO: 122260
  CDS (1)..(1215): transl_table=11

SEQ ID NO: 137582 - protein, 404 aa, Sinorhizobium meliloti 1021; identical to SEQ ID NO: 122261

SEQ ID NO: 137583 - DNA, 1212 bp, Caulobacter crescentus CB15; identical to SEQ ID NO: 122262
  CDS (1)..(1212): transl_table=11

SEQ ID NO: 137584 - protein, 403 aa, Caulobacter crescentus CB15; identical to SEQ ID NO: 122263

SEQ ID NO: 137585 - DNA, 1215 bp, Brucella melitensis 16M
  CDS (1)..(1215): transl_table=11
atggcaaaaatcaaggttgcaaacccggtcgtcgagctcgacggcgacgagatgacccgcattatctggcagttcatcaaggacaagcttatccatccctatctcgacatcgacctgaaatactacgatctttcggtcgagaaccgcgatgcgaccaatgatcaggtcacgatcgatgcagccaatgccatcaaggaatatggcgtgggcgtaaaatgcgcgaccatcacgcccgacgaagcgcgcgtggaagaattcaagctgaagaaaatgtggaagtcgcccaacggcaccatccgcaatatcctcggcggcgtgatcttccgcgagccgatcatctgcaagaacgtgccgcgcctcgtgccgggctggacccagccgatcatcgtcggccgccatgctttcggcgaccagtaccgcgcgactgacttcaagttccccggcaagggcacactgacgatcaagttcgtcggtgaagatggccagaccatcgaacatgaagtctatcaggccccttcggctggcgtggccatggccatgtataatctggacgaatcgatccgcgaattcgcacgcgcttccttcaattacggcttgcagcgcggctatccggtctatctctccacgaagaacaccatcctcaaggcctatgatggccgcttcaaggacatcttccaggaagtcttcgacgccgaattcaagtcgaagtttgaagaaaagaagatctggtacgaacaccgcctcatcgacgacatggtcgcctcggcgctcaagtggtcgggcggctatgtctgggcctgtaagaactatgatggcgacgtgcagtcggatatcgtcgcgcagggcttcggctcgctcggcctgatgacctcggttctgatgacgccggatggcaagacggtggaagcggaagccgcccacggcaccgtaacccgccactatcgccagcatcagaagggcgaggaaacctcgaccaactccatcgcttcgatcttcgcatggacccgcggtctggcgcatcgcgccaagctcgacaacaatgccgatctgaagaagttcgccgaaacgctggaaaaggtctgcgtggacaccgttgaaagcggcttcatgaccaaggatctggcgctcctcatcggcccggatcagccttggctctcgaccaccggcttcctcgacaagatcgacgaaaatcttcagaaagccatggctgcctga

SEQ ID NO: 137586 - protein, 404 aa, Brucella melitensis 16M
MAKIKVANPVVELDGDEMTRIIWQFIKDKLIHPYLDIDLKYYDLSVENRDATNDQVTIDAANAIKEYGVGVKCATITPDEARVEEFKLKKMWKSPNGTIRNILGGVIFREPIICKNVPRLVPGWTQPIIVGRHAFGDQYRATDFKFPGKGTLTIKFVGEDGQTIEHEVYQAPSAGVAMAMYNLDESIREFARASFNYGLQRGYPVYLSTKNTILKAYDGRFKDIFQEVFDAEFKSKFEEKKIWYEHRLIDDMVASALKWSGGYVWACKNYDGDVQSDIVAQGFGSLGLMTSVLMTPDGKTVEAEAAHGTVTRHYRQHQKGEETSTNSIASIFAWTRGLAHRAKLDNNADLKKFAETLEKVCVDTVESGFMTKDLALLIGPDQPWLSTTGFLDKIDENLQKAMAA

SEQ ID NO: 137587 - DNA, 1212 bp, Thermoanaerobacter tengcongensis MB4; identical to SEQ ID NO: 122266
  CDS (1)..(1212): transl_table=11

SEQ ID NO: 137588 - protein, 403 aa, Thermoanaerobacter tengcongensis MB4; identical to SEQ ID NO: 122267

SEQ ID NO: 137589 - DNA, 1410 bp, Drosophila melanogaster; identical to SEQ ID NO: 122268
  CDS (1)..(1410)

SEQ ID NO: 137590 - protein, 469 aa, Drosophila melanogaster; identical to SEQ ID NO: 122269

SEQ ID NO: 137591 - DNA, 1221 bp, Bifidobacterium longum NCC2705; identical to SEQ ID NO: 122270
  CDS (1)..(1221): transl_table=11

SEQ ID NO: 137592 - protein, 406 aa, Bifidobacterium longum NCC2705; identical to SEQ ID NO: 122271

SEQ ID NO: 137593 - DNA, 1215 bp, Brucella suis 1330; identical to SEQ ID NO: 122272
  CDS (1)..(1215): transl_table=11

SEQ ID NO: 137594 - protein, 404 aa, Brucella suis 1330; identical to SEQ ID NO: 122273

SEQ ID NO: 137595 - DNA, 1197 bp, Leptospira interrogans serovar Lai str. 56601
  CDS (1)..(1197): transl_table=11
atggcaaagatcaaggtaaaaaccccgctcgtggagcttgacggggacgagatgaccaggatcatctggaaggagattaaggatagattcattcatccgtatctcgatatagaactggattattatgatttaggcgtggagtacagggacaaaacggatgataaagtaaccgtggattctgctcacgcgattcaaaaatatggagtaggcgtaaaatgtgcgacgattactcctaaccaagatagagttaaagaatacaatctcaaacaagaatggaaatctccgaacggaaccattcgttctattttagacggaaccgtttttcgtaaaccgatcatcgtaaaaaatattcctcctgcggttcgttcttggaaaaaaccgattacagtaggacgtcacgcttacggagatctttataaggacacagaactttatattcccgaagccggaaaggtggaactcgtttataccggaaaggacggaaaagaaaaacaaagagctttgattcacgactttgaaggagccggtgtgatcatggggcaacataacttggataagtcgatcttaagttttgcccaggcttgttttaactacgctatttccgaaaagattgatctttggttcgctacaaaggacacaatctccaaaaaatatcacgccagattccgcgccatctttgacgaacttgcaaaggctaaagctgcggatctcaaaaaagcgggaattgaatattcgtattatctaatcgatgacgcagtcgctcagctgatgaaaaatgaaggtggaatgctctgggccctgatgaattacgacggagatgttatgagcgacatggtcgcctccggatttggatctttaggacttatgacttctgtgctcgtttctcctgatggaaaatttgaatacgaagcagcacacggtactgtgaccagacattatcgtaaataccaacagggtgaaactacttctacaaattcggtagcttctatttttgcttggacgggtgcgttgattaaaaggggagagttggacggaactcccgatgtggtcgcatttggtcataagctggaaaaagcggtgattgatacaatcgaaagcggagagatgacaaaagatttaactcttctttgcaccgattcgaatgcaaaagctttagacacttttcaatttatggaagcaattcaaaaacgactttaa

SEQ ID NO: 137596 - protein, 398 aa, Leptospira interrogans serovar Lai str. 56601; identical to SEQ ID NO: 122333

SEQ ID NO: 137597 - DNA, 1314 bp, Drosophila melanogaster
  CDS (1)..(1314)
atggataatgaaaggatgtccgccgtgagcgagcactcaagtgtggtatgctctcccgaacagatggcccagaagatcaaagccggtcccgttgtggatgtcctcggtgacgagatgacccgcatcatttgggactccattaagagccaactgattctgcccttcctggacattgagctgcatacctacgatcttggtattgagaaccgcgataaaaccgaggaccaggtcaccattgactgtgctgaggccatcaagaagtacaacgtgggcatcaagtgcgccacaatcactcccgacgagaagcgcgtagaggagttcaacctgaagaagatgtggaagtcgcccaacggtaccatccgtaacatcttgggaggaaccgtcttccgtgaggcaatcatctgcaagaacgtgccccgtctggtgactggctggcagaagcctattgtgatcggtcgccatgcccacgccgatcagtacaaggccgtcgactacgtggttcccggacccggcaagctgaccctcacctggaagggaaccgacggtcaggtgatcgatgaggtcattaatgacttcaagggccccggtattgccctgggaatgttcaacacggacgattccattgtggactttgcccacgcctctttcaaatatgctctggaccgcaagctgccgctgtacatgagcaccaagaacaccattctgaagaagtacgatggacgcttcaaggacatattcgaggacctgtacaacaagcagtacaagaaggagtacgaggcggcgggcatctggtatgaacaccgtctcatcgacgatatggttgcttatgccatgaagtcggagggtggcttcgtgtgggcctgcaagaactacgacggtgatgtgcagtcggactccgttgcccagggctacggatctctgggtctgatgacctccgtgctgctatgccccgatggcaagaccgtggaggctgaagccgctcacggaacggtgacgcgtcacttccgcttctaccagcagggcaaggagacctccaccaaccccattgcctcgatattcgcctggacccgtggcctgctgcatcgtgccaagctggacaacaatgagccactgaagcagttcgccgacacccttgagcaggtgtgcatcgacacaattgagagcggcgccatgaccaaggatctggccatctgcattaaaggcaacatcaacgccgttactcgcagggactaccaggagacttttgagttcattaacacgctggccaagaacctggagggtgccctggccaagaatgccgttgctgccaaatga

SEQ ID NO: 137598 - protein, 437 aa, Drosophila melanogaster
MDNERMSAVSEHSSVVCSPEQMAQKIKAGPVVDVLGDEMTRIIWDSIKSQLILPFLDIELHTYDLGIENRDKTEDQVTIDCAEAIKKYNVGIKCATITPDEKRVEEFNLKKMWKSPNGTIRNILGGTVFREAIICKNVPRLVTGWQKPIVIGRHAHADQYKAVDYVVPGPGKLTLTWKGTDGQVIDEVINDFKGPGIALGMFNTDDSIVDFAHASFKYALDRKLPLYMSTKNTILKKYDGRFKDIFEDLYNKQYKKEYEAAGIWYEHRLIDDMVAYAMKSEGGFVWACKNYDGDVQSDSVAQGYGSLGLMTSVLLCPDGKTVEAEAAHGTVTRHFRFYQQGKETSTNPIASIFAWTRGLLHRAKLDNNEPLKQFADTLEQVCIDTIESGAMTKDLAICIKGNINAVTRRDYQETFEFINTLAKNLEGALAKNAVAAK

SEQ ID NO: 137599 - DNA, 1251 bp, Drosophila melanogaster; identical to SEQ ID NO: 122274
  CDS (1)..(1251)

SEQ ID NO: 137600 - protein, 416 aa, Drosophila melanogaster; identical to SEQ ID NO: 122275

SEQ ID NO: 137601 - DNA, 1215 bp, Bradyrhizobium japonicum USDA 110; identical to SEQ ID NO: 122276
  CDS (1)..(1215): transl_table=11

SEQ ID NO: 137602 - protein, 404 aa, Bradyrhizobium japonicum USDA 110; identical to SEQ ID NO: 122277

SEQ ID NO: 137603 - DNA, 1353 bp, Drosophila melanogaster; identical to SEQ ID NO: 122278
  CDS (1)..(1353)

SEQ ID NO: 137604 - protein, 450 aa, Drosophila melanogaster; identical to SEQ ID NO: 122279

SEQ ID NO: 137605 - DNA, 1230 bp, Gloeobacter violaceus PCC 7421; identical to SEQ ID NO: 122280
  CDS (1)..(1230): transl_table=11

SEQ ID NO: 137606 - protein, 409 aa, Gloeobacter violaceus PCC 7421; identical to SEQ ID NO: 122281

SEQ ID NO: 137607 - DNA, 1227 bp, Rhodopseudomonas palustris CGA009; identical to SEQ ID NO: 122282
  CDS (1)..(1227): transl_table=11

SEQ ID NO: 137608 - protein, 408 aa, Rhodopseudomonas palustris CGA009; identical to SEQ ID NO: 122283

SEQ ID NO: 137609 - DNA, 1239 bp, Mycobacterium avium subsp. paratuberculosis K-10
  CDS (1)..(1239): transl_table=11
atgtccaaccccgccaacacgtccaagatcaaggtcaagggccgcgtcgtcgagctcgacggtgacgagatgacccgggtcatctggaagatgatcaaggagaacttgatccttccctacctcgacatcgacctggactactacgacctgggcatcgagcaccgcgaccgcaccgacgaccaggtgacgatcgacgcggcgtatgccatcaagaagcacggcgtgggcgtcaagtgcgcgacgatcacccccgacgaggcgagggtccgggagttcaacctcaagaggatgtggctgtccccgaacgggacgatccggaacatcttgggcggcaccatcttccgcgagccgatcgtgatatccaatgtgccccggctggttccgggctggaccaagccgatcgtcatcggccgccacgcattcggtgaccagtaccggtcgaccaacttcaaggtggacaagccgggcaccgtcgcgatcaccttcactcccgccgacggcagcgagccgatcgtgcacgagatggtgtccatccccgaggacggcggggtggtgatggggatgtacaacttccgggagtcgatccgcgacttcgcccgcgcgtcgttcaagtacggcctgaacgccaaatggccggtgtacctgtcgaccaagaacaccatcctcaaggcctacgacggcatgttcaaggacgagttccagcgcatctacgacgaggaattcaaggagcagttcgaagccgagggactgacctacgaacaccggctgatcgacgacatggtggcggcctgcctcaaatgggagggcggctacgtgtgggcctgcaagaactacgacggcgacgtccaatccgacgcgatagcacagggttacggctcgctggggctgatgacctcggtgctgatgaccgccgacggcaagacggtcgaggccgaggccgcgcacggcaccgtcacccggcacttccgtcagtaccaggccggcaagccgacctcgaccaacccgatcgcctcgatcttcgcctggacgcgcgggctggcgcaccgcggcaagctggacgacacccccgaggtggtcgagttcgcgcagaccctggaacgcgtcgtcgtctccaccgtggagagcggcaagatgaccaaggacctcgccatcctgatcggccccgaccaaaagtggcagcagagcgaggaattcctcaactcgatcgccgagaacctgcggcgggagctgactaactag

SEQ ID NO: 137610 - protein, 412 aa, Mycobacterium avium subsp. paratuberculosis K-10
MSNPANTSKIKVKGRVVELDGDEMTRVIWKMIKENLILPYLDIDLDYYDLGIEHRDRTDDQVTIDAAYAIKKHGVGVKCATITPDEARVREFNLKRMWLSPNGTIRNILGGTIFREPIVISNVPRLVPGWTKPIVIGRHAFGDQYRSTNFKVDKPGTVAITFTPADGSEPIVHEMVSIPEDGGVVMGMYNFRESIRDFARASFKYGLNAKWPVYLSTKNTILKAYDGMFKDEFQRIYDEEFKEQFEAEGLTYEHRLIDDMVAACLKWEGGYVWACKNYDGDVQSDAIAQGYGSLGLMTSVLMTADGKTVEAEAAHGTVTRHFRQYQAGKPTSTNPIASIFAWTRGLAHRGKLDDTPEVVEFAQTLERVVVSTVESGKMTKDLAILIGPDQKWQQSEEFLNSIAENLRRELTN

SEQ ID NO: 137611 - DNA, 1230 bp, Bdellovibrio bacteriovorus HD100; identical to SEQ ID NO: 122284
  CDS (1)..(1230): transl_table=11

SEQ ID NO: 137612 - protein, 409 aa, Bdellovibrio bacteriovorus HD100; identical to SEQ ID NO: 122285

SEQ ID NO: 137613 - DNA, 1350 bp, Strongylocentrotus purpuratus; identical to SEQ ID NO: 122286
  CDS (1)..(1350)

SEQ ID NO: 137614 - protein, 449 aa, Strongylocentrotus purpuratus; identical to SEQ ID NO: 122287

SEQ ID NO: 137615 - DNA, 1230 bp, Nasonia vitripennis; identical to SEQ ID NO: 122290
  CDS (1)..(1230)

SEQ ID NO: 137616 - protein, 409 aa, Nasonia vitripennis; identical to SEQ ID NO: 122291

SEQ ID NO: 137617 - DNA, 1242 bp, Magnaporthe grisea 70-15; identical to SEQ ID NO: 122292
  CDS (1)..(1242)

SEQ ID NO: 137618 - protein, 413 aa, Magnaporthe grisea 70-15; identical to SEQ ID NO: 122293

SEQ ID NO: 137619 - DNA, 1338 bp, Gibberella zeae PH-1; identical to SEQ ID NO: 122294
  CDS (1)..(1338)

SEQ ID NO: 137620 - protein, 445 aa, Gibberella zeae PH-1; identical to SEQ ID NO: 122295

SEQ ID NO: 137621 - DNA, 1236 bp, Candida glabrata CBS 138; identical to SEQ ID NO: 122296
  CDS (1)..(1236)

SEQ ID NO: 137622 - protein, 411 aa, Candida glabrata CBS 138; identical to SEQ ID NO: 122297

SEQ ID NO: 137623 - DNA, 1272 bp, Candida glabrata CBS 138; identical to SEQ ID NO: 122298
  CDS (1)..(1272)

SEQ ID NO: 137624 - protein, 423 aa, Candida glabrata CBS 138; identical to SEQ ID NO: 122299

SEQ ID NO: 137625 - DNA, 1257 bp, Candida glabrata CBS 138; identical to SEQ ID NO: 122300
  CDS (1)..(1257)

SEQ ID NO: 137626 - protein, 418 aa, Candida glabrata CBS 138; identical to SEQ ID NO: 122301

SEQ ID NO: 137627 - DNA, 1290 bp, Kluyveromyces lactis NRRL Y-1140; identical to SEQ ID NO: 122302
  CDS (1)..(1290)

SEQ ID NO: 137628 - protein, 429 aa, Kluyveromyces lactis NRRL Y-1140; identical to SEQ ID NO: 122303

SEQ ID NO: 137629 - DNA, 1248 bp, Kluyveromyces lactis NRRL Y-1140; identical to SEQ ID NO: 122304
  CDS (1)..(1248)

SEQ ID NO: 137630 - protein, 415 aa, Kluyveromyces lactis NRRL Y-1140; identical to SEQ ID NO: 122305

SEQ ID NO: 137631 - DNA, 1296 bp, Debaryomyces hansenii CBS767; identical to SEQ ID NO: 122306
  CDS (1)..(1296)

SEQ ID NO: 137632 - protein, 431 aa, Debaryomyces hansenii CBS767; identical to SEQ ID NO: 122307

SEQ ID NO: 137633 - DNA, 1233 bp, Debaryomyces hansenii CBS767; identical to SEQ ID NO: 122308
  CDS (1)..(1233)

SEQ ID NO: 137634 - protein, 410 aa, Debaryomyces hansenii CBS767; identical to SEQ ID NO: 122309

SEQ ID NO: 137635 - DNA, 1230 bp, Apis mellifera; identical to SEQ ID NO: 122310
  CDS (1)..(1230)

SEQ ID NO: 137636 - protein, 409 aa, Apis mellifera; identical to SEQ ID NO: 122311

SEQ ID NO: 137637 - DNA, 1476 bp, Aspergillus nidulans FGSC A4; identical to SEQ ID NO: 122312
  CDS (1)..(1476)

SEQ ID NO: 137638 - protein, 491 aa, Aspergillus nidulans FGSC A4; identical to SEQ ID NO: 122313

SEQ ID NO: 137639 - DNA, 1302 bp, Candida albicans SC5314; identical to SEQ ID NO: 122314
  CDS (1)..(1302): transl_table=12

SEQ ID NO: 137640 - protein, 433 aa, Candida albicans SC5314; identical to SEQ ID NO: 122315

SEQ ID NO: 137641 - DNA, 1239 bp, Candida albicans SC5314; identical to SEQ ID NO: 122316
  CDS (1)..(1239): transl_table=12

SEQ ID NO: 137642 - protein, 412 aa, Candida albicans SC5314; identical to SEQ ID NO: 122317

SEQ ID NO: 137643 - DNA, 1290 bp, Ustilago maydis 521; identical to SEQ ID NO: 122318
  CDS (1)..(1290)

SEQ ID NO: 137644 - protein, 429 aa, Ustilago maydis 521; identical to SEQ ID NO: 122319

SEQ ID NO: 137645 - DNA, 1359 bp, Cryptococcus neoformans var. neoformans B-3501A; identical to SEQ ID NO: 122320
  CDS (1)..(1359)

SEQ ID NO: 137646 - protein, 452 aa, Cryptococcus neoformans var. neoformans B-3501A; identical to SEQ ID NO: 122321

SEQ ID NO: 137647 - DNA, 1350 bp, Cryptococcus neoformans var. neoformans B-3501A; identical to SEQ ID NO: 122322
  CDS (1)..(1350)

SEQ ID NO: 137648 - protein, 449 aa, Cryptococcus neoformans var. neoformans B-3501A; identical to SEQ ID NO: 122323

SEQ ID NO: 137649 - DNA, 1230 bp, Strongylocentrotus purpuratus; identical to SEQ ID NO: 122288
  CDS (1)..(1230)

SEQ ID NO: 137650 - protein, 409 aa, Strongylocentrotus purpuratus; identical to SEQ ID NO: 122289

SEQ ID NO: 137651 - DNA, 1227 bp, Tribolium castaneum; identical to SEQ ID NO: 122324
  CDS (1)..(1227)

SEQ ID NO: 137652 - protein, 408 aa, Tribolium castaneum; identical to SEQ ID NO: 122325

SEQ ID NO: 137653 - DNA, 1311 bp, Tribolium castaneum; identical to SEQ ID NO: 122326
  CDS (1)..(1311)

SEQ ID NO: 137654 - protein, 436 aa, Tribolium castaneum; identical to SEQ ID NO: 122327

SEQ ID NO: 137655 - DNA, 1266 bp, Tribolium castaneum; identical to SEQ ID NO: 122328
  CDS (1)..(1266)

SEQ ID NO: 137656 - protein, 421 aa, Tribolium castaneum; identical to SEQ ID NO: 122329

SEQ ID NO: 137657 - DNA, 1209 bp, Clostridium thermocellum ATCC 27405; identical to SEQ ID NO: 122330
  CDS (1)..(1209): transl_table=11

SEQ ID NO: 137658 - protein, 402 aa, Clostridium thermocellum ATCC 27405; identical to SEQ ID NO: 122331

SEQ ID NO: 137659 - DNA, 1215 bp, Bradyrhizobium sp. ORS278
  CDS (1)..(1215): transl_table=11
atggcaaaaatcaaggtgaccaatccggtcgtcgagctcgacggcgacgagatgacccggatcatctggcagtacatcaaggacaagctgatcaacccgttccttgagatcgatctgcagtattacgacctggggatggagagccgcgacaagaccaacgaccaaatcacgatcgatgccgccaacgcgatcaagaaggtcggcgtcggcgtgaagtgcgccaccatcacccccgacgaagcccgcgtgaaggagttcggcctcaaggagatgtggaagtcgccgaatggcaccatccgcaacatccttggcggcgtcgtgttccgcgagccgatcatctgcaagaacgtgccgcgcctcgtccccggctggaccaagccgatcatcatcggccgccacgcctatggcgaccagtaccgcgccaccgacttcaaattccccggcaagggcaccctgtcgatgaagttcgtcggcgaggacggcaccgtgatcgagcgcgaggtattcaaggcgccgggtccgggcatcgcgatggagatgtacaatctcgatgactcgatcgtcgatttcgcccgcgcctcgttcaacatgggcctggccaagaactactcggtgtacctgtcgaccaagaacaccatcctcaaggtgtatgacggccgcttcaaggacctgttccaggaggtctacgacaaggagttcaaggacaagttcgaggccaagaagatcacctatgagcaccgcctgatcgacgacatggtcgccgcggcgctgaagtggtcgggcggctatgtctgggcctgtaagaactatgacggcgacgtgcagtccgacacggtggcgcagggctacggctcgctcggcttgatgacctcggtgctgctgaccccggacggcaacacggtggaggccgaggccgcccacggcacggtgacccgccacttccgcgagcaccagaagggcaaggagacctcgaccaactcgatcgcctcgatcttcgcctggacccgcggcctgtcgcaccgcgccaagctcgacaacaatgccgagctcgccaagttcgcctccaccctggagaaggtctgcgtcgacaccgtcgaggccggctacatgaccaaggacctcgcgctcctggtcggcgctgaccagcgctggctgtcgaccaccggcttcctcgacaagatcgccgagaacctcaccaaggcgatggcggcgtaa

SEQ ID NO: 137660 - protein, 404 aa, Bradyrhizobium sp. ORS278
MAKIKVTNPVVELDGDEMTRIIWQYIKDKLINPFLEIDLQYYDLGMESRDKTNDQITIDAANAIKKVGVGVKCATITPDEARVKEFGLKEMWKSPNGTIRNILGGVVFREPIICKNVPRLVPGWTKPIIIGRHAYGDQYRATDFKFPGKGTLSMKFVGEDGTVIEREVFKAPGPGIAMEMYNLDDSIVDFARASFNMGLAKNYSVYLSTKNTILKVYDGRFKDLFQEVYDKEFKDKFEAKKITYEHRLIDDMVAAALKWSGGYVWACKNYDGDVQSDTVAQGYGSLGLMTSVLLTPDGNTVEAEAAHGTVTRHFREHQKGKETSTNSIASIFAWTRGLSHRAKLDNNAELAKFASTLEKVCVDTVEAGYMTKDLALLVGADQRWLSTTGFLDKIAENLTKAMAA

SEQ ID NO: 137661 - DNA, 1215 bp, Bartonella quintana str. Toulouse; identical to SEQ ID NO: 122334
  CDS (1)..(1215): transl_table=11

SEQ ID NO: 137662 - protein, 404 aa, Bartonella quintana str. Toulouse; identical to SEQ ID NO: 122335

SEQ ID NO: 137663 - DNA, 1215 bp, Bartonella henselae str. Houston-1; identical to SEQ ID NO: 122336
  CDS (1)..(1215): transl_table=11

SEQ ID NO: 137664 - protein, 404 aa, Bartonella henselae str. Houston-1; identical to SEQ ID NO: 122337

SEQ ID NO: 137665 - DNA, 1215 bp, Leifsonia xyli subsp. xyli str. CTCB07; identical to SEQ ID NO: 122338
  CDS (1)..(1215): transl_table=11

SEQ ID NO: 137666 - protein, 404 aa, Leifsonia xyli subsp. xyli str. CTCB07; identical to SEQ ID NO: 122339

SEQ ID NO: 137667 - DNA, 1209 bp, Desulfotalea psychrophila LSv54; identical to SEQ ID NO: 122340
  CDS (1)..(1209): transl_table=11

SEQ ID NO: 137668 - protein, 402 aa, Desulfotalea psychrophila LSv54; identical to SEQ ID NO: 122341

SEQ ID NO: 137669 - DNA, 1221 bp, Thermobifida fusca YX; identical to SEQ ID NO: 122342
  CDS (1)..(1221): transl_table=11

SEQ ID NO: 137670 - protein, 406 aa, Thermobifida fusca YX; identical to SEQ ID NO: 122343

SEQ ID NO: 137671 - DNA, 1215 bp, Rhodobacter sphaeroides 2.4.1; identical to SEQ ID NO: 122344
  CDS (1)..(1215): transl_table=11

SEQ ID NO: 137672 - protein, 404 aa, Rhodobacter sphaeroides 2.4.1; identical to SEQ ID NO: 122345

SEQ ID NO: 137673 - DNA, 1215 bp, Rhodobacter sphaeroides 2.4.1
  CDS (1)..(1215): transl_table=11
atgtcgaagatcaaggtagcgaaccccgtcgtcgagctcgacggcgacgagatgacccgcatcatctgggacttcatcaagcagaagctgatcctgccctacctcgacatcgacctgcattactacgacctcggcatcgaggagcgcgaccgcaccgaggacaagatcacggtcgacgcggcccatgcgatcaagcagcatggcgtgggcgtgaaatgcgccaccatcacgccggacgaggcgcgggtcgaggaattcggcctgaaatcgatgtggaagagcccgaacggcacgatccgcaacatcctcggcggcgtgatcttccgccagccgatcatctgccgcaacgtcccgcgcctcgtgccgggctggacaaagcccatcgtcgtcggccgccatgccttcggcgaccagtatcgcgcgaccgacttccgcttcccgggcaagggcaagctcacgctgaaattcgtgggcgaggacggcgcggtgatcgagcgcgaggtgttcgacgcgccgggctcgggcgtgaccatggcgatgtacaacctcgaccagtcgatcatcgacttcgcgcgcgcctcgatgaactacgggctgaacctcggctggccggtgtacctctcgaccaagaacacgatcctcaaggcctatgacgggcgcttcaaggacctcttccagcaggtctacgaggaggaattcgccgagaagttcaaggcggcgggcatcacctacgagcaccggctgatcgacgacatggtggcctcggcgctgaaatggtcgggcggctatgtctgggcctgcaagaactacgacggcgacgtgcagtcggatacggtggcgcagggcttcggctcgctcgggctgatgacgagcgtgctgatgacgccggacgggcagacggtggaggccgaggccgcgcatggcacggtcacgcggcacttccgccagcatcaggcgggcaaggagacctcgaccaactcgatcgcctcgatctacgcctggacgggcggcctcaagcaccgcgccaagctcgacggcaatgccgatctcgcccgcttcgccgagacgctcgagcgggtcacggtgcagacggtcgaggacggcttcatgacgaaggacctcgcgctcctcgtgggcccggatcagaagtggctgaccacgatcggctatctcgagaaggtcgacgaatatctcgaccgcgcgctcggcgcctga

SEQ ID NO: 137674 - protein, 404 aa, Rhodobacter sphaeroides 2.4.1
MSKIKVANPVVELDGDEMTRIIWDFIKQKLILPYLDIDLHYYDLGIEERDRTEDKITVDAAHAIKQHGVGVKCATITPDEARVEEFGLKSMWKSPNGTIRNILGGVIFRQPIICRNVPRLVPGWTKPIVVGRHAFGDQYRATDFRFPGKGKLTLKFVGEDGAVIEREVFDAPGSGVTMAMYNLDQSIIDFARASMNYGLNLGWPVYLSTKNTILKAYDGRFKDLFQQVYEEEFAEKFKAAGITYEHRLIDDMVASALKWSGGYVWACKNYDGDVQSDTVAQGFGSLGLMTSVLMTPDGQTVEAEAAHGTVTRHFRQHQAGKETSTNSIASIYAWTGGLKHRAKLDGNADLARFAETLERVTVQTVEDGFMTKDLALLVGPDQKWLTTIGYLEKVDEYLDRALGA

SEQ ID NO: 137675 - DNA, 1218 bp, Rhodospirillum rubrum ATCC 11170; identical to SEQ ID NO: 122346
  CDS (1)..(1218): transl_table=11

SEQ ID NO: 137676 - protein, 405 aa, Rhodospirillum rubrum ATCC 11170; identical to SEQ ID NO: 122347

SEQ ID NO: 137677 - DNA, 1218 bp, Syntrophus aciditrophicus SB; identical to SEQ ID NO: 122348
  CDS (1)..(1218): transl_table=11

SEQ ID NO: 137678 - protein, 405 aa, Syntrophus aciditrophicus SB; identical to SEQ ID NO: 122349

SEQ ID NO: 137679 - DNA, 1224 bp, Novosphingobium aromaticivorans DSM 12444; identical to SEQ ID NO: 122350
  CDS (1)..(1224): transl_table=11

SEQ ID NO: 137680 - protein, 407 aa, Novosphingobium aromaticivorans DSM 12444; identical to SEQ ID NO: 122351

SEQ ID NO: 137681 - DNA, 1212 bp, Desulfitobacterium hafniense Y51; identical to SEQ ID NO: 122352
  CDS (1)..(1212): transl_table=11

SEQ ID NO: 137682 - protein, 403 aa, Desulfitobacterium hafniense Y51; identical to SEQ ID NO: 122353

SEQ ID NO: 137683 - DNA, 1215 bp, Mesorhizobium sp. BNC1; identical to SEQ ID NO: 122354
  CDS (1)..(1215): transl_table=11

SEQ ID NO: 137684 - protein, 404 aa, Mesorhizobium sp. BNC1; identical to SEQ ID NO: 122355

SEQ ID NO: 137685 - DNA, 1233 bp, Cytophaga hutchinsonii ATCC 33406; identical to SEQ ID NO: 122356
  CDS (1)..(1233): transl_table=11

SEQ ID NO: 137686 - protein, 410 aa, Cytophaga hutchinsonii ATCC 33406; identical to SEQ ID NO: 122357

SEQ ID NO: 137687 - DNA, 1224 bp, Rhodococcus sp. RHA1; identical to SEQ ID NO: 122358
  CDS (1)..(1224): transl_table=11

SEQ ID NO: 137688 - protein, 407 aa, Rhodococcus sp. RHA1; identical to SEQ ID NO: 122359

SEQ ID NO: 137689 - DNA, 1218 bp, Hyphomonas neptunium ATCC 15444; identical to SEQ ID NO: 122360
  CDS (1)..(1218): transl_table=11

SEQ ID NO: 137690 - protein, 405 aa, Hyphomonas neptunium ATCC 15444; identical to SEQ ID NO: 122361

SEQ ID NO: 137691 - DNA, 1212 bp, Rhizobium leguminosarum bv. viciae 3841; identical to SEQ ID NO: 122362
  CDS (1)..(1212): transl_table=11

SEQ ID NO: 137692 - protein, 403 aa, Rhizobium leguminosarum bv. viciae 3841; identical to SEQ ID NO: 122363

SEQ ID NO: 137693 - DNA, 1239 bp, Mycobacterium avium 104; identical to SEQ ID NO: 122364
  CDS (1)..(1239): transl_table=11

SEQ ID NO: 137694 - protein, 412 aa, Mycobacterium avium 104; identical to SEQ ID NO: 122365

SEQ ID NO: 137695 - DNA, 1218 bp, Magnetospirillum magnetotacticum MS-1; identical to SEQ ID NO: 122366
  CDS (1)..(1218): transl_table=11

SEQ ID NO: 137696 - protein, 405 aa, Magnetospirillum magnetotacticum MS-1; identical to SEQ ID NO: 122367

SEQ ID NO: 137697 - DNA, 1221 bp, Bifidobacterium longum DJO10A; identical to SEQ ID NO: 122368
  CDS (1)..(1221): transl_table=11

SEQ ID NO: 137698 - protein, 406 aa, Bifidobacterium longum DJO10A; identical to SEQ ID NO: 122369

SEQ ID NO: 137699 - DNA, 1215 bp, Kineococcus radiotolerans SRS30216
  CDS (1)..(1215): transl_table=11
gtggccaagatcaaggtccagggaccggtcgtcgagctcgacggtgacgagatgacccggatcatctggcagttcatcaaggaccgcctggtccacccgtacctcgacgtcgacctggagtactacgacctgggcgtcgagcaccgcgacgccaccgacgaccaggtgacgatcgacgcggcccacgccatccagcgggccggggtgggcgtcaagtgcgcgacgatcacgcccgacgaggcgcgcgtcgaggagttcggcctcaagaagatgtggcgctcgcccaacgggacgatccgcaacatcctcggcggcgtgatcttccgcgagccgatcatcatctccaacatcccgcgcctggtgccgggctggaccaagccgatcatcgtcggccgccacgcctacggcgaccagtaccgcgcgaccgacttcaagttccccagcgcgggcaccctcacggtgaccttcacccccgaggacggctccgagcccatcgagcacgaggtcttccaggcccccggcgccggcgtctcgctgtcgatgtacaacctcgacgcctcgatcgtcgacttcgcgcgctcctcgctcaactacggcctggcgcgcaactacccggtgtacctctccacgaagaacacgatcctcaaggcctacgacggccggttcaaggacatcttcgaggaggtcttcgagaacgagttcaaggacaggttcgccgaggccgggatcacctacgagcaccgcctcatcgacgacatggtcgccgcgtccctgaagtgggagggcggctacgtctgggcctgcaagaactacgacggcgacgtccagtccgacaccgtcgcgcagggcttcggctcgctggggctgatgacctcggtgctgtccaccccggacggctccgtggtggaggccgaggccgcccacggcaccgtgacccgccactaccgccagcaccagcagggcaagccgacgtcgacgaacccgatcgcgtcgatctacgcctggacccgcgggctggcccaccgcggcaagctggactccacccccgaggtcaccggcttcgccgagaccctcgaggacgtcgtcatcaagaccgtcgagagcggcaagatgaccaaggacctcgcgctgctcgtcgggccggaccagccctggcagaccaccgaggagttcctcggcagcctcgacgacaacctcgccgcgcgcctggcctga

SEQ ID NO: 137700 - protein, 404 aa, Kineococcus radiotolerans SRS30216
MAKIKVQGPVVELDGDEMTRIIWQFIKDRLVHPYLDVDLEYYDLGVEHRDATDDQVTIDAAHAIQRAGVGVKCATITPDEARVEEFGLKKMWRSPNGTIRNILGGVIFREPIIISNIPRLVPGWTKPIIVGRHAYGDQYRATDFKFPSAGTLTVTFTPEDGSEPIEHEVFQAPGAGVSLSMYNLDASIVDFARSSLNYGLARNYPVYLSTKNTILKAYDGRFKDIFEEVFENEFKDRFAEAGITYEHRLIDDMVAASLKWEGGYVWACKNYDGDVQSDTVAQGFGSLGLMTSVLSTPDGSVVEAEAAHGTVTRHYRQHQQGKPTSTNPIASIYAWTRGLAHRGKLDSTPEVTGFAETLEDVVIKTVESGKMTKDLALLVGPDQPWQTTEEFLGSLDDNLAARLA

SEQ ID NO: 137701 - DNA, 1218 bp, Sulfitobacter sp. EE-36; identical to SEQ ID NO: 122370
  CDS (1)..(1218): transl_table=11

SEQ ID NO: 137702 - protein, 405 aa, Sulfitobacter sp. EE-36; identical to SEQ ID NO: 122371

SEQ ID NO: 137703 - DNA, 1215 bp, Roseovarius nubinhibens ISM; identical to SEQ ID NO: 122372
  CDS (1)..(1215): transl_table=11

SEQ ID NO: 137704 - protein, 404 aa, Roseovarius nubinhibens ISM; identical to SEQ ID NO: 122373

SEQ ID NO: 137705 - DNA, 1215 bp, Oceanicola batsensis HTCC2597; identical to SEQ ID NO: 122374
  CDS (1)..(1215): transl_table=11

SEQ ID NO: 137706 - protein, 404 aa, Oceanicola batsensis HTCC2597; identical to SEQ ID NO: 122375

SEQ ID NO: 137707 - DNA, 1221 bp, Erythrobacter sp. NAP1; identical to SEQ ID NO: 122376
  CDS (1)..(1221): transl_table=11

SEQ ID NO: 137708 - protein, 406 aa, Erythrobacter sp. NAP1; identical to SEQ ID NO: 122377

SEQ ID NO: 137709 - DNA, 1736 bp, Pinus pinaster
  CDS (114)..(1367)
ggcacgagtagcgattttttccattggatcgtgattttggatcagtaagtccccgaggtggcctgggatcggttcctggacttctttgtcttcaatttctttctgctatcacaatggcgtcggagaagatcaaggtggagaatcccatcgtcgagatggacggggatgaaatgaccagggtcatatggacaatgattaaggacaagcttatttttccatttgtagagctggatattaagtattttgatttggggcttccccatcgcgatgctacagatgacaaggttacaattgagagtgcagaagccacattaaaatacaatgtggccatcaagtgtgcaactatcacaccagatgaagctcgagtcaaggaattcgacttgaaggctatgtggaagagtcccaatgggactatccgtaacattttgaatggtaccgtgttcagagagccaatcttatgtaagaacgtccctaagcttgttccaggatggacaaaggccatatgtattggaagacatgcttttggtgaccaatacaaagcaacagatacagttatcaagggccctggcaagctgaaattagttttcgttccagagaaagatggtgaaacatctgagttagaggtgtaccccttcaaaggtgatggaggagtagcattagccatgtacaatactgatgagtcgatacgttcatttgctgaggcttcaatgaccgtggcctatgagaagaagtggccactctaccttagtacgaaaaatacaattttgaaaaaatacgatggaaggttcaaagatattttccaagaggtctatgaatccaactggaaaagtaaatatgaaaaagcaggaatctggtatgaacataggcttatcgatgacatggtagcctatgcattaaagagtgaagggggctatgtatgggcgtgcaaaaattacgatggtgatgtacagagtgatttcttggcacagggatttggatcccttggcttgatgacgtctgtactggtttgtcctgatggaaaaactatcgaggccgaagcagctcatggcactgttactcggcattaccgcgtacatcaaaagggaggtgaaactagcacgaacagcattgcttctatttttgcatggacacgtgggcttgcacacagggcaaaactggacggaaatgcaaggctacttgaatttgcagagaagctggaagttgcttgtgtaggtactgttgaggccggaaaaatgacaaaagacttggcgctaattattcacggttccaacctttccagggagcactacctaaacactgaagagtttattgacgcagtggcagccgatctgaaaataagactttctgcaaaaccaaagagttcttaagggattgtgaaatgtgtggcgattttgatcctgcaagagttgtttgaagtcgtaggtcagtcagctactaggggaaatgcatgtggcccatggaatatctgttgtgacatttgaaaggaaaaacattggctgtgtttccaatttaaaactttacggttgcaatagtcattgctatgtttcgagggattatttcctcttaaatcttaatactcctgcacagaagtctctaatcagttatcatgggctatgtatgtgcggctacacaagcgcacaagaataaatattgttttaactagaaactccaaagtagatagcagacagcaaaattgtatgcataatgtatgcatattaaaaaaaaaaaaaagaaaa

SEQ ID NO: 137710 - protein, 417 aa, Pinus pinaster; identical to SEQ ID NO: 122381

SEQ ID NO: 137711 - DNA, 1374 bp, Populus tremula x Populus alba
  CDS (112)..(1374)
tctcgttttccttctctgctaatttacgggaggagaaagatagaaagacaacataaaagtttcaatctttaaaactctttgagcttcattaaaaaacaagacaacataaaaatggctttcgaaaagatcaaggttgctaaccccatcgttgaaatggatggagatgaaatgaccagagttttctggcaatcaataaaggaaaagcttattttcccatttttggagttggatatcaagtactttgaccttggccttcctcatcgcgatgccactgatgataaagtcactattgaaagctcagaggctactcttaagtacaatgtagcaatcaagtgtgcaactattactccagatgaagatcgtgtcaaggagtttaaattgaagcagatgtggaagagtccaaacggaacaattaggaacattttgaacggtactgtcttcagagaaccaattatttgcaaaaacgttccccgccttgtcccaggctggacgaaggcaatttgcatcggaagacatgcttttggtgatcaatatcgagcaactgatgcagtcatcaaaggagctggcaaactcaagctagtgtttgtgccagaaggacaggatgagaagacagagttggaggtgtacaattttacaggtgctggtggggtggcattggccatgtataacaccgatgagtccatccgttcttttgctgaagcttctatgaacactgcttaccaaaagaagtggccactttatctcagcacaaaaaatactatccttaagaagtacgatggaagattcaaggacatctttcaagaagtctatgaggctaactggaaatcaaagtacgaggctgcaggaatatggtatgaacaccgactcattgatgatatggttgcatatgctctcaagagtgaaggaggttatgtttgggcatgcaaaaactatgatggggatgtgcagagtgatttcttggcccaaggttttggatcacttggcttgatgacctctgtattggtgtgccctgatggaaagaccatagaggccgaggcagcccatggtacagttactcggcattacagggttcaccagaaaggtggtgaaaccagcacaaacagtattgcctctatttttgcttggtcaagagaacttgcccacagggctaagttggatgacaatgctaaactcttggatttcactgagaaactagaggcagcttgcgttggggctgtggagtctggcaagatgaccaaggatctcgcattgcttatccatggatctaaggttagtagggaccagtacctcaacactgaagagttcattgatgctgtggccgaggagctgaaagccagacttggcaggcaaagtgagcagtgcattaaagcttga

SEQ ID NO: 137712 - protein, 420 aa, Populus tremula x Populus alba; identical to SEQ ID NO: 122383

SEQ ID NO: 137713 - DNA, 1535 bp, Apium graveolens
  CDS (61)..(1299)
acacatcccccgagttaaagccgagttgaactgagtcgagtctactgtcatccatcgatcatggcgtttcagaagattaaggtcgctaaccccatcgtcgaaatggacggagatgaaatgacccgtgtattttggaaatctattaaggacaagcttatatttccctttgttgagcttgatataaaatactttgaccttggccttcctcaccgtgatgcaaccgatgataaagttactgttgaaagtgcagaggctaccctcaagtataatgtagcaatcaaatgtgcaacaattactccagatgaagctcgggttgaggaatttggtttgaagcagatgtggaagagtccaaatgggactattagaaatattttaaatggcacggtatttagggaaccaattatctgcaaaaacatcccgaagctcatcccagggtggacgaagccaatatgcatcggaagacatgcttttggtgatcaataccgcgcaacagatgcagttatcaaaggaccaggaaaacttaaattggtgtttgtaccagaaggtaaagaggaaaagacagagttggaagtttacaactttactggtgctggaggtgtagctctgtcaatgtacaacacagatgagtccattcgttcctttgctgaagcttctatgaccactgcttatgaaaagaagtggccactttatcttagcacaaaaaatactattcttaagaaatacgatggaagattcaaggacatattccaagaagtttatgaagccagctggaaatcgaagtatgaagctgcagggatatggtatgagcaccgtcttattgatgatatggttgcatatgctcttaaaagtgatggaggttatgtctgggcatgcaaaaattatgacggggatgtacaaagtgacttcctcgcgcaaggtttcggatctcttgggttgatgacatcagtcctagtatgtcctgacggaaagaccatagaagctgaagcagcccatggcactgttacccgtcattacagggttcatcagaagggtggagagaccagcacaaacagcatagcatcaatctttgcatggtcccggggccttgctcacagggcaaagctggatgataatgctgccctcctgagttttgcggagaagctagaggctgcttgtgttggtactgtggaggctggaaggatgaccaaggaccttgctcttattcttcatggatccaaactcagcagggaacactatctgaacactgaagagttcattgatgctgtagcagatgatttgaaagcaagactcgccaactaggttcagtgtcttgaaagatacgaatgtttgattatttgggggagtttcagacgctgttgagcagaaataatcaataaagataattgctgcattatttttatagtgatgtttgcgagttctattcagaatatttataacttttgttttaattgcttagttatgaattatgatatgactggaagattataataccattttatcaacattgagaaaaaaaaaaaaaaaaaaaaaaaaaa

SEQ ID NO: 137714 - protein, 412 aa, Apium graveolens; identical to SEQ ID NO: 122391

SEQ ID NO: 137715 - DNA, 1449 bp, Nicotiana tabacum; identical to SEQ ID NO: 122392
  CDS (1)..(1449)

SEQ ID NO: 137716 - protein, 482 aa, Nicotiana tabacum; identical to SEQ ID NO: 122393

SEQ ID NO: 137717 - DNA, 1827 bp, Glycine max
  CDS (289)..(1539)
ggcacgagctagcattattgatcgtttgtgtgggtgtgtctgttttcgttgtttcccactttccaaatcacatccaacgtgaatccgtcattcaacttgattgaagtatccaacgaaaattcaaacacacactaaccttactgagtgtgttcattgggaactggttcattccacacattttatttaagccaaaaaaacccacaatttctcttagtgtgtgctttttggttgaaattgttgtttcttcctctgagttccaactttcacctcagccaaagacacaacaaaatggggtttcagaagataagggtgggcaaccccatcgtcgaaatggatggggatgaaatgacccgagtgatttggaaactgataaaagataagcttattttcccttatttggagctggatattaagtattttgaccttggccttcctcatcgcgatgccactaatgatagagttactattgaaagcgctgaagctacactcaagtataatgtagctatcaaatgtgctactataactccagatgaagctcgtgtcaaggagtttaacttaaaacaaatgtggagaagtccaaatgggacgatccgaaacattttaaatggtacagtttttagagagccaattatctgtaagaacattcctcgtcttgtttcaggatggacaaagccaatatgcattggaagacatgcttttggagaccaatatcgggcaactgatacagttataaaaggcccaggaaagctaaaattggtttttgcacccagtggaaatgaaggcattaaagagctagaggtctataactttactggtgctggaggcatagctttgtccatgtataatactgatgagtccattcgagcttttgctgaggcttcaatgaactttgcttaccagaagaaatggcctctctatcttagcactaaaaataccattttaaagaaatatgatggaagattcaaggacattttccaggaagtttttgacacccaatggaatcacaagttcaaagctgcagggatatggtatgaacaccgtcttatagatgatatggttgcttatgctctcaaaagtgatggaggttatgtatgggcctgcaagaattatgatggtgatgtgcagagtgatttcttagctcaaggatttggttcacttggcttgatgacgtcagtactggtttgcccagatgggaaaaccattgaagcagaggcagcccatggcactgttacccgtcattatcgggttcatcagaagggaggtgaaaccagcacaaacagtattgcttcaatttttgcctggtcgcgaggtcttgcacataggccaaaattggatggaaatgctagattgttggacttcacagagaaactggaagcagcttgcattggaacagttgaattgggaaagatgacaaaggatcttgcacttcttgttcatggacctaaggtttctagatcccagtatttgaatactgaagagttcattgatgccgtagccgaggagctgcgaacaagattatcttcacaatcgaagctgtaatgttcaaaatgagtgtgcccaataaatgttctccatttccttcatttttcctttttctttcttgaaggagggaaattctattgcttgagttaaacattttagagcaataaggtccccctaaattcagatgcatcacttattgcaggttgcttccttcagccataagaactcaacatttgaagaactcataccatgtaccacaaaatcaatactatcttttcattgccaaaacaacagtgctactttggaagtccttacaacaatattaaagacatgtaaaaaaaaaaa

SEQ ID NO: 137718 - protein, 416 aa, Glycine max; identical to SEQ ID NO: 122395

SEQ ID NO: 137719 - DNA, 1645 bp, Eucalyptus globulus
  CDS (161)..(1411)
ccgcgttgacacggctgcgagaagacgacagaagggggcagcactgttcaccgctgagctctcgtttcgccctgtccctatctccgtctcgctctctctctgcaaaagagctccctcgaatcgacctgcttcgacccttcctcgagcgcgggagagagcaatgggtttcgagaagatcaaggtcgagaaccccatcgtcgagatggacggggatgaaatgacccgagtgttctggaaatcaatcaaggataagcttatttttcccttcttggagttggatatcaagtacttcgaccttggtcttcctcatcgtgatgccactgatgacaaggttacaattgaaagcgcagaagcaactcttaaatacaatgtggccatcaaatgtgcaactattacaccagatgaagctcggatgaaggagtttactttgaagcaaatgtggaaaagtcccaatgggacgattaggaacatcttgaatggcactgtcttcagagagccaataatgtgcaaaaatattccccggcttgtcccagggtggtccaagccaatatgcattggaagacatgcttttggtgatcaatacaaagctactgatactgtcattaaaggagctgggaaacttaaacttgtctttgtgccagaaggcacagatgagaagactgagctagaagtgtataacttcacgggcgctggtggagttgcattgtccatgtacaacacagatgagtcaatccgttcttttgctgaggcttcaatgaacactgcttatcagaagaagtggccgctctatcttagcacaaagaataccatccttaaaaaatatgatggaagattcaaggatatattccaagaagtttatgaagccaactggaagtcaaagtttgaggctgctggaatctggtatgaacaccgtcttattgatgatatggtggcttatgcgctaaagagcgacggaggttatgtgtgggcatgcaagaactatgatggagatgtccagagtgatttcttagcccaagggtttggatcgcttggcttgatgacatctgtcttggtctgcccagacggaaaaactattgaagcagaagccgctcatggtacggttacccgccattatcgggtccatcagaaaggaggcgaaaccagcactaatagcattgcttctatatttgcttggtcacgagggcttgctcatagggccaagttggataacaatgccaaactccttgattttgccgagaaactagaagcagcttgtattggaactgttgagtctggcaagatgaccaaggatcttgcactcctcattcatggtcctaagtttactagggatcaatacctgaacaccgaagagtttattgatgctgtggcagttgaactcaaggcaaggctttcatgccaaagtctgctgtaggtgactggcggacaacatggggaaagcacttccgcctgtgattgtgatccggaagaagaaataaagggggatcgattcgggggagaatgaggtgaatcctgaatgagattgtttgttggggaggaattaaatgaaagtagttcgtatcattcatgtactcagatggatttgtgtttcaaatttgaattgccttgatcccccattaaaggagttttgagccccgtactgtttaac

SEQ ID NO: 137720 - protein, 416 aa, Eucalyptus globulus; identical to SEQ ID NO: 122397

SEQ ID NO: 137721 - DNA, 1233 bp, Gryllus firmus; identical to SEQ ID NO: 122400
  CDS (1)..(1233)

SEQ ID NO: 137722 - protein, 410 aa, Gryllus firmus; identical to SEQ ID NO: 122401

SEQ ID NO: 137723 - DNA, 1500 bp, Codonopsis lanceolata
  CDS (92)..(1342)
  misc_feature (38)..(38): n is a, g, c or t
gcccgactctttcgttcatctcacgtctctccgacagnttcgccggcggagatttttcacacactcttcactcgcactctcggcgatcgaaatggcgtttgagaagatcaaggttgcaaaccccatcgttgagatggatggagatgaaatgactcgtatcttctggcaatcgataaaggataagcttatttttccctttttggagcttgatataaagtactttgaccttggccttcctcaccgtgatgccaccgatgacaaagtcacggtagagagtgctgaagctactcttaagtacaatgttgcaatcaagtgcgcaaccattactccagatgaggctcgtatgaaggagtttaccctgaaaagtatgtggaaaagtccaaatggaacaattaggaatattttgaatggtacggtgttcagagaaccgattatttgcaagaacattcccaggcttatcccaggatggacaaagccaatatgtattggaaggcatgcttttggtgatcagtatcgagctactgatgcagtcatcaagggaccaggaaaattgaagttggtcttcgttccagaagggagcgaggaaaagactgagttggaggtttacaacttcactggtgctggaggggtagccttgtcaatgtacaacactgatgagtccatttttgcttttgcggaggcttcaatgaacactgcttatgagaagaagtggcctctttaccttagcacaaaaaatactattcttaagaaatacgatggaggattcaaggatatcttccaagaagtttatgaagccaattggaagtcaaagtttgaggctgctgggatatggtataaacaccgtctcattgatgatatggttgcctattgtcttaagagtgacggaggttatgtatgggcatgcaaaaactatgatggggatgtgcagagtgatatgttagcacaaggatttggctcccttggattgaggacatctgtcctggtgtgccctgatggtaagaccatagaagctgaggcagctcatggcactgttacacgtcattacagggtgcatcagaaaggaggggaaaccagcacgaacagcattgcgtcaatctttgcctggacccgaggacttgcccacagggcgaagttggatgacaatgctaggcttttggatttcactgagaaactggaagcagcctgtattggcactgtggaatcagggaagatgacaaaggatcttgcactcattctccatggatccaagctcagtagggagcactacctgaacaccgaagaattcattgatgccgtggcagatgagctgaaagcaagactccaaggaaaatcatcactataagcgaatggattttgcttacagtttgtgagaagatcaccggggcaattcccattagggtcggatagtttctgactttcacccagtggcagctgttttgagcttcttcattacttggtttcgatttaatacagttatgttgtagaaccttttgctaaata

SEQ ID NO: 137724 - protein, 416 aa, Codonopsis lanceolata; identical to SEQ ID NO: 122407

SEQ ID NO: 137725 - DNA, 1350 bp, Crassostrea gigas; identical to SEQ ID NO: 122408
  CDS (1)..(1350)
  misc_feature (657)..(657): n is a, g, c or t
  misc_feature (1010)..(1010): n is a, g, c or t

SEQ ID NO: 137726 - protein, 449 aa, Crassostrea gigas; identical to SEQ ID NO: 122409
  misc_feature (337)..(337): The Xaa at location 337 stands for Ala, Glu, Gly, or Val.

SEQ ID NO: 137727 - DNA, 1212 bp, Rhizobium leguminosarum bv; identical to SEQ ID NO: 122410
  CDS (1)..(1212): transl_table=11

SEQ ID NO: 137728 - protein, 403 aa, Rhizobium leguminosarum bv; identical to SEQ ID NO: 122411

SEQ ID NO: 137729 - DNA, 1564 bp, Pisum sativum
  CDS (79)..(1317)
aggatccgggtaccatggttctcacctaacatctcgttctccgcatcttcatcctcttctcttcttccgatcaccaccatggcattccagaaaatcaaagtcgccagtcccatcgttgagatggacggagatgaaatgacccgagttatctggaagtcaatcaaggataagctcatttttcctttcttggagttggacatcaagtactttgacctaggccttcctcatcgtgatcagactgatgataaagttacagttgaaagtgccgaagcaactctcaagtataatgttgcaatcaagtgtgcaactatcactccagatgaagctcgtgtcgaggagttcggcctgaagagcatgtggaggagtccaaatgggacaattagaaacattttgaatggaactgtcttcagagaaccaattatttgcaaaaatgtccctcgccttattcctggttggacaaagccaatatgtattggaaggcatgcttttggtgatcaatatagggccactgatgcagttattaaaggacctggaaagctgaagatggtgtttgttccagaaggcaaaggtgagaccactgatttggaggtttataacttcactggtgaaggaggtgttgcattggctatgtacaacactgatgagtctattcgttcttttgctgaggcatctatggcaactgctttagagaaaaaatggccactttatcttagcaccaaaaatacaattcttaagaaatatgatggaagattcaaggacatatttcaagaagtttacgaggcaagctggaaatcaaagtacgaggctgctggtatatggtatgagcatcgactcattgatgatatggtggcatatgcactcaagagtgaaggaggttatgtatgggcatgcaagaactatgatggagatgtccagagtgatttcttagctcaaggttttggatcgttgggtttgatgacatctgtattggtttgccctgatgggaagactattgaagcagaagcagcccatgggacagttacccgtcatttcagggttcatcaaaagggcggagaaaccagcacaaacggcatagcatccatctttgcttggacaagaggtctagcccatagggcaaagctagatgacaatgctaaactcttggaactcactgaaaagctagaggcagcttgtattggagcagtagaatctgggaagatgaccaaggatttggcacttattcttcatggatcccagcttaagagggagcattatttgaacacagaggaattcatcgatgctgtggcagccgagcttaaatcgaagatctctgcgtagatttgtgattttagatattagaaaagtgatgagattggagaggttcgcatgcactttcaaaagaaataagaaagaggattgaagcattggacttggctatttttctttccttcatttgtgtgttgggtcggatagcatgggttgtgcttccccccgtttagtttgaaattttgaattgggtacctttgaattttgacttacaaatttaaatggattttgttttgctatctctgctgaaaaaaaaaaa

SEQ ID NO: 137730 - protein, 412 aa, Pisum sativum; identical to SEQ ID NO: 122413

SEQ ID NO: 137731 - DNA, 1215 bp, Rhizobium meliloti; identical to SEQ ID NO: 122414
  CDS (1)..(1215): transl_table=11

SEQ ID NO: 137732 - protein, 404 aa, Rhizobium meliloti; identical to SEQ ID NO: 122415

SEQ ID NO: 137733 - DNA, 1722 bp, Nicotiana tabacum
  CDS (112)..(1524)
gcacggcgacaaagacaatagagagttgctcagagcagcaaaaactagcaactgattaaagcctacaaaagtgttatgcttaccacccgactcagactccggtgttccgccatggctagtgttgcttcttttatctcatcttcatcggcttcaacatcatccgcagttaccaaaaaccttcccttttccatcatttccaatcggcaactgttcaagaaccgtgtttatctcctccaccgaatccccaatgcttcaattcgatcgttcgcttccactacagcttcgtctaaaatccgcgttgaaaatcctattgtcgaaatggacggtgatgaaatgacgagggttatatggacaatgatcaaagagaagctaatatatccttatctagagttggatacgaagtattacgatttggggatattgaaccgtgatgccactgacgatcaagttactgttgaaagtgctgaggctactcttaagtataatgttgctgtgaaatgcgctactataacacctgatgagaccagagttaaggaatttgggctgaagtctatgtggagaagtcccaatgccacaatcagaaacattttaaatggtactgttttccgggagcctatactatgcaagaacgtccccagaattgttcctggttggaagaaacccatttgtattggtaggcatgcctttggtgaccagtatcgtgccacagatgcagttattaatggaccaggaaagctcaaaatggtttttgagccagaaaatggggaagcccctacggaactggatgtttatgattttaaaggtccaggtgttgcacttgccatgtacaatgttgaccagtcaattcgagcgtttgctgaatcatcaatgtcaatggcattttcgaagaaatggcctctttatttgagtacaaaaaatacaatactaaagaaatacgatggcaggtttaaggacatttttgaagaggtatatgaagagaagtggaagcaacagtttgaggaacactcgatatggtatgagcatagattgatagatgacatggtagcttatgcattaaaaagcgggggtggatatgtttgggcatgcaagaactatgatggagatgtccagagtgatctgctcgctcaaggatttggttctctgggcctcatgacctctgtattgttatcttctgatggcaagacattagaagctgaagcagctcatggcacagtaaccagacattttcggctgcatcaaaagggtcaagaaactagtacaaatagtgttgcttctatttttgcatgggcaaggggacttggacatagggcccagcttgatgggaaccaaaagttatctgaatttgttcacgccctggaagctgcttgcgttggcacaatagagtccgggaagatgactaaggatttagctatattggttcatggacccaaggtatcaagggaacactacttgaatactgaagaatttattgatcctgtagcacagaaacttcaagagaagctcggtgcctgcgcagttgtatgagctgaagcagatcatgagctgcaagtcatcacatatttttcgcttcctactcatacccttcacagtgaacataaatctatatgctgccaatggagattcgtttagacaagtttctgtaatcgcatagataggagataacatctctttgagtggttcatgctcgtgcgacttaagatctcaataaaatgccatttcgcc

SEQ ID NO: 137734 - protein, 470 aa, Nicotiana tabacum; identical to SEQ ID NO: 122417

SEQ ID NO: 137735 - DNA, 1794 bp, Lupinus albus
  CDS (58)..(1515)
acatagtaggcatcgatattgttgagctccctccactcgcaaccaaattaagttttgatgataagagcagcttttcgatcaagtgctatctccggcggcgcaaccaccaccactacgatgttttattcttgttcaaactttgtcattaaaaacccttatttcctctttacttcttcaacaactccgtcatccttgaaacacaaccttctttctttctccactgctccctttcatcgggtttcacttcgctgctatgcaacccaccctaacttccataggcttcaagtccttaatccaattgttgaaatggacggtgatgaaatgaccaggattatatggaagatgataaaggataaacttatatttccgtacctggatttaaacataaagtattttgatttgggggttgagaaccgcgatgctaccgatgacagagttactgtcgaaagtgctgaagccactctcaagtacaatgttgctgtgaaatgtgcaacaataactcctgatgagacccgagtcaaagaatttggattgaagtctatgtggagaagccccaatgggacaatcaggaatattttaaatggtactgttttccgtgaacccataatatgccgcaacatacccagaattgttcctgggtggaaaaaacccatatgtattggcagacatgcttttggtgatcagtatcgtgccactgatgcaataattaaaggaccagggaagctgaagttggtatttgtcccagaagatggtgaggctccaacggagcttgatgtttatgatttcaaaggcccaggtgtagcgcttgctatgtataatattgacgagtcaattcgagcttttgcggaatcatcaatgtcattggcatttgcaaagaaatggccactttacttgagcaccaaaaacacaattctcaagaaatatgacggcagatttaaagacatattccaggaggtatatgaagaaaggtggaggcaaaattttgaagaacactcaatatggtatgagcataggctaattgatgacatggtggcatatgcggtcaagagtgaaggtggatatgtttgggcttgcaagaattatgatggtgatgtccaaagtgatttactagctcaaggatttggctcattgggtctcatgacttctgtactgttatcttctgatggtaagacattagaagctgaagcagctcatggaaccgtaactcgacattttcggcttcatcaaaaggggcaggaaactagtacaaacagtattgcttccatatttgcatggacgcgaggactggaacatagggccaagctggataataatgaaaaactaagggatttcacatataagttggaggctgcatgtgttgagacagtggagtctggaaagatgaccaaagatcttgcacttctcattcacggacctaaggtatcaagggaatattacttgaacactgaggaatttattgatgctgtggctcataatcttaagagaaagctccaagagactcctgcattggtctgagtagtagcttttgataagtttgaaaaggttgacactggttttgatagatgcccctattatttaaccattcataatgatgctattttgggatgatataaaatagttttgatgtgttgaacaaaatgtaggtgtgggaatatgaatttatgaatttggttttttatgaataattcgttgatagtgactgtaacatggagatatgcaacaatggcattaacaataagcatgttaacaaatacctactagccctcaagcaaattgaatagaattggtgcatgt

SEQ ID NO: 137736 - protein, 485 aa, Lupinus albus; identical to SEQ ID NO: 122421

SEQ ID NO: 137737 - DNA, 1583 bp, Lupinus albus
  CDS (43)..(1281)
cctcatatcatttctgtgttctcatcatctccgatcgaaaccatggcattccagaagatcaacgtcgccaaccccatcgtcgaaatggacggagatgaaatgactcgagttatctggaaatcaatcaaggacaagctcattttgcccttcttggagttggacatcaagtattatgaccttggccttccttaccgtgatgagacagatgacaaagtcacagttgaaagtgctgaagcaactctgaagtacaatgtagcaatcaagtgtgcaactattactccagatgaagcccgtgtgaaggagtttggcctgaagcaaatgtggaagagtccaaatgggacaatcaggaatattttgaacggaactgttttcagagaaccaattctttgcaaaaacatcccccgccttgttcctggttggaacaagccaatatgtattggaagacatgcttttggtgatcaatataaggctactgatgcagtgattaaaggagctggaaaactgaaactggtgtttgtcccagaaggccaaagtgaggcgactgaattagaggtttataatttcactggtgaaggaggtgttgcacaggcgatgtataacactgatgagtctatccgtgcttttgccgatgcttctatgacaactgcttatgagaaaaaatggccactttatcttagcaccaagaatacaattcttaagaaatatgatggaagattcaaggacatctttcaagaagtttatgaagcaagctggaaatcaaactttgaggctgctggtatatggtatgagcatcggctcattgatgatatggtggcatacgcagtcaagagtgatggaggttatgtatgggcatgcaaaaactatgatggagatgttcagagtgatttcttagctcaaggttttggatcactgggcttgatgacatctgtattggtttgccctgatggaaagaccatagaagcagaagcagcccatggcacagttacccgtcattttagggttcatcagaagggaggggaaaccagcacaaacagcatagcatccatctttgcttggagtagggggctagcccacagggcaaaacttgatgacaatgctaaactcttggacttcactaaaaaactagaggaagcttgcattggagcagtagagtctggaaagatgaccaaggatttggcactcattattcatggatccaaactttcaagggagcattatctgaacacagaggagttcattgatgccgtggcaaacgagctcaaagcaaagatttctgcttgattttagatagatgagaaaagattagaatgaaaagagatgtttcatgtggtcgtaaactatcttctgaagaaataagaaagcattggtggttggagccttttccttctttgctggttgggtctaagaatgcttcgccattttatttcaactgatttgtcttatgtaattttgaacgatttactttggagtttaattgggcttttcattgtttttgctgattttactttgcatgtttcacttattgttctcaagagttttttattaactcttacctaattacttctaagctttaatttgttact

SEQ ID NO: 137738 - protein, 412 aa, Lupinus albus; identical to SEQ ID NO: 122423

SEQ ID NO: 137739 - DNA, 1627 bp, Lupinus albus
  CDS (79)..(1317)
aagtgtcgcggcgcctctacatacgtgtttgtctcatttctcaggtctcacctaacttcctcatttctcatcggagccatggcattccagaagatcaacgtcgccaatcccatcgttgagatggacggagatgaaatgactcgagttatctggaaatcaatcaaggataagctcatttttcccttcttggagttggacatcaagtattatgaccttggccttccttaccgtgacgagacagatgataaagtcactgttgaaagtgctgaagcaactctgaagtataatgtagcaatcaagtgtgcaactattactccagatgagggccgtgtgaaggaatttggcctgaagcaaatgtggaggagtccaaatgggacaattaggaacattttgaatggaactgttttcagagaaccaattctttgcaaaaacatcccccgccttcttcctggctggaacaagccaatatgtattggaagacatgcttttggtgatcaatatcgggcgactgactcagtgattaaaggagctggaaaactaaaactggtgtttgtcccagaaggccaaagtgaggcgactgaattagaagtttataatttcactggtgaaggaggtgttgcattggctatgtataacaccgacgagtctatccgtgcttttgctgaggcttctatgacaactgcttatgagaaaaaatggccactttatcttagcaccaaaaatacaattctgaagaaatatgatggaagattcaaggacatctttcaagaagtttatgaagcaagctggaaatcgaagtttgaggctgctggtatatggtatgaacatcggctcatcgatgatatggtggcatacgcagtcaaaagtgatggaggttatgtatgggcatgcaaaaactatgatggagatgtccagagtgatttcttagcacaaggttttggttcactgggcttgatgacatctgtattggtttgccctgatgggaaaactatagaatcagaagcagcccatggcacagttacccgtcattttagggttcatcagaagggaggggaaaccagcacaaacagcatagcatccatctttgcttggagtaggggtctagcccacagggcaaaacttgatgacaatgctaaactcttggatttcactcaaaaactagaggcagcttgcattggagcagtagagtctgggaagatgaccaaggatctggcactcattcttcatggatccaagctttcaagggagcactatctgaacacagaggagttcattgatgctgtggcaaacgagctcaaagcaaggctttctgcttaggcttgattttagataaatgagaaaggattagagtgaaaggagatctctccagtgttgttatactctcttctgaagaaataagaaagcattggttggcgcatttttcttgtttgttgagttagtctgggaatgcagcggttggctgcttggctattttgcttgaactgatttgtcttgtaattttgagttgaattacttcagagtttaattgggctttgctatgtgttttttgctgattttactttgcatgcttgacatattattctgcaaataacacatgcgtacttaattttggggatttttctccgac

SEQ ID NO: 137740 - protein, 412 aa, Lupinus albus; identical to SEQ ID NO: 122425

SEQ ID NO: 137741 - DNA, 1551 bp, Cucumis sativus
  CDS (62)..(1294)
ctgtactctccattttcgatcttctctctgagtgtttccatcaggagcaagaccacgaaccatggctttccagaagatcaaggtcgccaatcccatcgttgagatggacggagatgaaatgactcgagttatctgggagtcaattaagaataagcttattttcccatttttggaattggacatcaagtattttgaccttggccttccacaccgtgatgccacagatgataaagttacaattgaaagtgcagaagctactttaaagtacaatgtagcaatcaaatgtgcaacaattactccagatgaggcacgtgttaaggaatttggcttgaagcagatgtggagaagtccaaatggaacaatcaggaatattctgaatggaactgtcttcagagaaccgattctttgcaaaaatgttcctcgccttgtaccaggttggacgaagcctatctgtattggaagacatgcttttggtgatcaatacagagctactgatacagtcatcagaggacctgggaaattgaaattagtttttgaggggcaggagacgcaagagatagaggttttcaatttcactggtgctggaggagttgcgttagccatgtataacactgatgagtccatccgatcttttgctgaggcatcaatggccactgcttatgagaagaaatggcccctttaccttagcacaaaaaatactattctaaagaaatacgatggaagattcaaggatatattccaagaagtctacgaatctcagtggaaatcaaagtttgaggctgctggcatatggtatgaacaccgtctcatcgatgatatggtggcttatgcccttaagagtgaaggaggttatgtctgggcatgcaagaactatgatggagatgttcagagtgatttcttagctcaaggatttggatctcttggcttgatgacttctgtattggtttgtcctgatggaaaaacaattgaagcagaagcagctcatggcactgttacacgacattttagggttcatcaaaaaggtggtgaaaccagcacaaacagcatagcatccatctttgcttggtctcgtggccttgctcacagggctaaactagatgacaatgctagtctcttagagttcaccgagaaactagaattggcttatatcgatactgtggaatctggaaagatgaccaaggatcttgctcttatccttcatggatccaagctttctcgtgaccaatatctgaatactgaggagttcattgatgctgttgctgaggaactaaaatccagactcctcaaggcatagtggtattttaaatgttcaatggtcaataattgttaagaatatctttctcatttcatcttctttcctaaggtacatagtttggtgggatattgttaatgcatttggcttctaactatcaactcaactaggctatagtcatcttgaggttgtttaacagttacttcttttacaatcatttatccaatctcttgtgcactgtattcggccattttaggtaattgcactaccattttgttggtaaaaaaaaaaaaaaaaaa

SEQ ID NO: 137742 - protein, 410 aa, Cucumis sativus; identical to SEQ ID NO: 122429

SEQ ID NO: 137743 - DNA, 1610 bp, Arabidopsis thaliana
  CDS (165)..(1397)
ggcacgagtttttcacctacttcatcactcatcaccagcttcgcatcttcttctccggcttgatcttctctcgtttctagatctccgacgatcggaatatcaaatccgatcgattaattctgtcaatcacacaaaaaccgaaaaccgaaaacccaaaaaaaaccatggcgtttgagaagatcaaggtggcaaatcccatcgtcgagatggatggtgatgaaatgaccagggttatttggaagtctatcaaggataagcttattactccttttgtggagttggatatcaagtacttcgaccttggtcttcctcaccgtgatgctacggatgacaaagttactattgaaagtgctgaagctactaagaagtacaatgtggcgatcaagtgtgccaccatcactccagatgaaggccgtgtcacggaatttggcttgaagcagatgtggagaagtccaaatgggaccatcaggaatatcctgaatggaactgtatttagagagccaattatctgcaaaaatgttcccaagcttgtcccaggctggacaaagcccatctgcattggaaggcatgcttttggtgatcagtaccgtgccactgatgctgtaatcaagggaccaggaaaactgactatgacctttgagggaaaagatgggaaaactgaaaccgaagtctttacatttactggtgaaggtggtgttgctatggtaatgtacaacactgatgagtccatccgtgcttttgctgatgcatcgatgaacactgcttatgagaaaaagtggccactttaccttagcacaaagaataccattcttaagaaatacgatggcagattcaaagacatcttccaagaagtctatgaagccagctggaagtcgaagtatgatgctgctggaatctggtatgaacaccgtctcattgatgatatggtggcctacgctcttaagagtgagggaggctatgtttgggcatgcaaaaactatgatggtgatgtccaaagtgatttgttggcacaaggattcgggtcacttggattgatgacatctgttctggtctgcccagatggaaagtcgattgaagctgaagcggcccatggaactgtcacccgtcacttcagggttcatcagaaaggtggtgagaccagcacaaacagcatagcctctatttttgcttggactcgtggacttgcacacagggctaagttagatgacaacgcaaaactcttggatttcactgagaagctggaagccgcttgtgttgggacagtggagtcagggaaaatgaccaaagatcttgcactcatcattcacggctcaaagctttcgagggacacgtacctgaacacagaggagttcatcgatgcagtcgctgctgagctcaaagaaagactcaatgcttaagaaactgaagaaattgggtaaaattcgaacgtctcagttcctaagtgtcttatctggttggtggggttggttgggatcgggaggaataaacttttgtggagaggagtgttgagaacgatttgtttcctctcttataatatttccaaaatattgcgacatttttccatttttattcagatctcgaattttatgtttaaaaaaaaaaaaaaaaaa

SEQ ID NO: 137744 - protein, 410 aa, Arabidopsis thaliana; identical to SEQ ID NO: 122433

SEQ ID NO: 137745 - DNA, 1561 bp, Prunus persica
  CDS (1)..(1245)
atggctttccagaagatcaaggtggccaaccccatcgtggagatggacggagatgaaatgacgcgagttttctggaaatccataaaggataagcttattttaccctttttggaattggacatcaagtactttgaccttggtcttcctcatcgtgatgccactgatgataaagttactgttgaaagtgcagaggctactcttaagtacaatgtagcaatcaaatgtgcaactatcactccagatgaaggtcgtgttaaggagtttaacttgaagagtatgtggaggagtcccaatggcactattaggaatattttgaatggtactgttttcagagaaccaattctttgcaaaaacatccctcgccttatcccaggctggacaaagccaatatgcattggaagacatgctttcggtgatcagtatcgagcaactgatgctgtcattaaaggacctgggaaactgaaattggtgtttgtgccagacggaaaggatgagaaaacagaactagaggtgtacaacttcacaggtgaggggggagtagcattggccatgtacaacactgatgagtccatccgtgcttttgcagaggcttccatgaccactgcttatgagaaaaagtggcctctttatcttagcacaaagaacactattcttaagaagtatgatggaagattcaaggacatatttcaagaagtttatgaagccaagtggaagtcacagtatgaggctgctggcatatggtacgagcaccgtctcattgatgatatggtggcttatgcacttaaaagtgatggtgggtatgtttgggcatgcaagaattatgatggagatgtgcagagtgatttcttagctcaagggtttggctctcttggattgatgacatcagtactggtgtgcccagatggaaagactatagaagcagaagctgcccacggtacagttactcggcattacagggttcaccagaaaggaggtgaaaccagtacaaacagcatagcttctatctttgcttggacaagagggcttgcacacagggcaaagttggatgacaatgcaaagcttttggatttcactcagaaactggaagaagcttgcattggaactgtggaatctgggaaaatgaccaaggatcttgcactcattattcatggacctaagcttgctaggaaccactacttgaatacggaagagttcattgaagctgtggcagaggaactcagagcaaggctttctttgaaagaatagttgtacgtgaggggtttgcagacttgactctatgcattgggatagacaactgtggacttgtccttttgtactcccgaaagaaataatggaaggcggaatctttcccctctggtggttagagatgttgactcatctgtttttagtgtattagtttcttgtgcacaatttaattgctcgactcttactgatttgaatgttctttcttcatcagtttgcttccgcaagcaagtttgacctttttcatggctaagccaattttagtgatttccagcaagaaatcaagttttagaaaaaaaaaaaaaaagggggggcccgg

SEQ ID NO: 137746 - protein, 414 aa, Prunus persica; identical to SEQ ID NO: 122435

SEQ ID NO: 137747 - DNA, 1554 bp, Solanum tuberosum
  CDS (61)..(1473)
cttttttaagccatctaaagtggtatgctggccgtccgactcagactccggtgttcctccatggccggcgttgcttcttttgtctcatcttcatcggcttctgcatcatctatagctagtaaaaaactctattttcaagtcaattccaatcggcagctcttcaatagcagagtatctctcactacgcgaatccctaatgcctcaattcggtgcttcgcttcttcctctggtccgactagcaaaattcgcgttcaaaatcccatcgtcgaaatggacggtgatgaaatgacgagggttatatggaaaatgatcaaagacaagctaatatatccttatctagagttggatacaaagtattatgatttaggtatattgaaccgtgatgccactgatgaccaagttactgttgaaagtgctgaggcaaccctgaagtacaatgttgctgtgaaatgcgctactataacacctgatgagaccagagtcaaggaatttgggctgaagtctatgtggaaaagtcccaatggcacaatcagaaacattttaaacggtactgttttccgggagcctatactatgcacgaacattcccaggattgttcctggttggaagaaacccatttgtattggtaggcatgcttttggtgatcagtatcgtgccacagatcgaattattaatgggcccggaaagctcaaaatggtttttgtgccagaaaatggggaatcccctatggagctggatgtttatgattttaaaggtccgggtattgcacttgccatgtacaatgttgaccagtcaattcgagcgtttgctgaatcatcaatgtcaatggcattttcaaagaaatggcctctttacttgagtacaaaaaacacaattttaaagaaatacgatggaaggtttaaggacatttttcaagaggtatacgaagagaagtggaagcaacagtttgaggaacactctatatggtatgagcatagactgatagatgacatggtagcttatgcattaaaaagtgagggtggatatgtttgggcatgcaagaactatgatggagatgtccagagtgatttgctcgctcaaggatttggttctctgggcctcatgacttctatattgttatcttctgatggcaagacattagaagctgaagcagctcacggcactgtaacaatacattttcggctgcatcaaaagggtcaagaaactagtacaaacagtgttgcttccatttttgcatggacaaagggacttggacatagggctcagcttgatgggaatcaaaagttgttggaatttgttcacacccttgaagcttcttgcattgggacaatagaatccgggaagatgactaacttagctatattagctcatggatccaaggtgtcaagagaattctacttgaacactgaagagtttattgatgctgtagcacagaaacttcaagagaagcttcatgcctcggtgcctatttaagttatcctgaattatgtagtgagaacatgtatgagctgaagaagatcatgagcagcatccttttcacagtgaagcggccgc

SEQ ID NO: 137748 - protein, 470 aa, Solanum tuberosum; identical to SEQ ID NO: 122443

SEQ ID NO: 137749 - DNA, 1708 bp, Citrus limon
  CDS (155)..(1399)
  misc_feature (1533)..(1533): n is a, g, c or t
cgaaagcagcagcatttcaattttcatagtattattattattattattgcttcttgctgcttctttttgtccacacgacctcggcacctccgctctgaccctattatctgactctctctagttgtgaatcaaccgaaactgaacaaagaagaaaatggcttttcagaagatcaaggtcgccaatcccatcgttgaaatggacggagatgaaatgactcgagttttctggaaatcgattaaggataagcttattttcccttttctggagttggacataaagtacttcgaccttggccttccgaatcgtgatgcaactgatgacaaagttaccgttgaaagtgcagaagccactctcaagtacaatgtagcgatcaagtgtgctactattactccagatgaagctcgtgttaaggaatttgtcttgaaacagatgtggaagagtccaaatgggacaatcaggaatattttgaatggcactgttttcagagaaccaatcatttgcaaaaatgtccctcggcttattccaggctggacaaagcccatatgcattggcaggcatgcttttggtgatcaatatcgagcaactgatacagttattcaaggacctggcaaacttaaattggtgtttgtaccagagggaaaagatgagaagacagagttagaggtttacaactttacgggtgagggtggagttgcattgtccatgtataacactgatgagtccatccgaagttttgctgaggcttctatgaacactgcctatcaaaaaaagtggccactctatcttagtacaaaaaacactatccttaaaaattatgatggaaaattcaaagacatatttcaagaggtttatgaggcaaactggaagtcaaagtttgaagctgctggcatatggtatgaacatcgtctcattgatgatatggtagcttatgctctcaaaagtgaaggaggttacgtgtgggcttgcaaagattatgatggaaatgtccaaagtgatttcctagctcaagggtttggatctcttggattgatgacatctgtactggtatgccctgatgggaaaacaattgaagccgaagcagcccatggaacagtcacccgacactacagagttcatcagaaaggtggtgaaactagcacaaacagcatagcctccatctttgcttggtcacgagggcttgcacatagggcgaagttggacaacaatgctaggctgttggattttactgagaaactagaagctgcatgtgttggcactgttgaatctgggaagatgaccaaggatcttgcacttattatccatggatctaagatgactagggaacactatctgaatactgaagagttcattgatgctgtggccgacgatttaagagcaagactctctggcaaagcatgattttatgctacacattcaaaggtaaagacttggggaagcttccctttggttatttttttcatactatgctgagaagaaataattgaagaggggaaaattggggattgggatttggtttttttttaattcctacnatagactgctttcctgttgatcgacaaactttcattttcatgcaagcaaatgttttgaacatggcttgttataaacaaaactattgctgccaaatttacgttcatggtttatttgagctgcacctctgttgcccaaaaaaaaaaaaaaaaaaaaaaaaaaaaaaaaaaaaaaaaa

SEQ ID NO: 137750 - protein, 414 aa, Citrus limon; identical to SEQ ID NO: 122445

SEQ ID NO: 137751 - DNA, 1488 bp, Daucus carota
  CDS (91)..(1341)
agacaaactcagttgtaaattccgccagtttgattacttgtttgtaaaatataattttgtgatcctgggttttgcaaattggaagtaaagatggctatgcagaagatcaaagtgttgaatccaatcgttgaaatggatggtgatgaaatgacaagggttttttggaaatctattaaggagaaacttatatttccatttctggatttagacataaagtattttgatcttggcctccctaatcgtgatgccaccgatgatagagttacaattgaaagtgcagaagccactcttaagtacaatgtagcaattaagtgtgcaactatcacaccagatgaaactcgtctcaaggagttcaacttaaagcagatgtggaagagtccgaacgggactattcgtaacatattaaatggaactgttttccgcgaaccaatcatttgcaaaaatataccgcgacttgtccaaggctggaataagccaatatgcattggcaggcatgcttttggagatcaatatcgagctactgatctagttgttcaaggacctggaaaactcaaaatggtgtttgtaccagatgggcaaagtgagaaaacagagttagaggttttcaactttactggcgctggaggagtagctctttcaatgtacaacactgacgagtccattcatgcttttgctgaggcttctatgaacacagcttaccaaaaaagatggccactatatcttagcactaagaatactatccttaagaaatacgatggaagatttaaggatattttccaagaagtttatgaaaaagagtggaagtcaaagtttgaatctgtaggaatatggtatgagcatcgcttaattgatgatatggttgcttatgctcttaagagcgatggaggttatgtatgggcatgcaaaaactatgatggagatgtccaaagtgactttttagcccaaggattcggatctcttggtttgatgacatctgtactggtatgcccggatggaaagaccattgaagctgaagcagcccatggcacagttactcgtcattatcgtgtccatcaaaaaggaggtgaaactagcactaacagcatagcttcaatctttgcttggtctcgagggctagctcatagagcaaaattagatgacaatgccctcctcctggatttcactgagaaattggaagcagcttgcattggaactgttgaacgcggaaagatgaccaaggaccttgcaattcttctctatgggtctagggtaactaaggctcattatttgaacaccgagggatttatcgatgctgttgctgcagaactgagatcaagactatataagaaatcaaagttataacacatgtgtgttctctatgagatgtcagtgcttgacactgttttttccaatgtatgcaacatttttatttgtgaccatccttataaaataaattcatgtatagcaacttcgatccaaatactcattaatattattaaatcaatgctt

SEQ ID NO: 137752 - protein, 416 aa, Daucus carota; identical to SEQ ID NO: 122447

SEQ ID NO: 137753 - DNA, 1512 bp, Daucus carota
  CDS (93)..(1331)
ggcgtctctcactaaaacccttcttcactatttttctcttcacatctgagctgagctgagtcgagtccgagtcgagatcatcatcatcagaaatggcgtttcagaagatcaaggtcgcgaatcccatcgtcgaaatggacggagatgaaatgactcgtgtattctggaaatctatcaaggacaagcttatatttcccttcgttgagctggatataaaatactttgaccttggccttcctcaccgtgatgcaactgatgataaagttactgttgaaagtgcagaggctaccctcaagtataatgtagctatcaaatgtgcaacaattaccccagatgaagctcgtgtgaaggagtttggcttgaaacagatgtggaagagtccaaatgggacaattagaaatattttaaacggcacggtatttagggaaccaattatatgcaaaaatatcccaaagctcatccctgggtggacaaagccaatatgcattggaagacatgcttttggcgatcagtaccgcgcaacagatgcagttatccaaggaccaggaaagcttaagttggtttttgtaccagaaggtaaagaagagaagacagagttagaagtttacaacttcactggtgctggaggtgttgctttgtcgatgtacaacactgatgagtctattcgttcttttgctgaagcttcaatggccacagcttatgaaaagaagtggccactttatcttagcacaaaaaatactattctgaagaaatatgatggaagatttaaggacatattccaagaagtttatgaagccagctggaaatcgaagtatgatgctgcagggatatggtacgagcaccgtcttattgatgatatggttgcatatgctcttaaaagtgatggaggttatgtctgggcatgcaaaaattatgatggggatgtccaaagtgatttccttgctcaaggttttggatctctggggttgatgacatcagtcctggtatgccctgatggaaagaccatagaagctgaagcagcccatggcactgttacccggcattacagggttcatcagaagggtggagagaccagcacaaacagcatagcatcaatctttgcatggtctcgaggccttgctcacagggcaaagctggatgataatgctgccctcttgagttttgctgaaaagcttgaggctgcttgtgttggtactgtggagtctgggaagatgactaaggatcttgctctcatactacatggatccaaactcagcagggaacactatcttaacactgaagagttcattgatgcagtagcaagtgatttgaaagcaagactcgccaactaagtttaaatgccttgaatgaaatgaaagttggaattattggggagttcagaattaagaaaaaacaacaataagaaaggcagttgctgcattattttgatagtgatgtttgcaatttcttttgagaatatttgtaacttttgtttgaattgcttacctatgatgtgactggaagagttaaatt

SEQ ID NO: 137754 - protein, 412 aa, Daucus carota; identical to SEQ ID NO: 122449

SEQ ID NO: 137755 - DNA, 1600 bp, Candida tropicalis
  CDS (201)..(1493): transl_table=12
tctcctgtatcggggaatcacaaaagaaagttcgcggcagagcgttgactaattcctcaaaaattttccactttttcttcgctttatattttgccgattaggaatgaatttttttttttgagttttcgatcaagtagttctccaggaataacacctccgcccataacacttcctattccgcataacaactattccccagaatgatcagagctagtgctatccaacgtaccgcaatgttgctgagacaattgcgcgggttttcgaccagtgctaccttggccgataagatcaaggtcaagaacccaattgttgaattggatggtgacgaaatgacccgtatcatttggcaaaagattaaagaccagttgatcttgccttaccttgacgtcgacttgaagtactatgacttgggtatcgaatctcgtgatgccacagacgatcaaatcaccattgacgccgctaacgctatcaaagaatacggtgttggtgtcaagtgtgcaaccatcaccccagacgaagcaagagtcaaggaattccacttgaagaagatgtggctttctccaaacggtaccattagaaacattctcggtggtactgtcttcagagaatctatcatcatcccatgtatcccaagattgattcccggttgggaaaagccaattgtcatcggtagacacgctttcggcgatcaatacaaggctactgatttggttatcaacgagccaggtagattggaattgagattcactccagccagcggcggcgaagcccagacccaaaaggtttacgactacactggtccaggtgtcggtttggccatgtacaacaccgacgagtccattactggattcgctcatgcttccttcaagatggctttggctaaaggcttgccattgtacatgtccaccaagaacaccatcttgaagaaatacgacggtagattcaaggacatttttcaacagatttacgaacaagattatgctgctgaattcgaaaaacagggcttgtggtacgaacacagattgattgacgacatggttgcccagatgatcaagtccaaaggtggatttgtcatggctttgaagaactacgatggtgacgtgcaatccgatatcgtcgctcaaggttttggttctttgggtttgatgacttctgccttgatgactccagatggtaaggcttatgaagccgaagctgctcacggtaccgtcaccagacactacagacaacaccaacaaggtaaagagacttccaccaactcaattgcttctatctttgcctggaccagaggtttagctcaaagaggtaagttggacgaaactccagacgtggttgactttgccagcaagctcgaacaagctaccattgacactgttgaagttgaccgtataatgaccaaggacttggctttggctatgggcaaaactgatagatctgcatacgtcaccaccactgaatttttggacgctgttgctgacagattgaagaagtaaagtgcaacgtatatatatttgaatacacttcaatgcaagataaactcataaatttatgtacttttcgtttcccgttcccgcgcttctttatctaggtgttcccacaa

SEQ ID NO: 137756 - protein, 430 aa, Candida tropicalis; identical to SEQ ID NO: 122451

SEQ ID NO: 137757 - DNA, 1817 bp, Candida tropicalis
  CDS (241)..(1476): transl_table=12
gtataaatgtaataaatattagtggctcttgggttaaaaaaaatttgcatacttagcagcatccacccaccacccgctacccaccaaaacggagaaaaactttatatataaatactccaccaatccccccatttttatattccacttgcattccccccaaaaagaggttggatctactttttcatcttttttacttcctacttatctataccttcggagttaatacttaatctacaaaccatgggcgaaattcagaaaataacagtcaagaacccaatcgtcgaaatggacggtgacgaaatgacccgtatcatctggcaattcatcaaagacaagttgatcttgccttacttgaatgtcgacttgaaatactacgacttgggcattgagtacagagacaagaccgacgacaaggtcaccaccgatgctgctgaagccatcttgcaatatggtgtcggtgtcaagtgtgccaccatcaccccagatgaagccagagttaaagaattcaacttgaagaagatgtggctctctccaaacggtacattgagaaacgtcattggcggtactgtctttagagaaccaattgtcattgacaacatcccaagaattgtgcctagctgggaaaaaccaatcatcattggtagacacgctttcggcgaccaatacaaggccaccgatgtggttatcccagctgccggtgacttgaaattggtgttcaagccaaaagacggcggcgaagtacaagaattcccagtctaccagttcgacggtccaggtgtcgccttgagcatgtacaacaccgacgcttcaattactgatttcgctgaaagctccttccaattagccattgagcgtaaattgaacttgttttcttccaccaaaaacaccatcttgaagaaatacgacgggaaattcaaagacatattcgaaggcttgtacgccagcaaatacaagaccaagatggacgaattgggcatctggtacgagcacagattgattgacgatatggttgcgcagatgttgaagtctaaaggtggttacatcatcgccatgaaaaactacgatggtgatgtccaatccgacattgtcgcacaaggtttcggttccttgggcttgatgacctctgttttagttaccccagacggcaaggcttttgagtccgaagctgcccacggtactgtcactagacattatagacaacaccaacaaggcaaagagacctccaccaactccattgcctccatctacgcctggaccagagggttgatccaaagaggtaagttggatgacactccggaagttgtcaagtttgctgaagagttggaaaaggctgtcatcgagactgtctccaaggacaacatcatgactaaagacttggccttgactcagggtaagaccgacagatcttcgtatgtcacgactgaagaattcattgatggtgttgctaatagattgaacaaaaacttgggctactagagtgtaggtaaatgaatggtttctgttttatagttcttctgattatttatttattgtaactcctagtgaatgtacatgtataattcattgtgtgggagtggaaggatccttgcaaagggtggtggttgctgccaaagcccatgccatctaggggatgcgatcaaatcttgcgtcgattggtctcaagcagccagggttaaaaagcttttttttctctcctgcaggcagcgcgcacgcgttgcaaaaaacaaactctctttgttctgtgcttctttgtttgtggtttgctcgtttccatcgtttatcgtttagccatcaattttcacggatttctttttttt

SEQ ID NO: 137758 - protein, 411 aa, Candida tropicalis; identical to SEQ ID NO: 122453

SEQ ID NO: 137759 - DNA, 1569 bp, Solanum tuberosum
  CDS (69)..(1319)
ttttcttccaccaacttttcttcattcggctgagatttctctgcttaatttttctctcaatctgcaaaatggcgtttcagaaaatcactgtgcaaaaccccatcgttgagatggacggagatgaaatgacacgagttatttggaaatctatcaaggataagctcatccttccctttctggaattggacataaaatactttagccttggccttccccaccgtgatgccacagatgataaggttacagttgaaagtgcggaagccactcagaagtacaacgtagctatcaagtgtgcaaccatcaccccagatgaggcccgtgtaaaggagtttaacttgaaatccatgtggaggagcccaaatgggacaatcagaaacatcttaaatggaactgtctttagagaaccaattatgtgcaaaaatatccccagacttgtcccaggttggactaaaccaatttgcattggtagacatgcttttggagatcaataccgagctactgatacagttattaaaggagcgggaaaactcaaattggtgtttgtgccagaaggatcagacgagaagactgagtttgaagtttacaactttactggtgctggtggagtagctttatccatgtacaacacagacgagtctgttcgttcatttgctgaggcttcaatgaacatggcattccaaaagaaatggccactctatcttagtacaaagaataccattcttaagaaatatgatgggaggttcaaggatatcttccaagaagtttatgaagcaaattggaagtccaagtacgaggaagccggaatctggtacgaacaccgtcttatcgacgatatggttgcttatgctttaaagagtgaaggtggttacgtatgggcttgcaagaactacgatggggatgttcagagtgatttcttagcacaaggttttggatcccttgggttgatgacttctgtcctggtgtgtcctgatggcaagaccattgaggctgaagcagcccatggaactgttacccgccactacagggttcaccagaaaggaggtgaaaccagcacaaacagcattgcctctatctttgcctggactcgtggacttgcacacagggcaacattggacaacaacgaaaggctcttggattttactgagaaactagaggcagcatgcattggtgcagtggaatctggaaagatgacgaaagatcttgcactcatcatcatccatggatccaagctttcacgagagcattatctgaacacggaagagttcattgacgctgttgccgatgagctcaaagcaagacttctgaaagcaaaggcctaaatgtgtgaaggcaagtctttcttcctcaggcagtttgaggcatattgaattgaagagaaataaaaggagtaagcctgttggatatcaaattcaagaggtttttatcttttggttgaggattattctgcagacattatatttgaaccatttaaatctgaattcctattgctgatgttgctgcaagttatttgccaatttgtagttgtacacatagcttattgttgcctttttatatcaatttgcttaaaaa

SEQ ID NO: 137760 - protein, 416 aa, Solanum tuberosum; identical to SEQ ID NO: 122455

SEQ ID NO: 137761 - DNA, 1560 bp, Glycine max
  CDS (87)..(1328)
cagcaattcacactggtctttgcttctcgttactcatttctcacctaactttctattcttctcagtctcagatcagaaccttagccatggcagcgttccagaagatcaaggtcgccaaccccatcgtcgagatggacggagatgaaatgactagggttatctggaagtcaatcaaggacaagctcattttgcccttcttggagttggacatcaagtattatgacttaggccttccttaccgtgatgagaccgatgataaagttacaattgaaagtgcggaagcaactctcaagtataatgtggcaattaagtgcgcaactattactccagatgaagctcgtgtgaaggagtttggtctgaagtcaatgtggaagagtccaaatgggacaattaggaacattttgaatggaactgtcttcagagaaccaattctttgcaaaaacattccccgccttgttcctggttggacaaaggcaatatgcattggaagacatgcgtttggtgatcaatatcgggcgactgacacagtaattaaaggagctggaaagctgaagctggtgtttgttccagaaggccagggtgaggagactgaattcgaggtttttaacttcactggtgaagggggtgtttcattggctatgtacaatactgatgagtctattcgttcttttgctgaggcctctatggcaactgctttagagaaaaagtggccactttatcttagcaccaaaaatacaattctgaagaaatatgatggaagattcaaggacatatttcaagaagtttatgaggcaagctggaaatcaaagtttgaggctgctggtatatggtatgagcatcgactcattgatgatatggtggcgtatgcacttaagagtgaaggaggttatgtatgggcatgcaaaaactatgatggagatgtccagagtgatttcttagctcaaggttttggatcactgggtttgatgacatctgtattggtttgccctgatggaaagactattgaagcagaagcagcccacggcacagttacccgccattttagggttcatcagaagggaggcgaaaccagcacaaatagcatagcatccatctttgcctggacaagagggctagcccacagggcaaaactggatgacaatgctaaactcttggatttcactgaaaagctagaggcagcttgcattggagtagtagaggctgggaagatgaccaaggatttggcacttattcttcatggatccaagctgtcaagggagcattatttgaacacagaggaattcatcgatgccgtggcagccgagcttagtgcgaggctttctgcatagacttgattcaagacaagcggaaaaaagacgttagcaacaaggagcgtgcgtgcgtctgctactctcttctattcagaagaaataagaaagggaaaaaaagcattggtccttagccccgtttccttcatttgtttgttggttgggaatgcaagggttggctgtttcttctccataatattggttgtgaactgatttgtcctttgtaatttcttattgatcccttccaactccc

SEQ ID NO: 137762 - protein, 413 aa, Glycine max
MAAFQKIKVANPIVEMDGDEMTRVIWKSIKDKLILPFLELDIKYYDLGLPYRDETDDKVTIESAEATLKYNVAIKCATITPDEARVKEFGLKSMWKSPNGTIRNILNGTVFREPILCKNIPRLVPGWTKAICIGRHAFGDQYRATDTVIKGAGKLKLVFVPEGQGEETEFEVFNFTGEGGVSLAMYNTDESIRSFAEASMATALEKKWPLYLSTKNTILKKYDGRFKDIFQEVYEASWKSKFEAAGIWYEHRLIDDMVAYALKSEGGYVWACKNYDGDVQSDFLAQGFGSLGLMTSVLVCPDGKTIEAEAAHGTVTRHFRVHQKGGETSTNSIASIFAWTRGLAHRAKLDDNAKLLDFTEKLEAACIGVVEAGKMTKDLALILHGSKLSREHYLNTEEFIDAVAAELSARLSA

SEQ ID NO: 137763 - DNA, 1584 bp, Nicotiana tabacum
  CDS (85)..(1332)
cttctttcaccaacttcccccttcactgtttctctcttcggcggagatttttctgttctatcttcacccctttcatctgcaaacatgactttcgacaaaatcaaggttgaaaaccctatcgttgagatggacggagatgaaatgactcgtgttatttggaaatcgatcaaggataagctcatctgtccttttctggagttggatataaaatactttgaccttggccttccgcaccgtgatgccacagacgataaggttacagttgaaagtgcggaagccactcagaaatacaatgtagctattaagtgtgcaaccattactccagatgaggcccgtgtaaaagagtttaacttgaaatccatgtggaggagcccaaatgggacaattagaaacatcctaaatggaacggtcttcagagaaccaattatgtgcaaaaatattccccgacttgtcccaggttggactaaaccaatatgcattggtagacatgcttttggagatcaataccgggctactgatacagttattcaaggagctggaaaactcaaattggtgtttgtgccagagggaacagacgagaagactgaattcgaagtttacaactttactggtgctggtggagtagctttatccatgtacaacacagatgagtccgtccgctcatttgctgaggcttcaatgaacatggcataccaaaagaaatggccactctatcttagtacaaagaatactattcttaagaaatatgatgggaggtttaaggacatcttccaagaagtttatgaagcaaattggaagtccaagtatgaggaagcaggaatttggtatgaacaccgtcttatcgacgatatggctgcttatgctttaaagagtgaaggtggttatgtatgggcctgcaagaactatgatggggatgtacagagtgatttcttagcacaaggttttggatccttgggcttgatgacatctgtcctggtgtgtcctgatggcaagaccattgaggctgaagcagcccatggaactgtcacccgccactacagggttcaccagaaaggaggtgaaaccagcacaaacagtattgcgtcaatctttgcctggactcgtggacttgcacacagggcaacgttagacaacaacgaaaggctcttggattttactgagaaactagaggcagcatgcattggtgcagttgaatctggaaagatgaccaaagatcttgcacttatcatccatggatccaagctctcgagagatcattatctcaacactgaagagttcattgacgccgtggccgatgagctcaaagcaagacttctgaaagcaaaggcctaaatgtctgggcagacaagaggacagtcttttttctggggcagttgagggatattgaagtgaaataaaaggattagggcctgatggtatactaaatctcaagaggttttattttataggttggggttactctccaggcattaatgtttgaaccatttaaatctgaatttctttttgctgaaactgctgcaagttatttcctgatttgcaaattggaccacgtgactgtgttacagtgctaaagaagccctctca

SEQ ID NO: 137764 - protein, 415 aa, Nicotiana tabacum; identical to SEQ ID NO: 122457

SEQ ID NO: 137765 - DNA, 1263 bp, Saccharomyces cerevisiae; identical to SEQ ID NO: 122458
  CDS (1)..(1263)

SEQ ID NO: 137766 - protein, 420 aa, Saccharomyces cerevisiae; identical to SEQ ID NO: 122459

SEQ ID NO: 137767 - DNA, 1985 bp, Aspergillus niger
  CDS (288)..(1784)
tccgttcttccctcattcctccccaggttcttgcttattgcaggaaagattatttcccagagtgaacagaaacgattttccgggttctccgatctgccccgtgaaggtcccttacagcaacagcatctcgtccagtccggcttaacggcagcttccgaactccaccaccgcctccttccagccgagagcttcacggcttcttgcttgtctttccctcggactttccccggttcctcccacacagcaggcccagttactgtcgagtctttggcaatccatcccacaccatgtcgtctgtccggttcagttccgcattggcgcgccgctccttcgccgtcgcttcccctcctctctctgcccctctctcttcctccgctcgtcgctttctctcttcttcctcttctactatttcttcttcttcctcctctgtctctactcgctctcccagatctcttacttctgcctcatcccttctctcctctcgtactgcttctgcccgctggaccggtctatcctcgttgaaccttactcaatcccgcaccatggctaccgaaatccccaagatcaaggtcaagaaccccgtcgttgagctcgacggtgatgagatgacccgtatcatctggcaggagatcagagaaaagttgattctgccttaccttgacgtcgacctcaagtactatgacctgggtctcgaataccgtgaccagaccgatgaccaggtcaccgttgaggctgccgaggctatcaagaagtatggtgtcggtgtcaagtgcgccaccatcactcccgatgaggctcgtgttgaggagttcaagctgaagaagatgtggctgtcccccaacggcaccatccgtaacatcctcggcggtaccgtcttccgtgaacccatcatcatccccgccattccccgtctcgtccccggctggaacaagcccatcatcatcggtcgtcacgctttcggtgaccagtaccgtgccaccgaccgtgtcatccctggccccggcaagctcgagcttgtctacacccctgtcaatggcgagcccgagaccgtcaaggtctacgacttccagggtggtggtattgcccagactcagtacaacaccgatgagtcgatccgtggcttcgcccacgccagtttccagatggccctgctcaagggtctccctctgtacatgagcaccaagaacaccatcctgaagcgctacgatggtcgcttcaaggatatcttccaggagatctacgagtccacctaccagaaggactttgaggccaagaacctctggtacgagcaccgtctcattgacgacatggttgcccagatgatcaagagtgagggtggattcgtcatggccctgaagaactacgacggtgatgtccagtccgacattgtcgcccagggtttcggctcccttggtctgatgacctcgaccctggtcacccctactggcgaggctttcgagtctgaggctgcccacggtaccgtgacccgtcactaccgcgagcaccagaagggccgcgagacctccaccaaccccattgcctccatcttcgcctggacccgcggtctgatccagcgtggcaagctcgacgagactcctgatgtcgttacctttgctgaggagcttgagcgcgcttgcattgaggttgtcaacgatgagggcatcatgaccaaggatctggctctggcctgcggccgcaaggagcgtgaggcctgggttactacccgcgagtacatggctgccgtcgagcgcagactcaaggccaacctcaagtcccgcctttaaatacccgattgttttccattgatacactaacgctagcgtgactcgatgagtcgatattcttagaattacgggttgcattatgtagattttacaaaaggtggagacagttgttgaaaccacatgtatagtgcaactgatgtttgttccatgtctcatgaacttgtacatgcttgataatgaaaatagatgcagtcttctgat

SEQ ID NO: 137768 - protein, 498 aa, Aspergillus niger; identical to SEQ ID NO: 122461

SEQ ID NO: 137769 - DNA, 1257 bp, Schizosaccharomyces pombe; identical to SEQ ID NO: 122462
  CDS (1)..(1257)

SEQ ID NO: 137770 - protein, 418 aa, Schizosaccharomyces pombe; identical to SEQ ID NO: 122463

SEQ ID NO: 137771 - DNA, 1608 bp, Saccharomyces cerevisiae
  CDS (111)..(1397)
tttgactcacataattccacttgcccatataaagagggactcatatgatcttatgaaatcttccttcaagcaattgtgagacaacagacgcacaaggaagatcgcccagcatgagtatgttatctagaagattattttccacctctcgccttgctgctttcagtaagattaaggtcaaacaacccgttgtcgagttggacggtgatgaaatgacccgtatcatttgggataagatcaagaagaaattgattctaccctacttggacgtagatttgaagtactacgacttatctgtcgaatctcgtgacgccacctccgacaagattactcaggatgctgctgaggcgatcaagaagtatggtgttggtatcaaatgtgccaccatcactcctgatgaagctcgtgtgaaggaattcaacctgcacaagatgtggaaatctcctaatggtaccatcagaaacattctcggcggtacagtgtttagagagcccattgtgattcctagaattcctagactggtcccacgttgggaaaaaccaatcattattggaagacacgcccacggtgatcaatataaagctacggacacactgatcccaggcccaggatctttggaactggtctacaagccatccgaccctacgactgctcaaccacaaactttgaaagtgtatgactacaagggcagtggtgtggccatggccatgtacaatactgacgaatccatcgaagggtttgctcattcgtctttcaagctggccattgacaaaaagctaaatcttttcttgtcaaccaagaacactattttgaagaaatatgacggtcggttcaaagacattttccaagaagtttatgaagctcaatataaatccaaattcgaacaactagggatccactatgaacaccgtttaattgatgatatggtcgctcaaatgataaaatctaaaggtggctttatcatggcgctaaagaactatgacggtgatgtccaatctgacatcgtcgctcaaggatttggctccttaggtttgatgacttctatcttagttacaccagacggtaaaactttcgaaagtgaagctgctcatggtaccgtgacaagacattatagaaagtaccaaaagggtgaagaaacttctacaaactccattgcatccattttcgcgtggtcgagaggtctattgaagagaggtgaattggacaatactcctgctttgtgtaaatttgccaatattttggaatccgccactttgaacacagttcagcaagacggtatcatgacgaaggacttggctttggcttgcggtaacaacgaaagatctgcttatgttaccacagaagaatttttggatgccgttgaaaaaagactacaaaaagaaatcaagtcgatcgagtaatcgaatttacgtagcccaatctaccacttttttttttcatttttagtgttatacttagttatgctctaggataatgaactacttttttttttttttttttactgttatcataaatatatataccttattgttgtttgcaaccgtcggttaattccttatcaaggttccccaagttcggatcattaccatcaatttccaacattttcatgag

SEQ ID NO: 137772 - protein, 428 aa, Saccharomyces cerevisiae; identical to SEQ ID NO: 122229

SEQ ID NO: 137773 - DNA, 1230 bp, Mycobacterium bovis; identical to SEQ ID NO: 122464
  CDS (1)..(1230): transl_table=11

SEQ ID NO: 137774 - protein, 409 aa, Mycobacterium bovis; identical to SEQ ID NO: 122465

SEQ ID NO: 137775 - DNA, 1221 bp, Sphingomonas yanoikuyae; identical to SEQ ID NO: 122466
  CDS (1)..(1221): transl_table=11

SEQ ID NO: 137776 - protein, 406 aa, Sphingomonas yanoikuyae; identical to SEQ ID NO: 122467

SEQ ID NO: 137777 - DNA, 1251 bp, Brassica napus; identical to SEQ ID NO: 122476
  CDS (1)..(1251)

SEQ ID NO: 137778 - protein, 416 aa, Brassica napus; identical to SEQ ID NO: 122477

SEQ ID NO: 137779 - DNA, 1251 bp, Brassica napus; identical to SEQ ID NO: 122478
  CDS (1)..(1251)

SEQ ID NO: 137780 - protein, 416 aa, Brassica napus; identical to SEQ ID NO: 122479

SEQ ID NO: 137781 - DNA, 1452 bp, Brassica napus; identical to SEQ ID NO: 122480
  CDS (1)..(1452)

SEQ ID NO: 137782 - protein, 483 aa, Brassica napus; identical to SEQ ID NO: 122481

SEQ ID NO: 137783 - DNA, 1230 bp, Triticum aestivum; identical to SEQ ID NO: 122486
  CDS (1)..(1230)

SEQ ID NO: 137784 - protein, 409 aa, Triticum aestivum; identical to SEQ ID NO: 122487

SEQ ID NO: 137785 - DNA, 1239 bp, Zea mays; identical to SEQ ID NO: 122488
  CDS (1)..(1239)

SEQ ID NO: 137786 - protein, 412 aa, Zea mays; identical to SEQ ID NO: 122489

SEQ ID NO: 137787 - DNA, 1236 bp, Linum usitatissimum; identical to SEQ ID NO: 122490
  CDS (1)..(1236)

SEQ ID NO: 137788 - protein, 411 aa, Linum usitatissimum; identical to SEQ ID NO: 122491

SEQ ID NO: 137789 - DNA, 1251 bp, Linum usitatissimum; identical to SEQ ID NO: 122492
  CDS (1)..(1251)

SEQ ID NO: 137790 - protein, 416 aa, Linum usitatissimum; identical to SEQ ID NO: 122493

SEQ ID NO: 137791 - DNA, 1245 bp, Hordeum vulgare; identical to SEQ ID NO: 122494
  CDS (1)..(1245)

SEQ ID NO: 137792 - protein, 414 aa, Hordeum vulgare; identical to SEQ ID NO: 122495

SEQ ID NO: 137793 - DNA, 1251 bp, Helianthus annuus; identical to SEQ ID NO: 122496
  CDS (1)..(1251)

SEQ ID NO: 137794 - protein, 416 aa, Helianthus annuus; identical to SEQ ID NO: 122497

SEQ ID NO: 137795 - DNA, 1239 bp, Brassica napus; identical to SEQ ID NO: 122498
  CDS (1)..(1239)

SEQ ID NO: 137796 - protein, 412 aa, Brassica napus; identical to SEQ ID NO: 122499

SEQ ID NO: 137797 - DNA, 1248 bp, Zea mays; identical to SEQ ID NO: 122500
  CDS (1)..(1248)

SEQ ID NO: 137798 - protein, 415 aa, Zea mays; identical to SEQ ID NO: 122501

SEQ ID NO: 137799 - DNA, 1242 bp, Glycine max; identical to SEQ ID NO: 122484
  CDS (1)..(1242)

SEQ ID NO: 137800 - protein, 413 aa, Glycine max; identical to SEQ ID NO: 122485

SEQ ID NO: 137801 - DNA, 1347 bp, Glycine max; identical to SEQ ID NO: 122502
  CDS (1)..(1347)

SEQ ID NO: 137802 - protein, 448 aa, Glycine max; identical to SEQ ID NO: 122503

SEQ ID NO: 137803 - DNA, 1239 bp, Zea mays
  CDS (1)..(1239)
atggcgttcgagaagatcaaggtctccaacccaatcgtcgagatggacggtgatgagatgaccagggtattctggcagtctatcaaggacaagcttatcctcccatttctggacctggacatcaagtactatgatttggggatactgcaccgtgaagcaactgatgacaaggtcacagtggaggctgcagaggctactctcaagtacaacgtggctattaagtgtgcgaccattactccagatgaaactcgggttaaggagttcaatctgaaacacatgtggaagagcccaaatggcacaattaggaacattataaatggcactgtgttcagagagcctattatatgcaaaaacgttccaagacttgttccaggatggactaagcccatctgcattggaaggcatgccttcggtgatcaataccgagctaccgatgcagttctgaaggggcctgggaagctgaagctagtttttgagggaaaagaagaacagattgatctggaggtattcaacttcactggtgctggaggagttgccttgtctatgtacaacaccgacgagtcaatccgagcttttgctgaggcttctatgacaactgcttatgagaagaaatggccactctaccttagcaccaaaaacacaatcctgaaaaaatatgatggcaggtttaaggacattttccaggaggtctatgaagctgactggaagtccaaatttgaggctgctggaatatggtatgagcatcgtcttattgatgacatggttgcgtacgcgcttaagagcgaaggaggctatgtgtgggcttgcaagaactacgatggagatgtgcagagtgatttcttagctcaaggttttggatctttgggtttgatgacatcagtgttggtgtgccctgatggaaaaaccatcgaagctgaagctgcccatggcacggttacccgtcatttccgtgtccaccagaaaggaggcgaaaccagcacgaacagcattgcttcgatctttgcatggacaagaggacttgcccacagggcaaagctcgacgacaacgctagactactcgacttcgctctcaaactcgaggctgcttgcgttgagaccgtggagtccgggaagatgactaaagatctggcgattcttgtccatggatcttccagcgtcacgagaagccattacctgaacaccgaggagttcatcgacgcagtcgctactgagctccgatcaagactgggagccaactga

SEQ ID NO: 137804 - protein, 412 aa, Zea mays; identical to SEQ ID NO: 122241

SEQ ID NO: 137805 - DNA, 1470 bp, Zea mays; identical to SEQ ID NO: 122506
  CDS (1)..(1470)

SEQ ID NO: 137806 - protein, 489 aa, Zea mays; identical to SEQ ID NO: 122507

SEQ ID NO: 137807 - DNA, 25 bp, Artificial sequence
  primer
atgacaaagattaaggtagctaacc

SEQ ID NO: 137808 - DNA, 23 bp, Artificial sequence
  primer
ttacaatgcagctgcctcgaact

SEQ ID NO: 137809 - protein, 410 aa, Artificial sequence
  consensus sequence
  Variant (3)..(3): Xaa in position 3 is any amino acid
  Variant (5)..(6): Xaa in position 5 to 6 is any amino acid
  Variant (8)..(8): Xaa in position 8 is any amino acid
  Variant (11)..(11): Xaa in position 11 is any amino acid
  Variant (19)..(19): Xaa in position 19 is any amino acid
  Variant (22)..(23): Xaa in position 22 to 23 is any amino acid
  Variant (26)..(27): Xaa in position 26 to 27 is any amino acid
  Variant (30)..(30): Xaa in position 30 is any amino acid
  Variant (32)..(32): Xaa in position 32 is any amino acid
  Variant (34)..(38): Xaa in position 34 to 38 is any amino acid
  Variant (40)..(40): Xaa in position 40 is any amino acid
  Variant (44)..(46): Xaa in position 44 to 46 is any amino acid
  Variant (49)..(49): Xaa in position 49 is any amino acid
  Variant (51)..(51): Xaa in position 51 is any amino acid
  Variant (53)..(53): Xaa in position 53 is any amino acid
  Variant (56)..(58): Xaa in position 56 to 58 is any amino acid
  Variant (60)..(60): Xaa in position 60 is any amino acid
  Variant (62)..(63): Xaa in position 62 to 63 is any amino acid
  Variant (65)..(66): Xaa in position 65 to 66 is any amino acid
  Variant (68)..(69): Xaa in position 68 to 69 is any amino acid
  Variant (79)..(79): Xaa in position 79 is any amino acid
  Variant (82)..(82): Xaa in position 82 is any amino acid
  Variant (85)..(85): Xaa in position 85 is any amino acid
  Variant (88)..(88): Xaa in position 88 is any amino acid
  Variant (91)..(91): Xaa in position 91 is any amino acid
  Variant (102)..(102): Xaa in position 102 is any amino acid
  Variant (111)..(113): Xaa in position 111 to 113 is any amino acid
  Variant (115)..(115): Xaa in position 115 is any amino acid
  Variant (123)..(123): Xaa in position 123 is any amino acid
  Variant (127)..(127): Xaa in position 127 is any amino acid
  Variant (133)..(133): Xaa in position 133 is any amino acid
  Variant (138)..(138): Xaa in position 138 is any amino acid
  Variant (142)..(147): Xaa in position 142 to 147 is any amino acid
  Variant (149)..(149): Xaa in position 149 is any amino acid
  Variant (151)..(163): Xaa in position 151 to 163 is any amino acid
  Variant (164)..(168): Xaa in position 164 to 168 is any or no amino acid
  Variant (170)..(175): Xaa in position 170 to 175 is any amino acid
  Variant (176)..(178): Xaa in position 176 to 178 is any or no amino acid
  Variant (181)..(183): Xaa in position 181 to 183 is any amino acid
  Variant (187)..(187): Xaa in position 187 is any amino acid
  Variant (189)..(189): Xaa in position 189 is any amino acid
  Variant (192)..(193): Xaa in position 192 to 193 is any amino acid
  Variant (196)..(197): Xaa in position 196 to 197 is any amino acid
  Variant (199)..(207): Xaa in position 199 to 207 is any amino acid
  Variant (209)..(209): Xaa in position 209 is any amino acid
  Variant (211)..(211): Xaa in position 211 is any amino acid
  Variant (220)..(220): Xaa in position 220 is any amino acid
  Variant (230)..(246): Xaa in position 230 to 246 is any amino acid
  Variant (247)..(248): Xaa in position 247 to 248 is any or no amino acid
  Variant (260)..(262): Xaa in position 260 to 262 is any amino acid
  Variant (264)..(265): Xaa in position 264 to 265 is any amino acid
  Variant (268)..(268): Xaa in position 268 is any amino acid
  Variant (283)..(284): Xaa in position 283 to 284 is any amino acid
  Variant (299)..(300): Xaa in position 299 to 300 is any amino acid
  Variant (305)..(305): Xaa in position 305 is any amino acid
  Variant (306)..(306): Xaa in position 306 is any or no amino acid
  Variant (308)..(308): Xaa in position 308 is any amino acid
  Variant (319)..(319): Xaa in position 319 is any amino acid
  Variant (321)..(321): Xaa in position 321 is any amino acid
  Variant (324)..(324): Xaa in position 324 is any amino acid
  Variant (326)..(327): Xaa in position 326 to 327 is any amino acid
  Variant (332)..(332): Xaa in position 332 is any amino acid
  Variant (344)..(345): Xaa in position 344 to 345 is any amino acid
  Variant (347)..(347): Xaa in position 347 is any amino acid
  Variant (351)..(357): Xaa in position 351 to 357 is any amino acid
  Variant (359)..(361): Xaa in position 359 to 361 is any amino acid
  Variant (364)..(368): Xaa in position 364 to 368 is any amino acid
  Variant (372)..(372): Xaa in position 372 is any amino acid
  Variant (373)..(373): Xaa in position 373 is any or no amino acid
  Variant (375)..(375): Xaa in position 375 is any amino acid
  Variant (382)..(392): Xaa in position 382 to 392 is any amino acid
  Variant (393)..(398): Xaa in position 393 to 398 is any or no amino acid
  Variant (400)..(401): Xaa in position 400 to 401 is any amino acid
  Variant (403)..(409): Xaa in position 403 to 409 is any amino acid
KIXVXXPXVEXDGDEMTRXIWXXIKXXLIXPXLXXXXXYXDLGXXXRDXTXDXVTXXXAXAXXKXXVXXKCATITPDEXRVXEFXLKXMWXSPNGTIRNILXGTVFREPIXXXNXPRLVPGWXKPIXIGRHAXGDQYXATDXXXXXXGXLXXXXXXXXXXXXXXXXXXVXXXXXXXXXGVXXXMYNXDXSIXXFAXXSXXXXXXXXXPXYXSTKNTILKXYDGRFKDIFXXXXXXXXXXXXXXXXXXXYEHRLIDDMVAXXXKXXGGXVWACKNYDGDVQSDXXAQGFGSLGLMTSVLXXPDGKXXEXEAAHGTVTRHXRXHQXGXXTSTNXIASIFAWTRGLXXRXKLDXXXXXXXFXXXLEXXXXXTVEXXGXMTKDLAXXXXXXXXXXXXXXXXXTXXFXXXXXXXL

SEQ ID NO: 137810 - protein, 56 aa, Artificial sequence
  protein pattern
  Variant (2)..(2): Xaa in position 2 is any amino acid
  Variant (3)..(3): Xaa in position 3 is any or no amino acid
  Variant (13)..(15): Xaa in position 13 to 15 is any amino acid
  Variant (17)..(18): Xaa in position 17 to 18 is any amino acid
  Variant (21)..(21): Xaa in position 21 is Phe or Tyr
  Variant (22)..(22): Xaa in position 22 is Ile or Val
  Variant (23)..(23): Xaa in position 23 is any amino acid
  Variant (25)..(25): Xaa in position 25 is any amino acid
  Variant (36)..(36): Xaa in position 36 is any amino acid
  Variant (37)..(37): Xaa in position 37 is Ile, Leu or Val
  Variant (41)..(41): Xaa in position 41 is Phe or Tyr
  Variant (46)..(46): Xaa in position 46 is Leu or Met
  Variant (47)..(47): Xaa in position 47 is any amino acid
  Variant (48)..(48): Xaa in position 48 is Ser or Thr
  Variant (50)..(50): Xaa in position 50 is any amino acid
  Variant (52)..(52): Xaa in position 52 is any amino acid
  Variant (53)..(53): Xaa in position 53 is Cys, Ser or Thr
  Variant (54)..(54): Xaa in position 54 is Ala, Pro or Ser
  Variant (55)..(55): Xaa in position 55 is Asp or Thr
YXXHRLIDDMVAXXXKXXGGXXXAXKNYDGDVQSDXXAQGXGSLGXXXSXLXXXXG

SEQ ID NO: 137811 - protein, 61 aa, Artificial sequence
  protein pattern
  Variant (3)..(3): Xaa in position 3 is any or no amino acid
  Variant (5)..(5): Xaa in position 5 is any or no amino acid
  Variant (7)..(7): Xaa in position 7 is any amino acid
  Variant (10)..(10): Xaa in position 10 is any amino acid
  Variant (13)..(13): Xaa in position 13 is any amino acid
  Variant (23)..(23): Xaa in position 23 is Ile or Leu
  Variant (24)..(24): Xaa in position 24 is Asp, Gly or Asn
  Variant (26)..(26): Xaa in position 26 is Thr or Val
  Variant (27)..(27): Xaa in position 27 is Ile or Val
  Variant (30)..(30): Xaa in position 30 is Ala, Glu or Gln
  Variant (31)..(31): Xaa in position 31 is Ala, Pro or Ser
  Variant (33)..(33): Xaa in position 33 is Ile, Leu, Met or Val
  Variant (34)..(36): Xaa in position 34 to 36 is any amino acid
  Variant (37)..(37): Xaa in position 37 is Ile, Leu or Val
  Variant (39)..(39): Xaa in position 39 is Lys or Arg
  Variant (40)..(40): Xaa in position 40 is Ile, Leu, Pro or Val
  Variant (41)..(41): Xaa in position 41 is Ile, Leu or Val
  Variant (42)..(42): Xaa in position 42 is any amino acid
  Variant (43)..(43): Xaa in position 43 is Ala, Gly, Asn, Gln, Ser or Thr
  Variant (45)..(46): Xaa in position 45 to 46 is any amino acid
  Variant (47)..(47): Xaa in position 47 is Ala or Pro
  Variant (48)..(48): Xaa in position 48 is Ile or Val
  Variant (49)..(49): Xaa in position 49 is any amino acid
  Variant (50)..(50): Xaa in position 50 is Ile or Val
  Variant (51)..(51): Xaa in position 51 is Ala or Gly
  Variant (55)..(55): Xaa in position 55 is Phe, His or Tyr
  Variant (56)..(56): Xaa in position 56 is Ala or Gly
  Variant (60)..(60): Xaa in position 60 is any amino acid
  Variant (61)..(61): Xaa in position 61 is Ala, Cys or Ser
RVXEXFXLKXMWXSPNGTIRNIXXGXXFRXXIXXXXXPXXXXXWXXXXXXXRHAXXDQYXX

SEQ ID NO: 137812 - protein, 59 aa, Artificial sequence
  protein pattern
  Variant (2)..(3): Xaa in position 2 to 3 is any or no amino acid
  Variant (5)..(5): Xaa in position 5 is any or no amino acid
  Variant (13)..(13): Xaa in position 13 is Phe or Tyr
  Variant (15)..(15): Xaa in position 15 is any amino acid
  Variant (16)..(16): Xaa in position 16 is His, Trp or Tyr
  Variant (18)..(18): Xaa in position 18 is any amino acid
  Variant (20)..(21): Xaa in position 20 to 21 is any amino acid
  Variant (26)..(26): Xaa in position 26 is Pro or Ser
  Variant (31)..(31): Xaa in position 31 is Phe or Tyr
  Variant (34)..(34): Xaa in position 34 is Ser or Thr
  Variant (35)..(35): Xaa in position 35 is any amino acid
  Variant (37)..(37): Xaa in position 37 is Ile or Leu
  Variant (38)..(39): Xaa in position 38 to 39 is any amino acid
  Variant (41)..(41): Xaa in position 41 is Ala, Gly or Pro
  Variant (42)..(43): Xaa in position 42 to 43 is any amino acid
  Variant (45)..(45): Xaa in position 45 is any amino acid
  Variant (46)..(46): Xaa in position 46 is Asn or Thr
  Variant (47)..(48): Xaa in position 47 to 48 is any amino acid
  Variant (49)..(49): Xaa in position 49 is Ile, Leu or Val
  Variant (50)..(51): Xaa in position 50 to 51 is any amino acid
  Variant (52)..(52): Xaa in position 52 is Phe or Tyr
  Variant (53)..(53): Xaa in position 53 is Ala, Cys, Gly, Ser, Thr or Val
  Variant (54)..(55): Xaa in position 54 to 55 is any amino acid
  Variant (56)..(56): Xaa in position 56 is Leu or Val
  Variant (58)..(58): Xaa in position 58 is any amino acid
  Variant (59)..(59): Xaa in position 59 is Ala, Ser, Thr or Val
AXXAXHGTVTRHXRXXQXGXXTSTNXIASIXAWXXGXXXRXXXDXXXXXXXXXXXXEXX

SEQ ID NO: 137813 - protein, 41 aa, Artificial sequence
  protein pattern
  Variant (2)..(2): Xaa in position 2 is Phe or Tyr
  Variant (5)..(5): Xaa in position 5 is Gly or Ser
  Variant (6)..(6): Xaa in position 6 is Ile, Leu, Met or Val
  Variant (7)..(8): Xaa in position 7 to 8 is any amino acid
  Variant (11)..(11): Xaa in position 11 is any amino acid
  Variant (13)..(13): Xaa in position 13 is any amino acid
  Variant (15)..(15): Xaa in position 15 is any amino acid
  Variant (16)..(16): Xaa in position 16 is Ile or Val
  Variant (18)..(18): Xaa in position 18 is any amino acid
  Variant (19)..(19): Xaa in position 19 is Asp, Glu or Gln
  Variant (20)..(20): Xaa in position 20 is Ala, Ser or Thr
  Variant (22)..(22): Xaa in position 22 is any amino acid
  Variant (24)..(24): Xaa in position 24 is any amino acid
  Variant (25)..(25): Xaa in position 25 is any or no amino acid
  Variant (27)..(28): Xaa in position 27 to 28 is any amino acid
  Variant (29)..(29): Xaa in position 29 is any or no amino acid
  Variant (31)..(31): Xaa in position 31 is Ala or Gly
  Variant (32)..(32): Xaa in position 32 is Ile or Val
  Variant (40)..(40): Xaa in position 40 is Asp or Asn
  Variant (41)..(41): Xaa in position 41 is Ala, Glu or Gln
YXDLXXXXRDXTXDXXTXXXAXAXXKXXXVXXKCATITPXX

SEQ ID NO: 137814 - protein, 20 aa, Artificial sequence
  protein pattern
  Variant (7)..(7): Xaa in position 7 is any amino acid
  Variant (11)..(11): Xaa in position 11 is Lys or Arg
  Variant (15)..(15): Xaa in position 15 is any amino acid
  Variant (17)..(19): Xaa in position 17 to 19 is any amino acid
  Variant (20)..(20): Xaa in position 20 is Phe or Tyr
KNTILKXYDGXFKDXFXXXX

SEQ ID NO: 137815 - protein, 25 aa, Artificial sequence
  protein pattern
  Variant (2)..(2): Xaa in position 2 is Asp or Glu
  Variant (3)..(3): Xaa in position 3 is Ile, Leu, Met or Val
  Variant (4)..(4): Xaa in position 4 is any amino acid
  Variant (11)..(11): Xaa in position 11 is Ile or Val
  Variant (12)..(12): Xaa in position 12 is Phe, Ile, Leu or Met
  Variant (14)..(15): Xaa in position 14 to 15 is any amino acid
  Variant (18)..(19): Xaa in position 18 to 19 is any amino acid
  Variant (21)..(21): Xaa in position 21 is Ile, Leu or Val
  Variant (22)..(22): Xaa in position 22 is any amino acid
  Variant (24)..(24): Xaa in position 24 is Phe or Tyr
  Variant (25)..(25): Xaa in position 25 is Ile, Leu or Val
VXXXGDEMTRXXWXXIKXXLXXPXX

SEQ ID NO: 137816 - protein, 20 aa, Artificial sequence
  protein pattern
  Variant (2)..(2): Xaa in position 2 is Phe, His or Tyr
  Variant (4)..(4): Xaa in position 4 is any amino acid
  Variant (5)..(5): Xaa in position 5 is any or no amino acid
  Variant (7)..(7): Xaa in position 7 is any or no amino acid
  Variant (9)..(9): Xaa in position 9 is Ile or Val
  Variant (10)..(10): Xaa in position 10 is any amino acid
  Variant (11)..(11): Xaa in position 11 is Ala, Asp, Glu, Gly, Asn or Ser
  Variant (14)..(14): Xaa in position 14 is any amino acid
  Variant (15)..(15): Xaa in position 15 is Ala, Cys or Ser
  Variant (16)..(16): Xaa in position 16 is Cys or Ser
  Variant (17)..(17): Xaa in position 17 is Phe, Leu or Met
  Variant (18)..(19): Xaa in position 18 to 19 is any amino acid
  Variant (20)..(20): Xaa in position 20 is Ala, Gly or Ser
MXNXXDXSXXXFAXXXXXXX

SEQ ID NO: 137817 - protein, 8 aa, Artificial sequence
  protein pattern
  Variant (7)..(7): Xaa in position 7 is any or no amino acid
MTKDLAXL

SEQ ID NO: 137818 - DNA, 969 bp, Saccharomyces cerevisiae
  CDS (1)..(969)
atgtctatggagcctcctgtggggcttacggctatgcccgtcaccaagctagccatgatcacgacgcttgtggttcccttagttgcctcgattgcaagttacaaacatatatttctattgcaatatgatccttttctgcagacctaccatcaatactaccgtctgctcatattccagttctgcgccatcaatgaatccgatacagtaatactggcgttgatatggtatctgtttaggcatttagaacggctactaggatcccacaagtacttgaccttgattgttttgtcatgggcctacaccaccttaggaatttggggattgaatctgatctggaacgcatttattggacagtacaagtggcttcaatggaacaattttagtacaggttcactgcccattgttttaagcttagtacatttttacaaagaatacacccctcagatttacgaatggaatataagattactaggacctcgaggaggagcatcaagtcacaatgataacaagcgagaagacaagagcgccgtagagtggaaaatcaacgatcagtttcttttaaatgggttaattctcctgcttatattaaatcaggggtttgcaggaatactatgcggattcataagctggatgtgtggtattttcatcgataagggcctgttaccgggattagaccattggagaataccgtttgtatcctatttcatctctcaaggcccacccacgagggctaacgttgctatagcggccaatgcggccacgaatacagcagcagcaagagccactgtagaagcagctactgctgctacaggaaatggaaatacaggcaactctgggcctacaagcctaccgcttcgtggttcaagcaccacccctacaaatacctctagcgctggtgatgacgagcctggtgccgatgaacctgcaagaccactgggagtccaatttttggatacctttaggagatga

SEQ ID NO: 137819 - protein, 322 aa, Saccharomyces cerevisiae
MSMEPPVGLTAMPVTKLAMITTLVVPLVASIASYKHIFLLQYDPFLQTYHQYYRLLIFQFCAINESDTVILALIWYLFRHLERLLGSHKYLTLIVLSWAYTTLGIWGLNLIWNAFIGQYKWLQWNNFSTGSLPIVLSLVHFYKEYTPQIYEWNIRLLGPRGGASSHNDNKREDKSAVEWKINDQFLLNGLILLLILNQGFAGILCGFISWMCGIFIDKGLLPGLDHWRIPFVSYFISQGPPTRANVAIAANAATNTAAARATVEAATAATGNGNTGNSGPTSLPLRGSSTTPTNTSSAGDDEPGADEPARPLGVQFLDTFRR

SEQ ID NO: 137820 - DNA, 912 bp, Candida glabrata CBS 138
  CDS (1)..(912)
atgtcgctggagactcctgttggactgagacggtttcccgtcacgaagctgtgtatggttactggtatagttgtgcctgtggtggcggcgcttacggagacgaagtatgtgtttaaggcgacctacgatccgtttatcaaagagtatgggcagtactaccggtacctgacgtaccagctcagcagtgtcaatgagacagatgtggcgctgatagtgttgctgttctaccagtatcggcagctagagaggttatttgggaacgagaagtatctgagcatgctggccatgttgatcttctaccaagggttagccacagtttccgtgcacctactgtttaacaacttggtggggccctggcttgggacgcagtggaatgagctcgcgagtggtgcgtttggagtggtgataggactgttccatttctacaagcagtatacgcctatcgtttatgagtttgacattgtgctgggtgcgccattgtggtcgcagttgttccacaagggcgtgatacgaaggtttgataacgagaacaagagtatgaaagtgcggttgaatgaccagttcatggtgaatgtgctagtgataatactgatatgcaaccagggggcctgggggcccttacaagcgcttgtggcgtggttatcggggctgttcctggatatcgggatcttgcccggcctggacaagtggagagtgccctttgcgcactacatgttgtttggagaggtcaaaagactggaagtgggcagcacgagcgctaacacgagtgcatcactgggcgggaacagcgtcacgcagctggcaaacaactctgcgtcgtcgcaacttgaagaggacaatgagaacgacgagcccaacgacgagcccgccaggccacttggtgtgcaattcctagacgcattcagacgttag

SEQ ID NO: 137821 - protein, 303 aa, Candida glabrata CBS 138
MSLETPVGLRRFPVTKLCMVTGIVVPVVAALTETKYVFKATYDPFIKEYGQYYRYLTYQLSSVNETDVALIVLLFYQYRQLERLFGNEKYLSMLAMLIFYQGLATVSVHLLFNNLVGPWLGTQWNELASGAFGVVIGLFHFYKQYTPIVYEFDIVLGAPLWSQLFHKGVIRRFDNENKSMKVRLNDQFMVNVLVIILICNQGAWGPLQALVAWLSGLFLDIGILPGLDKWRVPFAHYMLFGEVKRLEVGSTSANTSASLGGNSVTQLANNSASSQLEEDNENDEPNDEPARPLGVQFLDAFRR

SEQ ID NO: 137822 - DNA, 837 bp, Kluyveromyces lactis NRRL Y-1140
  CDS (1)..(837)
atgccgtcaacaaatagtgtaggtgtggaaataccaactggattggttcaattcccaataacaaagatactgatgatttgttgtgtaggggttgccctaacagcatcattattcaatatgaagtatctgttccttttacaatatgacccatttatcgttgaatatggacaatattggaggtattttacgtttcagttagggagtttaaatgaaagcgatgttgccataatgaccttgatttggtatcagtttagatcgttagagaggctatttggatcaaggaagtaccttaatatcgtgatattatcatgggcttatacaacagtggtaatatttttgatttcgaatctacttaacaagcttttgcctggaatttggtgggatcaatacacaaatggcccactaccagtaatattgtgtttgactcatttctacaaacagtatacaccaaggttatacgaattcaatataataatcaaccaaccttttcttcttcattctaacacgatcgtttggaagctgacagatcaatttttcatccatggcctgttattccttgccatggtaaatcaaggcgcaacagggttggtaatcggactaataagttggatttgtgctatcttgatggataatgggctactaccaggtactgactccttccaattggcgcctttcaaagacagctggaacagaagttctagcacattaaacagaccaagcgcagttatgacaaacgatatgacatcggaagatctaaatgaggaagaggccgaagaacctcaagatgaacctcagcgcactttaggggtccagttcttggatacttttagaaggtga

SEQ ID NO: 137823 - protein, 278 aa, Kluyveromyces lactis NRRL Y-1140
MPSTNSVGVEIPTGLVQFPITKILMICCVGVALTASLFNMKYLFLLQYDPFIVEYGQYWRYFTFQLGSLNESDVAIMTLIWYQFRSLERLFGSRKYLNIVILSWAYTTVVIFLISNLLNKLLPGIWWDQYTNGPLPVILCLTHFYKQYTPRLYEFNIIINQPFLLHSNTIVWKLTDQFFIHGLLFLAMVNQGATGLVIGLISWICAILMDNGLLPGTDSFQLAPFKDSWNRSSSTLNRPSAVMTNDMTSEDLNEEEAEEPQDEPQRTLGVQFLDTFRR

SEQ ID NO: 137824 - DNA, 987 bp, Debaryomyces hansenii CBS767
  CDS (1)..(987)
atggcccaattaacaccgataagagggtttaataataccccagtatccaagacaatatgtatagtcagcacgttggtggcattggggctttctatattccagatgaaacattatgttcggttatcgatagatccatatatattggagtatgcgcagtactggagggtgctaacttatgagatgtcggtgatcaatgagtctgattacatgttgtgtgtgctactctggttccagtacaagaacttggagaggttctatgggtcgcggaaatacgtgtcgttgatagtggtgtttgcgttgtacaattcgatagtgtgttttcttatcatgaatttggggcaattgggggtgaattttgtggtgtacttagtatcgttaattgctagtgggggaaagggggatattgaatataatacaaccgtgttcaaccaggtggcactgggcccattgggcattttgtcgtcgttctacatttgctatggggcaaatatacctacgtcgtataagtttaaaatattgttatcgaagcctacgttactggacgatggggaggtacatccatctaattcaagcaaggaactagttcttacgaaccatttccagatccatattatttatacgttattgcttctcaataatggattgggatcaataataccgtgtttggtaggtatagtcatagggaaattgtattcaaacgagttacttccgggtgccaagaactggctaattcccgtacgtgtctttgaggcattcatgcatcctcgcaagtttggaagcagcttattatcatccaccaggggaatacgcagtggtggctaccagaccatcaacaatgctaacgctaatgcaaatgagctgattgccgatgaggatgcagaggaagttctagatgaaggcaggagcaataaccgtgcccatgaaatcagagcagaaacccctgttaggccattgggcagccagttcttggacacattcagaacgtga

SEQ ID NO: 137825 - protein, 328 aa, Debaryomyces hansenii CBS767
MAQLTPIRGFNNTPVSKTICIVSTLVALGLSIFQMKHYVRLSIDPYILEYAQYWRVLTYEMSVINESDYMLCVLLWFQYKNLERFYGSRKYVSLIVVFALYNSIVCFLIMNLGQLGVNFVVYLVSLIASGGKGDIEYNTTVFNQVALGPLGILSSFYICYGANIPTSYKFKILLSKPTLLDDGEVHPSNSSKELVLTNHFQIHIIYTLLLLNNGLGSIIPCLVGIVIGKLYSNELLPGAKNWLIPVRVFEAFMHPRKFGSSLLSSTRGIRSGGYQTINNANANANELIADEDAEEVLDEGRSNNRAHEIRAETPVRPLGSQFLDTFRT

SEQ ID NO: 137826 - DNA, 1002 bp, Candida albicans SC5314
  CDS (1)..(1002): transl_table=12
atggctcaactaactcctatacgagggtttaccaacactcctgtaacacgatcgatatgtatgatatcgactgttgtgccgataatgctatcggtgttggctataaaatatgttgtcaagtttgctatcgatccttacatcattcaatacaaccaattctggagagtggtgacttaccaattatcagtagtcaatgaatcagactacttgattacagtattattatggtttcagttcaaagttttagagagattctacggatcacggaagtatttaagtattataacattgttcactgtttataatgcggttgcatgcctatttatcatgagtttagggcaattattgctttattacatattatttgttatcaaggttttcattatggggtatgatcaaggtagcattcattataatgtaacttttttaaatgagataataccaggaccattgggtatactttcgtctttgtatgtgtgttacggagcaaacatcccggtatcatactatttcaagatattattgaaggatccaagaaatgcagatcaacctgagacaagctctccaagtaaggaattaaatttgaccaatctttttcctatacacatattatacactattttgatactaaacaacgggttgcgttcaataattccatgtctagttggtttattgattggaaagttgtatgtttacgaattgctccctggtggatcatcgtggttgttatcaaatacagtattccggttgtttataaacccagttaaaagagcaggcgtatggctagaggctgtaaggagaagactttctatcagatacgaaagattgagcagtggcgactcgcaagaagcacttgaagaagaagaacttaatgaaaacaacgacgagcctgatgataatgatgaaattttggatgagacaagacaacaagagaaccaaatcagagcagaaactccggttcgacctttgggtagtcaatttctcgacaccttcagaacgtaa

SEQ ID NO: 137827 - protein, 333 aa, Candida albicans SC5314
MAQLTPIRGFTNTPVTRSICMISTVVPIMLSVLAIKYVVKFAIDPYIIQYNQFWRVVTYQLSVVNESDYLITVLLWFQFKVLERFYGSRKYLSIITLFTVYNAVACLFIMSLGQLLLYYILFVIKVFIMGYDQGSIHYNVTFLNEIIPGPLGILSSLYVCYGANIPVSYYFKILLKDPRNADQPETSSPSKELNLTNLFPIHILYTILILNNGLRSIIPCLVGLLIGKLYVYELLPGGSSWLLSNTVFRLFINPVKRAGVWLEAVRRRLSIRYERLSSGDSQEALEEEELNENNDEPDDNDEILDETRQQENQIRAETPVRPLGSQFLDTFRT

SEQ ID NO: 137828 - DNA, 22 bp, Artificial sequence
  primer
atgtctatggagcctcctgtgg

SEQ ID NO: 137829 - DNA, 26 bp, Artificial sequence
  primer
tcatctcctaaaggtatccaaaaatt

SEQ ID NO: 137830 - protein, 335 aa, Artificial sequence
  consensus sequence
  Variant (2)..(5): Xaa in position 2 to 5 is any amino acid
  Variant (10)..(17): Xaa in position 10 to 17 is any amino acid
  Variant (19)..(22): Xaa in position 19 to 22 is any amino acid
  Variant (24)..(27): Xaa in position 24 to 27 is any amino acid
  Variant (29)..(35): Xaa in position 29 to 35 is any amino acid
  Variant (38)..(38): Xaa in position 38 is any amino acid
  Variant (40)..(41): Xaa in position 40 to 41 is any amino acid
  Variant (43)..(43): Xaa in position 43 is any amino acid
  Variant (46)..(46): Xaa in position 46 is any amino acid
  Variant (48)..(49): Xaa in position 48 to 49 is any amino acid
  Variant (51)..(51): Xaa in position 51 is any amino acid
  Variant (53)..(56): Xaa in position 53 to 56 is any amino acid
  Variant (61)..(65): Xaa in position 61 to 65 is any amino acid
  Variant (67)..(67): Xaa in position 67 is any amino acid
  Variant (69)..(69): Xaa in position 69 is any amino acid
  Variant (71)..(73): Xaa in position 71 to 73 is any amino acid
  Variant (77)..(78): Xaa in position 77 to 78 is any amino acid
  Variant (81)..(81): Xaa in position 81 is any amino acid
  Variant (85)..(92): Xaa in position 85 to 92 is any amino acid
  Variant (94)..(103): Xaa in position 94 to 103 is any amino acid
  Variant (105)..(114): Xaa in position 105 to 114 is any amino acid
  Variant (115)..(135): Xaa in position 115 to 135 is any or no amino acid
  Variant (137)..(140): Xaa in position 137 to 140 is any amino acid
  Variant (142)..(142): Xaa in position 142 is any amino acid
  Variant (144)..(148): Xaa in position 144 to 148 is any amino acid
  Variant (150)..(152): Xaa in position 150 to 152 is any amino acid
  Variant (154)..(157): Xaa in position 154 to 157 is any amino acid
  Variant (159)..(160): Xaa in position 159 to 160 is any amino acid
  Variant (162)..(162): Xaa in position 162 is any amino acid
  Variant (164)..(164): Xaa in position 164 is any amino acid
  Variant (166)..(166): Xaa in position 166 is any amino acid
  Variant (168)..(169): Xaa in position 168 to 169 is any amino acid
  Variant (171)..(181): Xaa in position 171 to 181 is any amino acid
  Variant (182)..(194): Xaa in position 182 to 194 is any or no amino acid
  Variant (196)..(198): Xaa in position 196 to 198 is any amino acid
  Variant (200)..(203): Xaa in position 200 to 203 is any amino acid
  Variant (205)..(207): Xaa in position 205 to 207 is any amino acid
  Variant (209)..(210): Xaa in position 209 to 210 is any amino acid
  Variant (212)..(212): Xaa in position 212 is any amino acid
  Variant (214)..(220): Xaa in position 214 to 220 is any amino acid
  Variant (222)..(226): Xaa in position 222 to 226 is any amino acid
  Variant (228)..(233): Xaa in position 228 to 233 is any amino acid
  Variant (238)..(240): Xaa in position 238 to 240 is any amino acid
  Variant (242)..(279): Xaa in position 242 to 279 is any amino acid
  Variant (280)..(315): Xaa in position 280 to 315 is any or no amino acid
  Variant (317)..(320): Xaa in position 317 to 320 is any amino acid
  Variant (321)..(321): Xaa in position 321 is any or no amino acid
  Variant (323)..(323): Xaa in position 323 is any amino acid
  Variant (328)..(328): Xaa in position 328 is any amino acid
GXXXXPVTKXXXXXXXXVXXXXSXXXXKXXXXXXXDPXIXXYXQYXRXXTXQXXXXNESDXXXXXLXWXQXXXLERXXGSXKYLXXXXXXXXYXXXXXXXXXXLXXXXXXXXXXXXXXXXXXXXXXXXXXXXXXXNXXXXGXLXXXXXLXXXYXXXXPXXYXFXIXLXXPXXXXXXXXXXXXXXXXXXXXXXXXLXXXFXXXXLXXXLXXNXGXXXXXXXLXXXXXGXXXXXXLLPGXXXWXXXXXXXXXXXXXXXXXXXXXXXXXXXXXXXXXXXXXXXXXXXXXXXXXXXXXXXXXXXXXXXXXXXXXXXXXXEXXXXXPXRPLGXQFLDTFR

SEQ ID NO: 137831 - protein, 21 aa, Artificial sequence
  protein pattern
  Variant (2)..(2): Xaa in position 2 is Asp or Glu
  Variant (3)..(3): Xaa in position 3 is Glu or Thr
  Variant (5)..(5): Xaa in position 5 is any amino acid
  Variant (6)..(9): Xaa in position 6 to 9 is any or no amino acid
  Variant (11)..(11): Xaa in position 11 is Pro or Thr
  Variant (14)..(14): Xaa in position 14 is Ser or Val
AXXPXXXXXRXLGXQFLDTFR

SEQ ID NO: 137832 - protein, 35 aa, Artificial sequence
  protein pattern
  Variant (2)..(2): Xaa in position 2 is Glu, Asn or Gln
  Variant (3)..(3): Xaa in position 3 is Phe, Ile, Leu or Val
  Variant (4)..(5): Xaa in position 4 to 5 is any amino acid
  Variant (7)..(7): Xaa in position 7 is Ala, Pro or Ser
  Variant (8)..(8): Xaa in position 8 is Phe or Leu
  Variant (9)..(9): Xaa in position 9 is Gly or Pro
  Variant (10)..(10): Xaa in position 10 is Ile or Val
  Variant (11)..(11): Xaa in position 11 is Leu or Val
  Variant (12)..(12): Xaa in position 12 is any amino acid
  Variant (13)..(13): Xaa in position 13 is Gly or Ser
  Variant (14)..(14): Xaa in position 14 is Phe or Leu
  Variant (15)..(17): Xaa in position 15 to 17 is any amino acid
  Variant (19)..(19): Xaa in position 19 is any amino acid
  Variant (20)..(20): Xaa in position 20 is Ala, Glu or Gln
  Variant (21)..(22): Xaa in position 21 to 22 is any amino acid
  Variant (24)..(25): Xaa in position 24 to 25 is any amino acid
  Variant (27)..(27): Xaa in position 27 is any amino acid
  Variant (28)..(28): Xaa in position 28 is Phe or Trp
  Variant (29)..(29): Xaa in position 29 is any amino acid
  Variant (31)..(31): Xaa in position 31 is any amino acid
  Variant (33)..(34): Xaa in position 33 to 34 is any amino acid
NXXXXGXXXXXXXXXXXYXXXXPXXYXXXIXLXXP

SEQ ID NO: 137833 - protein, 15 aa, Artificial sequence
  protein pattern
  Variant (2)..(2): Xaa in position 2 is any amino acid
  Variant (3)..(3): Xaa in position 3 is Phe or Leu
  Variant (4)..(4): Xaa in position 4 is any amino acid
  Variant (5)..(5): Xaa in position 5 is Asp, Ser or Val
  Variant (6)..(6): Xaa in position 6 is any amino acid
  Variant (7)..(7): Xaa in position 7 is Glu or Gly
  Variant (8)..(8): Xaa in position 8 is Ile or Leu
  Variant (12)..(12): Xaa in position 12 is Ala, Gly or Leu
  Variant (13)..(14): Xaa in position 13 to 14 is any amino acid
GXXXXXXXLPGXXXW

SEQ ID NO: 137834 - DNA, 1815 bp, Escherichia coli
  CDS (1)..(1815): transl_table=11
atgtttatgtctctggctgccaattgcttaagcaagatcggacggttaatgtgttttacacattttttccgtcaaacagtgaggcaggccatggagatgttgtctggagccgagatggtcgtccgatcgcttatcgatcagggcgttaaacaagtattcggttatcccggaggcgcagtccttgatatttatgatgcattgcataccgtgggtggtattgatcatgtattagttcgtcatgagcaggcggcggtgcatatggccgatggcctggcgcgcgcgaccggggaagtcggcgtcgtgctggtaacgtcgggtccaggggcgaccaatgcgattactggcatcgccaccgcttatatggattccattccattagttgtcctttccgggcaggtagcgacctcgttgataggttacgatgcctttcaggagtgcgacatggtggggatttcgcgaccggtggttaaacacagttttctggttaagcaaacggaagacattccgcaggtgctgaaaaaggctttctggctggcggcaagtggtcgcccaggaccagtagtcgttgatttaccgaaagatattcttaatccggcgaacaaattaccctatgtctggccggagtcggtcagtatgcgttcttacaatcccactactaccggacataaagggcaaattaagcgtgctctgcaaacgctggtagcggcaaaaaaaccggttgtctacgtaggcggtggggcaatcacggcgggctgccatcagcagttgaaagaaacggtggaggcgttgaatctgcccgttgtttgctcattgatggggctgggggcgtttccggcaacgcatcgtcaggcactgggcatgctgggaatgcacggtacctacgaagccaatatgacgatgcataacgcggatgtgattttcgccgtcggggtacgatttgatgaccgaacgacgaacaatctggcaaagtactgcccaaatgccactgttctgcatatcgatattgatcctacttccatttctaaaaccgtgactgcggatatcccgattgtgggggatgctcgccaggtcctcgaacaaatgcttgaactcttgtcgcaagaatccgcccatcaaccactggatgagatccgcgactggtggcagcaaattgaacagtggcgcgctcgtcagtgcctgaaatatgacactcacagtgaaaagattaaaccgcaggcggtgatcgagactctttggcggttgacgaagggagacgcttacgtgacgtccgatgtcgggcagcaccagatgtttgctgcactttattatccattcgacaaaccgcgtcgctggatcaattccggtggcctcggcacgatgggttttggtttacctgcggcactgggcgtcaaaatggcgttgccagaagaaaccgtggtttgcgtcactggcgacggcagtattcagatgaacatccaggaactgtctaccgcgttgcaatacgagttgcccgtactggtggtgaatctcaataaccgctatctggggatggtgaagcagtggcaggacatgatctattccggccgtcattcacaatcttatatgcaatcgctacccgatttcgtccgtctggcggaagcctatgggcatgtcgggatccagatttctcatccgcatgagctggaaagcaaacttagcgaggcgctggaacaggtgcgcaataatcgcctggtgtttgttgatgttaccgtcgatggcagcgagcacgtctacccgatgcagattcgcgggggcggaatggatgaaatgtggttaagcaaaacggagagaacctaa

SEQ ID NO: 137835 - protein, 604 aa, Escherichia coli
MFMSLAANCLSKIGRLMCFTHFFRQTVRQAMEMLSGAEMVVRSLIDQGVKQVFGYPGGAVLDIYDALHTVGGIDHVLVRHEQAAVHMADGLARATGEVGVVLVTSGPGATNAITGIATAYMDSIPLVVLSGQVATSLIGYDAFQECDMVGISRPVVKHSFLVKQTEDIPQVLKKAFWLAASGRPGPVVVDLPKDILNPANKLPYVWPESVSMRSYNPTTTGHKGQIKRALQTLVAAKKPVVYVGGGAITAGCHQQLKETVEALNLPVVCSLMGLGAFPATHRQALGMLGMHGTYEANMTMHNADVIFAVGVRFDDRTTNNLAKYCPNATVLHIDIDPTSISKTVTADIPIVGDARQVLEQMLELLSQESAHQPLDEIRDWWQQIEQWRARQCLKYDTHSEKIKPQAVIETLWRLTKGDAYVTSDVGQHQMFAALYYPFDKPRRWINSGGLGTMGFGLPAALGVKMALPEETVVCVTGDGSIQMNIQELSTALQYELPVLVVNLNNRYLGMVKQWQDMIYSGRHSQSYMQSLPDFVRLAEAYGHVGIQISHPHELESKLSEALEQVRNNRLVFVDVTVDGSEHVYPMQIRGGGMDEMWLSKTERT

SEQ ID NO: 137836 - DNA, 3382 bp, Zea mays
  CDS (971)..(2947)
  misc_feature (390)..(390): n is a, g, c or t
aaaagctgcacacacgtccatacaatgttcatgacagattaacttacttagaaatacttgaaacaagtacccaataagcaatgaagcaaaaaacaaaatttgtgacaagtctgcaaattggaacaaacaaactgcaagtctgcaatagaattatagagaagtagacaacaacaggccatggccaagccaccgccaaacagcaaacaggtagggctggccgactaggcaccttgccaacctcattcagttacacaacttggtcacttggagcaaactacaagctgcaacttggaagagacgcagcaccagtctaaaagcattgcacagaggcacacagcaagcaaactgcaccatccatcgaccatcaccttgtagcacaacaccaggaangctggaggcttggagcagttgaggggatggggcctgacgggtggtagctgggcggcaagcgagagctggagggttggagcagttgagctgagtgcacgccggagccggaagctgcagtcggcggcgggtggcggcgttcctgcggcttgggggaggcgttggacttgttcgactagggctgttttttttttttttttttttttcagctcaaataggtagctagatattatcagcaaataaagctccatcataataggttcacaaaacgaatgtctgatttatcttagtggcaaacgctggattcaaatacaactagaaccatgaaaaatggcctactgaagtgcaggcaagacgttcaactgatggcggaccgtgacaccatggcaggttgacatctctccacaggcacaccaacgcatccgaagaaatgtatgtacccacgcatgtcatcaggtccacaatccatctcgatctgcctacttggatctctgcctcatctttctgcgcttcctcttgagcctcctcatgcgcttcttcttccacttggccctcatggtcgcttcttcgcgtgctaacctcgatgcgtctcctcctgcggcgtcggcggcggttccccgcctccgagacagccgccgcaaccatggccaccgccgccgccgcgtctaccgcgctcactggcgccactaccgctgcgcccaaggcgaggcgccgggcgcacctcctggccacccgccgcgccctcgccgcgcccatcaggtgctcagcggcgtcacccgccatgccgatggctcccccggccaccccgctccggccgtggggccccaccgagccccgcaagggtgctgacatcctcgtcgagtccctcgagcgctgcggcgtccgcgacgtcttcgcctaccccggcggcgcgtccatggagatccaccaggcactcacccgctcccccgtcatcgccaaccacctcttccgccacgagcaaggggaggcctttgccgcctccggctacgcgcgctcctcgggccgcgtcggcgtctgcatcgccacctccggccccggcgccaccaacctagtctccgcgctcgccgacgcgctgctcgattccgtccccatggtcgccatcacgggacaggtgccgcgacgcatgattggcaccgacgccttccaggagacgcccatcgtcgaggtcacccgctccatcaccaagcacaactacctggtcctcgacgtcgacgacatcccccgcgtcgtgcaggaggctttcttcctcgcctcctctggtcgaccggggccggtgcttgtcgacatccccaaggacatccagcagcagatggcggtgcctgtctgggacaagcccatgagtctgcctgggtacattgcgcgccttcccaagccccctgcgactgagttgcttgagcaggtgctgcgtcttgttggtgaatcgcggcgccctgttctttatgtgggcggtggctgcgcagcatctggtgaggagttgcgacgctttgtggagctgactggaatcccggtcacaactactcttatgggcctcggcaacttccccagcgacgacccactgtctctgcgcatgcttggtatgcatggcacagtgtatgcaaattatgcagtggataaggccgatctgttgcttgcatttggtgtgcggtttgatgatcgtgtgacagggaaaattgaggcttttgcaagcagggctaagattgtgcacattgatattgatccggctgagattggcaagaacaagcagccacatgtgtccatctgtgcagatgttaagcttgctttgcagggcatgaatgctcttcttgaaggaagcacatcaaagaagagctttgactttggctcatggaacgatgagttggatcagcagaagagggaattcccccttgggtataaaacatctaatgaggagatccagccacaatatgctattcaggttcttgatgagctgacgaaaggcgaggccatcatcggcacaggtgttgggcagcaccagatgtgggcggcacagtactacacttacaagcggccaaggcagtggttgtcttcagctggtcttggggctatgggatttggtttgccggctgctgctggtgcttctgtggccaacccaggtgttactgttgttgacatcgatggagatggtagctttctcatgaacgttcaggagctagctatgatccgaattgagaacctcccggtgaaggtctttgtgctaaacaaccagcacctggggatggtggtgcagtgggaggacaggttctataaggccaacagagcgcacacatacttgggaaacccagagaatgaaagtgagatatatccagatttcgtgacgatcgccaaagggttcaacattccagcggtccgtgtgacaaagaagaacgaagtccgcgcagcgataaagaagatgctcgagactccagggccgtacctcttggatataatcgtcccacaccaggagcatgtgttgcctatgatccctagtggtggggctttcaaggatatgatcctggatggtgatggcaggactgtgtactgatctaaaatccagcaagcaactgatctaaaatccagcaagcaccgcctccctgctagtacaagggtgatatgtttttatctgtgtgatgttctcctgtgttctatctttttttgtgggccgtcagctatctgttatggtaatcctatgtagcttccgaccttgtaattgtgtagtctgttgttttccttcaaaaaaaaaaaaaaaaaaaaaaaaaaaaaaaaaaaaaaaaaaaaaaaaaaaaaaaaaaaaaaaaaaaaaaaaaaaaaaaaaaaaaaaaaaggaaaaaaaaataaaaaaaaaaaaaaaaaaaaaaaaaaaagggggggcccttttaaggggtcaaaagttaaacccgggggattggaaaggaaaaattttttttatggggcccccaaaaaaaaaaaagggggccgggtttaaaaaagtgtggagggg

SEQ ID NO: 137837 - protein, 658 aa, Zea mays
MRLLLRRRRRFPASETAAATMATAAAASTALTGATTAAPKARRRAHLLATRRALAAPIRCSAASPAMPMAPPATPLRPWGPTEPRKGADILVESLERCGVRDVFAYPGGASMEIHQALTRSPVIANHLFRHEQGEAFAASGYARSSGRVGVCIATSGPGATNLVSALADALLDSVPMVAITGQVPRRMIGTDAFQETPIVEVTRSITKHNYLVLDVDDIPRVVQEAFFLASSGRPGPVLVDIPKDIQQQMAVPVWDKPMSLPGYIARLPKPPATELLEQVLRLVGESRRPVLYVGGGCAASGEELRRFVELTGIPVTTTLMGLGNFPSDDPLSLRMLGMHGTVYANYAVDKADLLLAFGVRFDDRVTGKIEAFASRAKIVHIDIDPAEIGKNKQPHVSICADVKLALQGMNALLEGSTSKKSFDFGSWNDELDQQKREFPLGYKTSNEEIQPQYAIQVLDELTKGEAIIGTGVGQHQMWAAQYYTYKRPRQWLSSAGLGAMGFGLPAAAGASVANPGVTVVDIDGDGSFLMNVQELAMIRIENLPVKVFVLNNQHLGMVVQWEDRFYKANRAHTYLGNPENESEIYPDFVTIAKGFNIPAVRVTKKNEVRAAIKKMLETPGPYLLDIIVPHQEHVLPMIPSGGAFKDMILDGDGRTVY

SEQ ID NO: 137838 - DNA, 1719 bp, Shewanella oneidensis MR-1
  CDS (1)..(1719): transl_table=11
atggagaagttatccggcgccagcatgattgtgcgttcccttattgatgaaggtgtaaagcacatttttggttatcctggcggctcagtgttagatatctacgacgccctgcaccttatccccggtattgaacatatcctcgttcgccacgaacaagccgcagtgcatatggccgatggttatgcccgcgccacgggaaaagtgggtgtggtattagtgacctcaggtccaggcgccaccaatgcgattaccggtatcgctaccgcttatatggattcaattccattagtagtactatcgggccaagtacctagcaatcttatcggtaatgatgccttccaagaatgcgacatgattgggatttcacgccccgtcgtcaaacacagctttttagtacaagatcccactcaaattcctgagatcattaaaaaagccttttatattgcctccacgggtcgtcccggccccgtcgtggtagacttgcccaaggattgcctcaatccagcattactgcacgactatatttaccccgagagcataaaaatgcgctcctataatccaacgacatcgggccataaaggtcaaattcgtcgaggattacaggcattattagcagcgaaaaaacccgtgctgtatgtgggcggcggcgcgattatctcaggatctgaaaaacaaatcttaacgctggcagaaaaattaaatattcccgttatcagcaccttaatgggtcttggcgccttccctggcacccacaaaaacagcttaggtatgctggggatgcacggtcgttacgaagctaacatggcgatgcataactgcgatcttatctttggtattggcgttcgtttcgatgatagaaccaccaataacattgaaaaatactgccccaatgccacgattttgcatattgatatcgacccatcatccatttcaaaaaccgtaagagtagatatccctattgtaggttcggccgatatcgtattggatagcatattggcgctgcttgatgaagccagtgagaccaatgatttcgttgcaatcaatcaatggtggcaagagatcactacgtggcgcaatcgtcagtgcctggcatacgataaagaaagtaaccggatcaaaccacaacaagtcattgaaaccttatataaactcaccaatggtgaggcctatgttgcttccgatgttggtcaacaccagatgtttgccgcactatattatccctttgataaaccacgtcgttggataaactccggtggccttggcaccatgggctttgggttacccgctgccatgggggtcaaaatggcgatgccagacgaaaccgtggtctgcgtaaccggtgatggttcaattcaaatgaacattcaagaactatcaaccgctctgcaatacgatacgccagttaaaattatcaacttaaacaaccgtttccttggcatggtgaaacagtggcaagatatgatctactctggtcgccattcccattcctatatggattcggtacctaattttgcaaaaattgccgaagcctatggccatgttggcatgaccattagcgatcccgctgagcttgaatctaagatggccgaagccctcgccatgaaagacagactggtatttatcgatattatggtggatgagactgagcacgtttacccgatgcttatccgcggtggagcgatgaacgaaatgtggttaagcaaaacggagaagtgctaa

SEQ ID NO: 137839 - protein, 572 aa, Shewanella oneidensis MR-1
MEKLSGASMIVRSLIDEGVKHIFGYPGGSVLDIYDALHLIPGIEHILVRHEQAAVHMADGYARATGKVGVVLVTSGPGATNAITGIATAYMDSIPLVVLSGQVPSNLIGNDAFQECDMIGISRPVVKHSFLVQDPTQIPEIIKKAFYIASTGRPGPVVVDLPKDCLNPALLHDYIYPESIKMRSYNPTTSGHKGQIRRGLQALLAAKKPVLYVGGGAIISGSEKQILTLAEKLNIPVISTLMGLGAFPGTHKNSLGMLGMHGRYEANMAMHNCDLIFGIGVRFDDRTTNNIEKYCPNATILHIDIDPSSISKTVRVDIPIVGSADIVLDSILALLDEASETNDFVAINQWWQEITTWRNRQCLAYDKESNRIKPQQVIETLYKLTNGEAYVASDVGQHQMFAALYYPFDKPRRWINSGGLGTMGFGLPAAMGVKMAMPDETVVCVTGDGSIQMNIQELSTALQYDTPVKIINLNNRFLGMVKQWQDMIYSGRHSHSYMDSVPNFAKIAEAYGHVGMTISDPAELESKMAEALAMKDRLVFIDIMVDETEHVYPMLIRGGAMNEMWLSKTEKC

SEQ ID NO: 137840 - DNA, 1719 bp, Photobacterium profundum SS9
  CDS (1)..(1719): transl_table=11
atggaaatgttgtctggcgcagacatgatcgttcgttcaatgatcgatcaaggcgtaaagcatatcttcggataccctggtggttcagtacttgatatttacgatgctctgcatgagaagagtgatatcgaacacgtactcgtccgccatgagcaagccgctgtacacatggcagatggttatgctcgagctacaggtgatgtgggtgtagtactcgttacatcaggtcctggtgcgacgaatgcaatcactggtattgcgacggcctacatggattctatccctatggttgttttttctggtcaggttatgagtaacttgattggtaatgatgccttccaagaatgtgacatggtgggtatttctcgtcctgttgtgaagcacagctttttaattaaaaaagctcaagatatccctgagatcatcaaaaaagctttttatatcgcttctagcggtcgccctggtcctgttgttatcgatatccctaaagatatgctgaatccagcggaaacctacccttatcaatacccagaatcgattgcgatgcgttcgtataacccaacaacgcaagggcacaaaggtcagattaaacgtggtctaaaagcactcttatctgcgaagaagcctgttctgtacgtcggtggcggtgctgttatctctgaatgtgatcagcaaatcttaaaattagcagaatcgttgaatcttccggttgttaatacactgatggggttaggcgcatttccggggacgcataaaaattgtcttggtatgttaggtatgcacggcacatacgaagccaatatggcaatgcataatgcggatttgatctttggtattggtgttcgttttgatgatcgaaccaccaacaatgttgataaatattgtccaaatgccacgatcatgcacatcgatatcgacccatcttctatttcaaaaaccattgcggtggatattccgattgtaggctctgctgaaacggttctagattgcatgcttaaaatgctcgatgagcaagaaagcagtaatgaccaagaggcgatagcgagttggtgggcagatcttgagtcatggcgttcacgtaagtgtttaagttatgaaaccaataacgaacgtattaagcctcagcaggttattgaatcgctttataagttaacaaatggcgatgcatatgttgcctctgatgttggtcagcaccagatgtttgctgcattgtattatccttttgataaaccacgtcgttggattaattcgggcggcctcggcaccatgggctttggtcttcctgctgccatgggggtgaaatttgccttacctgatgcagaagtcgtttgtgtgactggtgacggcagtattcagatgaatattcaagagttatcaacggcacttcagtatgatatccctgttaaaatcattaacttaaataaccgctttcttggtatggttaagcagtggcaagatatgatttatcaaggtcgtcattcacattcgtacatggattcagtgcctgattttgctgcaatcgcagaagcttacggacatgttggggtgcgtatttcagatccagcgaaactggatagtgagctggaaaaagcgctagccatgaaagataagctggtgttcgttgatattagtattgatgaaaccgagcatgtatatccaatgttgatccgtggtggttcaatgagcgaaatgtggttaagcaaaacggagagaacataa

SEQ ID NO: 137841 - protein, 572 aa, Photobacterium profundum SS9
MEMLSGADMIVRSMIDQGVKHIFGYPGGSVLDIYDALHEKSDIEHVLVRHEQAAVHMADGYARATGDVGVVLVTSGPGATNAITGIATAYMDSIPMVVFSGQVMSNLIGNDAFQECDMVGISRPVVKHSFLIKKAQDIPEIIKKAFYIASSGRPGPVVIDIPKDMLNPAETYPYQYPESIAMRSYNPTTQGHKGQIKRGLKALLSAKKPVLYVGGGAVISECDQQILKLAESLNLPVVNTLMGLGAFPGTHKNCLGMLGMHGTYEANMAMHNADLIFGIGVRFDDRTTNNVDKYCPNATIMHIDIDPSSISKTIAVDIPIVGSAETVLDCMLKMLDEQESSNDQEAIASWWADLESWRSRKCLSYETNNERIKPQQVIESLYKLTNGDAYVASDVGQHQMFAALYYPFDKPRRWINSGGLGTMGFGLPAAMGVKFALPDAEVVCVTGDGSIQMNIQELSTALQYDIPVKIINLNNRFLGMVKQWQDMIYQGRHSHSYMDSVPDFAAIAEAYGHVGVRISDPAKLDSELEKALAMKDKLVFVDISIDETEHVYPMLIRGGSMSEMWLSKTERT

SEQ ID NO: 137842 - DNA, 1722 bp, Vibrio fischeri ES114
  CDS (1)..(1722): transl_table=11
atggaaatgttatctggttcagagatgatcgtacaatctctgattgatgaaggtgttgaacacatatttggctaccctggtggctctgtgttggatatatatgatgcgttgcacatgaaaagtgatgtgattcagcatgtacttgtaagacatgagcaagcagctacgcatatggctgatggctatgcaagagcaacaggaaagccaggtgtcgttcttgtgtgttctggtcctggtgctaccaataccattacgggtatcgctaccgcttatatggactcaataccaatggttgttctttctggtaacgttcctactaatatgatcggtaacgatgctttccaagagtgtgacatggttggagtctctcgacctgtagtcaagcacagcttcttagttaagaaagccgaagatatccctgaaacccttaaaaaagccttttatattgcttctactggccgtccaggtcccgtggttattgatatcccgaaagatgtaatgaaccctgctattaagttttcatatcaataccctgaatccatgaagatgcgttcgtataatccaacaacatctggtcataaaggacagattaaaaaaggattaaaaacattattagaggctaagaagcctgttttgtatgttggcggtggcgcgataatttcttctgcagaaaaacaaatactaaaattagctgagactcttaatttacctgttgtaagtaccttgatgggattgggagcttttcctggcactcataaaaatgcacttggcatgttaggtatgcatggtaagtatgaagctaatatggctatgcataacgcagatcttatttttggtgttggggttcgttttgatgatagaaccaccaataacttagaaaaatactgcccgaacgccacgatcatgcatatcgacattgatccctcgtcgatttcaaagaatgttcgagttgatgttccaattgttggctctgcggagattgttcttgattctatgcttaagctgttagtggagcagggaggaacaaacgatgaggcagccttagcaacatggtgggaagaaattggagtttggcaagagcgtaattgcttggcttatgaaacctctcctgatcgtattaaaccacagcaggttatcgaaacgcttcataaattaaccaatggtgatgcttatgtcgcttccgatgttggacagcatcagatgtttgctgctttgtattacccatttaataagccacgtcgttggattaattctggtggactaggaaccatggggttcggtttaccagcagctctaggggttaaatttactcatcctgatgaagtggtggtttgtgtgactggtgatggcagtattcagatgaatattcaggagctatctaccgcattgcaatacgatatccctgtgaaaatcattaatttgaataaccgtttcttaggaatggtgaagcagtggcaagatattatttaccaaggtcgccattccaattcttatatgagttcagttcctgattttgccgcaattgctgaggcatatggtcatgtaggaattcgtattaatcaccctgatgagctggagtcaggtctagagaaggctctttctctaaaagatcgccttgtgtttgtggatattaatgttgatgaaacagagcacgtttacccaatgcaaattaaaggggaagcaatggataaaatgtggctaagtaaaacggagagaacctaa

SEQ ID NO: 137843 - protein, 573 aa, Vibrio fischeri ES114
MEMLSGSEMIVQSLIDEGVEHIFGYPGGSVLDIYDALHMKSDVIQHVLVRHEQAATHMADGYARATGKPGVVLVCSGPGATNTITGIATAYMDSIPMVVLSGNVPTNMIGNDAFQECDMVGVSRPVVKHSFLVKKAEDIPETLKKAFYIASTGRPGPVVIDIPKDVMNPAIKFSYQYPESMKMRSYNPTTSGHKGQIKKGLKTLLEAKKPVLYVGGGAIISSAEKQILKLAETLNLPVVSTLMGLGAFPGTHKNALGMLGMHGKYEANMAMHNADLIFGVGVRFDDRTTNNLEKYCPNATIMHIDIDPSSISKNVRVDVPIVGSAEIVLDSMLKLLVEQGGTNDEAALATWWEEIGVWQERNCLAYETSPDRIKPQQVIETLHKLTNGDAYVASDVGQHQMFAALYYPFNKPRRWINSGGLGTMGFGLPAALGVKFTHPDEVVVCVTGDGSIQMNIQELSTALQYDIPVKIINLNNRFLGMVKQWQDIIYQGRHSNSYMSSVPDFAAIAEAYGHVGIRINHPDELESGLEKALSLKDRLVFVDINVDETEHVYPMQIKGEAMDKMWLSKTERT

SEQ ID NO: 137844 - DNA, 1722 bp, Haemophilus influenzae R2866
  CDS (1)..(1722): transl_table=11
atgaagaagttatctggcgcagagatggtggttcaatctttacgtgatgaaggcgtagagtatgtatttggttatcccggaggcgcggtattagatatttatgatgcaattcatacgctgggtggtattgaacatattttagttcgccacgaacaagccgcggtgcatatggcggatggttacgcacgttcaacgggtaaagttggatgtgtgctagtgacttcggggcctggtgcaacaaatgctatcactggtattttaacggcttataccgattctgtgcctatggttatcatttcgggtcaggttatgagcaatttaattggcagtgatgctttccaagaatgtgatatgctgggcatttctcgtcccgttgtgaagcatagctttattgtcaaaaaggcggaagatattccatctactttgaaaaaagccttttatattgcatctacgggtcgtccaggccctgttgttgtggatattccaaaagacactgtaaatcctaattttaaatatccttatgaataccctgaatatgtcgagttacgttcttataatcccacagtaaatggacacaaaggtcaaattaaaaaagcgttaaaagcacttttagtggcgaagaaaccaatactttttgtcggtggtggtgcaatcactgctgaatgtagtgagcagttaattcagtttgcacaacgtttaaatttacccgtgacttcctcattaatgggattgggtgcttatccaagtacggataaacaattcttaggtatgttgggtatgcatggtactttagaagcgaatacggcaatgcacgaaagtgatcttattttgggggttggcgttcgttttgatgatcgtacgacaaataatttagaaaaatattgcccaaatgcaaaagtgattcatattgatattgatccaacctcaatttctaaaaatgtgccagtagcgattccaattgtcggaaatgcgaaaaatgtattggaagaatttttgggtttattgaatgaagagggattaaaatctcaaacggatcttgaaagttggtggcaagaaatcaaccaatggaaagcaaaaaaatgtttggaatttgaccgcacttctggcgtgattaaaccgcaacaagtcgtggaagcggtatatcgcctcacgaaaggacaagcttatgtggcttctgatgtaggtcagcaccaaatgtttgctgcgttacattatccattcgatgaaccgcgtcattggattaattctggtggtgcaggcacaatgggttttggttttcctgcggcacttggtgtgaaattagctcatcctgaaggaactgttgtttgcgttactggcgatggtagtattcaaatgaatattcaagagctttctaccgcaacacaatatggcattcctgttgtcattatttgtttgaataatcatttcttgggaatggtaaaacaatggcaagatttgatttattctggtcgccattcgcaaacctatatgaattccttgcctgattttgcgaaattggcagaatcttacggtcacgtaggaataaaaattgctacccccgatgaacttgaaagcaaattgcaagaagcattcagtattaaaaataaattagtctttgtagatattaatgtagatgaatctgaacacgtttatccaatgcaaattcgtggtggtgcaatgaatgaaatgattttaagtaaacctcaagaggagacaaactaa

SEQ ID NO: 137845 - protein, 573 aa, Haemophilus influenzae R2866
MKKLSGAEMVVQSLRDEGVEYVFGYPGGAVLDIYDAIHTLGGIEHILVRHEQAAVHMADGYARSTGKVGCVLVTSGPGATNAITGILTAYTDSVPMVIISGQVMSNLIGSDAFQECDMLGISRPVVKHSFIVKKAEDIPSTLKKAFYIASTGRPGPVVVDIPKDTVNPNFKYPYEYPEYVELRSYNPTVNGHKGQIKKALKALLVAKKPILFVGGGAITAECSEQLIQFAQRLNLPVTSSLMGLGAYPSTDKQFLGMLGMHGTLEANTAMHESDLILGVGVRFDDRTTNNLEKYCPNAKVIHIDIDPTSISKNVPVAIPIVGNAKNVLEEFLGLLNEEGLKSQTDLESWWQEINQWKAKKCLEFDRTSGVIKPQQVVEAVYRLTKGQAYVASDVGQHQMFAALHYPFDEPRHWINSGGAGTMGFGFPAALGVKLAHPEGTVVCVTGDGSIQMNIQELSTATQYGIPVVIICLNNHFLGMVKQWQDLIYSGRHSQTYMNSLPDFAKLAESYGHVGIKIATPDELESKLQEAFSIKNKLVFVDINVDESEHVYPMQIRGGAMNEMILSKPQEETN

SEQ ID NO: 137846 - DNA, 1722 bp, Haemophilus influenzae
  CDS (1)..(1722): transl_table=11
atgaagaagttatctggcgcagagatggtggttcaatctttacgtgatgaaggcgtagagtatgtatttggttatcccggaggcgcggtattagatatttatgatgcaattcatacgctgggtggtattgaacatattttagttcgccacgaacaagccgcggtgcatatggcggatggttacgcacgttcaacgggtaaagttggatgtgtgctagtgacttcggggcctggtgcaacaaatgctatcactggcattttaacggcttataccgattctgtgcctatggttatcatttcgggtcaggttatgagcaatttaattggcagtgatgctttccaagaatgtgatatgctgggtatttctcgtcccgttgtgaagcatagctttattgtcaaaaaggcggaagatattccatctactttgaaaaaagccttttatattgcatctacgggtcgtccaggtcctgttgttgtggatattccaaaagacactgtaaatcctaattttaaatatccttatgaataccctgaatatgtcgagttacgttcttataatccaacagtaaatggacacaaaggtcaaattaaaaaagcgttaaaagcacttttagtggcgaagaaaccaatactttttgtcggtggtggtgcaatcactgctgaatgtagtgagcagttaattcagtttgcacaacgtttaaatttacccgtgacttcctcattaatgggattgggtgcttatccaagtacggataaacaattcttaggtatgttgggtatgcatggtactttagaagcgaatacggcaatgcacgaaagtgatcttattttggggattggcgttcgttttgatgatcgtacgacaaataatttagaaaaatattgcccaaatgcaaaagtgattcatattgatattgatccaacctcaatttctaaaaatgtgccagtagcgattccaattgtcggaaatgcgaaaaatgtattggaagaatttttgggtttattgaatgaagagggattaaaatctcaaacagatcttgaaagttggtggcaagaaatcaaccaatggaaagcaaaaaaatgtttggaatttgaccgcacttctggcgtgattaaaccgcaacaagtcgtggaagcggtatatcgcctcacgaaaggacaagcttatgtggcttctgatgtaggtcagcaccaaatgtttgctgcgttacattatccattcgatgaaccgcgtcattggattaattctggtggtgcaggcacaatgggttttggttttcctgcggcacttggtgttaaattagctcatcctgaaggaactgttgtttgcgttactggcgatggtagtattcaaatgaatattcaagagctttctaccgcaacacaatatggcattcctgttgtcattatttgtttgaataatcatttcttgggaatggtaaaacaatggcaagatttgatttattctggtcgccattcgcaaacctatatgaattccttgcctgattttgcgaaattggcagaatcttacggtcacgtaggaataaaaattgctacccccgatgaacttgaaagcaaattgcaagaagcattcagtattaaaaataaattagtctttgtagatattaatgtagatgaatctgaacacgtttatccaatgcaaattcgtggtggtgcaatgaatgaaatgattttaagtaaacctcaagaggagacaaactaa

SEQ ID NO: 137847 - protein, 573 aa, Haemophilus influenzae
MKKLSGAEMVVQSLRDEGVEYVFGYPGGAVLDIYDAIHTLGGIEHILVRHEQAAVHMADGYARSTGKVGCVLVTSGPGATNAITGILTAYTDSVPMVIISGQVMSNLIGSDAFQECDMLGISRPVVKHSFIVKKAEDIPSTLKKAFYIASTGRPGPVVVDIPKDTVNPNFKYPYEYPEYVELRSYNPTVNGHKGQIKKALKALLVAKKPILFVGGGAITAECSEQLIQFAQRLNLPVTSSLMGLGAYPSTDKQFLGMLGMHGTLEANTAMHESDLILGIGVRFDDRTTNNLEKYCPNAKVIHIDIDPTSISKNVPVAIPIVGNAKNVLEEFLGLLNEEGLKSQTDLESWWQEINQWKAKKCLEFDRTSGVIKPQQVVEAVYRLTKGQAYVASDVGQHQMFAALHYPFDEPRHWINSGGAGTMGFGFPAALGVKLAHPEGTVVCVTGDGSIQMNIQELSTATQYGIPVVIICLNNHFLGMVKQWQDLIYSGRHSQTYMNSLPDFAKLAESYGHVGIKIATPDELESKLQEAFSIKNKLVFVDINVDESEHVYPMQIRGGAMNEMILSKPQEETN

SEQ ID NO: 137848 - DNA, 2301 bp, Oryza sativa
  CDS (48)..(1982)
cccaaacccagaaaccctcgccgccgccgccgccgccaccacccaccatggctacgaccgccgcggccgcggccgccgccctgtccgccgccgcgacggccaagaccggccgtaagaaccaccagcgacaccacgtccttcccgctcgaggccgggtgggggcggcggcggtcaggtgctcggcggtgtccccggtcaccccgccgtccccggcgccgccggccacgccgctccggccgtgggggccggccgagccccgcaagggcgcggacatcctcgtggaggcgctggagcggtgcggcgtcagcgacgtgttcgcctacccgggcggcgcgtccatggagatccaccaggcgctgacgcgctccccggtcatcaccaaccacctcttccgccacgagcagggcgaggcgttcgcggcgtccgggtacgcgcgcgcgtccggccgcgtcggggtctgcgtcgccacctccggccccggggcaaccaacctcgtgtccgcgctcgccgacgcgctgctcgactccgtcccgatggtcgccatcacgggccaggtccacagccgcatgatcggcaccgacgccttccaggagacgcccatagtcgaggtcacccgctccatcaccaagcacaattaccttgtccttgatgtggaggacatcccccgcgtcatacaggaagccttcttcctcgcgtcctcgggccgtcctggcccggtgctggtcgacatccccaaggacatccagcagcagatggccgtgccggtctgggacacctcgatgaatctaccagggtacatcgcacgcctgcccaagccacccgcgacagaattgcttgagcaggtcttgcgtctggttggcgagtcacggcgcccgattctctatgtcggtggtggctgctctgcatctggtgacgaattgcgctggtttgttgagctgactggtatcccagttacaaccactctgatgggcctcggcaatttccccagtgacgacccgttgtccctgcgcatgcttgggatgcatggcacggtgtacgcaaattatgccgtggataaggctgacctgttgcttgcgtttggtgtgcggtttgatgatcgtgtgacagggaaaattgaggcttttgcaagcagggccaagattgtgcacattgacattgatccagcagagattggaaagaacaagcaaccacatgtgtcaatttgcgcagatgttaagcttgctttacagggcttgaatgctctgctacaacagagcacaacaaagacaagttctgattttagtgcatggcacaatgagttggaccagcagaagagggagtttcctctggggtacaaaacttttggtgaagagatcccaccgcaatatgccattcaggtgctggatgagctgacgaaaggtgaggcaatcatcgctactggtgttgggcagcaccagatgtgggcggcacaatattacacctacaagcggccacggcagtggctgtcttcggctggtctgggcgcaatgggatttgggctgcctgctgcagctggtgcttctgtggctaacccaggtgtcacagttgttgatattgatggggatggtagcttcctcatgaacattcaggagctggcattgatccgcattgagaacctccctgtgaaggtgatggtgttgaacaaccaacatttgggtatggtggtgcaatgggaggataggttttacaaggcgaatagggcgcatacatacttgggcaacccggaatgtgagagcgagatatatccagattttgtgactattgctaaggggttcaatattcctgcagtccgtgtaacaaagaagagtgaagtccgtgccgccatcaagaagatgctcgagactccagggccatacttgttggatatcatcgtcccgcaccaggagcatgtgctgcctatgatcccaagtgggggcgcattcaaggacatgatcctggatggtgatggcaggactgtgtattaatctataatctgtatgttggcaaagcaccagcccggcctatgtttgacctgaatgacccataaagagtggtatgcctatgatgtttgtatgtgctctatcaataactaaggtgtcaactatgaaccatatgctcttctgttttacttgtttgatgtgcttggcatggtaatcctaattagcttcctgctgtctaggtttgtagtgtgttgttttctgtaggcatatgcatcacaagatatcatgtaagtttcttgtcctacatatcaataataagagaataaagtacttctatgcaaaaaaaaaaaaaaaaaaaaaaaaa

SEQ ID NO: 137849 - protein, 644 aa, Oryza sativa
MATTAAAAAAALSAAATAKTGRKNHQRHHVLPARGRVGAAAVRCSAVSPVTPPSPAPPATPLRPWGPAEPRKGADILVEALERCGVSDVFAYPGGASMEIHQALTRSPVITNHLFRHEQGEAFAASGYARASGRVGVCVATSGPGATNLVSALADALLDSVPMVAITGQVHSRMIGTDAFQETPIVEVTRSITKHNYLVLDVEDIPRVIQEAFFLASSGRPGPVLVDIPKDIQQQMAVPVWDTSMNLPGYIARLPKPPATELLEQVLRLVGESRRPILYVGGGCSASGDELRWFVELTGIPVTTTLMGLGNFPSDDPLSLRMLGMHGTVYANYAVDKADLLLAFGVRFDDRVTGKIEAFASRAKIVHIDIDPAEIGKNKQPHVSICADVKLALQGLNALLQQSTTKTSSDFSAWHNELDQQKREFPLGYKTFGEEIPPQYAIQVLDELTKGEAIIATGVGQHQMWAAQYYTYKRPRQWLSSAGLGAMGFGLPAAAGASVANPGVTVVDIDGDGSFLMNIQELALIRIENLPVKVMVLNNQHLGMVVQWEDRFYKANRAHTYLGNPECESEIYPDFVTIAKGFNIPAVRVTKKSEVRAAIKKMLETPGPYLLDIIVPHQEHVLPMIPSGGAFKDMILDGDGRTVY

SEQ ID NO: 137850 - DNA, 2300 bp, Oryza sativa
  CDS (48)..(1982)
cccaaacccagaaaccctcgccgccgccgccgccgccaccacccaccatggctacgaccgccgcggccgcggccgccgccctgtccgccgccgcgacggccaagaccggccgtaagaaccaccagcgacaccacgtccttcccgctcgaggccgggtgggggcggcggcggtcaggtgctcggcggtgtccccggtcaccccgccgtccccggcgccgccggccacgccgctccggccgtgggggccggccgagccccgcaagggcgcggacatcctcgtggaggcgctggagcggtgcggcgtcagcgacgtgttcgcctacccgggcggcgcgtccatggagatccaccaggcgctgacgcgctccccggtcatcaccaaccacctcttccgccacgagcagggcgaggcgttcgcggcgtccgggtacgcgcgcgcgtccggccgcgtcggggtctgcgtcgccacctccggccccggggcaaccaacctcgtgtccgcgctcgccgacgcgctgctcgactccgtcccgatggtcgccatcacgggccaggtccaccgccgcatgatcggcaccgacgccttccaggagacgcccatagtcgaggtcacccgctccatcaccaagcacaattaccttgtccttgatgtggaggacatcccccgcgtcatacaggaagccttcttcctcgcgtcctcgggccgtcctggcccggtgctggtcgacatccccaaggacatccagcagcagatggccgtgccggtctgggacacctcgatgaatctaccagggtacatcgcacgcctgcccaagccacccgcgacagaattgcttgagcaggtcttgcgtctggttggcgagtcacggcgcccgattctctatgtcggtggtggctgctctgcatctggtgacgaattgcgctggtttgttgagctgactggtatcccagttacaaccactctgatgggcctcggcaatttccccagtgacgacccgttgtccctgcgcatgcttgggatgcatggcacggtgtacgcaaattatgccgtggataaggctgacctgttgcttgcgtttggtgtgcggtttgatgatcgtgtgacagggaaaattgaggcttttgcaagcagggccaagattgtgcacattgacattgatccagcagagattggaaagaacaagcaaccacatgtgtcaatttgcgcagatgttaagcttgctttacagggcttgaatgctctgctacaacagagcacaacaaagacaagttctgattttagtgcatggcacaatgagttggaccagcagaagagggagtttcctctggggtacaaaacttttggtgaagagatcccaccgcaatatgccattcaggtgctggatgagctgacgaaaggtgaggcaatcatcgctactggtgttgggcagcaccagatgtgggcggcacaatattacacctacaagcggccacggcagtggctgtcttcggctggtctgggcgcaatgggatttgggctgcctgctgcagctggtgcttctgtggctaacccaggtgtcacagttgttgatattgatggggatggtagcttcctcatgaacattcaggagctggcattgatccgcattgagaacctccctgtgaaggtgatggtgttgaacaaccaacatttgggtatggtggtgcaattggaggataggttttacaaggcgaatagggcgcatacatacttgggcaacccggaatgtgagagcgagatatatccagattttgtgactattgctaaggggttcaatattcctgcagtccgtgtaacaaagaagagtgaagtccgtgccgccatcaagaagatgctcgagactccagggccatacttgttggatatcatcgtcccgcaccaggagcatgtgctgcctatgatcccaagtgggggcgcattcaaggacatgatcctggatggtgatggcaggactgtgtattaatctataatctgtatgttggcaaagcaccagcccggcctatgtttgacctgaatgacccataaagagtggtatgcctatgatgtttgtatgtgctctatcaataactaaggtgtcaactatgaaccatatgctcttctgttttacttgtttgatgtgcttggcatggtaatcctaattagcttcctgctgtctaggtttgtagtgtgttgttttctgtaggcatatgcatcacaagatatcatgtaagtttcttgtcctacatatcaataataagagaataaagtacttctatgcaaaaaaaaaaaaaaaaaaaaaaaa

SEQ ID NO: 137851 - protein, 644 aa, Oryza sativa
MATTAAAAAAALSAAATAKTGRKNHQRHHVLPARGRVGAAAVRCSAVSPVTPPSPAPPATPLRPWGPAEPRKGADILVEALERCGVSDVFAYPGGASMEIHQALTRSPVITNHLFRHEQGEAFAASGYARASGRVGVCVATSGPGATNLVSALADALLDSVPMVAITGQVHRRMIGTDAFQETPIVEVTRSITKHNYLVLDVEDIPRVIQEAFFLASSGRPGPVLVDIPKDIQQQMAVPVWDTSMNLPGYIARLPKPPATELLEQVLRLVGESRRPILYVGGGCSASGDELRWFVELTGIPVTTTLMGLGNFPSDDPLSLRMLGMHGTVYANYAVDKADLLLAFGVRFDDRVTGKIEAFASRAKIVHIDIDPAEIGKNKQPHVSICADVKLALQGLNALLQQSTTKTSSDFSAWHNELDQQKREFPLGYKTFGEEIPPQYAIQVLDELTKGEAIIATGVGQHQMWAAQYYTYKRPRQWLSSAGLGAMGFGLPAAAGASVANPGVTVVDIDGDGSFLMNIQELALIRIENLPVKVMVLNNQHLGMVVQLEDRFYKANRAHTYLGNPECESEIYPDFVTIAKGFNIPAVRVTKKSEVRAAIKKMLETPGPYLLDIIVPHQEHVLPMIPSGGAFKDMILDGDGRTVY

SEQ ID NO: 137852 - DNA, 1986 bp, Oryza sativa; Strain IRGA 417
  CDS (1)..(1935)
atggctacgaccgccgcggccgcggccgccaccttgtccgccgccgcgacggccaagaccggccgtaagaaccaccagcgacaccacgtctttcccgctcgaggccgggtgggggcggcggcggtcaggtgctcggcggtgtccccggtcaccccgccgtccccggcgccgccggccacgccgctccggccgtgggggccggccgagccccgcaagggcgcggacatcctcgtggaggcgctggagcggtgcggcgtcagcgacgtgttcgcctacccgggcggcgcgtccatggagatccaccaggcgctgacgcgctccccggtcatcaccaaccacctcttccgccacgagcagggcgaggcgttcgcggcgtccgggtacgcgcgcgcgtccggccgcgtcggggtctgcgtcgccacctccggccccggggcaaccaacctcgtgtccgcgctcgccgacgcgctgctcgactccgtcccgatggtcgccatcacgggccaggtcccccgccgcatgatcggcaccgacgccttccaggagacgcccatagtcgaggtcacccgctccatcaccaagcacaattaccttgtccttgatgtggaggacatcccccgcgtcatacaggaagccttcttcctcgcgtcctcgggccgtcctggcccggtgctggtcgacatccccaaggacatccagcagcagatggctgtgccagtctgggacacctcgatgaatctaccggggtacattgcacgcctgcccaagccacccgcgacagaattgcttgagcaggtcttgcgtctggttggcgagtcacggcgcccgattctctatgtcggtggtggctgctctgcatctggtgatgaattgcgccggtttgttgagctgaccggcatcccagttacaaccactctgatgggcctcggcaatttccccagtgatgatccgttgtccctgcgcatgcttgggatgcatggcacggtgtacgcaaattatgcggtggataaggctgacctgttgcttgcatttggcgtgcggtttgatgatcgtgtgacagggaaaattgaggcttttgcaagcagggccaagattgtgcacattgacattgatccagcggagattggaaagaacaagcaaccacatgtgtcaatttgcgcagatgttaagcttgctttacagggcttgaatgctctgctagaccagagcacaacaaagacaagttctgattttagtgcgtggcacaatgagttggaccagcagaagagggagtttcctctggggtacaagacttttggtgaagagatcccaccgcaatatgctattcaggtgctggatgagctgacgaaaggggaggcaatcatcgctactggtgttggacagcaccagatgtgggcggcacaatattacacctacaagcggccacggcagtggctgtcttcggctggtctgggcgcaatgggatttgggctgcctgctgcagctggtgcttctgtggctaacccaggtgtcacagttgttgatattgatggggatggtagcttcctcatgaacattcaggagttggcattgatccgcattgagaacctcccggtgaaggtgatggtgttgaacaaccaacatttgggtatggttgtgcaatgggaggataggttttacaaggcaaatagggcgcatacatacttgggcaacccagaatgtgagagtgagatatatccagattttgtgactattgctaaagggttcaatattcctgcagtccgtgtaacaaagaagagtgaagtccgtgccgccatcaagaagatgctcgataccccagggccatacttgttggatatcatcgtcccacaccaggagcatgtgctgcctatgatcccaagtgggggcgcattcaaggacatgatcctggatggtgatggcaggactgtgtattaatctataatctgtatgttggcaaagcaccagcccggcctatgtttgacctga

SEQ ID NO: 137853 - protein, 644 aa, Oryza sativa; Strain IRGA 417
MATTAAAAAATLSAAATAKTGRKNHQRHHVFPARGRVGAAAVRCSAVSPVTPPSPAPPATPLRPWGPAEPRKGADILVEALERCGVSDVFAYPGGASMEIHQALTRSPVITNHLFRHEQGEAFAASGYARASGRVGVCVATSGPGATNLVSALADALLDSVPMVAITGQVPRRMIGTDAFQETPIVEVTRSITKHNYLVLDVEDIPRVIQEAFFLASSGRPGPVLVDIPKDIQQQMAVPVWDTSMNLPGYIARLPKPPATELLEQVLRLVGESRRPILYVGGGCSASGDELRRFVELTGIPVTTTLMGLGNFPSDDPLSLRMLGMHGTVYANYAVDKADLLLAFGVRFDDRVTGKIEAFASRAKIVHIDIDPAEIGKNKQPHVSICADVKLALQGLNALLDQSTTKTSSDFSAWHNELDQQKREFPLGYKTFGEEIPPQYAIQVLDELTKGEAIIATGVGQHQMWAAQYYTYKRPRQWLSSAGLGAMGFGLPAAAGASVANPGVTVVDIDGDGSFLMNIQELALIRIENLPVKVMVLNNQHLGMVVQWEDRFYKANRAHTYLGNPECESEIYPDFVTIAKGFNIPAVRVTKKSEVRAAIKKMLDTPGPYLLDIIVPHQEHVLPMIPSGGAFKDMILDGDGRTVY

SEQ ID NO: 137854 - DNA, 1659 bp, Archaeoglobus fulgidus DSM 4304
  CDS (1)..(1659): transl_table=11
atgcgtgctgctgatgccattgtcaaggctttggagatggaaggtatagaggtcgtgtttggaatacccggaggtgcgattattgaggtctacgatgcgctctacgattcgggaataaggcacataacaacgaggcacgagcagggtgcgacccacgcggcagacggctacgcaagggcgagcggcaaagtgggggttgccttcgccacctccggacccggagcgacgaacaccgttaccggcatagctacagcctacatggactcctcaccgctcgttgtcttcaccggccaggttccgaccagcatgatcggaaacgatgcgtttcaggaggccgacataaccggaatcacgatgcccataaccaagcacaactacctggttacggacaccaaagaccttctgggcacgataaaggaggctttccacatagcctcaaccggcagacccggtccggttctcgttgacctgcccaaggacatcacaaccgcagacatagacttcaactaccccaagaaggtcagcctcccgggatacaagccgaagctggaggggcatccgaggcagatagcgaaggcggccgagctgataatgaaggcggagagaccggttatacttgccggtggtggggtcataatctcaaacgcctcaaaggagcttgtcgagcttgcagaaacaatcccggccttcgttgttacaacgctgatgggaaaaggctcaattccagaaacacacccgctgtcactcggattcgccggaatgcacggaacgaagtacgcaaactacgctttgagtgagagcgacttgattatcgcggtcggctgcaggttcagcgacagaacaaccggaaacgtcgcgatgttcgcaccagaggcaaagataatccacatcgacatcgatcctgcagaaataggaaaaaacgtcagagttgacgtccctatagtcggagatgcgaggaaagtccttgcaaagcttaagaaggccgtggagtacaagcaaagaaaagaatgggaggacaaggtgaacgactggaagaagagatatccgctgaagtacaaaaaggaggggttcaagccgcagtacgtgattgagcgcgcctgcgagattatgccggacgctattatcacgacagaggttggacagaatcagatgtgggctgctcagtttttcaaaaccaagtacccaaggcagttcataacaagcggtggattgggaacgatgggtttcggcttccctgcagcgatgggcgcacaggtcgcgtttccagaaaagacagttatagacatcgcaggggatgggagcttcttcatgaacatccaggagcttgcaacatgcgtcaagtacgagattcccgtgaaagttctggttctgaataacggctacctcggaatggtcaggcagtggcaggagctgttctacagagagaggtactctgcaacctgcattggctgcgagaaaacgggatttgaagccatagcaaggggtttcggtgcgataggcatgaccgtcgagaagccttcggaagtcgatgatgcactcaaggaggcaaaggaagtcgacgcgccggtggtcatagacttcagagttgactaccaggcaaacgtcttcccgatggtcccgccgggagcggcgttaaacgagattatcgatgaggagtga

SEQ ID NO: 137855 - protein, 552 aa, Archaeoglobus fulgidus DSM 4304
MRAADAIVKALEMEGIEVVFGIPGGAIIEVYDALYDSGIRHITTRHEQGATHAADGYARASGKVGVAFATSGPGATNTVTGIATAYMDSSPLVVFTGQVPTSMIGNDAFQEADITGITMPITKHNYLVTDTKDLLGTIKEAFHIASTGRPGPVLVDLPKDITTADIDFNYPKKVSLPGYKPKLEGHPRQIAKAAELIMKAERPVILAGGGVIISNASKELVELAETIPAFVVTTLMGKGSIPETHPLSLGFAGMHGTKYANYALSESDLIIAVGCRFSDRTTGNVAMFAPEAKIIHIDIDPAEIGKNVRVDVPIVGDARKVLAKLKKAVEYKQRKEWEDKVNDWKKRYPLKYKKEGFKPQYVIERACEIMPDAIITTEVGQNQMWAAQFFKTKYPRQFITSGGLGTMGFGFPAAMGAQVAFPEKTVIDIAGDGSFFMNIQELATCVKYEIPVKVLVLNNGYLGMVRQWQELFYRERYSATCIGCEKTGFEAIARGFGAIGMTVEKPSEVDDALKEAKEVDAPVVIDFRVDYQANVFPMVPPGAALNEIIDEE

SEQ ID NO: 137856 - DNA, 1758 bp, Aquifex aeolicus VF5
  CDS (1)..(1758): transl_table=11
atgccggcaaagaaaggagctgacatagttattgaaacacttaaggctgaaggcgttgaggttgtttttgggcttcccggcggagcgataatggaagtttacgacgccctttacaggctcggagggataaaacacatactcgcaaggcacgaacagggcgccggtcacatggcggaagggtacgcaaaggcaaccggaaaagtaggggttgtaatggtaacatcaggaccgggagccacaaacctcgtcacacccatagcggacgcatatatggactccgttccgcttgtcgcaataacgggacaggtacccacccaccttatcggaaacgatgcctttcaagaagttgatatcgtaggaataacgagacccataaccaagcataactttttagttaagagcatagaggagcttcccctcatcttaagggaggccttttacatagcgagaacaggaagacccggacccgttctcgtggaccttcccaaagacgtcactcagcaaatagcggacgtaaaaataccctctgacgaagaggtaaaggcagcccttcccggatacaagccccacgttgagggaaatccccagcagataaagaaggcagcagagctcataatgtccgcaaaaagacctgttctttacgttggcgggggagctgtaaactcggaagctcaggaggaactaattgaactcgctgaattaatgcagatacccgtaaccaccaccacccagggtaaaggtgcattccccgaaacacaccctctttccctcaggatgctcggaatgcacggaacatattacgcaaatatggcggtttacaactcggacctcctcatagctgtaggtgcgagatttgacgacagggttacgggtaagatagatgaattcgcaccgggagcaaagataattcacatagacatagacccagcttctatttccaagaacataaccgttgacgttcccatagtcggggacgtgaagatagtcctcaggaagctcataaacgaaataaagaaaaggggagcaaagatactctatccagaagagaggaagaagtggctggagcaaatagaaaagtggaaaaaactccatccactgacttacagaaattctgacaaggttataaagcctcagtacgttatagaacagctctgggaagccacgaacggggaagccataatcgttccaggcgttggacagcaccagatgtgggctgcgatgttctacaagttcaaatatccgagacagtttataaattcgggcggacttggaactatgggatttggactgcccgcgggaataggggcaaagataggaagaccggacagagaagtttgggtagtggacggagacggctccttcgttatgaccatgcaggaagtaatcaccgcagttcagtataaagttcccgttaaggtagctattattaacaacgcgtacctcgggatggtaaggcagtggcaggaactcttctacgacaagaggtactccgaagttgacctctcagtccagccggatttcgtaaagctcgcagaagcgatgggcgcggttggtatgagggctaaaaagcctaaggaagtaagagaagttatagaagaggcaagaaagatagacgacagacccgtaattatagacttctgggtagacagggaggaaaacgttctcccaatggttccagcaggaaagtcttacaaggacatgatactcgaagacggaaaaggaaagcacgaagcggaaaccatgtacctcgtaggttaa

SEQ ID NO: 137857 - protein, 585 aa, Aquifex aeolicus VF5
MPAKKGADIVIETLKAEGVEVVFGLPGGAIMEVYDALYRLGGIKHILARHEQGAGHMAEGYAKATGKVGVVMVTSGPGATNLVTPIADAYMDSVPLVAITGQVPTHLIGNDAFQEVDIVGITRPITKHNFLVKSIEELPLILREAFYIARTGRPGPVLVDLPKDVTQQIADVKIPSDEEVKAALPGYKPHVEGNPQQIKKAAELIMSAKRPVLYVGGGAVNSEAQEELIELAELMQIPVTTTTQGKGAFPETHPLSLRMLGMHGTYYANMAVYNSDLLIAVGARFDDRVTGKIDEFAPGAKIIHIDIDPASISKNITVDVPIVGDVKIVLRKLINEIKKRGAKILYPEERKKWLEQIEKWKKLHPLTYRNSDKVIKPQYVIEQLWEATNGEAIIVPGVGQHQMWAAMFYKFKYPRQFINSGGLGTMGFGLPAGIGAKIGRPDREVWVVDGDGSFVMTMQEVITAVQYKVPVKVAIINNAYLGMVRQWQELFYDKRYSEVDLSVQPDFVKLAEAMGAVGMRAKKPKEVREVIEEARKIDDRPVIIDFWVDREENVLPMVPAGKSYKDMILEDGKGKHEAETMYLVG

SEQ ID NO: 137858 - DNA, 1722 bp, Vibrio cholerae O1 biovar eltor str. N16961
  CDS (1)..(1722): transl_table=11
atggaaatgctatctggcgcagagatgatcgtccaatctctgatcaatgaaggtgtggagcaaatcttcggatatcccggcggttcagtactcgacatctacgatgcccttcacgaaaaaacagaccaaattaaacacgttctggttcgtcacgaacaagccgcaacacatatggctgatggctatgcgcgcgccactggaaaaccgggcgtagtgctcgtctgctcaggtccgggcgccaccaatacggtgactgggattgcaaccgcctatatggactcgattccgatgattgtgatctccggtaacgtagccactaatcttattggtaacgatgcatttcaagagtgcgatatcgtcggcgtgtctcgtcccatcgttaaacacagctttttggtgaaaaaagccgaagatattcctgaaaccatcaaaaaagcgttttatatcgcgtcaacggggcgtcctggtcctgtagtgattgacgtgccaaaagatgtgatgagcccgcttaataagctgccttatgagtatccagaaaccattaaaatgcgctcttacaacccaacgacggctggccacaaaggacagatcaaaaaagggttacgcgcactgctcgatgcgaaaaagccagtactgtacgtcggtggcggggcgattattgctaatgcagatcagcaaattcgccaacttgcagaggctttaaatctgcccgtggttagtactttgatgggattgggcgtttttcctggcactcataaaaactcactgggtatgcttggcatgcatggtgtgtatgaagccaatatggcgatgcacaatgcagatctgatttttggggtaggtgtgcgctttgatgaccgtacgactaacaacctagagaagtactgccccaacgcgaaaatcatgcatatcgatattgacccgtcatcgatttctaaaaacgtgaaagtcgatctgccgattgttggttctgccgaccaagtattggatggcatgctcaagcttctggaagagagcgctgagcgcaatgatgcggcagcattggatagttggtggaatgagatccaagtgtggcgtgatcgtcagtgtttggcttatgaaacctcagcagaacggattaagcctcagcaagtgattgaaacgctatataaaatcacggaaggtaaagcaattttggcctcggatgtggggcagcaccaaatgtttgcggcactctactatccgtttgataagccgcgtcagtggattaactctggcgggctaggcaccatgggttttggtttacctgcgggaatgggcgtgaaattcgccatgccagaagaagaggtactggtcgtgaccggagatggcagtattcagatgaatattcaagagctatcgaccgcactgcagtacgacattccagtaaaaatcattaacctcaacaaccgtttccttggaatggtgaaacagtggcaggatattatttatcaaggtcgtcactctaactcatacatgagttctgtgccggattttgcggcgatcgcagaagcttatggtcatgttgggatccgtatttctcaccctgatgagctgcaagctgggctggaaaaagcgttagcgatgaaagatcgtctggtgtttgtcgacattaatgtcgatgaaactgagcacgtttacccaatgcagatcaaaggcgaagggatggacaaaatgtggttgagcaaaacggagagaacctaa

SEQ ID NO: 137859 - protein, 573 aa, Vibrio cholerae O1 biovar eltor str. N16961
MEMLSGAEMIVQSLINEGVEQIFGYPGGSVLDIYDALHEKTDQIKHVLVRHEQAATHMADGYARATGKPGVVLVCSGPGATNTVTGIATAYMDSIPMIVISGNVATNLIGNDAFQECDIVGVSRPIVKHSFLVKKAEDIPETIKKAFYIASTGRPGPVVIDVPKDVMSPLNKLPYEYPETIKMRSYNPTTAGHKGQIKKGLRALLDAKKPVLYVGGGAIIANADQQIRQLAEALNLPVVSTLMGLGVFPGTHKNSLGMLGMHGVYEANMAMHNADLIFGVGVRFDDRTTNNLEKYCPNAKIMHIDIDPSSISKNVKVDLPIVGSADQVLDGMLKLLEESAERNDAAALDSWWNEIQVWRDRQCLAYETSAERIKPQQVIETLYKITEGKAILASDVGQHQMFAALYYPFDKPRQWINSGGLGTMGFGLPAGMGVKFAMPEEEVLVVTGDGSIQMNIQELSTALQYDIPVKIINLNNRFLGMVKQWQDIIYQGRHSNSYMSSVPDFAAIAEAYGHVGIRISHPDELQAGLEKALAMKDRLVFVDINVDETEHVYPMQIKGEGMDKMWLSKTERT

SEQ ID NO: 137860 - DNA, 1725 bp, Pasteurella multocida subsp. multocida str. Pm70
  CDS (1)..(1725): transl_table=11
atgaaaaagttatctggcgcagaaatggttgtgcagtctttgcgagatgaaggcgttgagtttttatttggttatcctggcggatcggttttagatatttatgatgcgattcataccttggggggcattgaacatattcttgtccgacatgaacaagccgctgtgcacatggcagatggttatgccagagcgaccggtaaagtgggttgtgttcttgtgacatccggacccggtgcaactaataccatcactggtattgcaacagcgtatatggattccgtgcctttgattattttatctggacaggtgatgtcaggattaattggcagtgatgcttttcaagaatgcgatatggtgggtatctctcgtccagtcgtcaaacacagttttttagtgaaatctgcggctgaaattcctgaaaccattaaaaaagctttttatattgcgtcaacaggcagaccgggacctgtggtgatcgatttgccaaaggatgtggttaatcctgcacataaatttacttatcattatccagaaagagttgaattacgttcttataatccaacaatacaagggcataaagggcaaattaaaaaagcattaaaagccttattagtcgcgaaaaagccggtgttatttgttggtggtggtgtcatcactgcgaattgtagcgacaaattaacgcaatttgcacaaaccttaaatttgccggtcacttcctccttaatgggattaggtgcctatccaagctcagataagcaattcttagggatgttaggcatgcatggtacttacgaagcgaataatgcaatgcatcatagtgatctcattcttggtattggtgtgcgttttgatgatagaacgactaataacttggcaaaatattgtccacatgcaaaagtgattcatattgatattgatccaacgtctatttctaaaaatgtattggcatctattccaattgtgggcagtgcagaaaaagtcattaatgaatttttagccttattagaggatgacaatttattaaaatcgcaaactgccttggatgaatggtggcagcaaattgatgaatggaaagcagtaaaatgtctctcttttacacgagatgattccgtcattaaaccacagcaagtgatggaagtggtttatcgattaacacaaggtgaggcttatgtcgcctcagatgttggacaacatcaaatgtttgcggcattacattatccgtttaaccaacctcggcgttggattaactctggtggcttagggaccatgggctttggactaccagccgcacttggggtaaagctcgcttatcctgactcaacagtggtgtgtgtgacgggggatggcagtattcaaatgaatattcaagagctttctactgcacagcaatatgatattccaattgtgattatcagtttgaataaccgctttttaggcatggtgaaacagtggcaagatctgatttattctggacgccattcacagtcttatatgaattctttacctgattttgtgaagcttgctgaggcttatggacatgtgggtatccaaattaatacgccagatgaattagaggaaaaactcactcaagcattttcgatgaaagataaattagtatttgtcgatattaatgttgatgcgacggaacatgtttatccgatgcaagtacgtggtggtgcaatgaatgaaatgattttaacaaaaccggagaaggcgaatgcgtag

SEQ ID NO: 137861 - protein, 574 aa, Pasteurella multocida subsp. multocida str. Pm70
MKKLSGAEMVVQSLRDEGVEFLFGYPGGSVLDIYDAIHTLGGIEHILVRHEQAAVHMADGYARATGKVGCVLVTSGPGATNTITGIATAYMDSVPLIILSGQVMSGLIGSDAFQECDMVGISRPVVKHSFLVKSAAEIPETIKKAFYIASTGRPGPVVIDLPKDVVNPAHKFTYHYPERVELRSYNPTIQGHKGQIKKALKALLVAKKPVLFVGGGVITANCSDKLTQFAQTLNLPVTSSLMGLGAYPSSDKQFLGMLGMHGTYEANNAMHHSDLILGIGVRFDDRTTNNLAKYCPHAKVIHIDIDPTSISKNVLASIPIVGSAEKVINEFLALLEDDNLLKSQTALDEWWQQIDEWKAVKCLSFTRDDSVIKPQQVMEVVYRLTQGEAYVASDVGQHQMFAALHYPFNQPRRWINSGGLGTMGFGLPAALGVKLAYPDSTVVCVTGDGSIQMNIQELSTAQQYDIPIVIISLNNRFLGMVKQWQDLIYSGRHSQSYMNSLPDFVKLAEAYGHVGIQINTPDELEEKLTQAFSMKDKLVFVDINVDATEHVYPMQVRGGAMNEMILTKPEKANA

SEQ ID NO: 137862 - DNA, 1734 bp, Methanothermobacter thermautotrophicus str. Delta H
  CDS (1)..(1734): transl_table=11
gtgtttccaatgaaaggtggccaggcaataatcagatcacttctggatcagggagcagacaccgtattcggataccccggtggacagttactgccactctatgatatgctctatgattctgaacttaaacacatcctcgtaagacatgaacagtgcgcagcacacgctgcagacggatatgcaagggcctcaggaagggtgggggtctgcatagctacctccggtcccggggcaacaaaccttgtaacaggcattgcaacggcctacatggactcagcccccatcgtggccattgcaggtcaggtcccaacacacctcattggaaatgatgcattccaggaggtggacatgatagggataaccatgcccatcaccaagcacagtttccagccatcagacgccagcgagatacctgcaattgtcagggcaagcttccacatagcaaagacaggacggccaggaccggttgttatagacctccccaaggatatacaggaacaggagatcatggaggaggttgatgacctggagctcccagggtacaggcccaatgtaaagggccaccccctccagataaagagggccgctgaactcataaggaggtcagaaaaacccgtcatacttgctggtggaggagttataatatcaggggcgtccagggagataaaggaattatcagatctcataaaggccccggtgacaacaacactccttggtaagggttcctttcctgaggaccacccttcagccatgggtatgctcggcatgcacggccgcaaggtggcgaacctgacagtggacgaatgcgactgcctcatagccgttggatgcagattctcagaccgtacaacagggaacgttgcagaattcgcccccaacgccaggataatacacgtcgacatcgaccccgctgagataggtaagaacgttggggttgatgtccccatcgttggagatgcaagaaacgtcctcagggaactcatagcaaaactcaaaaaatatgaaaagagggacagccaatggcttgaaagcgtccagaaattccgtgccgattgcatgccaaggatgagctatgatgaggtgcccctgaagccccagcaggttataaaggagataagccaggtccttgatgacgagacggtcgttacaacggatgtgggacagaaccagatgtggatggcccacttctacacatcccgtgcccccagaaagttcatatcatcaggaggccttggaacaatgggcttcggttttccagccgccataggtgccaaggtggcactgcctgatagtgacgttgttgcagtgtgcggtgacggcggattcctcatggtctgccaggaccttgcaaccataagggaatacgacatcccggtggtgatatgtatcatggacaacaggcaccttggaatggtggcgcagtggcagcgcctcttctatgatgagagaatgtcccatacacacctgggcgaagttccggactttgtgaagctggctgaatcatttggagtggaggctgagaggatagaggaacccggtgaaacctctgaagccctttcaagggcaataaggtctggtgaacctgccctccttgatatagtgatagatcctgatgagatactccccatggtcccccccggctgtggtctcaccgagatagtgggggagtaccgggttgaaagggaggacccccaggaaattaaatactccccagggaaggcggatggtgattga

SEQ ID NO: 137863 - protein, 577 aa, Methanothermobacter thermautotrophicus str. Delta H
MFPMKGGQAIIRSLLDQGADTVFGYPGGQLLPLYDMLYDSELKHILVRHEQCAAHAADGYARASGRVGVCIATSGPGATNLVTGIATAYMDSAPIVAIAGQVPTHLIGNDAFQEVDMIGITMPITKHSFQPSDASEIPAIVRASFHIAKTGRPGPVVIDLPKDIQEQEIMEEVDDLELPGYRPNVKGHPLQIKRAAELIRRSEKPVILAGGGVIISGASREIKELSDLIKAPVTTTLLGKGSFPEDHPSAMGMLGMHGRKVANLTVDECDCLIAVGCRFSDRTTGNVAEFAPNARIIHVDIDPAEIGKNVGVDVPIVGDARNVLRELIAKLKKYEKRDSQWLESVQKFRADCMPRMSYDEVPLKPQQVIKEISQVLDDETVVTTDVGQNQMWMAHFYTSRAPRKFISSGGLGTMGFGFPAAIGAKVALPDSDVVAVCGDGGFLMVCQDLATIREYDIPVVICIMDNRHLGMVAQWQRLFYDERMSHTHLGEVPDFVKLAESFGVEAERIEEPGETSEALSRAIRSGEPALLDIVIDPDEILPMVPPGCGLTEIVGEYRVEREDPQEIKYSPGKADGD

SEQ ID NO: 137864 - DNA, 1728 bp, Neisseria meningitidis Z2491
  CDS (1)..(1728): transl_table=11
atgcagctatcaggcgcgcaaatcatagtgcagagtctcaaagccgaaggtgtcgagtacgttttcggttatcccggcggtgcggttatcgaaatctacgatgcccttttccaactcaataaattcaagcacattctgacccgtcacgagcaggcggcagtacacgcggcagatgcgtatgcgcgcgtcagcggtaaggtgggcgtggcattggttacatccggcccgggcgttaccaatgcactgaccggtattgctactgcctatacggattcgattccgatggtggtcatcagcgggcaggtaggcaattccctgattggtacggatgcgttccaagaagttgatacggtgggtattacccgtccgtgcgtcaaacacaatttcctggttacggacatcaatgagttggcggaaaccattaaaaaggcgttccaaattgccgcaagcggccgaccggggcccgtggtggttgatgtcccgaaagatgttacgcaggcgatggcgaaattcagctatcctcaggaagacatttttatccgttcgtatcaaccggttgttcaagggcatatcggtcagattaaaaaggccgtgcagatgttggcatctgccaaacgtccggtcgtctattttggcggcggcgtggtgttgggtaatgcttctgaagagctgacccgatttgtccgaatgacgggtgctccgtgcacgggtacgctgatgggcttgggcgcttatccttccggcgaccgccaattcctcggtatgctcggtatgcacggtacttacgaggcaaaccttgccatgcagaatgcggatgtcgttcttgccgtaggtgcgcgttttgacgaccgtgtggtttccgtaccgtccaaatttttcgagaaggcgaagaaggttatccatatcgatgtcgatccttccagcatcgccaaacgcgtgaaggcggacattccgattgtcggcgacgtgaaaaacgttttgtccgagatggttgcgctgtggcaaaaacaagagtccgtgccgtctgaagatgctttgggcaaatggtggaaaaccatagaggaatggcgttcccgcgattgcttgtggtttgacaacggcagcgaaattatcaagccacaatatgtgattcagaagcttgccgagattaccggcaattcggcaatcatcacatcggatgtagggcagcatcaaatgtttgcggctcaatattatcccttcgaacgtccgcgccaatggctcaactccggcggtttgggtacgatgggcgttggtctgccttatgcgattggtgcaaaacttgccgccccggatcaagacgtattctgtattaccggcgacggctcgatccagatgaacatccaagagctgtccacctgtttccaatatcggattccggttaacgtcattacgctgaacaacggttatctcggtatggtacgccagtggcaggaaatatattacggcggacgagagtcggaaacctatttcgattctttgcccgatttcgtcaaacttgccgaggcatacggccatatcggtatccgcgtggacaagaagtctgatgtggaaggtgcgttgttggaagcattgaaccaaaaagacaggctggtgtttatcgacttcctgaccgaccagaaacagaatgtgatgcccatggtcggcaacggcaaaggtttggacgaaatggtacttccgccgcatatgcgtgcggacggaaaggcgtaa

SEQ ID NO: 137865 - protein, 575 aa, Neisseria meningitidis Z2491
MQLSGAQIIVQSLKAEGVEYVFGYPGGAVIEIYDALFQLNKFKHILTRHEQAAVHAADAYARVSGKVGVALVTSGPGVTNALTGIATAYTDSIPMVVISGQVGNSLIGTDAFQEVDTVGITRPCVKHNFLVTDINELAETIKKAFQIAASGRPGPVVVDVPKDVTQAMAKFSYPQEDIFIRSYQPVVQGHIGQIKKAVQMLASAKRPVVYFGGGVVLGNASEELTRFVRMTGAPCTGTLMGLGAYPSGDRQFLGMLGMHGTYEANLAMQNADVVLAVGARFDDRVVSVPSKFFEKAKKVIHIDVDPSSIAKRVKADIPIVGDVKNVLSEMVALWQKQESVPSEDALGKWWKTIEEWRSRDCLWFDNGSEIIKPQYVIQKLAEITGNSAIITSDVGQHQMFAAQYYPFERPRQWLNSGGLGTMGVGLPYAIGAKLAAPDQDVFCITGDGSIQMNIQELSTCFQYRIPVNVITLNNGYLGMVRQWQEIYYGGRESETYFDSLPDFVKLAEAYGHIGIRVDKKSDVEGALLEALNQKDRLVFIDFLTDQKQNVMPMVGNGKGLDEMVLPPHMRADGKA

SEQ ID NO: 137866 - DNA, 1809 bp, Escherichia coli O157:H7 EDL933
  CDS (1)..(1809): transl_table=11
atgtctctggctgccaattgcttaagcaagatcggacggttaatgtgttttacacattttttccgtcaaacagtgaggcaggccatggagatgttgtctggagccgagatggtcgtccgatcgcttatcgatcagggcgttaaacaagtattcggttatcccggaggcgcagtccttgatatttacgatgcattgcataccgtgggtggtatcggtcatgttttagttcgtcatgagcaggcggcagtgcatatggccgatggtctggcgcgcgcgaccggggaagtcggcgtcgtgctggtaacgtcgggtccaggggcgaccaatgcgattaccggcatcgccaccgcttatatggattccattccattagttgtcctttccgggcaggtagcgacctcgttgataggttacgatgcctttcaggagtgcgacatggtggggatttcgcgaccggtggttaaacacagttttctggttaagcaaacggaagacattccgcaggtgctgaaaaaggctttctggctggcggcaagtggtcgcccaggaccagtggtcgttgatttaccgaaagatattcttaatccggcgaacaaattaccctatgtctggccggagtcggtcagtatgcgttcttacaatcccactactaccggacataaagggcaaattaagcgcgctctgcaaacgctggtggcggcaaaaaaaccggttgtctacgtaggcggtggggcaatcacggcgggctgccatcaacagctgaaagaaacggtggaggcgttaaatctgcccgttgtttcctcattgatggggctgggagcgtttccggcaacgcatcgtcaggcactgggcatgctgggaatgcacggtacctacgaagccaatatgacgatgcataacgcggatgtgatttttgctgtcggtgtccgctttgacgatcgcaccactaacaatctggcaaagtactgcccaaatgccactgttctgcatatcgatattgatcctacttccatttctaaaaccgtgactgcggatattccgattgtgggggatgctcgccaggtcctcgaacaaatgcttgaactcttgtcgcaagaatccgcccatcaaccgctggatgagatccgcgactggtggcagcagattgaacagtggcgcgctcgtcagtgcctgaaatatgacactcacagtgaaaagattaaaccgcaggcggtgatcgagactctttggcggttgacgaaggggggcgcttacgttacgtccgatgtcgggcagcaccagatgtttgctgcgctttattatccattcgacaaaccccgtcgttggatcaactccggtggcctcggcactatgggctttggtttacctgcggcactgggcgtcaaaatggcgctgccagaagaaaccgtggtttgcgtcactggcgacggcagtattcagatgaacattcaggaactgtctacagcgttgcaatatgaactgccggtgctggtggttaatcttaataaccgctatttggggatggtgaagcagtggcaggacatgatctattccggtcgtcattcacaatcttatatgcagtctttaccagacttcgtccgtctggcggaagcctatggtcacgtcgggatccagatctctcatccgcaagagctggaaagcaaacttagcgaggcgcttgaacaggtgcgtaataatcgcctggtatttgttgatgtcaccgtcgatggcagtgagcacgtctacccgatgcagattcgcgggggcggaatggatgaaatgtggttaagcaaaacggagagaacctga

SEQ ID NO: 137867 - protein, 602 aa, Escherichia coli O157:H7 EDL933
MSLAANCLSKIGRLMCFTHFFRQTVRQAMEMLSGAEMVVRSLIDQGVKQVFGYPGGAVLDIYDALHTVGGIGHVLVRHEQAAVHMADGLARATGEVGVVLVTSGPGATNAITGIATAYMDSIPLVVLSGQVATSLIGYDAFQECDMVGISRPVVKHSFLVKQTEDIPQVLKKAFWLAASGRPGPVVVDLPKDILNPANKLPYVWPESVSMRSYNPTTTGHKGQIKRALQTLVAAKKPVVYVGGGAITAGCHQQLKETVEALNLPVVSSLMGLGAFPATHRQALGMLGMHGTYEANMTMHNADVIFAVGVRFDDRTTNNLAKYCPNATVLHIDIDPTSISKTVTADIPIVGDARQVLEQMLELLSQESAHQPLDEIRDWWQQIEQWRARQCLKYDTHSEKIKPQAVIETLWRLTKGGAYVTSDVGQHQMFAALYYPFDKPRRWINSGGLGTMGFGLPAALGVKMALPEETVVCVTGDGSIQMNIQELSTALQYELPVLVVNLNNRYLGMVKQWQDMIYSGRHSQSYMQSLPDFVRLAEAYGHVGIQISHPQELESKLSEALEQVRNNRLVFVDVTVDGSEHVYPMQIRGGGMDEMWLSKTERT

SEQ ID NO: 137868 - DNA, 1689 bp, Escherichia coli O157:H7 EDL933
  CDS (1)..(1689): transl_table=11
  misc_feature (1058)..(1058): k is g or t
atggcaagttcgggcacatcatcgacgcgtaagcgctttaccggcgcagaatttatcgttcatttcctggaacagcagggcattaagattgtgacgggcattccgggcggttctatcctgcctgtttacgatgccttaagccaaagcacgcaaatccgccatattctggctcgccatgaacagggcgcggggtttatcgctcagggaatggcgcgcaccgacggtaaaccggcggtctgtatggcctgtagcggaccgggggcgactaacctggtgaccgccattgctgatgcgcggctggactccatcccgctgatttgcatcactggtcaggttcccgcctcaatgatcggcactgacgccttccaggaagtcgacacctacggcatctctatccccatcaccaaacacaactatctggtcagacatatcgaagaactcccgcaggtcatgagcgatgccttccgtattgcgcaatcaggccgccctggcccggtgtggatagacattcctaaggatgtgcaaacggccgtttttgagattgaagcacagcccgcggtggcagaaaaagccgtcgcgcccgcctttagcgaagaaagcattcgtgacgcagcggcaatgattaatgctgccaaacgcccggtgctttatctgggcggtggtgtgatcaatgcgcctgcgagagtgcgtgaactggcggagaaagcgcagctgcctaccacaatgactttaatggcgctgggcatgttgccaaaagcgcatccgttgtcgctgggtatgttggggatgcacggtgtgcgcagcaccaactatattttgcaggaggcggatttgttgattgtgctcggtgcgcgttttgatgaccgggcgattggcaaaaccgagcagttctgcccgaatgccaaaattattcatgtcgatatcgaccgcgcagagctgggtaaaatcaagcagccgcacgtagcgattcaggcggatgttgatgacgtgctggcgcagctgatcccgcaggtggaagcgcaaccgcgtgcagagtggcaccagttggtagcggattkgcagcgcgaattcccgtgtccaatcccgaaagcgtgcgatccgttaagccattacggcctgatcaacgccgttgccgcctgtgtcgatgacaatgcgattatcaccaccgatgtgggtcagcatcagatgtggacggcgcaggcttatccgctcaatcgcccacgccagtggctgacctccggcgggctgggcacgatgggttttggcctgcctgcggcgattggcgcggcgctggcgaacccggatcgcaaagtgttgtgtttctccggcgatggcagcctgatgatgaatattcaggagatggcgaccgccagcgaaaaccagctggatgttaaaatcattctgatgaacaacgaagcgctggggctggtgcatcagcaacagagtctgttctacaagcagggcgtttttgccgctacctatccgggaaaaatcaactttatgcagattgccgccggattcggcctcgaaacctgtgatttgaataacgaagccgatccgcaggctgcattgcaggaaatcatcaatcgccctggtccggcgctgatccatgtgcgcattgatgccgaagaaaaagtgtacccgatggtgccgccaggtgcggcgaatacagaaatggtgggggaataa

SEQ ID NO: 137869 - protein, 562 aa, Escherichia coli O157:H7 EDL933
  misc_feature (353)..(353): The Xaa at location 353 stands for Leu, or Trp.
MASSGTSSTRKRFTGAEFIVHFLEQQGIKIVTGIPGGSILPVYDALSQSTQIRHILARHEQGAGFIAQGMARTDGKPAVCMACSGPGATNLVTAIADARLDSIPLICITGQVPASMIGTDAFQEVDTYGISIPITKHNYLVRHIEELPQVMSDAFRIAQSGRPGPVWIDIPKDVQTAVFEIEAQPAVAEKAVAPAFSEESIRDAAAMINAAKRPVLYLGGGVINAPARVRELAEKAQLPTTMTLMALGMLPKAHPLSLGMLGMHGVRSTNYILQEADLLIVLGARFDDRAIGKTEQFCPNAKIIHVDIDRAELGKIKQPHVAIQADVDDVLAQLIPQVEAQPRAEWHQLVADXQREFPCPIPKACDPLSHYGLINAVAACVDDNAIITTDVGQHQMWTAQAYPLNRPRQWLTSGGLGTMGFGLPAAIGAALANPDRKVLCFSGDGSLMMNIQEMATASENQLDVKIILMNNEALGLVHQQQSLFYKQGVFAATYPGKINFMQIAAGFGLETCDLNNEADPQAALQEIINRPGPALIHVRIDAEEKVYPMVPPGAANTEMVGE

SEQ ID NO: 137870 - DNA, 1647 bp, Escherichia coli O157:H7 EDL933
  CDS (1)..(1647): transl_table=11
atgaatggcgcacagtgggtggtacatgcgttgcgggcacagggtgtgaacaccgttttcggttatccgggtggcgcaattatgccggtttacgatgcattgtatgacggcggcgtggagcacttgctgtgccgacatgagcagggtgcggcaatggcggctatcggttatgcccgtgctaccggcaaaactggcgtatgtatcgccacgtctggtccgggcgcaaccaacctgataaccgggcttgcggacgcactgttagattctatccctgttgttgccatcaccggtcaagtgtccgcaccgtttatcggtactgacgcatttcaggaagtggatgtcctgggattgtcgttagcctgtaccaagcacagctttctggtgcagtcgctggaagagttgccgcgcattatggctgaagcattcgacgttgccagctcaggtcgtcctggtccggttctggtcgatatcccaaaagatatccagttagccagcggcgacctggaaccgtggttcaccaccgttgaaaacgaagtgactttcccacatgccgaagttgagcaagcgcgccagatgctggcaaaagcgcaaaaaccgatgctgtacgttggtggtggcgtgggtatggcgcaggcagttcctgctttacgagaatttctcgctaccacaaaaatgcctgccacctgcacgctgaaagggctgggcgcagttgaagcagattatccgtactatctgggcatgctgggaatgcatggcaccaaagcggcgaacttcgcggtgcaggagtgcgacttgctgatcgccgtgggtgcacgttttgatgaccgggtgaccggcaaattgaacaccttcgcaccacacgccagtgttatccatatggatatcgacccggcagaaatgaacaagctgcgtcaggcacatgtggcattacagggtgatttaaatgcgctgttaccagcattacagcagccattaaatatcaatgactggcagcaatactgcgcgcagctgcgtgatgaacatgcctggcgttacgaccatcccggtgacgctatctacgcgccgttgttgttaaaacaactgtcggatcgtaaacctgcggattgcgttgtgaccacagatgtggggcagcatcagatgtgggccgcgcagcacatcgcacacactcgcccggaaaatttcattacctccagcggcttaggcaccatgggttttggtttaccggcggcggttggcgcgcaagtcgcgcgaccaaacgataccgtcgtctgtatctccggtgacggctctttcatgatgaatgtacaagagctgggcaccgtaaaacgcaagcagttaccgttgaaaatcgtcttactcgataaccaacggttagggatggttcgacaatggcagcaactgtttttccaggaacgatacagcgaaaccacccttaccgataaccccgatttcctcaagttagccagcgccttcggcatccctggccaacacatcacccgtaaagaccaggttgaagcggcactcgacaccatgctgaacagtgatgggccatacctgcttcatgtctcaatcgacgaacttgagaacgtctggccgctggtgccgcctggtgccagtaattcagaaatgttggagaaattatcatga

SEQ ID NO: 137871 - protein, 548 aa, Escherichia coli O157:H7 EDL933
MNGAQWVVHALRAQGVNTVFGYPGGAIMPVYDALYDGGVEHLLCRHEQGAAMAAIGYARATGKTGVCIATSGPGATNLITGLADALLDSIPVVAITGQVSAPFIGTDAFQEVDVLGLSLACTKHSFLVQSLEELPRIMAEAFDVASSGRPGPVLVDIPKDIQLASGDLEPWFTTVENEVTFPHAEVEQARQMLAKAQKPMLYVGGGVGMAQAVPALREFLATTKMPATCTLKGLGAVEADYPYYLGMLGMHGTKAANFAVQECDLLIAVGARFDDRVTGKLNTFAPHASVIHMDIDPAEMNKLRQAHVALQGDLNALLPALQQPLNINDWQQYCAQLRDEHAWRYDHPGDAIYAPLLLKQLSDRKPADCVVTTDVGQHQMWAAQHIAHTRPENFITSSGLGTMGFGLPAAVGAQVARPNDTVVCISGDGSFMMNVQELGTVKRKQLPLKIVLLDNQRLGMVRQWQQLFFQERYSETTLTDNPDFLKLASAFGIPGQHITRKDQVEAALDTMLNSDGPYLLHVSIDELENVWPLVPPGASNSEMLEKLS

SEQ ID NO: 137872 - DNA, 1701 bp, Streptococcus pneumoniae TIGR4
  CDS (1)..(1701): transl_table=11
atggagaaaatcagtttagaatctcctaagacggggtcggacctagttttggaaacacttcgtgatttaggagttgataccatctttggttatcctggtggtgcggttttgcctttttatgatgcgatatataattttaaaggcattcgccacattctagggcgccatgagcaaggttgtttgcatgaagctgaaggttatgccaaatcaactggaaagttgggtgttgccgtcgtcactagtggaccaggagcaacaaatgccattacagggattgcggatgccatgagcgatagcgttccccttttggtctttacaggtcaggtggcgcgagcagggattgggaaggatgcctttcaggaggcagacatcgtgggaattaccatgccaatcactaagtacaattaccaagttcgtgagacagctgatattccgcgtatcattacggaagctgtccatatcgcaactacaggccgtccagggccagttgtaattgacctaccaaaagacatatctgctttagaaacagacttcatttattcaccagaagtgaatttaccaagttatcagccgactcttgagccgaatgatatgcaaatcaagaaaatcttgaagcaattgtccaaggctaaaaagccagtcttgttagctggtggtggaattagttatgctgaggctgctacggaactaaatgaatttgcagaacgctatcaaattccagtggtaaccagtcttttgggacaaggaacgattgcaacgagtcacccactctttcttggaatgggaggcatgcacgggtcattcgcagcaaatattgctatgacggaagcggactttatgattagtattggttctcgtttcgatgaccgtttgacggggaatcctaagactttcgctaagaatgctaaggttgcccacattgatattgacccagctgagattggcaagattatcagtgcagacattcctgtagttggagatgctaagaaggccttgcaaatgttgctagcagaaccaacagttcacaacaacactgaaaagtggattgagaaagtcactaaagacaagaatcgtgttcgttcttatgataagaaagagcgtgtggttcaaccgcaagcagttattgaacgaattggtgaattgacgaatggagatgccattgtggtaacagacgttggtcaacaccaaatgtggacagctcagtattatccctaccaaaatgaacgtcagttagtgacttcaggtggtttgggaacaatgggctttggaattccagcagcaatcggtgctaaaattgctaacccagataaggaagtagtcttgtttgttggggatggtggtttccaaatgaccaaccaggagttggctattttgaatatttacaaggtgccaatcaaggtggttatgctgaacaatcattcacttggaatggttcgccagtggcaggaatccttctatgaaggcagaacatcagagtcggtctttgatacccttcctgatttccaattgatggcgcaggcttatggtattaaaaactataagtttgacaatcctgagaccttggctcaagaccttgaagtcatcactgaggatgttcctatgctaattgaggtagatatttctcgtaaggaacaggtgttaccaatggtaccggctggtaagagtaatcatgagatgttgggggtgcagttccatgcgtag

SEQ ID NO: 137873 - protein, 566 aa, Streptococcus pneumoniae TIGR4
MEKISLESPKTGSDLVLETLRDLGVDTIFGYPGGAVLPFYDAIYNFKGIRHILGRHEQGCLHEAEGYAKSTGKLGVAVVTSGPGATNAITGIADAMSDSVPLLVFTGQVARAGIGKDAFQEADIVGITMPITKYNYQVRETADIPRIITEAVHIATTGRPGPVVIDLPKDISALETDFIYSPEVNLPSYQPTLEPNDMQIKKILKQLSKAKKPVLLAGGGISYAEAATELNEFAERYQIPVVTSLLGQGTIATSHPLFLGMGGMHGSFAANIAMTEADFMISIGSRFDDRLTGNPKTFAKNAKVAHIDIDPAEIGKIISADIPVVGDAKKALQMLLAEPTVHNNTEKWIEKVTKDKNRVRSYDKKERVVQPQAVIERIGELTNGDAIVVTDVGQHQMWTAQYYPYQNERQLVTSGGLGTMGFGIPAAIGAKIANPDKEVVLFVGDGGFQMTNQELAILNIYKVPIKVVMLNNHSLGMVRQWQESFYEGRTSESVFDTLPDFQLMAQAYGIKNYKFDNPETLAQDLEVITEDVPMLIEVDISRKEQVLPMVPAGKSNHEMLGVQFHA

SEQ ID NO: 137874 - DNA, 1857 bp, Agrobacterium tumefaciens str. C58
  CDS (1)..(1857): transl_table=11
atgtcttcaaacaggccctcgggctcctcgatatccaaagccaaagcgggatggaaacaggcaatgacggataaggacaatacggaaaacagcaatcgcatgacaggtgcggagatcgttctgcaggcgctgaaggacaacggcgtcgagcacatcttcggttatcccggcggtgccgttcttccgatttatgacgagattttccagcaggaagacattcagcacatcctcgtgcgtcatgagcagggtgccggccacgcggccgaagggtatgcccgttccaccggcaaggtcggcgtcatgctcgttacctccggtcccggcgccaccaatgcggtgacgccgctgcaggatgcgctgatggattccattccgctcgtctgcctgtccggccaggttccgacatcgctgatcggttccgacgcatttcaggaatgcgataccgtcggcatcacgcgcccctgcaccaagcacaactggctggtcaaggacgtcaacgaactggctggcatcatccatgaagccttccgcatcgcgcagactggccgtccgggtcccgtcgttgtcgatattccgaaggatattcagttcgccaccggcacctatacgccgccttccgccgccatccagcagaagagctacaagccgaaggttcagggcgacctcaacgccattcatgctgccatcgaactgatgtcgaaagcgaagaagccggttttttacaccggcggcggcgtcatcaattctggtccggaggcaacccgtctgctgcgtgaactggtcgagctcaccaatttcccgatcacctcgacgctgatgggtctcggcgcctatccggcttccggcaagaactggctcggcatgctgggcatgcacggttcctacgaagccaatatgacgatgcatgattgcgatgtcatggtctgcatcggcgcgcgtttcgatgaccgtattaccggtcgcatcaatgcgttttcgccgaattccaagaagatccatatcgatatcgatccgtcctcgatcaacaagaccgtgcgtgtcgacgtgcctgttatcggcgatgtcgggcatgttctggaagacatggttcgcctgtggcgcgctttgccgaagaaaccggaaaaagcgcagacggccgactggtggtcgcagattgagcgctggcgcgcccgcaattccttcgcctacaagaactccaaagatgtcatcatgccgcaatatgcattgcagcggctttatgaggcgtcgaagggacgcgacacttacatcacgacagaagtcggccagcaccagatgtgggcggcgcagttcttcggtttcgaggagccgaaccactggatgacctcgggcggtctcggcaccatgggttatggcctgccggcggctatcggcgtgcaggtcgcgcatcccgaagcgcttgtcatcgacattgccggtgacgcatcgatccagatgtgtatccaggaaatgtcctgcgccatccagtacggcctgccggtgaagattttcatcctcaacaaccagtatatgggcatggtgcggcaatggcagcagttgctgcacggcaaccgtctgtccaactcctataccgaagccatgcctgatttcgtcaagctggcggaggcctatggcgctgtcggcatgtattgcgacgacccgaaggaactggacgacaagatcgccgagatgattgcggtcaacaagccggtcatcttcgattgccgcgttgccaatctcgccaattgcttcccgatgatcccatctggtaaagcccataacgagatgctgttgccggatgaggcgacggatgaagctgttgccaacgccatcgatgccaagggccgtcagctagtctga

SEQ ID NO: 137875 - protein, 618 aa, Agrobacterium tumefaciens str. C58
MSSNRPSGSSISKAKAGWKQAMTDKDNTENSNRMTGAEIVLQALKDNGVEHIFGYPGGAVLPIYDEIFQQEDIQHILVRHEQGAGHAAEGYARSTGKVGVMLVTSGPGATNAVTPLQDALMDSIPLVCLSGQVPTSLIGSDAFQECDTVGITRPCTKHNWLVKDVNELAGIIHEAFRIAQTGRPGPVVVDIPKDIQFATGTYTPPSAAIQQKSYKPKVQGDLNAIHAAIELMSKAKKPVFYTGGGVINSGPEATRLLRELVELTNFPITSTLMGLGAYPASGKNWLGMLGMHGSYEANMTMHDCDVMVCIGARFDDRITGRINAFSPNSKKIHIDIDPSSINKTVRVDVPVIGDVGHVLEDMVRLWRALPKKPEKAQTADWWSQIERWRARNSFAYKNSKDVIMPQYALQRLYEASKGRDTYITTEVGQHQMWAAQFFGFEEPNHWMTSGGLGTMGYGLPAAIGVQVAHPEALVIDIAGDASIQMCIQEMSCAIQYGLPVKIFILNNQYMGMVRQWQQLLHGNRLSNSYTEAMPDFVKLAEAYGAVGMYCDDPKELDDKIAEMIAVNKPVIFDCRVANLANCFPMIPSGKAHNEMLLPDEATDEAVANAIDAKGRQLV

SEQ ID NO: 137876 - DNA, 1665 bp, Agrobacterium tumefaciens str. C58
  CDS (1)..(1665): transl_table=11
atgaaggcaggaatgaaaagaactggtggccaactgatcgtcgaagcgctgaaggccaatggcgtctcgcgcgtttcctgcgttccgggcgaaagctacctggcggtgctggatgcactttatgaaagcggcatcgaaaccgtcgtctgccgccaggaaggcggcgccgccatgatggctgacacctggggccgcctgacgggcgaaccaggcatctgcatggtgacgcgcggaccgggcgccaccaacgcatcggccggcctgcacattgcgagacaggattccattccgatgatcctcttcatcggccaggtacagcgcgaagcccgcgagcgcgaggcgtttcaggaagtcgaataccgccgcgccttcaccgaattcgccaaatgggtgggcgagatcgacgatgcccgccgcatccccgaattcgtcacccgtgccttcgccgttgccacctccggccgccccggcccggtggttctgacgctgcccgaagacatgctggtggaggaggtcgaagcgcccgaggcaaagccctatatgccggtggaggcgcatcccggcccttcgcagatgacggccttcgcaaaaatgctgggcgaggcgaaacggccgattttcattatcggcggtacacgctggtccgaagaaagcgtggcaaccttccgggcatttgccgaaaaccacaagctgcccgtcggctgttccttccgccgccagatgctgttcgatcatctgagcccctcttatgccggagatgtcggcatcggcatcaacccggccttagcgaaggagatcaaggaatccgatctggtggtgctgctcggcggtcgcctctcggaaatgccgtcctccggttatacgctcatcgacatcccctacccgtcgcagaagctgatccatatttatcccgaagccgaagagctcggccgcgtctatcgccccgatctggcgatctgtgctgcgccggatgatttcgtcgccgtcctctcctcgctcaccctttccggcagcgccgcctgggcggaacgcaccgccgccatgcacgcggcttacctcgcctggtcgacgccgccgcagaccggccccggcacggtgcagatggggccgatcatggactggatcgaggccaatgtggccgacgacgccatcttcaccaatggcgccggcaattatgccacctggctgcaccgcttccaccgcttccgccgctacaacacgcaatcggccccgacctccggttccatgggttacggcctgccggcggctgtcgccgccaagcatctgttcccggagcgtgaggtgatctgctttgccggtgacggctgtttcatgatgcacggacaggaattcatcactgccgtgcgttatggcctgccgatcatcaccgtgcttgttaacaatggcacctatggcaccattcgcatgcatcaggagcgggaataccccggccgtgtcagcggcaccgatctcgtcaatccggatttcaacgcttttgccaaggcctatggcggccatggcgaaacggtggaaagaacgcaagacttcgccgccgccttcgagcgggcgcgtgcaagcggcaagcctggcatcatcgaggtgaagctggacccggaagcgatcacgccgacgcgcacgctgacgcagatcaggacaaaaagctga

SEQ ID NO: 137877 - protein, 554 aa, Agrobacterium tumefaciens str. C58
MKAGMKRTGGQLIVEALKANGVSRVSCVPGESYLAVLDALYESGIETVVCRQEGGAAMMADTWGRLTGEPGICMVTRGPGATNASAGLHIARQDSIPMILFIGQVQREAREREAFQEVEYRRAFTEFAKWVGEIDDARRIPEFVTRAFAVATSGRPGPVVLTLPEDMLVEEVEAPEAKPYMPVEAHPGPSQMTAFAKMLGEAKRPIFIIGGTRWSEESVATFRAFAENHKLPVGCSFRRQMLFDHLSPSYAGDVGIGINPALAKEIKESDLVVLLGGRLSEMPSSGYTLIDIPYPSQKLIHIYPEAEELGRVYRPDLAICAAPDDFVAVLSSLTLSGSAAWAERTAAMHAAYLAWSTPPQTGPGTVQMGPIMDWIEANVADDAIFTNGAGNYATWLHRFHRFRRYNTQSAPTSGSMGYGLPAAVAAKHLFPEREVICFAGDGCFMMHGQEFITAVRYGLPIITVLVNNGTYGTIRMHQEREYPGRVSGTDLVNPDFNAFAKAYGGHGETVERTQDFAAAFERARASGKPGIIEVKLDPEAITPTRTLTQIRTKS

SEQ ID NO: 137878 - DNA, 1779 bp, Sinorhizobium meliloti 1021
  CDS (1)..(1779): transl_table=11
atgagcggaactgagaaccagatgacgggcgcggagatcgttctccaggctttgaaagacaatggcgtcgaacacatcttcggctatcccggcggtgccgtgctcccgatctacgacgagattttccagcaggaggatatccagcacatcctcgtccgccacgagcagggcgccggccacatggccgaaggttatgcccgctccaccggcaaggtcggcgtcatgctggtgacttccggcccgggagcgaccaatgcggtcacgccgctgcaggacgcgctgatggactcgatcccgctcgtctgcatctcggggcaggtaccgacgtcgctgatcggttcggacgccttccaggaatgcgacacgatcggcatcacgcggccctgtaccaagcacaactggctggtcagggacgtcaacgagctcgcccgcgtcatccatgaggctttccgcgtcgctcagtccggccgtccgggtccggtcgtcgtcgacattccgaaggacgtccagttcgcaaccggcacctatacgccgccttcggccgttccgacgcagaagagctaccagccgaagacccaaggggacctgaagaagatcgaggaggcggtcgcgctcatgaaaacggcgcgccagccggtcatctattcgggcggcggcgtcatcaattccgggccgcaagccgcgcatttcctgcgcgagctggtcgagctcaccggcttcccgatcacgtcgaccctgatgggcctcggcgcctatcctgcctccggcaaaaactggctcggcatgctcgggatgcacgggacctacgaagccaacctggcgatgcatgattgcgacgtcatgatctgcatcggcgcgcgcttcgacgaccggatcaccggccggctcaatgccttctcgcccaactccaagaagatccacatcgacatcgacccgtcctcgatcaataagaacgtccgcgtcgacgttccgatcatcggcgatgtcgccgctgttctcgaggacatgattcgcctgtggcgggctgcggccaagacggtcgaccagacgcggcttggcgactggtggaagtcgatctccaagtggcgggcgcgcaactctctggcctatacgccgagtgccgacgtcatcatgccgcaatatgcgatccagcggctatacgagctcaccaaggaccgcgacacctacatcaccaccgaggtcggccagcaccagatgtgggccgcgcagttcttcggcttcgaagagccgaaccgctggatgacctcgggcggcctcgggaccatgggctacggattcccggccgcggtcggcgtccaggtcgcgcatccggagagcctcgtcatcgacatcgccggcgacgcctcgatccagatgtgcatccaggagatgtcgtgtgcggttcagtacggcctgccggtcaagatcttcatcctgaacaaccaatatatgggcatggtccggcagtggcagcaactcctgcacggcaaccgcctgtcgcattcctacaccgaggcgatgcctgacttcgtcaagctcgccgaggcctatggcggcgtcggcatccgttgcgaaaagccgggagagctcgacgatgcgatccggcagatgatcgacactccggctccggtcatcttcgactgccgcgtcgccaatctcgccaactgcttcccgatgatcccttcgggcaaggcgcataacgaaatgctgctccccgacgaggccacggacgaggtggtcgccaacgccatcgatgccaagggccgccagctcgtttga

SEQ ID NO: 137879 - protein, 592 aa, Sinorhizobium meliloti 1021
MSGTENQMTGAEIVLQALKDNGVEHIFGYPGGAVLPIYDEIFQQEDIQHILVRHEQGAGHMAEGYARSTGKVGVMLVTSGPGATNAVTPLQDALMDSIPLVCISGQVPTSLIGSDAFQECDTIGITRPCTKHNWLVRDVNELARVIHEAFRVAQSGRPGPVVVDIPKDVQFATGTYTPPSAVPTQKSYQPKTQGDLKKIEEAVALMKTARQPVIYSGGGVINSGPQAAHFLRELVELTGFPITSTLMGLGAYPASGKNWLGMLGMHGTYEANLAMHDCDVMICIGARFDDRITGRLNAFSPNSKKIHIDIDPSSINKNVRVDVPIIGDVAAVLEDMIRLWRAAAKTVDQTRLGDWWKSISKWRARNSLAYTPSADVIMPQYAIQRLYELTKDRDTYITTEVGQHQMWAAQFFGFEEPNRWMTSGGLGTMGYGFPAAVGVQVAHPESLVIDIAGDASIQMCIQEMSCAVQYGLPVKIFILNNQYMGMVRQWQQLLHGNRLSHSYTEAMPDFVKLAEAYGGVGIRCEKPGELDDAIRQMIDTPAPVIFDCRVANLANCFPMIPSGKAHNEMLLPDEATDEVVANAIDAKGRQLV

SEQ ID NO: 137880 - DNA, 1716 bp, Agrobacterium tumefaciens str. C58
  CDS (1)..(1716): transl_table=11
atggatactgcagttcatgaaacaaccgtcgctgagcgtattgccaaagcgttgaggcgccatgatgtggaggtaatctttggacaaagccttccgtcggcggtcattttggcggccgaaaagatcggtataactcagatagcctatcgtcaggaaaacatgggtggcgccatggccgatggttacgccaggcgttcgggcaaaatcgggatcgtggcagcccagaacgggcccgcggcggcgctgctggttgctccgctggctgaagcactcaaggctagcgtcccggtcgtagcacttgtccaggatgtggagcgtgatcagactgatcggaacgcgtttcaggacctcgatcacatcggcctgtttcagtcatgcacaaaatgggttcgtcgtgtttccgtggaagagcggatagacgattacatcgatgccgcgttcaccgccgcctcgtctggtagagcaggtcccgcagtcctgcttcttcctgcggatcttttgcgatccgtatctactaccccttcaaggagaagaacgaacaatctcggccattggccgctcgacagatcacgtcccgccgacaaagatcttgatatcgctgcgaaagcgattgcgaacgcacgcgcacctgtcgtgatagcaggcggcggcatccacgcctccggggctgcccagcagttgcgactactgcaggacgaatgctcgatacctgtcttcacaacgaatatgggcaagggctcagttgatgagtggcaccctctttcaggaggggtactggcatctcttgtcggtccgaagtcactgggtcgacacacggtcgagatcgttcgggaagcggatcttgtcgtcttaatcggcacgaggacgaaccagaatggaacagacaactggcgccagtatagtcctgatgcccagattattcacatagataccgatccacaggaggtcggccggaattttgaggcaattcgtcttgttggtgacgcacgggagaccttggccggcctacgcgaaaggatcaggctttgtgacttgcacctgagaaccgtttcccgcgaggctgtctgcaaccgtcttcgggaaagctggaggaaattcaatgatgatcgcagaggctattacagctctgaggcctcaccgcttcgtcccgaacggattatggccgaacttcagggagttatcgatgaaaacaccacagtggtggcggacgctagttattcatcgatgtgggtcctcggacaactcagaatttcttccgaaaggacacgtgtgctcaccccccggggtcttgcaggacttgggtggggagttccccttgcaatcggagccaaggtcgccgcacctgagagcgatgttgtagcgctggtgggagatgggggatttgcgcacagctgggccgagcttgaaaccctggtccgcatgcaaattccgatcacgatcatcgtgctaaacaacggaattcttggcttccagcgtgatgccgaaactgtaaaattcggaaagtacacaaccgcctgccattttgcagaggtcgatcacgtcaagattgcacacgcgtgcggatgcgatgcggtccgtgtcacgcaaccgcaggacctcaaggcccatatgcaaaaggtcaagaaaagaaagttgccgttgctgatagaggctatgaccgatcccgaagctcacccggcactttctctctttgctcagatggacagtgcggcatga

SEQ ID NO: 137881 - protein, 571 aa, Agrobacterium tumefaciens str. C58
MDTAVHETTVAERIAKALRRHDVEVIFGQSLPSAVILAAEKIGITQIAYRQENMGGAMADGYARRSGKIGIVAAQNGPAAALLVAPLAEALKASVPVVALVQDVERDQTDRNAFQDLDHIGLFQSCTKWVRRVSVEERIDDYIDAAFTAASSGRAGPAVLLLPADLLRSVSTTPSRRRTNNLGHWPLDRSRPADKDLDIAAKAIANARAPVVIAGGGIHASGAAQQLRLLQDECSIPVFTTNMGKGSVDEWHPLSGGVLASLVGPKSLGRHTVEIVREADLVVLIGTRTNQNGTDNWRQYSPDAQIIHIDTDPQEVGRNFEAIRLVGDARETLAGLRERIRLCDLHLRTVSREAVCNRLRESWRKFNDDRRGYYSSEASPLRPERIMAELQGVIDENTTVVADASYSSMWVLGQLRISSERTRVLTPRGLAGLGWGVPLAIGAKVAAPESDVVALVGDGGFAHSWAELETLVRMQIPITIIVLNNGILGFQRDAETVKFGKYTTACHFAEVDHVKIAHACGCDAVRVTQPQDLKAHMQKVKKRKLPLLIEAMTDPEAHPALSLFAQMDSAA

SEQ ID NO: 137882 - DNA, 1728 bp, Yersinia pestis CO92
  CDS (1)..(1728): transl_table=11
atggagatgttgtcaggagccgagatggtggtccgatcgttaattgatcagggcgttaagcatgtattcggttatcccggcggggccgtacttgatatttacgatgccctgcacacggtcggaggcatcgatcacgtgctggtgcgccatgaacaaggtgcggttcacatggccgatggttatgcgcgggcaacgggcgaggtcggtgttgtactggtcacgtctggtcctggtgcaaccaatgcgattaccggtattgcgaccgcctatatggattcagtgccaatggtggtgctttcaggccaagtgccaagctcattgattggttttgatgccttccaagaatgtgacatggtggggatctcccgcccagtggtcaaacatagcttcttggttaagcgcacagaagacatcccgatggtgttgaaaaaagccttttatctggcatccactggccgtcccggtccggtggttatcgacttgccaaaagacattgtcggcccagcagtaaaaatgccttacgcctatccagagcaagtcagtttgcgctcctataatcctacggtgcaaggccaccgtgggcagattaagcgtgcactgcaaacgattatggcggctaaacggcccattatgtatgtcggtggtggtgcgattaacgccgcttgccatgaagaattactgatattggcagagaagctgaacttaccggtaaccagctctctgatggggctaggcagtttccctggtacgcatcgccaaagtgtcggcatgttggggatgcatggtacctttgaagccaatatggccatgcacaatactgatctgatttttgccgtcggtgtccgttttgacgatcgtaccaccaataatttagcaaaatattgccctgatgccacagtgctacacattgatatcgatccgacatcgatctcgaaaacggtcaccgccgatatcccgattgtgggtgatgccaaacaagtactgacacaaatgttagatttgttgtcgcaggtcggctgtacacaagattttgatagcttgcgcgattggtggcaatccattgaacaatggcgcacccgtaattgcttgggctacaacaaagacagtgggaaaatcaagccacaagcggtgattgaagccttacatcgtctgactaaaggcgatgcgtacgttacctctgatgtgggccaacatcagatgtttgcggctctttactatccctttgataagccacgtcgttggattaactccggtggcttgggcacgatgggctttggcttgccagcggcgcttggggttaaattggctttgcctaatgaaaccgtcgtttgtgtgaccggtgatggcagtatccagatgaatattcaggagttatcaaccgcactgcaatataacttgccagtgttggtattaaacctgaataaccgctatctggggatggtgaaacaatggcaggacatgatttattcaggccgccattctcagtcgtatatggattcgctgcctgattttgtcaagttggctgaagcctatggccatattggtgtggctattaatacgccggatgagctggaaagtaagctggcagacgcactgacacaattatccgaaaccaatcgtttggtctttgtggatgtgactgtcgatgaaacagaacatgtttacccgatgcagattcgtggtggtggcatggacgaaatgtggctaagcaaaacggagaggacttaa

SEQ ID NO: 137883 - protein, 575 aa, Yersinia pestis CO92
MEMLSGAEMVVRSLIDQGVKHVFGYPGGAVLDIYDALHTVGGIDHVLVRHEQGAVHMADGYARATGEVGVVLVTSGPGATNAITGIATAYMDSVPMVVLSGQVPSSLIGFDAFQECDMVGISRPVVKHSFLVKRTEDIPMVLKKAFYLASTGRPGPVVIDLPKDIVGPAVKMPYAYPEQVSLRSYNPTVQGHRGQIKRALQTIMAAKRPIMYVGGGAINAACHEELLILAEKLNLPVTSSLMGLGSFPGTHRQSVGMLGMHGTFEANMAMHNTDLIFAVGVRFDDRTTNNLAKYCPDATVLHIDIDPTSISKTVTADIPIVGDAKQVLTQMLDLLSQVGCTQDFDSLRDWWQSIEQWRTRNCLGYNKDSGKIKPQAVIEALHRLTKGDAYVTSDVGQHQMFAALYYPFDKPRRWINSGGLGTMGFGLPAALGVKLALPNETVVCVTGDGSIQMNIQELSTALQYNLPVLVLNLNNRYLGMVKQWQDMIYSGRHSQSYMDSLPDFVKLAEAYGHIGVAINTPDELESKLADALTQLSETNRLVFVDVTVDETEHVYPMQIRGGGMDEMWLSKTERT

SEQ ID NO: 137884 - DNA, 1866 bp, Synechocystis sp. PCC 6803
  CDS (1)..(1866): transl_table=11
gtggttgcatcaattcctaatcccaaaacaaatttcctgaaaactgttcctagccaacggcaaaccggggcttatatcctgatggatagcctgaaacgccatggggtcaaacacatttttggctatcccggcggggcaattttgcccatctatgatgaactgtaccgctttgaagcggcgggggaaattgagcatattttggtgcgccatgaacaaggagcttcccatgcggcggatgggtatgccagagccacaggtaaagtgggagtttgtttcggtacatctggaccaggggcgactaacttggtgaccggcattgccaatgcccatttggactcggtgcccatggtggtgattactggacaggtgggccgtgccatgattggtagcgatgctttccaggaaattgacatttttggcatcaccttaccgatcgttaagcactcctatgtggtacgtagtgcggcggatatggctcgcattgttactgaggctttccatcttgctagcaccggtcgtcccgggccggttttgatcgatattcccaaggatgtgggcttagaagaatgtgagtacattcccctcgaccccggtgacgttaatctaccgggttatcgccccacggttaaaggtaatccccgacaaattaatgcggcattgcaattgttggagcaggccagaaatcccttgctctacgtagggggaggggcgatcgccgccaatgcccatgcccaggtgcaggaatttgcggaaaggttccagttgccggtaacaaccaccctgatgggaattggggcttttgacgaaaaccatcccctttcggtgggtatgttgggtatgcatggcaccgcctatgccaactttgccgtcagcgaatgtgatttgttgattgcggtgggggcccgtttcgacgaccgggtaactggcaaactagacgaatttgctagccgcgccaaagtaattcacattgacatcgacccggcggaggtgggaaaaaacagggctcccgatgtgcccattgtgggggatgtacgccatgttttagaacagcttttgcagcgggcccgggaattggattaccccacccatccccataccacccaggcatggttaaatcgcattgatcattggcggaccgattaccccctccaggtgccccactatgaggatactattgccccccaggaggtagtacacgaaattggtcgccaggcccccgatgcctactacaccaccgatgtgggacaacaccaaatgtgggcggcccagtttttgaacaatggcccccgccgatggatttccagtgctggcttgggtacgatgggctttggtttacctgccgccatgggagccaaagtgggagtgggggacgaagcggtcatttgcatcagtggagatgccagcttccaaatgaatcttcaggaactgggaaccctagcccagtacgacatccaggttaaaactattattctcaataacggttggcaggggatggtgcgtcagtggcaacaaactttctacgaagaacgttattctgcttctaacatgtcccagggcatgccagacattaatctcctctgtgaagcctatggcatcaagggtattactgtgcgcaagcgggaagatttggccccggcgatcgccgaaatgctagcccacaatggtcctgtggtgatggatgtggtggtcaaaaaagatgaaaactgttaccctatgattgcccccggcatgagtaatgcccaaatgctaggtttaccggaagtgccggtacgggacaatggtccccggatggtggagtgcaaccattgccaaacccaaaatttcatcacccatcgtttctgttctggttgtggagccaaactctaa

SEQ ID NO: 137885 - protein, 621 aa, Synechocystis sp. PCC 6803
MVASIPNPKTNFLKTVPSQRQTGAYILMDSLKRHGVKHIFGYPGGAILPIYDELYRFEAAGEIEHILVRHEQGASHAADGYARATGKVGVCFGTSGPGATNLVTGIANAHLDSVPMVVITGQVGRAMIGSDAFQEIDIFGITLPIVKHSYVVRSAADMARIVTEAFHLASTGRPGPVLIDIPKDVGLEECEYIPLDPGDVNLPGYRPTVKGNPRQINAALQLLEQARNPLLYVGGGAIAANAHAQVQEFAERFQLPVTTTLMGIGAFDENHPLSVGMLGMHGTAYANFAVSECDLLIAVGARFDDRVTGKLDEFASRAKVIHIDIDPAEVGKNRAPDVPIVGDVRHVLEQLLQRARELDYPTHPHTTQAWLNRIDHWRTDYPLQVPHYEDTIAPQEVVHEIGRQAPDAYYTTDVGQHQMWAAQFLNNGPRRWISSAGLGTMGFGLPAAMGAKVGVGDEAVICISGDASFQMNLQELGTLAQYDIQVKTIILNNGWQGMVRQWQQTFYEERYSASNMSQGMPDINLLCEAYGIKGITVRKREDLAPAIAEMLAHNGPVVMDVVVKKDENCYPMIAPGMSNAQMLGLPEVPVRDNGPRMVECNHCQTQNFITHRFCSGCGAKL

SEQ ID NO: 137886 - DNA, 1647 bp, Salmonella typhimurium LT2
  CDS (1)..(1647): transl_table=11
atgaacggggcacagtgggtggtacatgctttgcgagcgcagggggtgaaaaccgtatttggttatcctggcggcgcaattatgccggtttacgacgcgttgtatgacggtggtgtggagcatttgttgtgccgacacgagcagggtgcggcaatggcggcaatcggttatgcccgttctaccggcaaaaccggtgtttgtatcgccacttccggccctggcgccactaacctgatcactggcctggcggatgcgttgttagattcggtccccgtcgtcgcgatcacgggtcaggtttccgccccgttcatcggcaccgatgcgttccaggaggtggatgtgttagggctgtcgctggcctgtaccaaacacagcttcctggtgcagtcgctggaagagttgccgcgcatcatggcggaggcttttgaagtcgccaacgctggccgtcctggcccggttctggtggatatcccgaaagatatccagttggccagcggtgagctggaaccctggtttactaccgttgctaacgaagcgactttcccgcaggctgatgtggaacaggcgcgccagatgctggaacaggcgaaaaaacccatgctgtacgtcggcggtggtgttggtatggcgcaggcagttccggcgctgcgtaaatttatcgcggtaacgcaaatgccagttacctgcacgctgaaagggctgggggctgttgaagctgattatccgtactatctgggcatgctgggaatgcacggtactaaagcggctaatttcgcggtgcaagagtgtgatttactgatcgcagtgggtgcacgttttgatgaccgggtgaccggtaagctgaatacgtttgcgccgaacgccagcgtaatccatatggatatcgacccggcggaaatgaacaaactgcgtcaggcacacgtcgcgttgcagggcgatttaaattcgctgttgccggcattacagcaaccgctgaagatcgacgcatggcgtcagtcctgtgcagagctgcgcgcagaacacgcctggcgctatgaccatcctggcgagactatctatgcgccgttgttgttgaagcaattgtcggaacgcaaacccgcagacagcgtggtgacgacggatgtggggcagcatcagatgtggtcagcccagcatatgacttacacccgcccggagaacttcatcacctccagcggtctggggacgatgggattcggcttaccggcggccgttggcgcgcaggtagcgcgaccgaatgataccgttatctgtatctccggtgacggctccttcatgatgaatgttcaggagttgggcaccgtaaaacgcaagcagttaccgttgaagatagtcttactcgacaaccagcggttagggatggttcgacaatggcagcaactgtttttccaggagcgatatagcgaaaccaccctgaccgataaccccgatttcctcatgctggccagcgccttcggcattccaggccagcacattactcgtaaagaccaggttgaagcggcactcgacacgatgttggcaagcgaagggccgtacctgcttcacgtctcaatcgacgaacttgaaaatgtctggccgttggtgccgcctggcgccagtaactctgaaatgctggagaaattatcatga

SEQ ID NO: 137887 - protein, 548 aa, Salmonella typhimurium LT2
MNGAQWVVHALRAQGVKTVFGYPGGAIMPVYDALYDGGVEHLLCRHEQGAAMAAIGYARSTGKTGVCIATSGPGATNLITGLADALLDSVPVVAITGQVSAPFIGTDAFQEVDVLGLSLACTKHSFLVQSLEELPRIMAEAFEVANAGRPGPVLVDIPKDIQLASGELEPWFTTVANEATFPQADVEQARQMLEQAKKPMLYVGGGVGMAQAVPALRKFIAVTQMPVTCTLKGLGAVEADYPYYLGMLGMHGTKAANFAVQECDLLIAVGARFDDRVTGKLNTFAPNASVIHMDIDPAEMNKLRQAHVALQGDLNSLLPALQQPLKIDAWRQSCAELRAEHAWRYDHPGETIYAPLLLKQLSERKPADSVVTTDVGQHQMWSAQHMTYTRPENFITSSGLGTMGFGLPAAVGAQVARPNDTVICISGDGSFMMNVQELGTVKRKQLPLKIVLLDNQRLGMVRQWQQLFFQERYSETTLTDNPDFLMLASAFGIPGQHITRKDQVEAALDTMLASEGPYLLHVSIDELENVWPLVPPGASNSEMLEKLS

SEQ ID NO: 137888 - DNA, 1899 bp, Nostoc sp. PCC 7120
  CDS (1)..(1899): transl_table=11
gtgactgtgagcttgccttccccgactagtccctcacaaacagagaaacatactcagtctgttaattcgccatcggtggttgtgacaccacaacgggtaactggtggcttcgcgctacttgatagcctgctgcgccacggcgttgagtatatctttggttatcctggtggggcgattctgccgatttatgatgatctgtataaggtggaagcaactggcagccttaaacatattctagtgagacacgaacaaggagcagctcatgctgctgatggttatgctcgtgcaaccggaaaagtaggtgtatgctttggtacttctgggcctggggcaactaacttggtaacaggtatcgctacagcctacatggattcaattccaatggtgattgttactgggcaagtaccccggaaaatgatcggtacagatgcgttccaagaaaccgatatctacggtattactctacccattgttaagcactcctatgtagtgcgtgacccccaagacatggcgcgaattgtggcagaagcattccacatagccagcacaggccgtccagggccagtgttgattgatgtgccgaaagatgtggcttttgaacaatttgattatgtacctgtagaaccaggttcaattaaattacgcggatatcgccccacggtgaagggaaatccacgccaaattaacgccgcgattgaattgatccgcgaaagccgtcgtcctttactatacgttggtggtggggcgatcgcatctggcgctcatgcagaaattcaagaactcgccgagttatttaatatccccgtcactaccaccctaatgggtatcggggcttttgatgaacaccatcctttatccttggggatgttggggatgcacggcacagcttacgctaactttgctgtgactgattgtgatttattgatttgcgtgggtgctaggtttgatgaccgtgttactggcaaattagatgagtttgcttctcgtgccaaagtcattcacatcgatattgaccccgccgaagttggtaaaaaccgcattcctgaagtccccattgttggcgatgtgcggaaagtcttacttgatttattacgtcgttgcaaacaaacaagtgccaaaactacccccaaccaaaaccaagaatggcttaacttaattaaccgttggcgggaggattaccccctagtagttccccagcatccagacagcattcccccacaagaagtgattgtggaagtcggtagtcaagccccccacgccttctacaccactgatgttggtcaacatcaaatgtgggcagcccaattcctcaaaaatggcccccggcgttggatttctagcgcaggcttgggaactatgggttttggtttacctgccgcaattggcgctaaagtagctttcccagatgaacaagtaatctgtattagcggtgatgccagtttccaaatgtgtctgcaagagcttggtactgctgcacaatataagataaatgtcaagactgtaattctaaataacggctggcaagggatggtacgccaatggcaacaagcattccacggcgagcgctactcctgctcaaatatggaagtagggatgccagatgtagagttattggcacaagcctacggcattaagggtattgtagtcactcacagagagcaattgaaagatgcgatcgctcaaatgttagcctacgatggcccagttattttagatgttcgcgtcacaaaagacgagaattgctatcctatggtagctcctggtaagagtaatgctcaaatgattggtttaccgaagcaaccaccaaagaccagtgtcgaaccagtttattgcagccattgtggcacgtcaaatttaccaaatcacaatttctgttctgaatgtgggactaagttgtaa

SEQ ID NO: 137889 - protein, 632 aa, Nostoc sp. PCC 7120
MTVSLPSPTSPSQTEKHTQSVNSPSVVVTPQRVTGGFALLDSLLRHGVEYIFGYPGGAILPIYDDLYKVEATGSLKHILVRHEQGAAHAADGYARATGKVGVCFGTSGPGATNLVTGIATAYMDSIPMVIVTGQVPRKMIGTDAFQETDIYGITLPIVKHSYVVRDPQDMARIVAEAFHIASTGRPGPVLIDVPKDVAFEQFDYVPVEPGSIKLRGYRPTVKGNPRQINAAIELIRESRRPLLYVGGGAIASGAHAEIQELAELFNIPVTTTLMGIGAFDEHHPLSLGMLGMHGTAYANFAVTDCDLLICVGARFDDRVTGKLDEFASRAKVIHIDIDPAEVGKNRIPEVPIVGDVRKVLLDLLRRCKQTSAKTTPNQNQEWLNLINRWREDYPLVVPQHPDSIPPQEVIVEVGSQAPHAFYTTDVGQHQMWAAQFLKNGPRRWISSAGLGTMGFGLPAAIGAKVAFPDEQVICISGDASFQMCLQELGTAAQYKINVKTVILNNGWQGMVRQWQQAFHGERYSCSNMEVGMPDVELLAQAYGIKGIVVTHREQLKDAIAQMLAYDGPVILDVRVTKDENCYPMVAPGKSNAQMIGLPKQPPKTSVEPVYCSHCGTSNLPNHNFCSECGTKL

SEQ ID NO: 137890 - DNA, 1794 bp, Agrobacterium tumefaciens str. C58
  CDS (1)..(1794): transl_table=11
atgacggataaggacaatacggaaaacagcaatcgcatgacaggtgcggagatcgttctgcaggcgctgaaggacaacggcgtcgagcacatcttcggttatcccggcggtgccgttcttccgatttatgacgagattttccagcaggaagacattcagcacatcctcgtgcgtcatgagcagggtgccggccacgcggccgaagggtatgcccgttccaccggcaaggtcggcgtcatgctcgttacctccggtcccggcgccaccaatgcggtgacgccgctgcaggatgcgctgatggattccattccgctcgtctgcctgtccggccaggttccgacatcgctgatcggttccgacgcatttcaggaatgcgataccgtcggcatcacgcgcccctgcaccaagcacaactggctggtcaaggacgtcaacgaactggctggcatcatccatgaagccttccgcatcgcgcagactggccgtccgggtcccgtcgttgtcgatattccgaaggatattcagttcgccaccggcacctatacgccgccttccgccgccatccagcagaagagctacaagccgaaggttcagggcgacctcaacgccattcatgctgccatcgaactgatgtcgaaagcgaagaagccggttttttacaccggcggcggcgtcatcaattctggtccggaggcaacccgtctgctgcgtgaactggtcgagctcaccaatttcccgatcacctcgacgctgatgggtctcggcgcctatccggcttccggcaagaactggctcggcatgctgggcatgcacggttcctacgaagccaatatgacgatgcatgattgcgatgtcatggtctgcatcggcgcgcgtttcgatgaccgtattaccggtcgcatcaatgcgttttcgccgaattccaagaagatccatatcgatatcgatccgtcctcgatcaacaagaccgtgcgtgtcgacgtgcctgttatcggcgatgtcgggcatgttctggaagacatggttcgcctgtggcgcgctttgccgaagaaaccggaaaaagcgcagacggccgactggtggtcgcagattgagcgctggcgcgcccgcaattccttcgcctacaagaactccaaagatgtcatcatgccgcaatatgcattgcagcggctttatgaggcgtcgaagggacgcgacacttacatcacgacagaagtcggccagcaccagatgtgggcggcgcagttcttcggtttcgaggagccgaaccactggatgacctcgggcggtctcggcaccatgggttatggcctgccggcggctatcggcgtgcaggtcgcgcatcccgaagcgcttgtcatcgacattgccggtgacgcatcgatccagatgtgtatccaggaaatgtcctgcgccatccagtacggcctgccggtgaagattttcatcctcaacaaccagtatatgggcatggtgcggcaatggcagcagttgctgcacggcaaccgtctgtccaactcctataccgaagccatgcctgatttcgtcaagctggcggaggcctatggcgctgtcggcatgtattgcgacgacccgaaggaactggacgacaagatcgccgagatgattgcggtcaacaagccggtcatcttcgattgccgcgttgccaatctcgccaattgcttcccgatgatcccatctggtaaagcccataacgagatgctgttgccggatgaggcgacggatgaagctgttgccaacgccatcgatgccaagggccgtcagctagtctga

SEQ ID NO: 137891 - protein, 597 aa, Agrobacterium tumefaciens str. C58
MTDKDNTENSNRMTGAEIVLQALKDNGVEHIFGYPGGAVLPIYDEIFQQEDIQHILVRHEQGAGHAAEGYARSTGKVGVMLVTSGPGATNAVTPLQDALMDSIPLVCLSGQVPTSLIGSDAFQECDTVGITRPCTKHNWLVKDVNELAGIIHEAFRIAQTGRPGPVVVDIPKDIQFATGTYTPPSAAIQQKSYKPKVQGDLNAIHAAIELMSKAKKPVFYTGGGVINSGPEATRLLRELVELTNFPITSTLMGLGAYPASGKNWLGMLGMHGSYEANMTMHDCDVMVCIGARFDDRITGRINAFSPNSKKIHIDIDPSSINKTVRVDVPVIGDVGHVLEDMVRLWRALPKKPEKAQTADWWSQIERWRARNSFAYKNSKDVIMPQYALQRLYEASKGRDTYITTEVGQHQMWAAQFFGFEEPNHWMTSGGLGTMGYGLPAAIGVQVAHPEALVIDIAGDASIQMCIQEMSCAIQYGLPVKIFILNNQYMGMVRQWQQLLHGNRLSNSYTEAMPDFVKLAEAYGAVGMYCDDPKELDDKIAEMIAVNKPVIFDCRVANLANCFPMIPSGKAHNEMLLPDEATDEAVANAIDAKGRQLV

SEQ ID NO: 137892 - DNA, 1653 bp, Agrobacterium tumefaciens str. C58
  CDS (1)..(1653): transl_table=11
atgaaaagaactggtggccaactgatcgtcgaagcgctgaaggccaatggcgtctcgcgcgtttcctgcgttccgggcgaaagctacctggcggtgctggatgcactttatgaaagcggcatcgaaaccgtcgtctgccgccaggaaggcggcgccgccatgatggctgacacctggggccgcctgacgggcgaaccaggcatctgcatggtgacgcgcggaccgggcgccaccaacgcatcggccggcctgcacattgcgagacaggattccattccgatgatcctcttcatcggccaggtacagcgcgaagcccgcgagcgcgaggcgtttcaggaagtcgaataccgccgcgccttcaccgaattcgccaaatgggtgggcgagatcgacgatgcccgccgcatccccgaattcgtcacccgtgccttcgccgttgccacctccggccgccccggcccggtggttctgacgctgcccgaagacatgctggtggaggaggtcgaagcgcccgaggcaaagccctatatgccggtggaggcgcatcccggcccttcgcagatgacggccttcgcaaaaatgctgggcgaggcgaaacggccgattttcattatcggcggtacacgctggtccgaagaaagcgtggcaaccttccgggcatttgccgaaaaccacaagctgcccgtcggctgttccttccgccgccagatgctgttcgatcatctgagcccctcttatgccggagatgtcggcatcggcatcaacccggccttagcgaaggagatcaaggaatccgatctggtggtgctgctcggcggtcgcctctcggaaatgccgtcctccggttatacgctcatcgacatcccctacccgtcgcagaagctgatccatatttatcccgaagccgaagagctcggccgcgtctatcgccccgatctggcgatctgtgctgcgccggatgatttcgtcgccgtcctctcctcgctcaccctttccggcagcgccgcctgggcggaacgcaccgccgccatgcacgcggcttacctcgcctggtcgacgccgccgcagaccggccccggcacggtgcagatggggccgatcatggactggatcgaggccaatgtggccgacgacgccatcttcaccaatggcgccggcaattatgccacctggctgcaccgcttccaccgcttccgccgctacaacacgcaatcggccccgacctccggttccatgggttacggcctgccggcggctgtcgccgccaagcatctgttcccggagcgtgaggtgatctgctttgccggtgacggctgtttcatgatgcacggacaggaattcatcactgccgtgcgttatggcctgccgatcatcaccgtgcttgttaacaatggcacctatggcaccattcgcatgcatcaggagcgggaataccccggccgtgtcagcggcaccgatctcgtcaatccggatttcaacgcttttgccaaggcctatggcggccatggcgaaacggtggaaagaacgcaagacttcgccgccgccttcgagcgggcgcgtgcaagcggcaagcctggcatcatcgaggtgaagctggacccggaagcgatcacgccgacgcgcacgctgacgcagatcaggacaaaaagctga

SEQ ID NO: 137893 - protein, 550 aa, Agrobacterium tumefaciens str. C58
MKRTGGQLIVEALKANGVSRVSCVPGESYLAVLDALYESGIETVVCRQEGGAAMMADTWGRLTGEPGICMVTRGPGATNASAGLHIARQDSIPMILFIGQVQREAREREAFQEVEYRRAFTEFAKWVGEIDDARRIPEFVTRAFAVATSGRPGPVVLTLPEDMLVEEVEAPEAKPYMPVEAHPGPSQMTAFAKMLGEAKRPIFIIGGTRWSEESVATFRAFAENHKLPVGCSFRRQMLFDHLSPSYAGDVGIGINPALAKEIKESDLVVLLGGRLSEMPSSGYTLIDIPYPSQKLIHIYPEAEELGRVYRPDLAICAAPDDFVAVLSSLTLSGSAAWAERTAAMHAAYLAWSTPPQTGPGTVQMGPIMDWIEANVADDAIFTNGAGNYATWLHRFHRFRRYNTQSAPTSGSMGYGLPAAVAAKHLFPEREVICFAGDGCFMMHGQEFITAVRYGLPIITVLVNNGTYGTIRMHQEREYPGRVSGTDLVNPDFNAFAKAYGGHGETVERTQDFAAAFERARASGKPGIIEVKLDPEAITPTRTLTQIRTKS

SEQ ID NO: 137894 - DNA, 1695 bp, Methanosarcina acetivorans C2A
  CDS (1)..(1695): transl_table=11
atgacaaccgggtcaacagaaaaagtcaacggcgcaaaggctctaataaagtgccttgaaaaagaaggggttgacacgctcttcgggtatccgggagggcagatcattcctttctacaacgaactctatgattcagatctgcgccacatacttgtacgtcacgaacaggcagcagctcatgctgcggacgggtacgcccgtgctactggaaagaccggggtctgcgtttctacttcaggtcccggagcaactaacctggtaacaggtattgccaccgcatatatggactcagtgccaattgtagccttaaccggccaggtaccaaggccccttatcggaaacgatgctttccaggaagcagatattaccggcatcactctgccaattaccaagcacaattatcttgtacaggatgcagaagaaatcccgaggattgtaaaagaagccttccatatcgcttccaccggaaggcctggcccggtattaattgaccttccaaaggatgtacagaatatagagattgatttacaatatcctgacaaggtagaactcagaggctataagcccacttacaagggtaatacccagcagataaaacgagccgctgaagagatcgcaaactcctgcaggcccataatctatgcaggaggaggagtaataagttcgaacgcgagtgcggaacttgttgagctggccgagactctcatggctccggttaccactacccttatggggataagcgctatcccgaccgagcatcccctctatgtcggaatgctcggaatgcacgggtgcaaatacgcaaactatgcagtccaggagtccgatcttattattgctgtgggcgcaaggtttgacgaccgggttaccggcaagctcgagtcttttgcccccaacgccagggttatccatattgatgttgaccctgccgagatttccaagaatgtgaaggtccatgtgcctattgtcggggacgcaaagcagatactcaagtctcttatcaaatatatccagcgctgcaattccgcggaatggattgaaaagataaaccagtggaagaaagaataccctcttgcctacaggtatgtgtcttcggatactataatgccccagtttgttgtcgagcagatttccgaagtctgcaaagatgcgatcatagttacggaagtcgggcaacaccagatgtgggcagctcagtacttcaaataccgcaaacccaggaccttccttacttcaggcgggctcggtacaatgggatatgggcttcctgcagccatgggagccaaggtcggaaagccggataagaccgttatcaatatcgcaggcgacggctctttccagatgaactctcaggagcttgcaactctggtccaaaacgatatcccggttgtttccgtgatcctgaacaacggttacctgggcatggtcaggcagtggcaggaactcttctatgaccggaggtattcccacacctttatcaagggcagtgttgacttcgtaaagcttgccgaagcctacggtgcgctcggactgcgtgcggaaaagccgtctgaagtcaggcctgcaatcgaagaggctgtagggtccggaaggcctgctgttgttgaagtgattgttgaatgtgaagcgaatgtctatccgatggtgccggcaggagctgcaattaatgagatcatcgacctggaggagcactga

SEQ ID NO: 137895 - protein, 564 aa, Methanosarcina acetivorans C2A
MTTGSTEKVNGAKALIKCLEKEGVDTLFGYPGGQIIPFYNELYDSDLRHILVRHEQAAAHAADGYARATGKTGVCVSTSGPGATNLVTGIATAYMDSVPIVALTGQVPRPLIGNDAFQEADITGITLPITKHNYLVQDAEEIPRIVKEAFHIASTGRPGPVLIDLPKDVQNIEIDLQYPDKVELRGYKPTYKGNTQQIKRAAEEIANSCRPIIYAGGGVISSNASAELVELAETLMAPVTTTLMGISAIPTEHPLYVGMLGMHGCKYANYAVQESDLIIAVGARFDDRVTGKLESFAPNARVIHIDVDPAEISKNVKVHVPIVGDAKQILKSLIKYIQRCNSAEWIEKINQWKKEYPLAYRYVSSDTIMPQFVVEQISEVCKDAIIVTEVGQHQMWAAQYFKYRKPRTFLTSGGLGTMGYGLPAAMGAKVGKPDKTVINIAGDGSFQMNSQELATLVQNDIPVVSVILNNGYLGMVRQWQELFYDRRYSHTFIKGSVDFVKLAEAYGALGLRAEKPSEVRPAIEEAVGSGRPAVVEVIVECEANVYPMVPAGAAINEIIDLEEH

SEQ ID NO: 137896 - DNA, 1842 bp, Streptomyces coelicolor A3(2)
  CDS (1)..(1842): transl_table=11
atgaccgagcaggccaccggggctcacccgcagccccggccccgatccggaggacagtccgcccccgagcacgtcacgggtgcgcagtccctcattcgctctctcgaggaggtcggcgccgacaccgtattcggcatccccggaggcaccatccttccggcctacgacccgctgatggactccaccagggtgcgccacgtcctggtccgccacgagcagggcgccggccacgcggccaccggctacgcgcaggccaccggcaaggtcggcgtctgcatggcgacctcgggccccggggccaccaacctggtgaccccgatcgccgacgccaacctggactccgtgccgctggtcgcgatcaccgggcaggtggtctcctccgcgatcggcacggacgccttccaggaggcggacatcgtcggcatcaccatgccgatcaccaagcacagcttcctggtcaccaaggccgaggacatcccccgggtgatcgcgcaggcgttccacatcgcctccaccggccgccccggccccgtcctggtcgacatccccaaggacatcctccagaagaagaccaccttctcctggccgccggtcatggacctgcccggctaccgcccggtcaccaagccgcacgccaagcagatccgcgaggcggccaagctgatctccgcggcgaagcggcccgtgctctacgtcggcggcggcgtcctcaaggcgaaggccaccgccgagctgaaggtcctcgccgaactcaccggagcgcccgtcaccaccaccctgatggcgctcggcgcgttccccgacagccacccgctgcacgtgggaatgccgggcatgcacggtgcggtcaccgccgtcaccgcgctgcagaaggccgacctgatcgtcgccctcggagcccgcttcgacgaccgcgtcaccggcaagctggacagcttcgccccgcacgccaagatcgtccacgccgacatcgacccggccgagatcggcaagaaccgcgccgccgacgtgccgatcgtcggcgacgcccgcgaggtcgtcgccgacctcgtgcaggccgtccagaaggagcacgacgagggcaacaagggcgactacagcgcctggtggaaggacctgagccgctggcgcgacacctaccccctcggctacgaccagcccgaggacggctcgctctccccgcagcaggtcatcgagcgcatcgggcagctggcacccgagggcacgatcttcgcggcgggcgtcggccagcaccagatgtgggccgcgcacttcgtccagtacgaaaagcccgccacctggctgaactcgggcggcgcggggaccatgggctacgcggtcccggcggccatgggcgcccaggccggcatgcccggccgcaccgtctgggcgatcgacggcgacggctgcttccagatgaccaaccaggaactgaccacctgcgccctgaacaacatcccgatcaaggtcgccgtcatcaacaacggcgccctcgggatggtccgccagtggcagaccctgttctacaaccagcggtactccaacacggtgctgcactccggcccggacgacgtcaacccggaggcccgcggcacccgcgtccccgacttcgtgaagctgtcggaggccatgggctgctacgccatccgctgcgaggaccccgccgacctcgacaaggtgatcgaggaggccaactccgtcaacgaccgccccgtcgtcgtcgacttcatcgtccacgaggacgccatggtctggccgatggtcgccgccggcacctccaacgacgagatcctggccgcccgggacgtccgccccgacttcggcgacaacgaagacgactga

SEQ ID NO: 137897 - protein, 613 aa, Streptomyces coelicolor A3(2)
MTEQATGAHPQPRPRSGGQSAPEHVTGAQSLIRSLEEVGADTVFGIPGGTILPAYDPLMDSTRVRHVLVRHEQGAGHAATGYAQATGKVGVCMATSGPGATNLVTPIADANLDSVPLVAITGQVVSSAIGTDAFQEADIVGITMPITKHSFLVTKAEDIPRVIAQAFHIASTGRPGPVLVDIPKDILQKKTTFSWPPVMDLPGYRPVTKPHAKQIREAAKLISAAKRPVLYVGGGVLKAKATAELKVLAELTGAPVTTTLMALGAFPDSHPLHVGMPGMHGAVTAVTALQKADLIVALGARFDDRVTGKLDSFAPHAKIVHADIDPAEIGKNRAADVPIVGDAREVVADLVQAVQKEHDEGNKGDYSAWWKDLSRWRDTYPLGYDQPEDGSLSPQQVIERIGQLAPEGTIFAAGVGQHQMWAAHFVQYEKPATWLNSGGAGTMGYAVPAAMGAQAGMPGRTVWAIDGDGCFQMTNQELTTCALNNIPIKVAVINNGALGMVRQWQTLFYNQRYSNTVLHSGPDDVNPEARGTRVPDFVKLSEAMGCYAIRCEDPADLDKVIEEANSVNDRPVVVDFIVHEDAMVWPMVAAGTSNDEILAARDVRPDFGDNEDD

SEQ ID NO: 137898 - DNA, 1743 bp, Streptomyces coelicolor A3(2)
  CDS (1)..(1743): transl_table=11
atggccaaacagaacgtcgcggaacagttcgtcgacatcctcacccgcgccggggtcgagcgcctctacggagtcgtcggggacagcctcaaccccgtcgtggacgccgtgcgccgccattccggcatcgaatgggtgcacgtacggcacgaggagaccgccgccttcgccgccggggcggaggcgcagatcaccgggaagctcaccgcgtgcgccggctcctgcggccccggcaacctccacctcatcaacgggctctacgacgcccaccgctccatggcccccgtcctcgccctggcctcccagatcccgtccagcgagatcgggctcggcttcttccaggagacccaccccgaccagctgttccgcgagtgcagtcactacagcgagctgatctccagcccgaagcagatgccccggctgctccagaccgccatccaacacgccgtcggccagggcggcgtcagcgtcgtctcgctgcccggcgacatcgcggacgagcccgccccgcagggggccgccgagacggccctcgtcacctcccggcccaccgtccggcccggcgacgaggagatcgaccggctggtccggatgatcgacgacgccgacaaggtcaccctgttctgcggcagcggcaccgcgggcgcgcacgccgaggtcatggagttcgccgggaagctcaaggcaccggtcgggcacgccctgcggggcaaggagttcatccagtacgacaacccgtacgacgtcggcatgagcggactgctcggctacggcgccgcctacgaggccacccacgagtgcgacctgctgctcctgatcggcaccgacttcccgtacaacgccttcctcccggacgacgtgaagatcgcccagatcgacgtgcggcccgagcacctgggacggcgctccaagctggacctcgcggtgtggggcgacgcgcgggagacgctgcgctgcctgatcccccgggtcaaggagaagaagaaccgccgcttcctggaccggatgctgaagaagcacgccgacgccctggaaggcgtcgtcaaggcgtacacccgcaaggtcgacaagcacgtcccgatccaccccgagtacgtggccgccctgctggacgagatggccgacgacgacgcggtgttcaccgtcgacaccgggatgtgcaacgtctgggcggctcgttacatctcgcccaacgggcgccgccgcatcatcggttccttctcccacggttcgatggcgaacgcgctgccgatggcgatcggcgcccagttcaccgaccggcgccgacaggtcgtgtcgatgtccggcgacggcgggttcaccatgctgatgggcgacttcctcaccctcgtccagcacgacctgccggtgaagatcgtgctcttcaacaactcctcgctcggcatggtcgagttggagatgctcgtcgcgggcctgccctcgcacggggtggccaacaagaacccggacttcgccgccgtcgccgaggcctgcggcgccttcggcgtccgggtggagaagcccaaggacctggccggggcgctgaaggcggcgttcaagcacaagggtcccgccctcgtcgacgtggtcaccgaccccaacgccctgtccatcccgccgaagatcagcgccgacatggtcaccggcttcgccctgtccgcctcgaagatcgtcctggacggcggggtcggacgcatgctccagatggcccggtcgaacctgcgcaacgtcccccgcccgtga

SEQ ID NO: 137899 - protein, 580 aa, Streptomyces coelicolor A3(2)
MAKQNVAEQFVDILTRAGVERLYGVVGDSLNPVVDAVRRHSGIEWVHVRHEETAAFAAGAEAQITGKLTACAGSCGPGNLHLINGLYDAHRSMAPVLALASQIPSSEIGLGFFQETHPDQLFRECSHYSELISSPKQMPRLLQTAIQHAVGQGGVSVVSLPGDIADEPAPQGAAETALVTSRPTVRPGDEEIDRLVRMIDDADKVTLFCGSGTAGAHAEVMEFAGKLKAPVGHALRGKEFIQYDNPYDVGMSGLLGYGAAYEATHECDLLLLIGTDFPYNAFLPDDVKIAQIDVRPEHLGRRSKLDLAVWGDARETLRCLIPRVKEKKNRRFLDRMLKKHADALEGVVKAYTRKVDKHVPIHPEYVAALLDEMADDDAVFTVDTGMCNVWAARYISPNGRRRIIGSFSHGSMANALPMAIGAQFTDRRRQVVSMSGDGGFTMLMGDFLTLVQHDLPVKIVLFNNSSLGMVELEMLVAGLPSHGVANKNPDFAAVAEACGAFGVRVEKPKDLAGALKAAFKHKGPALVDVVTDPNALSIPPKISADMVTGFALSASKIVLDGGVGRMLQMARSNLRNVPRP

SEQ ID NO: 137900 - DNA, 1722 bp, Chlorobium tepidum TLS
  CDS (1)..(1722): transl_table=11
atgcataacaacggagagaaactgatcggatccgaaatatttttcgagtgtctaaggcgtgaaaacgtcgaatacatcttcggctaccccggcggggcattgctgaaagtctatgaaaccctgcacgatgtcgaggatattgagcacattctggcgcgccacgaacagggtgcgacccacatggccgagggctacgcccgcgccaccggcaggcccggcgtggtgctggtcacctccggccccggcgcgaccaacaccgtcaccggcatcaccaacgcctacatggactccacgccgctagtggtcttcaccggccaggtgccgagttcgctgatcggcaacgacgcctttcaggaagcggacatcgtcggcatcacgcggccgatcaccaagcacaacttcctcgtcaaggatgtgcgcgagctggctacgaccatccgcaaggcattttacctggccaccaacggacggccaggcccggtgctggtcgatatgcccaaagatgtgctgaacgccgaatgcaccttcgagtggccggagaacgttgacattcgaggcttcaagccgacgatcaagtgccacgccaaccaggtcagcaaagcggcgaaaatgatcgccaaagccaagcgtccgctcttctacgtcggcggcggcgtcatcagcgcggaggcatcggcggagctgcgcaagctggccatcgaccagcagattccggtcaccatgaccctgcaaggactcggcgcgttccccggcgaccatccgctctccatgggaatgctcggcatgcacggcacctactgggccaaccaggcggtgagcaactgtgacctgttgatcgccgtcggtgcgcgcttcgacgaccgcgtcaccggcaaggttgacaccttcgccacccatgcgtacaaaatccacaacgacatcgacccgaccaacgtggacaagaacatcaaggtcgatctgccggtggtcggcgactcgaaggacttcctcgcctcgctcatcgaagcgatgccgaaatcgagggaggatcgcagcgcgtggctcgccgaaatcgagaagtggcgcaagcagtgtccgctcgactacgagatcgagccggattcgctcaaaaccgagttcgtcatcgacgaggtctccaggcagaccaaaggtcacgcggtggttgttaccgacgtcggccagcaccagatgtggacgtcgcagtactacaagttcaccgaaccgcgctcgatcatcacgagtggcggactcggcaccatgggcttcggcctgccgtcggccatcggcgcggccttcggcgtcaccgaccggccagtgttgctcttcagtggcgacggcggtctgatgatgaacatccaggagatggtcacggcggtttacaacaaactgccgatcaagattttcctgatcaacaacagctacctcggcatggtgcgccagtggcaggagctgttccatcaggagaagtacaccttcaccgacctggcgtcgagcaaccccgatttcgtcaaggttgccgaagcctttggctgcaaggcgatgagcgccagcaatccggaagcagcgcgcgccgccatcaccgaagcgctcgcgtacaacgacgggccagtgctggttgatttcagggttatccgcaaggatatggtttttccaatggtacccgccggcggctcgatttcagacatgctgttggcccggctgaatccgaaaacaatggtttaa

SEQ ID NO: 137901 - protein, 573 aa, Chlorobium tepidum TLS
MHNNGEKLIGSEIFFECLRRENVEYIFGYPGGALLKVYETLHDVEDIEHILARHEQGATHMAEGYARATGRPGVVLVTSGPGATNTVTGITNAYMDSTPLVVFTGQVPSSLIGNDAFQEADIVGITRPITKHNFLVKDVRELATTIRKAFYLATNGRPGPVLVDMPKDVLNAECTFEWPENVDIRGFKPTIKCHANQVSKAAKMIAKAKRPLFYVGGGVISAEASAELRKLAIDQQIPVTMTLQGLGAFPGDHPLSMGMLGMHGTYWANQAVSNCDLLIAVGARFDDRVTGKVDTFATHAYKIHNDIDPTNVDKNIKVDLPVVGDSKDFLASLIEAMPKSREDRSAWLAEIEKWRKQCPLDYEIEPDSLKTEFVIDEVSRQTKGHAVVVTDVGQHQMWTSQYYKFTEPRSIITSGGLGTMGFGLPSAIGAAFGVTDRPVLLFSGDGGLMMNIQEMVTAVYNKLPIKIFLINNSYLGMVRQWQELFHQEKYTFTDLASSNPDFVKVAEAFGCKAMSASNPEAARAAITEALAYNDGPVLVDFRVIRKDMVFPMVPAGGSISDMLLARLNPKTMV

SEQ ID NO: 137902 - DNA, 1782 bp, Yersinia pestis KIM
  CDS (1)..(1782): transl_table=11
gtggaaatgaattcccgttatccaatgagcaaactaagcccggaggcaaaacccatggagatgttgtcaggagccgagatggtggtccgatcgttaattgatcagggcgttaagcatgtattcggttatcccggcggggccgtacttgatatttacgatgccctgcacacggtcggaggcatcgatcacgtgctggtgcgccatgaacaaggtgcggttcacatggccgatggttatgcgcgggcaacgggcgaggtcggtgttgtactggtcacgtctggtcctggtgcaaccaatgcgattaccggtattgcgaccgcctatatggattcagtgccaatggtggtgctttcaggccaagtgccaagctcattgattggttttgatgccttccaagaatgtgacatggtggggatctcccgcccagtggtcaaacatagcttcttggttaagcgcacagaagacatcccgatggtgttgaaaaaagccttttatctggcatccactggccgtcccggtccggtggttatcgacttgccaaaagacattgtcggcccagcagtaaaaatgccttacgcctatccagagcaagtcagtttgcgctcctataatcctacggtgcaaggccaccgtgggcagattaagcgtgcactgcaaacgattatggcggctaaacggcccattatgtatgtcggtggtggtgcgattaacgccgcttgccatgaagaattactgatattggcagagaagctgaacttaccggtaaccagctctctgatggggctaggcagtttccctggtacgcatcgccaaagtgtcggcatgttggggatgcatggtacctttgaagccaatatggccatgcacaatactgatctgatttttgccgtcggtgtccgttttgacgatcgtaccaccaataatttagcaaaatattgccctgatgccacagtgctacacattgatatcgatccgacatcgatctcgaaaacggtcaccgccgatatcccgattgtgggtgatgccaaacaagtactgacacaaatgttagatttgttgtcgcaggtcggctgtacacaagattttgatagcttgcgcgattggtggcaatccattgaacaatggcgcacccgtaattgcttgggctacaacaaagacagtgggaaaatcaagccacaagcggtgattgaagccttacatcgtctgactaaaggcgatgcgtacgttacctctgatgtgggccaacatcagatgtttgcggctctttactatccctttgataagccacgtcgttggattaactccggtggcttgggcacgatgggctttggcttgccagcggcgcttggggttaaattggctttgcctaatgaaaccgtcgtttgtgtgaccggtgatggcagtatccagatgaatattcaggagttatcaaccgcactgcaatataacttgccagtgttggtattaaacctgaataaccgctatctggggatggtgaaacaatggcaggacatgatttattcaggccgccattctcagtcgtatatggattcgctgcctgattttgtcaagttggctgaagcctatggccatattggtgtggctattaatacgccggatgagctggaaagtaagctggcagacgcactgacacaattatccgaaaccaatcgtttggtctttgtggatgtgactgtcgatgaaacagaacatgtttacccgatgcagattcgtggtggtggcatggacgaaatgtggctaagcaaaacggagaggacttaa

SEQ ID NO: 137903 - protein, 593 aa, Yersinia pestis KIM
MEMNSRYPMSKLSPEAKPMEMLSGAEMVVRSLIDQGVKHVFGYPGGAVLDIYDALHTVGGIDHVLVRHEQGAVHMADGYARATGEVGVVLVTSGPGATNAITGIATAYMDSVPMVVLSGQVPSSLIGFDAFQECDMVGISRPVVKHSFLVKRTEDIPMVLKKAFYLASTGRPGPVVIDLPKDIVGPAVKMPYAYPEQVSLRSYNPTVQGHRGQIKRALQTIMAAKRPIMYVGGGAINAACHEELLILAEKLNLPVTSSLMGLGSFPGTHRQSVGMLGMHGTFEANMAMHNTDLIFAVGVRFDDRTTNNLAKYCPDATVLHIDIDPTSISKTVTADIPIVGDAKQVLTQMLDLLSQVGCTQDFDSLRDWWQSIEQWRTRNCLGYNKDSGKIKPQAVIEALHRLTKGDAYVTSDVGQHQMFAALYYPFDKPRRWINSGGLGTMGFGLPAALGVKLALPNETVVCVTGDGSIQMNIQELSTALQYNLPVLVLNLNNRYLGMVKQWQDMIYSGRHSQSYMDSLPDFVKLAEAYGHIGVAINTPDELESKLADALTQLSETNRLVFVDVTVDETEHVYPMQIRGGGMDEMWLSKTERT

SEQ ID NO: 137904 - DNA, 1809 bp, Thermosynechococcus elongatus BP-1
  CDS (1)..(1809): transl_table=11
gtgcaagcaactggagcatacattctgattgataccctatgccgtcacggtgttaagcatatttttggatatcctggtggggccattttaccgatttatgatgaactttaccgtgctgagtccaagggcatcattcagcacattctggtgcgccacgaacagggggcagcccatgctgctgacggctacgcccgtgccacaggtcaggtgggggtgtgttttgcgacttccggaccaggggcaacaaacttagttacaggcattgccacagcccacatggattcaattccactgctggtgatcacgggtcaggtacctcgctctgccattggcaccgatgcctttcaagaaaccgatatttttggcattacgctgcccattgttaaacactcctacgtggtgcgtgcagctaaggacatggcacggatcattgctgaggcgatctacattgccaccactggtcgaccgggacccgtgcttgtggatattcccaaggatgtggggttagaggtctgtgagtatgagccggtcgagccggggcaggtgaagctgcggggctatcgccccacgattcgcggcaatgcccgtcaaattgcccaagcggtccaattgattcgtgaggccaagcgaccgttgctttatgtggggggcggggcaattacagcgggtgctcacgaggaggtcctcaagttagccgagctcttccagattccagtgaccacaacactcatggggaagggggcttttcctgaatcccatcccctctctgtgggtatgttggggatgcatggcaccgcctatgccaactttgccgtcagtgaatgcgatctcctgattgcggtgggggcgcgctttgacgatcgcgtcaccggtaagctggacgagtttgcctcccgcgctaaggtcattcacattgacattgatcctgctgaggtgggcaaaaaccgtgtccctgatgtgccgattgtgggcagcgttaaaccagtgctgcagcagctcctcaagcacattgaagacagtggtcaagcggttgaacctcagacccaagcctggttagagcggattactatctggaagcaggattatcccctcattgtgccccaacccagtggtgaactctcaccgcaggaggtgattgtcgcttttggccgtcacgcccccgatgcctattacaccactgatgtgggtcagcaccagatgtgggcagcacaattcctgaaaaatggccctcggcgttggatctccagtgcgggcttgggcacaatgggctttggtatgcctgcggccatgggggtcaaagtagctttgccggatcaacaggtgatttgtattagtggcgatgccagtttccagatgaattcccaagagctggctacactggctcagtacggtattgctgtcaagactgtcattattaacaacttctggcagggaatggtgcggcagtggcagcaggccttttatgaggagcggtattcccattccaatatggccgagggaatgcccgattttgtgaaattggcggaggcctatggggttaaggggctacgggtgagcgatcgccaggatttggatgccattgtccaagaggttttggcctacgatgggccagtactgctggatgcccatgtcacccgcgatgaaaactgctacccaatggttgcccccggcaagcctaactctcaaatgctcggtctgccggaagccaaggttcttgaaaaggctgctgaactggtctactgtgccaattgtggagccaagacgatttcaacccatcgcttttgtccagagtgtggcagcaagctctag

SEQ ID NO: 137905 - protein, 602 aa, Thermosynechococcus elongatus BP-1
MQATGAYILIDTLCRHGVKHIFGYPGGAILPIYDELYRAESKGIIQHILVRHEQGAAHAADGYARATGQVGVCFATSGPGATNLVTGIATAHMDSIPLLVITGQVPRSAIGTDAFQETDIFGITLPIVKHSYVVRAAKDMARIIAEAIYIATTGRPGPVLVDIPKDVGLEVCEYEPVEPGQVKLRGYRPTIRGNARQIAQAVQLIREAKRPLLYVGGGAITAGAHEEVLKLAELFQIPVTTTLMGKGAFPESHPLSVGMLGMHGTAYANFAVSECDLLIAVGARFDDRVTGKLDEFASRAKVIHIDIDPAEVGKNRVPDVPIVGSVKPVLQQLLKHIEDSGQAVEPQTQAWLERITIWKQDYPLIVPQPSGELSPQEVIVAFGRHAPDAYYTTDVGQHQMWAAQFLKNGPRRWISSAGLGTMGFGMPAAMGVKVALPDQQVICISGDASFQMNSQELATLAQYGIAVKTVIINNFWQGMVRQWQQAFYEERYSHSNMAEGMPDFVKLAEAYGVKGLRVSDRQDLDAIVQEVLAYDGPVLLDAHVTRDENCYPMVAPGKPNSQMLGLPEAKVLEKAAELVYCANCGAKTISTHRFCPECGSKL

SEQ ID NO: 137906 - DNA, 1722 bp, Oceanobacillus iheyensis HTE831
  CDS (1)..(1722): transl_table=11
gtgaaagtagatgcaaaccagcagatggaggttaaaagtaatttagtaacgggtgctgatttgtttgtgcaagcattggaaagagcaaatgtggaagtagtttttggttatcctggaggtgcagtattaccgatttacgatgcgttacatcggaatcaaacatcttttgagcatgtactttcgcgacatgagcaaggatccattcatgcagcagaaggttatgcgagagtctctggcaaaccaggagttgtaattgctacttctggaccgggcgcgacaaatctaattactgggataacggatgcgatgatggactctatacctcttgtcatttttactggtcaagttgcaaaaggagttattggaacagatgcttttcaagaagcagatgtaatgggaattacaacacctattaccaaatataactaccaagtgaatgaaatagctgaactgccccgtattgtaaatgaagcatttcacattgcgacaacaggtagaccagggccagtcgttgtagatattccaaagaatatttcttcgacagtgacggtgaatgattatgaagcggattttcatttacctggttatcagccaacaatcacaccgaatcctttacaaattaccaaagtaaatgaagcattaaaacgagcggagaagccggtactattagctggagcgggaattcttatctctgacgcttccaatgaattaaaacagtttgctcaacattatcaactaccggtagttaccaccttacttggattaggaagctatcctggtaaggaatccttatcattaggaatggcggggatgcacggaacgtatgcagcaaatatggcaatctatgaatgtgatttgttaataaatattggtgcacgatttgatgataggctgacgggaaatattaaacactttgcaccaaatgcgaagatcgttcacattgatatcgaccctgctgaaattgggaaaaatatcgaaacgaatattcctgttgttgctgatgcaaaacgagcattaacagctcttttaaaaaatacaacagaaaaatgtgatcatcaaaattggctccatcagttgaagcataatcaattagatttcccattgtggtatgatcgttccgatcaagaaatctctccccaatggttaatggagcaaatatatgagctgtctaagggagaagcagttgtaacaacagatgtagggcagcatcaaatgtgggctgcacagtattactcatttaaagatccacataattgggtgacatctggtggattagggacaatggggttcggcttccctgcagccattggagctcaaatggctaaaccaaacagtttagttttagcagtagttggtgatggtggttttcaaatgactttacaggaattgtccatactgaaatcacagaatctgccagtaaaagtaataatcttaaataatgaagcgcttggtatggtacgccaatggcaggaaagtttttacgaagaaagatattcacattcgctgttttcagaaaaccctgattttgtgaaattggcagaaagttatggtgtgagaggaatgagagtggagaaagaagctgatgttccaaatatcttatctgaagtatttacctacgatggcccagttgtaattgattgcagagtagtgcaaaaaacctctgtttatccaatgattgcaccaggtacaggaatccaagaaatgattggagtgagaagatga

SEQ ID NO: 137907 - protein, 573 aa, Oceanobacillus iheyensis HTE831
MKVDANQQMEVKSNLVTGADLFVQALERANVEVVFGYPGGAVLPIYDALHRNQTSFEHVLSRHEQGSIHAAEGYARVSGKPGVVIATSGPGATNLITGITDAMMDSIPLVIFTGQVAKGVIGTDAFQEADVMGITTPITKYNYQVNEIAELPRIVNEAFHIATTGRPGPVVVDIPKNISSTVTVNDYEADFHLPGYQPTITPNPLQITKVNEALKRAEKPVLLAGAGILISDASNELKQFAQHYQLPVVTTLLGLGSYPGKESLSLGMAGMHGTYAANMAIYECDLLINIGARFDDRLTGNIKHFAPNAKIVHIDIDPAEIGKNIETNIPVVADAKRALTALLKNTTEKCDHQNWLHQLKHNQLDFPLWYDRSDQEISPQWLMEQIYELSKGEAVVTTDVGQHQMWAAQYYSFKDPHNWVTSGGLGTMGFGFPAAIGAQMAKPNSLVLAVVGDGGFQMTLQELSILKSQNLPVKVIILNNEALGMVRQWQESFYEERYSHSLFSENPDFVKLAESYGVRGMRVEKEADVPNILSEVFTYDGPVVIDCRVVQKTSVYPMIAPGTGIQEMIGVRR

SEQ ID NO: 137908 - DNA, 1755 bp, Brucella suis 1330
  CDS (1)..(1755): transl_table=11
atgaccggcgcagaaatggttatccaggcgctgatcgatcagggtgtggaaagcattttcggctatcccggcggcgcggtgcttccgatttatgacgagctgtttcagcaggatcaaatccagcacgttctggttcgccatgagcagggtgcaggccatgcagcggaaggctatgcgcgctcgacgggtaaagtcggcgtcatgctcgtcacttcggggccgggtgcaaccaatgccgtgacgccgttgcaggatgccttgatggattccatcccgctggtctgcatttccggtcaggttcccacgacgctgatcggttccgatgcgtttcaggaatgcgatacgattggcatcacgcgcccctgcaccaagcacaactggctggtaaaggacgtcaacgacctgtcgcgcgtcctgcatgaagctttccatgtcgcatccaccggccgtcccggccccgtcgtcgtcgatattccgaaggatattcagttcgccaagggcatctatacgccgccggaaactgcaccgcgcacaagttaccgtccagttctcgacggcaatgccgaggctatttccgaggctgtccgtctgctcgccaatgccagaaagccggtcatttattcgggcggcggcgtgatcaattccggccccgcggcttcccgtctgctgcgtgagctggtcgagatcagcaatttcccgatcacctccacgctgatggggcttggcgcctatcccgcctccggcaagaactggctcggtatgctgggcatgcacggcacctatgaagccaacatgaccatgcatgattgcgatgtcatgctgtgcgtcggtgcgcgtttcgacgaccgcatcaccggccgcctcaacgctttctcgccgaattccaagaaaattcatatcgatatcgatccgtcgtcgatcaacaagaacgttcgggtcgatgtgccgatcatcggcgatgtcgcgcatgtgctggaggatatcgtccgccagtttcgtgctttcgaccgcaagccagacaggcaggcattgaccgaatggtgggggcagatcgaccgttggcgcgcgcgcaattcgctggcctatacgccgaacaaagacgtcatcatgccgcaatatgccatcgagcggctttatgaactgaccaggaaccgcaacacctatatcaccaccgaggtgggccagcaccagatgtgggcggcgcaattcttcggctttgaacagccgaaccgttggctgacttccggcggccttggcaccatgggctatggtctgcctgcggcgctgggcgtgcagattgcacatccggatgcgctggttatcgatattgcaggcgatgcctcgatccagatgtgtatccaggaaatgtcggcagcaatccagcataatgcgccgatcaagattttcatcctgaacaaccagtatatgggcatggtgcgccagtggcagcaattgctgcatggcaaccgcctgtcgcattcctacacggaagcgatgcccgatttcgtgaaacttgcggaagcatacggcgcgcacggcattcgctgcgagaagccgggcgatctcgatgccgccattcaggagatgatcgatatcgacaagccggtcattttcgattgccgcgtggcaaaccttgccaactgcttcccgatgatcccgtcgggcaaggcgcataatgaaatgctgttgccggacgaagcgacagatgaggccgtcgccaatgccattgatgccaagggccgcgcgctcgtctga

SEQ ID NO: 137909 - protein, 584 aa, Brucella suis 1330
MTGAEMVIQALIDQGVESIFGYPGGAVLPIYDELFQQDQIQHVLVRHEQGAGHAAEGYARSTGKVGVMLVTSGPGATNAVTPLQDALMDSIPLVCISGQVPTTLIGSDAFQECDTIGITRPCTKHNWLVKDVNDLSRVLHEAFHVASTGRPGPVVVDIPKDIQFAKGIYTPPETAPRTSYRPVLDGNAEAISEAVRLLANARKPVIYSGGGVINSGPAASRLLRELVEISNFPITSTLMGLGAYPASGKNWLGMLGMHGTYEANMTMHDCDVMLCVGARFDDRITGRLNAFSPNSKKIHIDIDPSSINKNVRVDVPIIGDVAHVLEDIVRQFRAFDRKPDRQALTEWWGQIDRWRARNSLAYTPNKDVIMPQYAIERLYELTRNRNTYITTEVGQHQMWAAQFFGFEQPNRWLTSGGLGTMGYGLPAALGVQIAHPDALVIDIAGDASIQMCIQEMSAAIQHNAPIKIFILNNQYMGMVRQWQQLLHGNRLSHSYTEAMPDFVKLAEAYGAHGIRCEKPGDLDAAIQEMIDIDKPVIFDCRVANLANCFPMIPSGKAHNEMLLPDEATDEAVANAIDAKGRALV

SEQ ID NO: 137910 - DNA, 1809 bp, Shigella flexneri 2a str. 301
  CDS (1)..(1809): transl_table=11
atgtctctggctgccaattgcttaagcaagatcggacggttaatgtgttttacacattttttccgtcaaacagtgaggcaggccatggagatgttgtctggagccgagatggtcgtccgatcgcttatcgatcagggcgttaaacaagtattcggttatcccggaggcgcagtccttgatatttacgatgcattgcataccgtgggtggtattgatcatgtattagttcgtcatgagcaggcggcggtgcatatggccgatggcctggcgcgtgcgaccggggaagtcggcgtcgtgctggtaacgtcgggtccaggggcgaccaatgcgattaccggcatcgccaccgcttatatggattccattccattagttgtcctttccgggcaggtagcgacctcgttgataggttacgatgcctttcaggagtgcgacatggtggggatttcgcgaccggtggttaaacacagttttctggttaagcaaacggaagacattccgcaggtgctgaaaaaggctttctggctggcggcaagtggtcgcccaggaccagtggtcgttgatttaccgaaagatattcttaatccggcgaacaaattaccctatgtctgccctgagtcggtcagtatgcgttcttacaatcccactactaccggacataaagggcaaattaagcgtgctctgcaaacgctggtagcggcaaaaaaaccggttgtctacgtaggcggtggggcaatcatggcgggctgccatcagcagttgaaagaaacggtggaggcgttgaatctgcccgttgtttcctcattgatgggaatgggggcgtttccggcaacgcatcgtcaggcactgggcatgctgggaatgcacggtacctacgaagccaatatgacgatgcataacgcggatgtgattttcgccgtcggggtacgatttgatgaccgaacgacgaacaatctggcaaagtactgcccaaatgccactgttctgcatatcgatattgatcctacttccatttctaaaaccgtgactgcggatatcccgattgtgggggatgctcgccaggtcctcgaacaaatgcttgaactcctgtcgcaagaatccgcccatcaaccgctggatgagatccgcgactggtggcagcagattgaacagtggcgcgctcttcagtgcctgaaatatgacactcacagtgaaaagattaaaccgcaggcggtgatcgagactctttggcggttgactaatggggacgcttacgtgacgtccgatgtcgggcagcaccagatgtttgctgcgctttattatccattcgacaaaccgcgtcgctggatcaattccggcggtctcggcacgatgggttttggtttacctgcggcactgggcgtcaaaatggcgttgccagaagaaaccgtggtttgcgtcactggcgacggcagtattcagatgaacatccaggaactgtctaccgcgttgcaatacgagttgcccgtactggtggtgaatctcaataaccgctatctggggatggtgaaacagtggcaggacatgatctattccggccgtcattcacaatcttatatgcaatcactacccgatttcgtccgtctggcggaagcctatggtcacgtcgggatccagatctctcatccgcatgagctggaaagcaaacttagcgaggcgctggaacaggtgcgcaataatcgcctggtgtttgttgatgttaccgtcgatggcagtgagcacgtctacccgatgcagattcgcgggggcggaatggatgaaatgtggttaagcaaaacggagagaacctga

SEQ ID NO: 137911 - protein, 602 aa, Shigella flexneri 2a str. 301
MSLAANCLSKIGRLMCFTHFFRQTVRQAMEMLSGAEMVVRSLIDQGVKQVFGYPGGAVLDIYDALHTVGGIDHVLVRHEQAAVHMADGLARATGEVGVVLVTSGPGATNAITGIATAYMDSIPLVVLSGQVATSLIGYDAFQECDMVGISRPVVKHSFLVKQTEDIPQVLKKAFWLAASGRPGPVVVDLPKDILNPANKLPYVCPESVSMRSYNPTTTGHKGQIKRALQTLVAAKKPVVYVGGGAIMAGCHQQLKETVEALNLPVVSSLMGMGAFPATHRQALGMLGMHGTYEANMTMHNADVIFAVGVRFDDRTTNNLAKYCPNATVLHIDIDPTSISKTVTADIPIVGDARQVLEQMLELLSQESAHQPLDEIRDWWQQIEQWRALQCLKYDTHSEKIKPQAVIETLWRLTNGDAYVTSDVGQHQMFAALYYPFDKPRRWINSGGLGTMGFGLPAALGVKMALPEETVVCVTGDGSIQMNIQELSTALQYELPVLVVNLNNRYLGMVKQWQDMIYSGRHSQSYMQSLPDFVRLAEAYGHVGIQISHPHELESKLSEALEQVRNNRLVFVDVTVDGSEHVYPMQIRGGGMDEMWLSKTERT

SEQ ID NO: 137912 - DNA, 1725 bp, Pseudomonas putida KT2440
  CDS (1)..(1725): transl_table=11
gtggagcttttatctggcgctgagatggtcgtccgcttcttgcgtgacgaaggcgttaagcacatctacgggtaccctggtggtgctctcctgcatgtttacgacgcactgttcaaagaaccggaagtggaacacatcctggttcgtcacgagcaggcggccacccatatggcggacggctacgctcgcgccaccggcaaggccggtgtggtgctggtaacctccggtcctggcgcgaccaatgccattaccggtattgccaccgcctacatggactcgattccgatggtcatcctgtccggccaggtgcctagcaccatggtgggcaccgatgccttccaggaaaccgacatgattggtatctcgcggccgatcgtgaagcacagcttcatgatcaagaatccgaccgagatccctgaagttctgaaaaaagctttctacctggcgcaatccggtcgtccaggtccagtcgtggtcgacattccaaaagatatgaccaacccggctgagaagttcgaatacgtctacccgaaaaaggtcaagctgcgctcctacagcccggcggtccgcggtcactccggccagatccgcaaggctgccgagatgcttctggcggccaagcgcccggtcgtctactccggtggcggtgtgatcctcggcggtggctccgaagccctgactgaaatcgccaagtcgctgaacctgccggtcaccaataccctgatggggttgggtggcttcccgggtaccgaccgccagttcctcggcatgctcggcatgcatggcagctacaccgccaacatggccatgcatcatgccgatgtcatctttgccgtcggtgcgcgtttcgacgaccgcgttgtaaacggcccggccaagttctgcccgaacgccaagatcattcacatcgacatcgacccggcgtcgatctcgaagatgatcaaggccgacgtgccaatcgtcggcccggtcgacagcgtgctcagcgaaatgctcggcatcctcaaggaaatcggcgagcagcctgacaaggcggcgctggatgcctggtggaagcagattgacgaatggcgtggcaatggcgagttgttcccttacgacaagggcgatggcaacgtcatcaaaccgcagaaagtcatcgagacactgtgcgaagtgaccaatggcgatgccttcgtcacttccgacgtgggccagcaccagatgtttgccgcgcagtactaccgcttcaacaagccaaaccgctggatcaactccggtggcctgggcaccatgggcttcggcttcccggcggcgatgggcgtcaagctcaacttcccggatcaggacgtggcctgtgtgaccggcgaaggcagcatccagatgaacatccaggagctgtccacctgcatgcaatacggcctgccggtgaagatcgtcaacctgaacaacggcgtgttgggcatggtccgccagtggcaggacatggcctacaacggtcgtcactcgcactcgtacgtcgagtcgctgcctgactttatcaagctggctgaggcctatggccatgtgggtatccgcatcaccagcctgaaggacctcaagccgaagctggaagaagcgtttgcgatgaaggaccgtctggtgttcatcgacatcgcggttgaccgcagtgagcacgtctatccgatgcagatcaaggatggctcgatgcgtgacatgtggctgagcaagacggagcgtacctga

SEQ ID NO: 137913 - protein, 574 aa, Pseudomonas putida KT2440
MELLSGAEMVVRFLRDEGVKHIYGYPGGALLHVYDALFKEPEVEHILVRHEQAATHMADGYARATGKAGVVLVTSGPGATNAITGIATAYMDSIPMVILSGQVPSTMVGTDAFQETDMIGISRPIVKHSFMIKNPTEIPEVLKKAFYLAQSGRPGPVVVDIPKDMTNPAEKFEYVYPKKVKLRSYSPAVRGHSGQIRKAAEMLLAAKRPVVYSGGGVILGGGSEALTEIAKSLNLPVTNTLMGLGGFPGTDRQFLGMLGMHGSYTANMAMHHADVIFAVGARFDDRVVNGPAKFCPNAKIIHIDIDPASISKMIKADVPIVGPVDSVLSEMLGILKEIGEQPDKAALDAWWKQIDEWRGNGELFPYDKGDGNVIKPQKVIETLCEVTNGDAFVTSDVGQHQMFAAQYYRFNKPNRWINSGGLGTMGFGFPAAMGVKLNFPDQDVACVTGEGSIQMNIQELSTCMQYGLPVKIVNLNNGVLGMVRQWQDMAYNGRHSHSYVESLPDFIKLAEAYGHVGIRITSLKDLKPKLEEAFAMKDRLVFIDIAVDRSEHVYPMQIKDGSMRDMWLSKTERT

SEQ ID NO: 137914 - DNA, 1815 bp, Escherichia coli CFT073
  CDS (1)..(1815): transl_table=11
gtgtttatgtctctgtctgccaattgcttaagcaagatcggacggttaatgtgttttacacattttttccgtcaaacagtgaggcaggccatggagatgttgtctggagccgagatggtcgtccgatcgcttatcgatcagggcgttaaacaagtattcggttatcctggaggcgcggtccttgatatttacgatgcattgcataccgtgggtggtatcgatcatgttttagttcgccatgagcaggcggcggtgcatatggccgatggtctggcgcgcgcgaccggggaagtcggcgtcgtgctggtaacgtcgggtccaggggcgaccaatgcaattactggcattgccaccgcttatatggattccattccattagttgtcctttccgggcaggtagcgacctcgttgataggttatgatgcctttcaggagtgcgacatggtggggatttctcgcccggtggttaaacacagttttctggttaagcaaacggaagacattccgcaggtgctgaaaaaggctttctggctagcggcaagtggtcgtcctggacccgtggtcgttgatttaccgaaagatatcctaaatccggcgaacaaattaccctatgtctggccggagtcggtcagtatgcgttcttacaatcccacgacctccgggcataaagggcaaattaagcgcgctctgcaaacgctggtggcggcaaaaaaaccggttgtctacgtaggcggtggggcaatcacggcgggctgccatctgcagttgaaagaagcggtggaggtgttgaatctgcccgttgtttcctctttgatggggctgggggcgtttccggcaacgcatcgccaggcactgggcatgttgggaatgcacggtacctacgaagccaatatgacgatgcataacgcggatgtgattttcgccgtcggggtacgttttgatgaccgaacgacgaacaatctggcaaagtactgcccaaatgccactgttctgcatatcgatattgatccaacctcaatttctaaaaccgtgactgctgatatcccgattgtgggggatgctcgccaggtcctcgaacaaatgcttgaactcctgtcgcaagaatccgcccatcaaccgctggatgagatccgcgactggtggcagcagattgaacagtggcgcgctcgtcagtgcctgaaatatgacactcacagtgaaaagattaaaccgcaggcggtgatcgagactctttggcggttgactaatggggacgcttacgtgacgtccgatgtcgggcagcaccagatgtttgctgcgctttattatccattcgacaaaccgcgtcgctggatcaactctggcggcctcggcacgatgggttttggtttacctgcggcactgggcgtcaaaatggcgttgccagaagaaaccgtggtttgcgtcactggtgacggcagtattcagatgaacatccaggaactgtctaccgcgttgcaatatgagttgcccgtactggtggtgaatctcaataaccgctatctggggatggtgaagcagtggcaggacatgatctattccggccgtcattcacaatcttatatgcagtccttaccagacttcgtccgtctggcggaagcctatggtcacgtcgggatccagatctctcatccgcaagaactggaaagcaaacttagcgaggcgctggaacaggtgcgcaataatcgtctggtgtttgttgatgttaccgtcgatggcagtgagcacgtctacccgatgcagattcgcgggggcggaatggatgaaatgtggttaagcaaaacggagagaacctga

SEQ ID NO: 137915 - protein, 604 aa, Escherichia coli CFT073
MFMSLSANCLSKIGRLMCFTHFFRQTVRQAMEMLSGAEMVVRSLIDQGVKQVFGYPGGAVLDIYDALHTVGGIDHVLVRHEQAAVHMADGLARATGEVGVVLVTSGPGATNAITGIATAYMDSIPLVVLSGQVATSLIGYDAFQECDMVGISRPVVKHSFLVKQTEDIPQVLKKAFWLAASGRPGPVVVDLPKDILNPANKLPYVWPESVSMRSYNPTTSGHKGQIKRALQTLVAAKKPVVYVGGGAITAGCHLQLKEAVEVLNLPVVSSLMGLGAFPATHRQALGMLGMHGTYEANMTMHNADVIFAVGVRFDDRTTNNLAKYCPNATVLHIDIDPTSISKTVTADIPIVGDARQVLEQMLELLSQESAHQPLDEIRDWWQQIEQWRARQCLKYDTHSEKIKPQAVIETLWRLTNGDAYVTSDVGQHQMFAALYYPFDKPRRWINSGGLGTMGFGLPAALGVKMALPEETVVCVTGDGSIQMNIQELSTALQYELPVLVVNLNNRYLGMVKQWQDMIYSGRHSQSYMQSLPDFVRLAEAYGHVGIQISHPQELESKLSEALEQVRNNRLVFVDVTVDGSEHVYPMQIRGGGMDEMWLSKTERT

SEQ ID NO: 137916 - DNA, 1725 bp, Pseudomonas syringae pv. tomato str. DC3000
  CDS (1)..(1725): transl_table=11
gtggagcttttatctggcgctgaaatgatcgtccgctttttgcgtgacgaaggcgttgagcacatctatgggtacccgggtggtgccctcctgcatgtctacgatgccctgttcaaagaaccggccgtcagccatatccttgttcgtcacgagcaggcggctacgcacatggccgacggctatgcgcgcgccaccggcaaggcgggtgtggtgctggtgacgtccggccctggtgcaaccaatgccattaccggtatcgccacggcgtatatggactccattccgatggtggttctgtccggtcaggtagcgagcaccctggtgggcaccgacgcattccaggagaccgacatgatcggtatctcccggccgatcgtgaagcacagcttcatgatcaagcacccgtcggaaattccggaaattctgaagaaggctttctacctggcgcagtccggtcgtcccggccctgtggtcgtggatattccgaaagacatgaccaacccggccgagaaattcgaatacgtctttccgaaaaaagccaagctgcgctcctacagccctgcggtccgcggtcattccggccagatccgcaaggctgtggaaatgctcctggccgccaagcgtcctatcatctatgccggtggcggcgtgatcatgggcaacgcttcggcgcaactgaccgagctggctcaactgctcaatgccccagtgaccaatacgctgatgggcctgggttgctatcccggcaccgatcgccagttcgtcggtatgctcgggatgcacggcagctataccgccaaccttgcgatgcaccacaccgacgtgattctggctgtcggcgcgcgtttcgatgaccgggtgatcaatggcgcgagcaagttctgcccgaacgccaagatcatccacatcgatattgaccctgcgtcgatctccaagaccatcaaggctgacgtgcctatcgtcggccctgtcgaaagcgtgctgaccgaaatggtcgccaccctgaaagaaatcggcgaaacgcctgacaaggcgtcggtcgctgcatggtggaagcagattgacgagtggcgcggtagcggcgatctgttcccgtacaaccgtggcgatggcactgtcatcaagccgcaggcggtgatcgaaacactgtgcgaagtcaccaagggcgatgcctatgtgacctccgacgtgggtcagcatcagatgtttgctgcgcagtactaccgtttcaacaagccgaaccgctggatcaactccggcggtctgggcaccatgggctttggcttcccggcggcgatgggcgtcaagctgagctttccggacgagcacgttgcctgtgtgaccggtgaaggcagcatccagatgaacattcaggagctttcgacctgtctgcaatatggcctgccggtgaagatcattctgctcaataacggtgtgctgggcatggttcgccagtggcaggacatgagctacggcgcgcgtcactcgcattcctacatggaatcgctgcctgacttcgtcaagctggtcgaggcttatggccacgtcggcatgcgcatcaccgatttgaaagatctcaagccgaagatggaagaagcgtttgccatgactgaccggctggtgttccttgatattcaggtcgatgtgagcgagcacgtctatccgatgcagatcaaggacggctccatgcgcgatatgtggttgagcaagacggagcggacataa

SEQ ID NO: 137917 - protein, 574 aa, Pseudomonas syringae pv. tomato str. DC3000
MELLSGAEMIVRFLRDEGVEHIYGYPGGALLHVYDALFKEPAVSHILVRHEQAATHMADGYARATGKAGVVLVTSGPGATNAITGIATAYMDSIPMVVLSGQVASTLVGTDAFQETDMIGISRPIVKHSFMIKHPSEIPEILKKAFYLAQSGRPGPVVVDIPKDMTNPAEKFEYVFPKKAKLRSYSPAVRGHSGQIRKAVEMLLAAKRPIIYAGGGVIMGNASAQLTELAQLLNAPVTNTLMGLGCYPGTDRQFVGMLGMHGSYTANLAMHHTDVILAVGARFDDRVINGASKFCPNAKIIHIDIDPASISKTIKADVPIVGPVESVLTEMVATLKEIGETPDKASVAAWWKQIDEWRGSGDLFPYNRGDGTVIKPQAVIETLCEVTKGDAYVTSDVGQHQMFAAQYYRFNKPNRWINSGGLGTMGFGFPAAMGVKLSFPDEHVACVTGEGSIQMNIQELSTCLQYGLPVKIILLNNGVLGMVRQWQDMSYGARHSHSYMESLPDFVKLVEAYGHVGMRITDLKDLKPKMEEAFAMTDRLVFLDIQVDVSEHVYPMQIKDGSMRDMWLSKTERT

SEQ ID NO: 137918 - DNA, 1725 bp, Vibrio parahaemolyticus RIMD 2210633
  CDS (1)..(1725): transl_table=11
atgacagcaatgttgtcaggtgcagagatggtggtgcaatctctgatagaggaaaacgtagagcagatcttcggttatccgggtggttccgttttggatatctatgatgcactgcacgcaaaaaccgaccaaattaaacacgtactagtaagacacgaacaggctgcgacgcacatggctgatggctatgctcgcgcaacaggtaagccgggtgtggtactggtatgttcagggcctggcgcaaccaataccattaccggtattgcaacggcgtacatggactctattccgatgatcgtgatttcagggaacgtgccaaacagcctgattggtaacgacgctttccaagaatgtgacatcgtgggcgtctctcgtccggtagtaaaacacagctttttggtgaaaaaggcggaagatatccctgaaacgatcaaaaaagccttctacatttcaacaacgggtcgtcctgggccagttgtgattgatttgccaaaagacgtaatgaatccgcaaatcaaactgccttaccaatacccagaaagcatttcgatgcgttcatacaagccaaccacttcgggtcataaaggccaaatcaagaaagcactgaagtctttgattgaagcgaaaaaaccggtgctttatgtcggtggtggcgcagtcatttctggtgctcacgaacatattttagaactggcagacaaacttaacctgccagttgtcagtaccttaatgggcctaggtgcatttccgggtactcacaaaaactcgcttggtatgttggggatgcacggtacctacgaagccaatatggcgatgcacgaagcggatctgatcttcggtattggggtgcgttttgatgaccgcaccaccaataaccttgagaagtactgtccaaatgcgaaagtgatgcacattgatattgatccgtcgtcgatctccaaaaacgtcaaagtggatcttccaattgtaggctctgctgaaaaagtactgactactatgcttggtctactggcagagcaagattgtggcaacgatgaagcggcgatcactaagtggtgggatgatattcaagtgtggcgcgatcgtcagtgcttgtcttacgaaacgtcgtcggatcgtattaagccacagcaagtcattgaaacactgcacaagctaaccaatggtgacgcgtatgtggcgtctgatgtaggccagcaccaaatgtttgcggcgttgtactacccattcaacaaacctcgccgttggatcaattcgggtggcttgggcacaatgggcttcggtcttcctgctggtatgggcgttaagttcgcgatgcctgaagaagaagtggtggtggtgacgggtgatggcagtatccagatgaacattcaggagctatcgacggccatgcagtacgatattcctgtgaagatcatcaatctgaataaccgattcctcggtatggtaaaacagtggcaagacataatttatcaaggtcgccactctaactcttacatgagttctgttccggattttgctgcgattgcagaagcttatggtcacgtcggcattcgtatcgaaacgccagatcagctcgaagaagggctacaaaaagcgttggatatgaaagatcgtttggtgtttgttgatatcaacgtagacgaaaccgagcacgtatacccgatgcaaattaaaggcgaaggtatggacaagatgtggctaagcaaaacggagagaacttaa

SEQ ID NO: 137919 - protein, 574 aa, Vibrio parahaemolyticus RIMD 2210633
MTAMLSGAEMVVQSLIEENVEQIFGYPGGSVLDIYDALHAKTDQIKHVLVRHEQAATHMADGYARATGKPGVVLVCSGPGATNTITGIATAYMDSIPMIVISGNVPNSLIGNDAFQECDIVGVSRPVVKHSFLVKKAEDIPETIKKAFYISTTGRPGPVVIDLPKDVMNPQIKLPYQYPESISMRSYKPTTSGHKGQIKKALKSLIEAKKPVLYVGGGAVISGAHEHILELADKLNLPVVSTLMGLGAFPGTHKNSLGMLGMHGTYEANMAMHEADLIFGIGVRFDDRTTNNLEKYCPNAKVMHIDIDPSSISKNVKVDLPIVGSAEKVLTTMLGLLAEQDCGNDEAAITKWWDDIQVWRDRQCLSYETSSDRIKPQQVIETLHKLTNGDAYVASDVGQHQMFAALYYPFNKPRRWINSGGLGTMGFGLPAGMGVKFAMPEEEVVVVTGDGSIQMNIQELSTAMQYDIPVKIINLNNRFLGMVKQWQDIIYQGRHSNSYMSSVPDFAAIAEAYGHVGIRIETPDQLEEGLQKALDMKDRLVFVDINVDETEHVYPMQIKGEGMDKMWLSKTERT

SEQ ID NO: 137920 - DNA, 1725 bp, Salmonella enterica subsp. enterica serovar Typhi Ty2
  CDS (1)..(1725): transl_table=11
gtggagatgttgtctggagccgagatggtcgtccgatcgcttatcgatcaaggcgtaaagcaggtgttcggctatcctggaggcgcagtgcttgatatttatgatgcgctacataccgttggagggatcgatcatgtgctggtgcgtcatgagcaggccgcggtgcatatggcggatggcctggcgcgagccactggcgacgttggcgtggtgctggtgacttccggaccgggagcgaccaatgcgattacagggattgctacggcctatatggattccattccgctggtgattctttccggccaggtcgccacctcattgattggctatgatgcctttcaggagtgcgacatggtggggatttcccgaccggtggtcaaacatagcttcctggtcaaacagacggaagatattcccctggtgcttaaaaaggccttctggctggcggcaagcggacgtcctgggccggtggtcgtggatctgccgaaagatattttgaatccggcgaaaaaaatgccgtatgtctggccggaaacggtcagtatgcgctcttacaatcccacaacatcaggacataaaggacaaattaagcgtgccttgcaaacgctggcgtcggcaaaaaagccggtggtctatgttgggggaggggcgataagcgcggcctgctatgcgccgctgcgccacatcattgaaacctttaacctgccggtggtctcttcattaatgggactgggcgcgtttcctgctactcatcgccagtcgttaggaatgctgggaatgcatggcacttatgaagccaatatgaccatgcataacgccgacgtgattttcgctgttggcgtacgatttgacgaccgcacgacgaataatctcgctaaatattgtccgaacgcgacggtattacacatcgacattgacccgacgtccatatccaaaacggttaacgctgatatcccggtggtgggcgatgcacgcctggtactggaacaaatgctggagctactggcgcaggatgcgccgtctcagccgcaggatgatattcgcgactggtggcagcagatagagagctggcgcgcccgtcagtgcctgaaatatgacgcggaaagcgaaagcattaaaccccaggcggtgattgaaactctctggcgtctgacgaagggtgatgcgtacgtgacgtccgatgtaggacaacaccagatgtttgccgccctctactacccgttcgataagccacgtcgctggattaactctggcgggctcggcacgatggggtttggcctaccggctgcactgggcgttaaaatggccctgccgaaagaaatggtggtctgcgtgaccggcgatggcagtatacagatgaacattcaggagctgtcgacagccttacagtatgaactgccggtactggttctgaacctgaacaaccgttacctggggatggtgaaacagtggcaggatatgatctattccggtcgccattctcagtcttatatgcagtcgttaccggattttgtgcgcctggcggaagcatatggccatgtcgggctgcagattaaccgtccggatgagctggaaagtaaactcagcgaagcccttgagcatgtgcgtaataaccgactggtgttcgtcgatgtcaccgttgatggcagcgagcatgtctatccgatgcagattcgcgggggcgggatggacgaaatgtggttaagcaaaacggagaggacctga

SEQ ID NO: 137921 - protein, 574 aa, Salmonella enterica subsp. enterica serovar Typhi Ty2
MEMLSGAEMVVRSLIDQGVKQVFGYPGGAVLDIYDALHTVGGIDHVLVRHEQAAVHMADGLARATGDVGVVLVTSGPGATNAITGIATAYMDSIPLVILSGQVATSLIGYDAFQECDMVGISRPVVKHSFLVKQTEDIPLVLKKAFWLAASGRPGPVVVDLPKDILNPAKKMPYVWPETVSMRSYNPTTSGHKGQIKRALQTLASAKKPVVYVGGGAISAACYAPLRHIIETFNLPVVSSLMGLGAFPATHRQSLGMLGMHGTYEANMTMHNADVIFAVGVRFDDRTTNNLAKYCPNATVLHIDIDPTSISKTVNADIPVVGDARLVLEQMLELLAQDAPSQPQDDIRDWWQQIESWRARQCLKYDAESESIKPQAVIETLWRLTKGDAYVTSDVGQHQMFAALYYPFDKPRRWINSGGLGTMGFGLPAALGVKMALPKEMVVCVTGDGSIQMNIQELSTALQYELPVLVLNLNNRYLGMVKQWQDMIYSGRHSQSYMQSLPDFVRLAEAYGHVGLQINRPDELESKLSEALEHVRNNRLVFVDVTVDGSEHVYPMQIRGGGMDEMWLSKTERT

SEQ ID NO: 137922 - DNA, 1704 bp, Nitrosomonas europaea ATCC 19718
  CDS (1)..(1704): transl_table=11
atgagtactgaactgacaggtgccgagattacgatacgttgtctgcaggaggagggggtaagtcatatttttggctatcccggcggtgccgtattgttcctgtatgatgaattgttcaagcaggataaagtcaagcatattctggttcgccatgaacaggctgccctccatgcagcggatggttatgcgcgttccagtaacaaggtcggtgtagcactggtgacatctggcccgggggtgaccaatgccgtaacgggtattgctaccgcttacatggattccatcccaatggtgattatcagtgggcaggttcccacggctgccattggtcaggatgccttccaggaagtggataccgtgggaattacacggccttgtgtcaaacacaactttctggtgaaggatgtatcggagctggcggtcacaatcaaaaaagctttttatattgcttcaaccggtcgtccaggaccggtattggtggatattcccaaggacgtcacccagcagaaggcggaatttcattatcctgccagtatctcattgcgttcctactcaccggtaatcaacggggatgcccaacagctcaggaaagccgtccagatgatcctggaagccaagcgtcccatggtctataccggtggcggggtgattctggatgatgctgcggcagaattgacagaactcgtgcagatgctgaattttccctgtaccagtaccctcatggggttgggaggatatccggcgactgaccggcaatttgtcgggatgctgggcatgcatggtacctacgaagccaatatggccatgcaatactgcgatgtgctgatcgcagtcggtgctcgttttgatgatcgcgtcatcggaaatcccaagcatttctacagcgaagaacggaaaatcatccatatcgacatcgatccatcatcgatttccaagcgggtcaaggtggatgttcctatcgtcggcagtgtatctgcggtactgaaagagttgatcatgctgctgagagccggcagggagacgactgatgtccatgctttgaacaaatggtgggagcaggtcgagttgtggcgggcacgtgattgcctgaaatatgaccggtcggccagcgttatcaagccgcagctggtggtggaaaaactgtatgaaataaccggcggagacgccttcattacttctgacgtcgggcagcatcagatgtgggcagcccagttttacaaatttgataaaccgcgccgctgggttaattccggtggcttgggtacgatgggattcggtctgccttctgcgatgggggtacagatggccaacccgggcagtacggtggcctgtattaccggagaggcaagtatccagatgtgcattcaggagttatccacctgtaaacagtatcgtctgcccatcaagatcatcaatttgaacaaccgttacatggggatggtgcgtcaatggcaggagtttttccatggcaaccgttacgctgaatcctatatggatgcattacccgattttgtcaaactggcagaaagttacgggcatgtcggcatgcggatcgataaaccggaagatatcgatggtgcgttgagagaagccttcaaactggaagaacaactggtattcatggatttcattacggatcagaccgagaatgtttttcctatggtacctggtggcaaaggtttgtccgaaatgattctggtataa

SEQ ID NO: 137923 - protein, 567 aa, Nitrosomonas europaea ATCC 19718
MSTELTGAEITIRCLQEEGVSHIFGYPGGAVLFLYDELFKQDKVKHILVRHEQAALHAADGYARSSNKVGVALVTSGPGVTNAVTGIATAYMDSIPMVIISGQVPTAAIGQDAFQEVDTVGITRPCVKHNFLVKDVSELAVTIKKAFYIASTGRPGPVLVDIPKDVTQQKAEFHYPASISLRSYSPVINGDAQQLRKAVQMILEAKRPMVYTGGGVILDDAAAELTELVQMLNFPCTSTLMGLGGYPATDRQFVGMLGMHGTYEANMAMQYCDVLIAVGARFDDRVIGNPKHFYSEERKIIHIDIDPSSISKRVKVDVPIVGSVSAVLKELIMLLRAGRETTDVHALNKWWEQVELWRARDCLKYDRSASVIKPQLVVEKLYEITGGDAFITSDVGQHQMWAAQFYKFDKPRRWVNSGGLGTMGFGLPSAMGVQMANPGSTVACITGEASIQMCIQELSTCKQYRLPIKIINLNNRYMGMVRQWQEFFHGNRYAESYMDALPDFVKLAESYGHVGMRIDKPEDIDGALREAFKLEEQLVFMDFITDQTENVFPMVPGGKGLSEMILV

SEQ ID NO: 137924 - DNA, 1716 bp, Bordetella bronchiseptica RB50
  CDS (1)..(1716): transl_table=11
atggaactcaatggcgccgacatcgtcgtgcgctgcctggccgaagaaggcgtggaacacgttttcggctaccctggcggcgcggtgctttacatctacgacgcgattttcaagcaggacaaattccagcacattctggtgcgtcacgagcaggctgccgtgcacgccgccgacgcgtactcgcgcgcctcgcagaaagtgggcgtatgcctggtgaccagcggtccgggcgtcaccaatgccgtcaccggcatcgccaccgcctacatggactccatccccatggtcatcatcagcggccaggtgccgactgcggccatcggcgaggatgccttccaggaatgcgacaccgtgggcatcacgcgtccctgcgtcaagcacaacttcctggtgcgcgacgtcaaggacctggccgagaccatgcgccgtgccttcttcatcgcccgcaccggccgtcccggccccgtgctggtcgatatcccgaaggacatcaccgtcgcgcagtgcaagtacgcgccgcccaagggcgagatctcgatgcgctcgtacgcgccggtgaacaaggggcaccagggccagatcaagaaggccgtgcagatgctgctgcacgccgagcgtcccatgatctacacgggcggcggcgtgatcctgtccgatgccgccgaggccttgcgccacctggtggaccagaccggcgcgccgtgcaccaacaccctgatgggcctgggcgcgatgccggccaccgaccaccgcttcctgggcatgcccggcatgcacggcacctacgaggcgaacatggcgatgcagcactgcgacgtgctgctggccatcggggcgcgcttcgatgaccgcgtcatcggcaatccgcgccatttcgcgcagaacgcgcgcaagatcatccacatcgacatcgatccctcgtcgatctccaagcgcgtgcgcgtcgacgtgcccatcgtcggcaacgtcaaggacgtactggccgatctgagcgcccagtacgacctggcgcgcgccgacgccaagccggcgccgatcgagaagtggtggcagcagatcgaggcctggcgcggcaaggagtgcctgaagtacgccggctccgacgaggtcatcaagcctcagttcgtggtcgagaaactgtgggaagtgaccggaggcgacgccttcgtgacctccgacgtcggccagcaccagatgtgggccgcgcagtactacaagttcaacaagccgcgccgctggatcaactccggcggcctgggcaccatgggcgtggggctgccctatgccatgggcgtgcagatggccaatccgggcgccgacatcgccgtgatcaccggcgaggcgtcgatccagatgaacatccaggaattgtccacctgccaccagtaccacctgacgcccaagatcatctgcctgaacaaccgtttcctgggcatggtgcgccagtggcagcagatcgactacggctcgcgctattccgagtcgtacatggattcgctgccggatttcgtcaaggtcgccgaggcctatggccacgtcggcctgcgcatcgagcggcccgccgacgtcgagccggcgctgcgcgaagcattcaagaagcacaaggatcgcctggtcttcctggacttcatcaccgaccgcaccgaaaacgtgtggcccatggtgaaggccggccgcgggctgaccgagatgctgctcggttccgaggatctgtaa

SEQ ID NO: 137925 - protein, 571 aa, Bordetella bronchiseptica RB50
MELNGADIVVRCLAEEGVEHVFGYPGGAVLYIYDAIFKQDKFQHILVRHEQAAVHAADAYSRASQKVGVCLVTSGPGVTNAVTGIATAYMDSIPMVIISGQVPTAAIGEDAFQECDTVGITRPCVKHNFLVRDVKDLAETMRRAFFIARTGRPGPVLVDIPKDITVAQCKYAPPKGEISMRSYAPVNKGHQGQIKKAVQMLLHAERPMIYTGGGVILSDAAEALRHLVDQTGAPCTNTLMGLGAMPATDHRFLGMPGMHGTYEANMAMQHCDVLLAIGARFDDRVIGNPRHFAQNARKIIHIDIDPSSISKRVRVDVPIVGNVKDVLADLSAQYDLARADAKPAPIEKWWQQIEAWRGKECLKYAGSDEVIKPQFVVEKLWEVTGGDAFVTSDVGQHQMWAAQYYKFNKPRRWINSGGLGTMGVGLPYAMGVQMANPGADIAVITGEASIQMNIQELSTCHQYHLTPKIICLNNRFLGMVRQWQQIDYGSRYSESYMDSLPDFVKVAEAYGHVGLRIERPADVEPALREAFKKHKDRLVFLDFITDRTENVWPMVKAGRGLTEMLLGSEDL

SEQ ID NO: 137926 - DNA, 1767 bp, Chromobacterium violaceum ATCC 12472
  CDS (1)..(1767): transl_table=11
atgcagatatcgggcgccgaaattgtagtccgctgcctgcaggaagagggggtcgaattcgtcttcggctatccgggtggcgcggtactggaaatctacgatgccatcttccggcaggacaagttcaaacacgtgctggtaaggcacgaacaggcggcggtccatgccgccgacgcctattcgcgctccagcgacaaggtgggcgtggcgctggtgacctccggtcccggcgcgaccaatgccgtgaccggcatcgccaccgcctacatggattccatcccgatggtggtgatctccggccaggtgccttccccggccatcggcctggacgcgttccaggaagtggacatggtgggcatcacccgtccctgcgtgaagcacaacttcctggtcaaggacgtgaacgagatcgccgcgaccatcaagaaggcgttctacatcgccaagagcggccgtcccggcccggtggtggtggacatccccaaggacgtgacccaggcgcgcgccgagttccgctatccggacagcgtgcacatccgctcctacgtgccggccacccgcgggcacagcggacagatcaagaaagcggtgaacctgctgcttgaggccaagcgtccttatatctacgtcggcggcggcgccgtgcagggccgcgccgaagccgaggtgaccgagctggtgcggtccttgaacctgccgtgtaccaacaccctgatgggcctgggcgcctatccgggttcggaccggcagttcctgggcatgctgggcatgcacggcacctacgaagccaatatggcgatgcagtactgcgacgtgctggtggcggtgggcgcgcgtttcgacgaccgcgtgatcagcgtgccctcgcacttcctcggccaggccaagaaaatcatccacatcgacgtggatccgtcgtcgatctccaagcgcgtcaaggccgacatccccatcgtcggcgacgtcaagctggtgctgcgcgagatgctggaccaactgaagcaggccggccagaagccggacggctcggcgctgaaccagtggtggaagcagatcgaggaatggcgcggccacgactgtctgctgtacgcgccgtcggacgagctgatcaagccgcagatggtggtagagacgctgtacgacatcaccggcggccaggccatcgtcacctccgacgtcggccagcaccagatgtgggcggcgcagtactacaagttcgaccggcccaagcagtggctgaattccggcggcctcggcaccatgggcttcggcctgccggcggccatcggcgcgcagctggccaaccccaacgcgcaggtggcctgcatcaccggcgagggatcgatccagatgaacatccaggaactgtccaccgccaagcagtatcacaccccggtaaaggtggtggcgctgaacaaccgctacctgggcatggtgcgccagtggcaggagttcttctacggcacccgctactccgagtcctacatggacgcgctgccggacttcgtcaagatcgccgaggcctacggccacatcggcttcaaggtggagaatccggccgacgtggagccggtgctgcgcgaggcgttcagcgacaagctgaaggagcgcctggtgttcctggatttccgcaccgaccagtcggagaacgtgttcccgatgatccagaacggcaagggcctggatcagatggacctgccggcgcacatgcgcgccgtccagcaggtgcctttcgagaacaaccgtgactacggcaacatgtgctaa

SEQ ID NO: 137927 - protein, 588 aa, Chromobacterium violaceum ATCC 12472
MQISGAEIVVRCLQEEGVEFVFGYPGGAVLEIYDAIFRQDKFKHVLVRHEQAAVHAADAYSRSSDKVGVALVTSGPGATNAVTGIATAYMDSIPMVVISGQVPSPAIGLDAFQEVDMVGITRPCVKHNFLVKDVNEIAATIKKAFYIAKSGRPGPVVVDIPKDVTQARAEFRYPDSVHIRSYVPATRGHSGQIKKAVNLLLEAKRPYIYVGGGAVQGRAEAEVTELVRSLNLPCTNTLMGLGAYPGSDRQFLGMLGMHGTYEANMAMQYCDVLVAVGARFDDRVISVPSHFLGQAKKIIHIDVDPSSISKRVKADIPIVGDVKLVLREMLDQLKQAGQKPDGSALNQWWKQIEEWRGHDCLLYAPSDELIKPQMVVETLYDITGGQAIVTSDVGQHQMWAAQYYKFDRPKQWLNSGGLGTMGFGLPAAIGAQLANPNAQVACITGEGSIQMNIQELSTAKQYHTPVKVVALNNRYLGMVRQWQEFFYGTRYSESYMDALPDFVKIAEAYGHIGFKVENPADVEPVLREAFSDKLKERLVFLDFRTDQSENVFPMIQNGKGLDQMDLPAHMRAVQQVPFENNRDYGNMC

SEQ ID NO: 137928 - DNA, 1689 bp, Wolinella succinogenes DSM 1740
  CDS (1)..(1689): transl_table=11
atgagactgagcggctcggaaatggtcatcgaagcctttaagaatgagggcgtcaaagtcgttttcggttatccaggcggtgcgatcatgaatgtttatgatgaaatttataaacaaaattacttcaagcatatcctgacgcgccacgaacaggccgccatccacgcagcggatggctacgcccgagctacgggtgaagtgggcgtctccattatcaccagcggccctggattcaccaatgcggtgacgggaattgccacggcttacatggattcggttccgatggtcatcctaagcggtcaagtccccatcactctcatcggaacggatgcatttcaagagattgacgcggtgggaatctctcgcccctgtacaaaacacaactatttagtcaaagatatctctgaattgccccgaattctcaaagaggccttttatatcgccagaagcggacgacctggacccgttcatgtggacttgcctaaagatattagcgccaccatgggagagtttttctaccctgaagagatcaaactcaaaacctataaacccacctatcgcgggaacgctagacagatcaaaaaagcagccgaatcgatcaagcatgccaaaaagcctcttctttatgtcggcggaggcgtgattgcttcggaagcctcaggacttttaagggagctttcgcacaccacctctattcccgtagtggaaaccttgatggcgcgtggttccatggagcacaacgatcctcttttgcttggcatggtagggatgcatgggacctatgccgccaatatggccatgagcgaatcagatctcatcgtcgcgcttggtgcgcgctttgatgaccgcgtcacagggaagctcagcgagtttgccaaatacgctgagatcatccatatcgatattgacccaagcagcattgggaagattgtcaagatcaactaccccatcgtaggcgacatctccgaagtccttaaagagctcttgccccttttgaaggatatcaatccccaagccacccaatcgtggctcacgcagttggatcgatacaaagcgctccaccctctaaaatatgaggattctaatctctccatcaagccccaatgggtcattgagcgaatcggtgaacttttgggtgatcaggccaacatcaccaccgatgtaggtcaacaccaaatgtggagtgctcaattctaccctttcactcgccctagacaattcatgactagcggcggcttgggcacgatgggctttggatttcctgcggcgatgggcgtaaagatgggctcacctgagaaggtctccatcaatatcacgggcgatggttcgattcttatgaatattcaagaactcatgaccgctgtggagaagcaaatccctgtcatcaatgtcatcttgaacaacaactacctaggcatggtgcgacagtggcagactttcttctatgacaaacgctactccgaaacggatctctcttgccagcccgatttcgtcaagcttgccgaatcttttggcggagtggggtttagatgtgagaccaaagcggagtttgacactgcccttttaaaggccgttgagcttggacgcgtcacgatgattgatgtgaaagtcgatcgcttagagaatgttttgccaatggttcctagtggcgggtcgctctttaatatgatgcttgagtataaggattaa

SEQ ID NO: 137929 - protein, 562 aa, Wolinella succinogenes DSM 1740
MRLSGSEMVIEAFKNEGVKVVFGYPGGAIMNVYDEIYKQNYFKHILTRHEQAAIHAADGYARATGEVGVSIITSGPGFTNAVTGIATAYMDSVPMVILSGQVPITLIGTDAFQEIDAVGISRPCTKHNYLVKDISELPRILKEAFYIARSGRPGPVHVDLPKDISATMGEFFYPEEIKLKTYKPTYRGNARQIKKAAESIKHAKKPLLYVGGGVIASEASGLLRELSHTTSIPVVETLMARGSMEHNDPLLLGMVGMHGTYAANMAMSESDLIVALGARFDDRVTGKLSEFAKYAEIIHIDIDPSSIGKIVKINYPIVGDISEVLKELLPLLKDINPQATQSWLTQLDRYKALHPLKYEDSNLSIKPQWVIERIGELLGDQANITTDVGQHQMWSAQFYPFTRPRQFMTSGGLGTMGFGFPAAMGVKMGSPEKVSINITGDGSILMNIQELMTAVEKQIPVINVILNNNYLGMVRQWQTFFYDKRYSETDLSCQPDFVKLAESFGGVGFRCETKAEFDTALLKAVELGRVTMIDVKVDRLENVLPMVPSGGSLFNMMLEYKD

SEQ ID NO: 137930 - DNA, 1791 bp, Gloeobacter violaceus PCC 7421
  CDS (1)..(1791): transl_table=11
atgcaagccaccggagccttcgccgtcgtcgatagtctgtgctgccagggcgtccggcacatcttcggttaccccggtggggccattttgccggtctacgacgagatttacaaggccgaggccgaagggcggtttcagcactttctggtgcgccacgagcagggggcggcccacgccgccgacggctacgcccgggcgaccggccgggtgggcgtctgtgtggccacctccggtcccggggcgacgaatctggtgacgggcatcgccacggcccacatggattcggtgccgatggtggcgattaccggtcaggtgccgcgccggtcgatcggttccgacgcctttcaagaagccgatattctgggcatcaccctgcccatcgtcaagcactcctacgtcatccgcaacactggggacatcggccgcatcttcagcgaagccttccatatcgcaagcagcggccggcccggcccggtgctcatcgacgttcccaaggacgtgggccaagaaagcttcgagtacacgccggtccagacgacgcccaaaattcccgggtaccgcccaaccacacggggcaatccccgccaggtggcggcggcggcgaagctcatcctcgaagcggaccggcctctgctttatgtgggtggcggcgccatctccgccggggcgcacgccgaactgatgcgcctcgcggagctgggtttgatcccgaccaccaccaccttgatgggcaagggggccttccctgaagatcatccgctggccgtgggcatgctcggcatgcacggcaccgcctacgccaatttcgccgtcaccgagtgcgatttgctcatcgccgtgggggcgcgcttcgacgaccgggtgaccggcaaactggatgaatttgccgcccgcgcccgcgtcatccacatcgatatcgatccggcagaggtgggcaagaaccgggggccggaggtgcccatcgtgggcgacgtcaaactggtgctgcaggatctgattaaaaagctcatcgaatttcagccgcgcacccgggcgtggctggagcgcatcgagcgctggaaagccgagtatccgctggaggtgccgagcgatggcacccggctgtacccacaggaagtgatggtcgcctttcgcgaactggctaccgacgcctactacaccaccgacgtcggccagcaccagatgtgggcggcgcagtttctcaaaaacggcccccggcgctggatttcctcaggcggcctcggcacgatgggctacggctttccggcggccatcggcgtgcaggtggcactgcctgacgaagacgtcgtgtgcatctccggcgacgccagctttcagatgaacctacaagaaatcggcacggcggtgcagtacgacctgccggtcaaggccgccatcgtcaacaacggctggcagggcatggtccgccagtggcaagaatttttctacgaccgccgcttctcccactcccacatgaagccctcgatgcccgacttcgtcaaactcgctgaagcgttcggggcggagggcatggtcatcgatcaccccgaccagctcaaagaaggcatcgaggcgctgatggagcgcgaccggccggtgatttgcgactttcatgtcgtccccgacgccaactgctacccgatggtgcccccgggcaaggccaaccaccagatggtcgggctgcccaggccgttgccgatgcagccgctcgaactcatctactgccccaactgcggcaccaaaaataccaccgccaaccgcttctgccccgagtgcggcaccaagctttag

SEQ ID NO: 137931 - protein, 596 aa, Gloeobacter violaceus PCC 7421
MQATGAFAVVDSLCCQGVRHIFGYPGGAILPVYDEIYKAEAEGRFQHFLVRHEQGAAHAADGYARATGRVGVCVATSGPGATNLVTGIATAHMDSVPMVAITGQVPRRSIGSDAFQEADILGITLPIVKHSYVIRNTGDIGRIFSEAFHIASSGRPGPVLIDVPKDVGQESFEYTPVQTTPKIPGYRPTTRGNPRQVAAAAKLILEADRPLLYVGGGAISAGAHAELMRLAELGLIPTTTTLMGKGAFPEDHPLAVGMLGMHGTAYANFAVTECDLLIAVGARFDDRVTGKLDEFAARARVIHIDIDPAEVGKNRGPEVPIVGDVKLVLQDLIKKLIEFQPRTRAWLERIERWKAEYPLEVPSDGTRLYPQEVMVAFRELATDAYYTTDVGQHQMWAAQFLKNGPRRWISSGGLGTMGYGFPAAIGVQVALPDEDVVCISGDASFQMNLQEIGTAVQYDLPVKAAIVNNGWQGMVRQWQEFFYDRRFSHSHMKPSMPDFVKLAEAFGAEGMVIDHPDQLKEGIEALMERDRPVICDFHVVPDANCYPMVPPGKANHQMVGLPRPLPMQPLELIYCPNCGTKNTTANRFCPECGTKL

SEQ ID NO: 137932 - DNA, 1728 bp, Photorhabdus luminescens subsp. laumondii TTO1
  CDS (1)..(1728): transl_table=11
atggagatgttatcaggagctgaaatggtcgtccgatcgttaattgatcagggcgttaagcatatattcggttatccggggggggcagtactggatatttatgatgccctgcatacggttgggggcattgagcatatcctggtacgtcatgagcagggggcagttcatatggctgatggttatgctcgttctaccgggaaggttggtgtggtattaatcacctccggtccaggagcaaccaatgccattaccggtattgccacagcttatatggattcaattccgatggttgtattgtccggtcaagtcgccagttcgttgatcggtaatgatgcattccaagaatgtgacatggtagggatatcccgcccgatcgtaaaacacagttttttagtgaaaaaagcagaggatattccgaaggtactgaaaaaagctttctatctagcttccagtggtcgtccgggacccgtcgttattgatttaccaaaagacacggtaaatccggcagtaaaattaccctatatttatcctgatcagataagtatgcgttcttataatccaacgattcaaggacacaaagggcagattaagcgggcattaagaaaactattgaatgcgaaaaaaccagtcatatatgtaggcgggggggcgattaacgcagattgttcagcagaattactggtattggcagaaaaattcaatatccctgttgtgagctccctgatgggcttaggcagtttccctgcaactcatccgcaaagcctgggcatgctcggtatgcatggtacattcgaagccaacaaagccatccataattcagatgtcatttttgctgtcggtgtacgttttgatgatcgtacaaccaataatctggagaaatattgcccggaagcaacggtattacatattgatattgatccaacatcaatttcgaaaacggtttccgcagatgtacctattgttggtgatgctaaacaggtgcttggacaaatgttgtcgttgctggagacagtagaagacacacaagatccagatgcgctaaaagattggtggttatctattcagcaatggcggagccgtaaatgtcttagttttgatcgcagtggtgaaaagattaaaccacaagcggctatcgaggttctctatcgtctgacgaagggagaagcttatgtcacttcagatgttgggcagcatcagatgtttgttgcattgcattacccatttgataaaccaaggcgttggatcagttccggtggtttggggacgatgggatttggtttaccggcggctttgggcgttaaactggtgaaaccggaagcgacggtagtctgtgttacgggggatggtagtattcagatgaatattcaggagctgtccaccgcattgcaatatgggttgccggtactggttctgaacttgaataatcgtttcttggggatgataagacaatggcaagatatgatttatgctggtcgtcactctcaatcttatatggaatccttgcctgattttgtcaaattggctgaagcttacggtcatgttggcatttctattcaacgttatgatgaattggaaagtaaattggccgaagccttgaaagaggtgactgaaaatcagcggctggtatttgttgatatcactgtggatgaaactgaacatgtatatcctatgcagatccgtggaggagcaatggatgagatgtggttaagcaaaacggagagaacctga

SEQ ID NO: 137933 - protein, 575 aa, Photorhabdus luminescens subsp. laumondii TTO1
MEMLSGAEMVVRSLIDQGVKHIFGYPGGAVLDIYDALHTVGGIEHILVRHEQGAVHMADGYARSTGKVGVVLITSGPGATNAITGIATAYMDSIPMVVLSGQVASSLIGNDAFQECDMVGISRPIVKHSFLVKKAEDIPKVLKKAFYLASSGRPGPVVIDLPKDTVNPAVKLPYIYPDQISMRSYNPTIQGHKGQIKRALRKLLNAKKPVIYVGGGAINADCSAELLVLAEKFNIPVVSSLMGLGSFPATHPQSLGMLGMHGTFEANKAIHNSDVIFAVGVRFDDRTTNNLEKYCPEATVLHIDIDPTSISKTVSADVPIVGDAKQVLGQMLSLLETVEDTQDPDALKDWWLSIQQWRSRKCLSFDRSGEKIKPQAAIEVLYRLTKGEAYVTSDVGQHQMFVALHYPFDKPRRWISSGGLGTMGFGLPAALGVKLVKPEATVVCVTGDGSIQMNIQELSTALQYGLPVLVLNLNNRFLGMIRQWQDMIYAGRHSQSYMESLPDFVKLAEAYGHVGISIQRYDELESKLAEALKEVTENQRLVFVDITVDETEHVYPMQIRGGAMDEMWLSKTERT

SEQ ID NO: 137934 - DNA, 1725 bp, Vibrio vulnificus YJ016
  CDS (1)..(1725): transl_table=11
atgacagcaatgttgtcaggcgcagagatggttgttcaatctctgatcgaagaaaacgtagagcaaatttttggttatcccggtggttcagtactggatatttatgatgctcttcacgccaaaactgaacaaatcaagcatgtattagttcgtcatgaacaagccgcgacccacatggctgatggttatgctcgtgccacaggcaaacctggcgttgtcctagtctgttcaggacctggcgcaacgaacaccatcaccggaattgccacggcttacatggattccatcccgatgatcgttatttcaggaaacgtacccaatagcttaattggtaatgatgctttccaagagtgcgatatcgttggtgtttctcgccctgtggttaaacatagtttcctcgttaagcgtgcggaagacattccagagaccatcaagaaagcattttacattgccacgacaggtcgccctggccctgtggtgatcgacttgccaaaagatgtgatgaacccgctgatcaaactgccttatgaatatcctaagtcaatcagcatgcggtcatacaaaccaaccacttcgggccataaaggccaaatcaagaaagcgctaaaggcattacttgaagcgaagaagcccgttctttatatcggtggtggagcgattatctcaggtgcgcatgagtcgatcctcaagctggctgaaacattaaatttgcccgttgtaagcacactaatggggctcggtgctttcccggggacccacaaaaacgctctaggcatgctcggcatgcatggtaaatatgaagccaatatggcgatgcataacgccgatcttatttttggtgttggggtacgttttgatgaccgtaccaccaacaacttagaaaaatactgccctaatgcgaagatcatgcacatcgatatcgacccttcttcgatctcgaagaatgtcaaagttgacctacccatcgtggggtcagcggagcaagtgcttgagaccatggtgacacttcttgaagagcaaggcgctgaaaacgatacgcaagccttagcgagctggtgggatgaaattgaaggctggaaagcacgagattgcctcgcctacgacacctcttcggagcgcatcaagccacaacaagtgatcgagacactgcataagctgaccaatggggatgcttatgttgcgtcagatgtaggccagcatcaaatgtttgccgcgctttactacccgttcaacaaaccgcgccgttggatcaattctggtggtctaggcacgatgggctttggtttgcccgctggtatgggggtgaaattcgctatgccagaagaagaagtggtggtggtgacgggggatggcagtatccaaatgaacattcaagaactgtcgactgccatgcaatatgacattccggtcaaaattatcaacttgaataaccgtttcctagggatggtgaaacagtggcaagacattatctatcaaggtcgccactctaactcatacatgagttctgttcctgattttgcagccattgcagaagcttatggccatgtaggtattcgcattgaaacccccgatcaactcgagtcagagcttaaacgcgccctcgacatgaaagatcgcttggtgtttgtcgatatcaatgtggatgaaactgagcacgtctacccaatgcaaatcaaaggcgaaggcatggacaaaatgtggctaagcaaaacggagagaacttaa

SEQ ID NO: 137935 - protein, 574 aa, Vibrio vulnificus YJ016
MTAMLSGAEMVVQSLIEENVEQIFGYPGGSVLDIYDALHAKTEQIKHVLVRHEQAATHMADGYARATGKPGVVLVCSGPGATNTITGIATAYMDSIPMIVISGNVPNSLIGNDAFQECDIVGVSRPVVKHSFLVKRAEDIPETIKKAFYIATTGRPGPVVIDLPKDVMNPLIKLPYEYPKSISMRSYKPTTSGHKGQIKKALKALLEAKKPVLYIGGGAIISGAHESILKLAETLNLPVVSTLMGLGAFPGTHKNALGMLGMHGKYEANMAMHNADLIFGVGVRFDDRTTNNLEKYCPNAKIMHIDIDPSSISKNVKVDLPIVGSAEQVLETMVTLLEEQGAENDTQALASWWDEIEGWKARDCLAYDTSSERIKPQQVIETLHKLTNGDAYVASDVGQHQMFAALYYPFNKPRRWINSGGLGTMGFGLPAGMGVKFAMPEEEVVVVTGDGSIQMNIQELSTAMQYDIPVKIINLNNRFLGMVKQWQDIIYQGRHSNSYMSSVPDFAAIAEAYGHVGIRIETPDQLESELKRALDMKDRLVFVDINVDETEHVYPMQIKGEGMDKMWLSKTERT

SEQ ID NO: 137936 - DNA, 1779 bp, Rhodopseudomonas palustris CGA009
  CDS (1)..(1779): transl_table=11
atgagcgacagcaacagccacgatccgaaccagatgaccggtgcggcgatgatcgtccgcgcgatgaaggatcacggtgtcgagcacatcttcggctatccgggcggcgcggtacttccgatctacgacgagatcttccagcagtctgacgtccagcacatcctggtccggcacgagcagggcgccggccacgcggccgaaggctatgcgcgctcgaccggcaagccaggtgtggtgctggtgacctctggcccgggcgccaccaacatggtgacgccgctggccgacgcgttgatggattcgatcccgctggtgtgcatcaccggccaggtgccgacccatctgatcggcaacgacgccttccaggagtgtgacaccgttggcatcacccggccgtgcaccaagcacaactggctggtgcgccggatcgaggatctggccaaggtgctgcacgaggcgttctacgtcgcgacctccggccgtccgggcccggtggtggtcgacgtcccgaaggatgtgcagttcgccaccggcacctatcatccgccgcgcaaggccgacgtccacgtctcctacgtgccgaacaagaagggcgatcccgcccagatccgtaaggccgttgcgctgctggccaatgccaagcggccggtgatctattctggcggcggcgtgatcaactcgggccccgaagcgtcgcggctgctgcgtgagctggtggagatcaccgatttcccgatcacctcgacgctgatgggtctcggcgcgtatccggcctcgggcaagaactggctcggcatgctgggcatgcacggcacctacgaagccaacatgacgatgcacgattgcgacgtcatgctgtgcatcggcgcgcggttcgacgaccggatcaccggccgcaccgacgcgttcgcgccgaacgccaagaagatccacatcgatatcgatccgtcgtcgatcaacaagaacatccgggtcgacgtgccgatcatcggcgacgtcgccaccgtcctcgccgacctgctgagtgcgttcaaggccgaagccaagaagccggacatcaagccgtggtggcagcaggtcgcgacctggcgcgcacgcaattcgcttgcctataagaagaacaacgacgtcatcatgccgcaatacgcgatccagcggctgtacgaggcgacccgcggccgtgatacctacatcacgaccgaagtcggtcagcatcagatgtgggcggcgcagttctacggcttcgaacagccgaagcgctggatgacctcgggcggcctcggcaccatgggctacggcctgccggcggcgctcggcgtgcaggtggcgcatcgcgacagcctcgtcatcgacatcgccggcgacgcctcggtgcagatgacgatccaggagatggcgacggcggtgcagtacgagctgccgatcaagatcttcatcttgaacaaccagtacatgggcatggtgcgccagtggcagcagctgctgcacggcaaccggctgtcgcattcctacaccgaggcgatgcccgacttcgtcaagctggctgaagcttacggcgcggtcggcatgcaggttgtcaaaccgtcagatctcgacggcgcgatccaggacatgatcaaggtgaacaagccggtgctgttcgactgccgcgtcgccgcgctggagaactgcttcccgatgattccttcgggcaaggcgcacaacgaaatgctgttgccggccgaagccaccgacgaagccaccgcagccgccttcgctggcggcaaggcgctggtgtga

SEQ ID NO: 137937 - protein, 592 aa, Rhodopseudomonas palustris CGA009
MSDSNSHDPNQMTGAAMIVRAMKDHGVEHIFGYPGGAVLPIYDEIFQQSDVQHILVRHEQGAGHAAEGYARSTGKPGVVLVTSGPGATNMVTPLADALMDSIPLVCITGQVPTHLIGNDAFQECDTVGITRPCTKHNWLVRRIEDLAKVLHEAFYVATSGRPGPVVVDVPKDVQFATGTYHPPRKADVHVSYVPNKKGDPAQIRKAVALLANAKRPVIYSGGGVINSGPEASRLLRELVEITDFPITSTLMGLGAYPASGKNWLGMLGMHGTYEANMTMHDCDVMLCIGARFDDRITGRTDAFAPNAKKIHIDIDPSSINKNIRVDVPIIGDVATVLADLLSAFKAEAKKPDIKPWWQQVATWRARNSLAYKKNNDVIMPQYAIQRLYEATRGRDTYITTEVGQHQMWAAQFYGFEQPKRWMTSGGLGTMGYGLPAALGVQVAHRDSLVIDIAGDASVQMTIQEMATAVQYELPIKIFILNNQYMGMVRQWQQLLHGNRLSHSYTEAMPDFVKLAEAYGAVGMQVVKPSDLDGAIQDMIKVNKPVLFDCRVAALENCFPMIPSGKAHNEMLLPAEATDEATAAAFAGGKALV

SEQ ID NO: 137938 - DNA, 1701 bp, Geobacter sulfurreducens PCA
  CDS (1)..(1701): transl_table=11
atgaaaatgacaggagcgagaatattactcgaatgcctcaagctcgaaggggtcgataccgtgttcggctaccccggtggcacggtaatcaacatctatgatgagctgttttctttcaaggagatacgtcacattcttccccggcacgaacaggccggcgtccacgcggccgacggttttgcacgtgccaccggtcgggtgggggtagccatcgccacgtccggacccggagccaccaacaccgtcaccggcattgccaccgcatacatggattctatccccgtggtggttattaccggccaggtgcccacggcccttatcggcaacgatgcgttccaggaagtcgatattgtcggcatcacccggccgtgcaccaagcataatttcctggtaaaggatgtgaaagatatcccgtccatcatcaagaaggcattctatatcgcccgcacgggccgtccggggccggtcctcgtggatcttcccaaggacgtacagatcgccaccgctgagtttcactacccggattccatcgaattgcggagctacaagccgacggtcgagggacatcccaaacagatcgaaaaggccgtctccctcatgcttgaggccaagaagccggtgatctacgtgggtggtggggtcatctccggcgatgcagccggcgaactctatgatttcgccaaaaaactcaatatgccggttaccacgaccctcatgggactcggctcctttcccgaggatgatcatcaggccctgcgactcctgggaatgcacgggacctactacgcgaacatggcagtaaccaactgcgatatgctgtttgccgtgggcgcccggttcgacgaccgcgtaaccggtaaggtcgccaccttcgccccccacgcgaagatcatccacgtcgacgtggaccccacgtccatcaggaagaacgtgcgggtcgacctccccatcgtgggcgaggtgaagaaggtcctgtcccagatgctcaaggtgctggaggagcagggggacaaggtggagcgctttcgcacgggtattgaaccctggatggccgagatcgaaggatggaagcagaagcatcccatgacctacaagcagacaacctcggtcatcaagcctcagtacgttattcagaagctgcgggagctttccgagcccgacgccatcatcgccacggacgtggggcagcaccagatgtggactgcccagtttttcaccttcaccaaagcccggaccctcctgtcatcgggtggtctcggcaccatgggctacggtctgcctgcagccatgggcgcccaggctgcgtatcccgatcgccaggttatcgctatatgcggagacggcggcttccagatgaatatgcaggaactggcgacactggtccagaatcggttgccggtcaagatctgtattctcaacaacaatttcctcggcatggtccggcagtggcaggagctgttcttcgaccgccgctactcccagacctgcatggagctgcccatcgacttcatcaagctggcagaggccttcggtgcgaccggtctccaggcctccaaggtggacgaagtggaaggcaccatcaagaaggcattcgagacgcccggaccggttatcatggagttcaagatcgcgcgggaggaaaaggtcctccccatggtgcccgccggggcttctctcaatgaaatggtgctcaacgcctaa

SEQ ID NO: 137939 - protein, 566 aa, Geobacter sulfurreducens PCA
MKMTGARILLECLKLEGVDTVFGYPGGTVINIYDELFSFKEIRHILPRHEQAGVHAADGFARATGRVGVAIATSGPGATNTVTGIATAYMDSIPVVVITGQVPTALIGNDAFQEVDIVGITRPCTKHNFLVKDVKDIPSIIKKAFYIARTGRPGPVLVDLPKDVQIATAEFHYPDSIELRSYKPTVEGHPKQIEKAVSLMLEAKKPVIYVGGGVISGDAAGELYDFAKKLNMPVTTTLMGLGSFPEDDHQALRLLGMHGTYYANMAVTNCDMLFAVGARFDDRVTGKVATFAPHAKIIHVDVDPTSIRKNVRVDLPIVGEVKKVLSQMLKVLEEQGDKVERFRTGIEPWMAEIEGWKQKHPMTYKQTTSVIKPQYVIQKLRELSEPDAIIATDVGQHQMWTAQFFTFTKARTLLSSGGLGTMGYGLPAAMGAQAAYPDRQVIAICGDGGFQMNMQELATLVQNRLPVKICILNNNFLGMVRQWQELFFDRRYSQTCMELPIDFIKLAEAFGATGLQASKVDEVEGTIKKAFETPGPVIMEFKIAREEKVLPMVPAGASLNEMVLNA

SEQ ID NO: 137940 - DNA, 1869 bp, Mycobacterium avium subsp. paratuberculosis K-10
  CDS (1)..(1869): transl_table=11
gtgagcgctcccaccaggcggcccgcccccgacgcacccggcgctgccggcatcgccccggccccgccggccccggccgcgaagcccgccgccggcaaaccgaaacgcattgggcccgaacaagttaccggcgcgcaatcggtgatccgatcgctggaggagctcggcgtcgaggtgatcttcggcattcccggcggcgcggtactgccggtctatgacccgctgttcgactccaagaagctgcggcacgtgctggtccgccacgagcagggcgccggtcacgccgccagcggctacgcgcacgccaccggcaaggtcggtgtctgcatggccacctccggtccgggcgccaccaacctggtcaccgcgctggccgacgcccagatggactcgattcccgtcgtcgccgtcaccggccaggtgggacgcacgctaatcggcaccgacgccttccaggaggccgacatctccggcatcaccatgccgatcaccaagcacaacttcctggttcgctccggcaacgagatcccgcaggtgcttgccgaggcgttccacatcgccgcctccggccgccccggcgcggtgctcgtcgacatccccaaggacgtgctgcagggccagtgcacgttcagctggccgccgcgcatccacctgcccgggtacaagccgaccaccaaaccgcacagccggcagatccgcgaagccgccaagctgatcgcggccgcccgcaaaccggtgctgtacgtgggcggcggtgtcatccgcggggaggccagcgagcagctgcgcgaactggccgagctgaccggcatcccggtggtgaccacgctgatggcccgcggcgcgttcccggacagccaccgtcagcacctgggcatgcccgggatgcacggcaccgtcgcggcggtggcggccctgcagcgcagcgacctgctgatcgcgctgggtacgcggttcgatgaccgggtgaccggcaagctggacaccttcgccccggaagccaaggtcatccacgccgacatcgacccggccgagatcggcaagaaccggcatgccgacgtgccgatcgtcggcgacgtcaaggccgtcatcgccgaactggtcgagatgctgcgccacgacggggcgcccggcaatctcgacatcgccgactggtgggcctacctcgacgacgtccagtccacctatccgttgagctacgggccgcagagcgacggcagcctcgggcccgagtacgtcatcgagaagctgggccagatcgctggccccgacgcggtgtacgtcgccggggtgggccagcaccagatgtgggcggcgcaattcatctcctacgagaagccgcgcacctggctcaactccggcggcctgggcaccatggggttcgccattccggccgccatgggggccaagatggctcgcccggaggccgaggtgtgggcgatcgacggcgacggctgtttccagatgaccaaccaggaactggccacctgcgccgtcgagggcattccgatcaaggtggcgctgatcaacaacggcaacctgggcatggtgcgccagtggcagaccctgttctacgaagagcggtattcgcaaacggatctggccacccactcgcaccgcatcccggacttcgtcaagctcgccgaggcgctgggctgcgtcggattgcgttgcgagcgtgaggaagacgtcgtcgacgtgatcaacgctgcccgggcgatcaacgaccggccggtggtgatcgacttcatcgtcggcgccgacgcgcaggtgtggccgatggtggccgccggcaccagcaacgacgagatccaggccgcccgcgggatccgcccgctgttcgacgacgagaccgaagggcacgcctga

SEQ ID NO: 137941 - protein, 622 aa, Mycobacterium avium subsp. paratuberculosis K-10
MSAPTRRPAPDAPGAAGIAPAPPAPAAKPAAGKPKRIGPEQVTGAQSVIRSLEELGVEVIFGIPGGAVLPVYDPLFDSKKLRHVLVRHEQGAGHAASGYAHATGKVGVCMATSGPGATNLVTALADAQMDSIPVVAVTGQVGRTLIGTDAFQEADISGITMPITKHNFLVRSGNEIPQVLAEAFHIAASGRPGAVLVDIPKDVLQGQCTFSWPPRIHLPGYKPTTKPHSRQIREAAKLIAAARKPVLYVGGGVIRGEASEQLRELAELTGIPVVTTLMARGAFPDSHRQHLGMPGMHGTVAAVAALQRSDLLIALGTRFDDRVTGKLDTFAPEAKVIHADIDPAEIGKNRHADVPIVGDVKAVIAELVEMLRHDGAPGNLDIADWWAYLDDVQSTYPLSYGPQSDGSLGPEYVIEKLGQIAGPDAVYVAGVGQHQMWAAQFISYEKPRTWLNSGGLGTMGFAIPAAMGAKMARPEAEVWAIDGDGCFQMTNQELATCAVEGIPIKVALINNGNLGMVRQWQTLFYEERYSQTDLATHSHRIPDFVKLAEALGCVGLRCEREEDVVDVINAARAINDRPVVIDFIVGADAQVWPMVAAGTSNDEIQAARGIRPLFDDETEGHA

SEQ ID NO: 137942 - DNA, 2049 bp, Magnaporthe grisea 70-15
  CDS (1)..(2049)
atgcttcgtactgttggccgcaaagccctgaggggctcatccaagggatgttcacgaaccatctcgactctcaagcccgccacggcaactattgccaagcccggcagcaggaccctttcgacgccagcgacggcaacagcaacagcacctcgaactaagcccagcgccagcttcaatgctcgccgcgatccccagcctctggtcaaccctcgctcaggtgaggcagacgaatcattcattggcaagacgggaggagagattttccacgagatgatgctgaggcaaaacgtcaagcacatcttcggttaccctggcggtgctatccttcccgtgttcgacgcgatctacaactcgaagcacatcgactttgttctgcccaagcatgagcaaggcgccggccacatggcagagggctatgctcgcgcttcaggcaaacccggcgttgttctcgtcacctccggccccggtgccacaaatgtcatcactcccatggccgacgctcttgccgacggtacacctctggttgtattctcaggacaggttgttacctctgctattggaagcgacgccttccaggaggccgacgtcataggcatctcccggtcttgcaccaagtggaacgtcatggttaagagcgttgacgagctcccgaggagaattaacgaggcctttgagattgccaccagtgggcgacctgggcctgtcttggtcgatctgcccaaggacgtcacggctagtgtgctgaggagggctatccccaccgagacctcgattccctctattagcgctgcagcacgggctgtccaagaggcaggccgaaagcagcttgagcactccatcaaacgcgtagccgatctcgtcaacattgccaagaagcccgtcatatatgccggccaaggtgtcattttgtcggaaggcggcgttgaacttctcaaggcgcttgccgacaaggcctcgattcctgtcaccaccactctgcatggtctgggagcctttgacgagctcgacgagaaggcactgcacatgcttggtatgcacggttcggcttatgccaacatgtccatgcaagaggccgatttgatcattgcccttggtggccgcttcgatgaccgtgtcactggcagcatccccaaatttgctcctgccgccaagcttgctgctgctgaaggccgcggaggtattgtccacttcgagattatgcccaagaacatcaacaaggtcgtccaagcaacagaggccattgagggcgacgttgcttcgaacttgaagctgttgctccccaagattgaacaacgatccatgaccgatcgcaaggagtggttcgaccagatcaaggagtggaaggagaagtggcctctgtcacattatgagagggccgagcgtagtggtctcatcaagcctcagactctgatcgaggagctgagcaacctgactgctgaccgcaaggacatgacctacatcacaaccggtgttggccagcaccaaatgtggacagcacaacatttcaggtggaggcacccacggtccatgatcacctctggcggtttgggtaccatgggatatggtctgccggcagcgattggcgccaaggttgctaggccagatgctttggtcattgacatcgatggcgatgcatcgttcaacatgactctgacagagctttcgacggcggcacagttcaacattggcgtcaaggtcattgtcttgaacaacgaggagcagggaatggtgacccaatggcagaacttgttctacgaggaccgctactcacatacacaccagcgcaacccagacttcatgaagctcgccgatgcaatggacgttcaacatcgccgtgtttcgaagcctgacgatgtcgttgatgctctgacgtggctgatcaacaccgacggccccgctctgctcgaggtgatgactgataagaaggttcctgttctgcccatggtgcccggaggtaacggcctgcacgagttcatcacgtttgatgccagcaaggataagcaacggagagagctgatgcgcgcgaggacgaacggcctgcacggttaa

SEQ ID NO: 137943 - protein, 682 aa, Magnaporthe grisea 70-15
MLRTVGRKALRGSSKGCSRTISTLKPATATIAKPGSRTLSTPATATATAPRTKPSASFNARRDPQPLVNPRSGEADESFIGKTGGEIFHEMMLRQNVKHIFGYPGGAILPVFDAIYNSKHIDFVLPKHEQGAGHMAEGYARASGKPGVVLVTSGPGATNVITPMADALADGTPLVVFSGQVVTSAIGSDAFQEADVIGISRSCTKWNVMVKSVDELPRRINEAFEIATSGRPGPVLVDLPKDVTASVLRRAIPTETSIPSISAAARAVQEAGRKQLEHSIKRVADLVNIAKKPVIYAGQGVILSEGGVELLKALADKASIPVTTTLHGLGAFDELDEKALHMLGMHGSAYANMSMQEADLIIALGGRFDDRVTGSIPKFAPAAKLAAAEGRGGIVHFEIMPKNINKVVQATEAIEGDVASNLKLLLPKIEQRSMTDRKEWFDQIKEWKEKWPLSHYERAERSGLIKPQTLIEELSNLTADRKDMTYITTGVGQHQMWTAQHFRWRHPRSMITSGGLGTMGYGLPAAIGAKVARPDALVIDIDGDASFNMTLTELSTAAQFNIGVKVIVLNNEEQGMVTQWQNLFYEDRYSHTHQRNPDFMKLADAMDVQHRRVSKPDDVVDALTWLINTDGPALLEVMTDKKVPVLPMVPGGNGLHEFITFDASKDKQRRELMRARTNGLHG

SEQ ID NO: 137944 - DNA, 2073 bp, Gibberella zeae PH-1
  CDS (1)..(2073)
atgctccgaagtcgccctacgagacaggctattcgcgcctttggccacgcgagggcccgaacaacgctgcccgcgacgcaaagaacaaaagccactgctaccacttctgccgcgcctcagactcgcccggtgcccagccctgccttcaacttggagcccgaatctcgccgtcatgttcagcctcttgtcaaccgatcaaatcccgagatggatgagtctttcattggaaagtccggtggcgagatctttcacgagatgatgctcagacacgatgtgaagcatatttttggctaccccggaggtgctatccttcccgtctttgacgctatctacaactcgaaacacttcgactttatcctgccccgacacgaacaaggtgccggccacatggcacaaggctacgcacgagccaccggtaagcctggtgttgtactcgtcacatcaggcccaggagcgaccaatgtcatcacacccatgcaagatgctctctcagacggcactcccatcgtggtctttactggacaggtcgtgacaagtgccatcggatcggacgcgttccaagagtgcgatactgtgggcattagcaggagtgcatgcaagtggaattgcatggttacaagcattgctgagctaccgcgacgaattaacgaggctttcgagattgctactagcggtcgtcctggtcccgttcttatcgatcttcctaaggatattacagccggaattcttcgaaaggctataccgacacaaactcgcctgccctctatcccaagcatggcttctcaaaccgccaaacaagtaatggagaagcagcttaacgcctccctgagtcgtgctgctgatcttatcaagatagccaagcagcctatcatttacgctggccagggcattatccagtctgaaggtggaactgagcttcttcgcgagctggccgacaagtgctctatccctgttacgacaaccctccagggtcttggcgcatttgatgagcgtgacgagaagtcactacaaatgcttggtatgcacggcatggcatatgccaacatgtcaatgcaggaggccgacctgattattgcccttggcgcgcgctttgacgatcgcgttgtcttaaatacttcaaaatttgctcctaatgccaaggccgcagcagctgagaagcgaggcggcattatccattttgatatcttgcccaagaacatcaacaaggtcattcaagcaactgaggccattgagggcgatgttgctactaacctcaagatgctcatgcctatgcttacacccacaagcatggagcaacgaagcggatggttcaacaagatttctgaatggaaggctaagtggcccctgtccaactatgagcactctgacgctccgggaggcagcggtctcattaagcctcagaccctgattgaagagctgagcgatctcacctctaaaattgacaagaagacaattatctccactggagtcggtcagcatcaaatgtgggtagcacagcactacttgtggagagagcctcgatcatttgtcacaagtggtggactaggcacgatgggctttggactgccaagtgcgatcggaattgcggtggcgaaaccagacgccctcgtgatcgacatcgacggcgatgcgtccttcaacatgaccctaacagagctctccaccgctgctcaatttaacatcggcgtcaaggttattattctcaacaacgaggagcaaggcatggttacccaatggcagaacctgttttacgaggatcgctatgcacacacccaccagaagaaccccgactttatcaagctagccgacgcaatgggcgtgcaggcgagaaaggtcaccaagccagatgacgttcgggctagcctcgagtggctcatcaacacagacggcccagctcttcttgaggttgttaccgacaagaaggtccctctcctgcctatggtaccagcaggcgctggtctccacgagttcttggtttatgacaaggcgttcgattacagagaaggacaaggctcgacgtcagctaatgcgcgagcgaaccagtggtcttcacggttcttgatcaaaaagtga

SEQ ID NO: 137945 - protein, 690 aa, Gibberella zeae PH-1
MLRSRPTRQAIRAFGHARARTTLPATQRTKATATTSAAPQTRPVPSPAFNLEPESRRHVQPLVNRSNPEMDESFIGKSGGEIFHEMMLRHDVKHIFGYPGGAILPVFDAIYNSKHFDFILPRHEQGAGHMAQGYARATGKPGVVLVTSGPGATNVITPMQDALSDGTPIVVFTGQVVTSAIGSDAFQECDTVGISRSACKWNCMVTSIAELPRRINEAFEIATSGRPGPVLIDLPKDITAGILRKAIPTQTRLPSIPSMASQTAKQVMEKQLNASLSRAADLIKIAKQPIIYAGQGIIQSEGGTELLRELADKCSIPVTTTLQGLGAFDERDEKSLQMLGMHGMAYANMSMQEADLIIALGARFDDRVVLNTSKFAPNAKAAAAEKRGGIIHFDILPKNINKVIQATEAIEGDVATNLKMLMPMLTPTSMEQRSGWFNKISEWKAKWPLSNYEHSDAPGGSGLIKPQTLIEELSDLTSKIDKKTIISTGVGQHQMWVAQHYLWREPRSFVTSGGLGTMGFGLPSAIGIAVAKPDALVIDIDGDASFNMTLTELSTAAQFNIGVKVIILNNEEQGMVTQWQNLFYEDRYAHTHQKNPDFIKLADAMGVQARKVTKPDDVRASLEWLINTDGPALLEVVTDKKVPLLPMVPAGAGLHEFLVYDKAFDYREGQGSTSANARANQWSSRFLIKK

SEQ ID NO: 137946 - DNA, 2034 bp, Candida glabrata CBS 138
  CDS (1)..(2034)
atgacgagaagagggctaacggatccaatgatacgtattagtggggtagtagcgagagcatgccgtcgtagtgcggcgtatcaggtttgcaagtacagtgtgcgggcggttcccaggccggagccctcgccgagtttcaatgttgatcccgatacagcggctgctaataccgggagtggtgtgaagttgagttctaagctgaagaatgtggcgacgcagaagatggacaactcgtttgtgggtctgaccggtgggcagattttcaacgagatgatggcgcgcaacaatgtggacactgtgtttgggtaccctggtggtgcgatcttgccggtgtacgatgcgatccacaactccgacaagttcaagtttgtgttgcctaagcacgagcaaggtgcgggccacatggccgagggttacgcaagggcctccggtaagccaggtgtcgtgttggttacttcgggtcctggtgccacgaacgttgtgactcccatggccgatgcgctggctgacggtattcctatggttgtgtttacgggccaagtgcccaccactgccattggtaccgatgcgttccaagaagccgacattgttggtatctccagatcctgtacaaaatggaacgtgatggtgaagaacgtagcggagctgccactgagaatcaacgaggccttccagattgccacgagcggcagacccggcccagtgttggtggacttgccaaaggacgtcacagccgccatcctgagaacaccaatcccagttaagagcaccctgccatcaaccgcattgcaacagttgactgcaggtgtccaggaccaattcgttattgaaaacatcaagaaatctgccgacttgataaatatcgccaagaatccagtcctttacgtcggtggtggtatcctgaacaatgtcgatgggccaagattggtcaaagagctaagtgagcgtgcgcagatcccagttaccactactttacaaggtttgggtgcattcgaccaagaagatccaaagtctctagacatgctgggtatgcatggttgtgccactgcaaaccttgccgtccagaactccgacttgatcatcgccgtcggtgccagattcgacgaccgtgtcaccggtaacatcactaagtttgcaccagaagcaagaaaggccgcattggaaggtagaggtggtatcattcactttgaaatcactccaaagaacataaataaagtcgtagaagcacaagtggcagtagaaggtgacgctgcttccaacttatccaagttgatcccattggtattcccagtgaaggaaagaccagaatggttcgaaaagattaataagtggaagaaggaattcccatacagttactccctagagactccaggttctagaatcaaaccacaaactgccattgccaagttgtcaaagattgccaatgctaccagcaaggaagttattgttacaaccggtgtcggccaacatcaaatgtgggctgctcaacactggacatggaagaacccacgtactttcatcacttctggtggtctaggtaccatgggttacggtttgccatctgctatcggtgcccaagtcgctaagccagacgccttagtcattgacattgacggtgatgcttctttcaacatgtccttacaggaactaagttctgctgtgcaagctaatgctcctgtaaaaattctagtgctaaacaacgaagagcaaggtatggtcacccaatggcaatctctattctacgagcatcgttactcacacacacatcaattgaacccagatttcgtaaaacttgcggaggcaatgggtatgaagggtatgagagtgaaagaccaagccgagcttgaaaagactctaaaagagtttgttgactaccagggtccagtcttgcttgaagtcgaagtagagaagaaggtgccagtcttgccaatggtcccagccggtaagggtttacacgaatttattaactacgacccagaaatggaaagggaacagaacgaactacgtcacaagcgtaccggtggtaagcattaa

SEQ ID NO: 137947 - protein, 677 aa, Candida glabrata CBS 138
MTRRGLTDPMIRISGVVARACRRSAAYQVCKYSVRAVPRPEPSPSFNVDPDTAAANTGSGVKLSSKLKNVATQKMDNSFVGLTGGQIFNEMMARNNVDTVFGYPGGAILPVYDAIHNSDKFKFVLPKHEQGAGHMAEGYARASGKPGVVLVTSGPGATNVVTPMADALADGIPMVVFTGQVPTTAIGTDAFQEADIVGISRSCTKWNVMVKNVAELPLRINEAFQIATSGRPGPVLVDLPKDVTAAILRTPIPVKSTLPSTALQQLTAGVQDQFVIENIKKSADLINIAKNPVLYVGGGILNNVDGPRLVKELSERAQIPVTTTLQGLGAFDQEDPKSLDMLGMHGCATANLAVQNSDLIIAVGARFDDRVTGNITKFAPEARKAALEGRGGIIHFEITPKNINKVVEAQVAVEGDAASNLSKLIPLVFPVKERPEWFEKINKWKKEFPYSYSLETPGSRIKPQTAIAKLSKIANATSKEVIVTTGVGQHQMWAAQHWTWKNPRTFITSGGLGTMGYGLPSAIGAQVAKPDALVIDIDGDASFNMSLQELSSAVQANAPVKILVLNNEEQGMVTQWQSLFYEHRYSHTHQLNPDFVKLAEAMGMKGMRVKDQAELEKTLKEFVDYQGPVLLEVEVEKKVPVLPMVPAGKGLHEFINYDPEMEREQNELRHKRTGGKH

SEQ ID NO: 137948 - DNA, 2076 bp, Kluyveromyces lactis NRRL Y-1140
  CDS (1)..(2076)
atgctcagtcagaggtttgtaacgcgggctttggccagacgtgcttttggtaagacatgcttgaaattaggaagtgcaagtgcaagtgcaagtaacgctgcttctgctgctgccggtgaggctagtagcaggccacagcctgctcctagctttaacgctgatatagctggtggttcttctggcggtgccagaagaaaccagatcccattgtcgaagagatcgagaatcgcagacaagaatactggtgtcaacattcaaaaccagatggatgattcgttcattggaatgaccggtggtgagatcttccacgagatgatgcaacgtcacaacgtcgacaccgtttttggataccctggtggtgcgattttgcccgtgtacgacgcaatctacaactcagataaattcacttttgttctaccaaaacatgaacaaggtgcaggtcacatggcagagggatacgcaagagcctcagggaaaccaggtgttgttttggtgacttcaggtccaggtgcgactaatgtggtgactcctatggcagatgcattggcagacggtgtgccgttggtggtgtttacaggtcaagtggccacgtcagctatcggaacagatgctttccaagaagcagatgtggttggtatctctagatcttgtaccaaatggaacgtgatggtgaaaaccattgaggaactgcctcgtagaatcaacgaagcgtttgaaatcgcaacttccggtagaccgggccccgttttggtggatttaccaaaggacgtgacggcggcggtgctaagaaacccaattccaatgaagtctattctaccatctgatactctaaatcagttgactcaaagagtcgtcgatgagttcactttggaaaacattagcagggctgctgacttgatcaacagggctaagaagcctttgctatacgtgggtgctggtattctaggcagcgaaatgggtcctcaatacttgaagcaactaagtgacagagctcagatcccagtcaccacgactctacaaggtcttggtgcgttcaaccaagaagatcataaatctttggatatggtcggtatgcacggtaatgctgcagccaacttggccatccaaaacgccgatttgatcattgcattgggtgccagatttgacgatcgtgtcactctgaatatttccaaatttgctccagaggctagaaaggctgctctagagaaacgtggtggtatcgttcatttcgaaatctccccaaagaatatcaacaaggttgtcgaagccgaggtcgctgtcgaaggtgatgtgactcgtaacttggaaaaattgttgccattggtcgaatctgttcctgaaagaccagaatggtccgctcaagtggctaaatggaaacaagaatacccatacgcgtaccaaaaggagactccaggttctaagattaaacctcaaaccgttatctccaagttgtccgatttggtcttgaaatccggtagaccagccatcgtcaccactggtgtcggtcaacatcaaatgtgggctgctcaacactggacttggaaaagtccaagatctttcatcacttccggtggtcttggtaccatgggttacggtctaccagctgctatcggtgctcaagtcgccagacctgacgctatcgtcatcgatatcgacggtgatgcctctttcaacatgactctgatggaattgtcctccgctgttcaagctcgtacaccagtcaaggtcttgttgctaaataacgaggaacaaggtatggttacccaatggcaatctctcttctacgaacaccgttactcgcatacccatcaactgaatccagatttcgttaaattggccgaagctatgggtctgaaggctctcagactctcgaaacaagaggacactgacgccatcttgaaagaattcgttgactacgagggcccaatcttattggaagtgcaaatcgaaaagaaggttcctgtcttgccaatggtcccaaccggtaagggtctacacgaattcatcaactttgatccagaagtagaaaaggaacaaaacgaactacgtcacaaacgtactagtggtaaatattga

SEQ ID NO: 137949 - protein, 691 aa, Kluyveromyces lactis NRRL Y-1140
MLSQRFVTRALARRAFGKTCLKLGSASASASNAASAAAGEASSRPQPAPSFNADIAGGSSGGARRNQIPLSKRSRIADKNTGVNIQNQMDDSFIGMTGGEIFHEMMQRHNVDTVFGYPGGAILPVYDAIYNSDKFTFVLPKHEQGAGHMAEGYARASGKPGVVLVTSGPGATNVVTPMADALADGVPLVVFTGQVATSAIGTDAFQEADVVGISRSCTKWNVMVKTIEELPRRINEAFEIATSGRPGPVLVDLPKDVTAAVLRNPIPMKSILPSDTLNQLTQRVVDEFTLENISRAADLINRAKKPLLYVGAGILGSEMGPQYLKQLSDRAQIPVTTTLQGLGAFNQEDHKSLDMVGMHGNAAANLAIQNADLIIALGARFDDRVTLNISKFAPEARKAALEKRGGIVHFEISPKNINKVVEAEVAVEGDVTRNLEKLLPLVESVPERPEWSAQVAKWKQEYPYAYQKETPGSKIKPQTVISKLSDLVLKSGRPAIVTTGVGQHQMWAAQHWTWKSPRSFITSGGLGTMGYGLPAAIGAQVARPDAIVIDIDGDASFNMTLMELSSAVQARTPVKVLLLNNEEQGMVTQWQSLFYEHRYSHTHQLNPDFVKLAEAMGLKALRLSKQEDTDAILKEFVDYEGPILLEVQIEKKVPVLPMVPTGKGLHEFINFDPEVEKEQNELRHKRTSGKY

SEQ ID NO: 137950 - DNA, 2025 bp, Debaryomyces hansenii CBS767
  CDS (1)..(2025)
atgattgctcgtaatataaaggccacatcttgccaaagagcctttagaatggctagtagccaagttagatgtatgaataagactagctttctgaaagcaactatgagtgctagttcaagacctacgccggccccttcattcgatcaacaagatccaagcagcggagccactgagttaaagaaaaacgttgtaagaaagagtcaatatccaatcatggatgactcatttattgggttaactggtggtgagatcttccatgaaatgatgttgagacacaaggttgataccgtttttgggtatgctggaggtgccattttacctgttttcgacgctatctacaactctgataaattcaattttgttttaccaagacacgaacaaggtgctggacacatggctgaaggttatgctagagcatgcgggaagccaggtgttgtgttggttacttcaggaccaggtgccacgaatgttattacaccaatgaccgatgccttggctgatggtattccattggttgttttcactggtcaggttccaaccactgcaattggaaccgattcattccaagaagccgatgttattggtatttctagatcttgtaccaaatggaatgtcatggttaagaatattgctgaattaccaagacgtataaacgaagcttttgaaattgctacttcgggaagaccaggtccagtcttggttgatttaccaaaggatgttactgcaggtatcttaagagaatccatcccaataaatactaccttaccatcaaatgctttaactcaaatcactaagaaggttgctactgaattcaccatggaaagtatcagaaggtctgcacaactcttgaatatcgccaagaaaccaattctttacgttggtaatggtattttaaaccacgaacaaggtccagcattattaaaagagttagccgacaaagcatgtattcctgtcacaactactatccaaggtttaggtgcttttgatcaaagagatccaaaatctttagatatgttaggtatgcatggtagcgctgctgcaaacactgccatgcaaaatgctgatttaatcattgccttaggtgcaaggtttgacgatagagttactggtaatgttagcaaatttgctcctgctgctaaattagctgcttctgaaaacagaggtggtatcattcattttgaaatctctccaaagaacataaataaggttgtcgaagcaactgaggctgttgaaggtgatgttaccaacaacttgagcaagtttattccattagtggatgctgttaaagaaagaccagaatggatgggtgaagtccaaacatggaaagaaaagtacccatacgcttaccaattggaaaccccaggttcattaatcaaacctcaaactcttatcagagaaatctcaaaacaatcttctacatatggaaaggacgtttacgttacaactggtgtcggtcaacatcaaatgtgggccgctcaacatttcacatggaccaagccaagaactatgatcacatcgggtggtttaggtactatgggttacggtttaccagccgctattggtgcccaagttgccaagccagatgctatggttatcgatattgatggtgatgcttcattcaatatgactttgactgaattatcctcggcggttcaagctaacgcaccaattaaggtttgtgtcttgaataacgaagaacagggtatggttactcaatggcaatcattgttctacgaacacagatattctcacacccatcaatccaatccaaacttcatgaaattagctgatgccatgggtgttaagggtattaagatttctactcaagaagaattagttagtggtatcaaggaattcttagactacgcaggtcctgtcttattagaagttattgttgaaaagaaggttcctgttttaccaatggttccaggtggtaatgcattagatgacttcattattttcgatgctgatgttgaaagaaaagaaaatgaattaagaaatcaaagaaccggtggtaaacattga

SEQ ID NO: 137951 - protein, 674 aa, Debaryomyces hansenii CBS767
MIARNIKATSCQRAFRMASSQVRCMNKTSFLKATMSASSRPTPAPSFDQQDPSSGATELKKNVVRKSQYPIMDDSFIGLTGGEIFHEMMLRHKVDTVFGYAGGAILPVFDAIYNSDKFNFVLPRHEQGAGHMAEGYARACGKPGVVLVTSGPGATNVITPMTDALADGIPLVVFTGQVPTTAIGTDSFQEADVIGISRSCTKWNVMVKNIAELPRRINEAFEIATSGRPGPVLVDLPKDVTAGILRESIPINTTLPSNALTQITKKVATEFTMESIRRSAQLLNIAKKPILYVGNGILNHEQGPALLKELADKACIPVTTTIQGLGAFDQRDPKSLDMLGMHGSAAANTAMQNADLIIALGARFDDRVTGNVSKFAPAAKLAASENRGGIIHFEISPKNINKVVEATEAVEGDVTNNLSKFIPLVDAVKERPEWMGEVQTWKEKYPYAYQLETPGSLIKPQTLIREISKQSSTYGKDVYVTTGVGQHQMWAAQHFTWTKPRTMITSGGLGTMGYGLPAAIGAQVAKPDAMVIDIDGDASFNMTLTELSSAVQANAPIKVCVLNNEEQGMVTQWQSLFYEHRYSHTHQSNPNFMKLADAMGVKGIKISTQEELVSGIKEFLDYAGPVLLEVIVEKKVPVLPMVPGGNALDDFIIFDADVERKENELRNQRTGGKH

SEQ ID NO: 137952 - DNA, 2046 bp, Yarrowia lipolytica CLIB122
  CDS (1)..(2046)
atgcaatcgcgactcgcccgacgggccactaacctggccagaatctccagatccaagtattctcttggtctgcgatatgtttccaacacaaaagcccctgctgcccagccggcaactgctgaacgatcccagcccgctccccacttccagggcaccgttggcaagcctcctatcctcaagaaggctgaggctgccaacgctgacatggacgagtccttcatcggaatgtctggaggagagatcttccacgagatgatgctgcgacacaacgtcgacactgtcttcggttaccccggtggagccattctccccgtctttgacgccattcacaactctgagtacttcaactttgtgctccctcgacacgagcagggtgccggccacatggccgagggctacgctcgagcctctggtaagcccggtgtcgttctcgtcacctctggccccggtgccaccaacgtcatcacccccatgcaggacgctctttccgatggtacccccatggttgtcttcaccggtcaggtcctgacctccgttatcggcactgacgccttccaggaggccgatgttgtcggcatctcccgatcttgcaccaagtggaacgtcatggtcaagaacgttgctgagctcccccgacgaatcaacgaggcctttgagattgctacttccggccgacccggtcccgttctcgtcgatctgcccaaggatgttactgctgccatcctgcgagagcccatccccaccaagtccaccattccctcgcattctctgaccaacctcacctctgccgccgccaccgagttccagaagcaggctatccagcgagccgccaacctcatcaaccagtccaagaagcccgtcctttacgtcggacagggtatccttggctccgaggagggtcctaagctgcttaaggagctggctgagaaggccgagattcccgtcaccactactctgcagggtcttggtgcctttgacgagcgagaccccaagtctctgcacatgctcggtatgcacggttccggctacgccaacatggccatgcagaacgctgactgtatcattgctctcggcgcccgatttgatgaccgagttaccggctccatccccaagtttgcccccgaggctcgagccgctgcccttgagggtcgaggtggtattgttcactttgagatccaggccaagaacatcaacaaggttgttcaggccaccgaagccgttgagggagacgttaccgagtctgtccgacagctcatccccctcatcaacaaggtctctgccgctgagcgagctccctggactgagactatccagtcctggaagcagcagttccccttcctcttcgaggctgaaggtgaggatggtgttatcaagccccagtccgtcattgctctgctctctgacctgacagagaacaacaaggacaagaccatcatcaccaccggtgttggtcagcatcagatgtggactgcccagcatttccgatggcgacaccctcgaaccatgatcacttctggtggtcttggaactatgggttacggcctgcccgccgctatcggcgccaaggttgcccgacctgactgcgacgtcattgacatcgatggtgacgcttctttcaacatgactctgaccgagctgtccaccgccgttcagttcaacattggcgtcaaggctattgtcctcaacaacgaggaacagggtatggtcacccagtggcagtctctcttctacgagaaccgatactgccacactcatcagaagaaccccgacttcatgaagctggccgagtccatgggcatgaagggtatccgaatcactcacattgaccagctggaggccggtctcaaggagatgctcgcatacaagggccctgtgctcgttgaggttgttgtcgacaagaagatccccgttcttcccatggttcccgctggtaaggctttgcatgagttccttgtctacgacgctgacgccgaggctgcttctcgacccgatcgactgaagaatgcccccgcccctcacgtccaccagaccacctttgagaactaa

SEQ ID NO: 137953 - protein, 681 aa, Yarrowia lipolytica CLIB122
MQSRLARRATNLARISRSKYSLGLRYVSNTKAPAAQPATAERSQPAPHFQGTVGKPPILKKAEAANADMDESFIGMSGGEIFHEMMLRHNVDTVFGYPGGAILPVFDAIHNSEYFNFVLPRHEQGAGHMAEGYARASGKPGVVLVTSGPGATNVITPMQDALSDGTPMVVFTGQVLTSVIGTDAFQEADVVGISRSCTKWNVMVKNVAELPRRINEAFEIATSGRPGPVLVDLPKDVTAAILREPIPTKSTIPSHSLTNLTSAAATEFQKQAIQRAANLINQSKKPVLYVGQGILGSEEGPKLLKELAEKAEIPVTTTLQGLGAFDERDPKSLHMLGMHGSGYANMAMQNADCIIALGARFDDRVTGSIPKFAPEARAAALEGRGGIVHFEIQAKNINKVVQATEAVEGDVTESVRQLIPLINKVSAAERAPWTETIQSWKQQFPFLFEAEGEDGVIKPQSVIALLSDLTENNKDKTIITTGVGQHQMWTAQHFRWRHPRTMITSGGLGTMGYGLPAAIGAKVARPDCDVIDIDGDASFNMTLTELSTAVQFNIGVKAIVLNNEEQGMVTQWQSLFYENRYCHTHQKNPDFMKLAESMGMKGIRITHIDQLEAGLKEMLAYKGPVLVEVVVDKKIPVLPMVPAGKALHEFLVYDADAEAASRPDRLKNAPAPHVHQTTFEN

SEQ ID NO: 137954 - DNA, 2094 bp, Aspergillus nidulans FGSC A4
  CDS (1)..(2094)
atgatgcctttaagaccatcaaaaagcgccctgcgcactctgcattatcagaggtacattgcctctggacgaagagcctttgcttctgcggtctcgacgccccaccgcttttcgactcagaagcgcgaccagagcacagcaacggctactgcttcaacctcccgccctagacccagccctgccttcaaccaagagccaagccgcaatgaagtatcacctctccagaatcgacagcttcccgagctcgacgactcgtatggcattctcattcttttcgtccaaatattcgtcggactcagcggtggtgagatattccacgagatgatgctgcgcctgggtgtgaagcacgtttttggctaccctggaggtgccattcttcccgtcttcgacgcaatttacaactctaagcacttcgacttcatcctgcctcgacatgaacagggtgcgggccacatggcagaaggttatgctcgtgcttctgggaagcctggtgttgtccttgtcacttctggtcccggtgctaccaatgtcattactcccatgcaggacgccttctctgatggtacccccatggttgtcttctgtggtcaggttgtcactacctccatcggcacagactccttccaggaagccgacgtggttggtatctctagggcatgcaccaagtggaacgttatggtcaagtccgtcgccgaacttccccgccgtatccaagaagctttcgaaattgctactagcggtcgtcctggtcctgtcctcgtcgatcttcccaaggatatcaccgcaggtatcctccgtaaacccattcctatgcagagcactcttccttctcgcccgagcgccgcgactctggcggccaaggaattgagtgagaagcagcttcacagcaccatcaatcgcgtggcccgtctcgtcaacgtcgccaagaaacctgtactctacgttggtcagggtatcctcgaaaaccccgacggccccaaactcctgaaggagctggccgacaaggcttgcattcctgttactacaactttgcaaggtcttggcggctttgacgagctcgaccccaaatccctgcacatgcttggtatgcatggctctgcctatgcaaacttggctatgcaggaagccgatttgatcatcgcccttggtgctcgctttgatgatcgtgtgactggtagcatcgctaaatttgctccccaggctaagctcgctgcttcggaaaatcgtggtggtattgttcacttcgagatcatgccgaagaacatcaacaaggttgtgcaagcaaacgaggctgttgagggtgactgtgctgagaacattcgacacctccttcctcttgttgaacctgtctccgaaagaccagagtggtttgcccaaatcaatgactggaagacccggttcccgctctctctctacgagaaacagactcctgacggccccatcaagccgcaggctttgattgagaagctcagtgatcttactgctcacatgaaagaccgcactatcattaccactggtgttggacagcaccaaatgtgggccgcccagcacttccgttggcgccgtccccgctccatgatcacttctgggggtcttggtactatgggctacggcctgccggctgctattggtgccaaagttgcccgccctgactgccttgttatcgatatcgatggcgatgcctcctttaacatgactctcactgagcttaccactgctgcccagtttaacattggcatcaaggtccttctcttgaataacgaggagcagggcatggtgacccaatggcaaaacctgttctacgaggaccgctactcccacactcaccagaagaaccctgatttcgtgcgtcttgctgaggctatgggtgttgctgccgagcgctgcaccaagccctcagaagtggagtccaagctgaagtggctgatcgagagtgatggacctgccttgctcgaggtattcaccgaccgtaaggtgcccgtgttaccaatggttcctggtggtagcggcctgcacgagttcctcgttttcgacgaagccaaggaccgtgagaggagggctttaatgaagaaaaggaaccctaacggcgtttaa

SEQ ID NO: 137955 - protein, 697 aa, Aspergillus nidulans FGSC A4
MMPLRPSKSALRTLHYQRYIASGRRAFASAVSTPHRFSTQKRDQSTATATASTSRPRPSPAFNQEPSRNEVSPLQNRQLPELDDSYGILILFVQIFVGLSGGEIFHEMMLRLGVKHVFGYPGGAILPVFDAIYNSKHFDFILPRHEQGAGHMAEGYARASGKPGVVLVTSGPGATNVITPMQDAFSDGTPMVVFCGQVVTTSIGTDSFQEADVVGISRACTKWNVMVKSVAELPRRIQEAFEIATSGRPGPVLVDLPKDITAGILRKPIPMQSTLPSRPSAATLAAKELSEKQLHSTINRVARLVNVAKKPVLYVGQGILENPDGPKLLKELADKACIPVTTTLQGLGGFDELDPKSLHMLGMHGSAYANLAMQEADLIIALGARFDDRVTGSIAKFAPQAKLAASENRGGIVHFEIMPKNINKVVQANEAVEGDCAENIRHLLPLVEPVSERPEWFAQINDWKTRFPLSLYEKQTPDGPIKPQALIEKLSDLTAHMKDRTIITTGVGQHQMWAAQHFRWRRPRSMITSGGLGTMGYGLPAAIGAKVARPDCLVIDIDGDASFNMTLTELTTAAQFNIGIKVLLLNNEEQGMVTQWQNLFYEDRYSHTHQKNPDFVRLAEAMGVAAERCTKPSEVESKLKWLIESDGPALLEVFTDRKVPVLPMVPGGSGLHEFLVFDEAKDRERRALMKKRNPNGV

SEQ ID NO: 137956 - DNA, 2052 bp, Candida albicans SC5314
  CDS (1)..(2052): transl_table=12
atgatttctcgtaatttgagaacttcatcaacgaaaaccttttatggttccattttaagatcacaaattagatcaatatcgaaaaataattctcaacaagctgctgctcaatcaacttcacgtccacaaccatctcctgcttttaatactgctgatacatctactcaaccaatcataaatgatccaactcttaataaacacaaatcttccgctatttctagaaagaaaaaggaacaattaatggatgattcattcattggattaactggtggtgaaattttccatgaaatgatgcttagacataaagttgataccgtgtttggatatgctggtggtgctattttaccagtatttgacgccatttataattctgataaatttaaatttgttttaccaagacatgaacaaggtgctggtcatatggctgaaggttatgctagagctagtggtaaaccaggagttgttttagtcacttctggtcctggtgccaccaatgttataacgccgatggccgatgcattaatggatggggtaccattagtggtattttctggtcaagtgccaactactgctattggtactgatgcattccaagaagctgatattgttggtatttctagatcttgtactaaatggaatgttatggttaaaaatgtggcggaattaccaagaagaattaatgaagcatttgaaattgctactactggtagacctggtcctgttttagttgatttaccaaaagatgtcacagcatcaattttaagagaatcaattcctataaatactacattaccatcaaatgcattgagtcaaatcactaaaaaagccgttagtgaattcacttcagaagctattaaaagagcggctaatattttaaataaagctaaaaaaccaatcatttacgctggtgcggggattttaaataatgaacaaggtcctaaattattaaaagaattagctgataaagctaatatccccgtaacaacaactttacaaggattaggtgcatttgatcaaagagatcctaaatctttagatatgttgggtatgcatggatctgctgctgccaatactgctattcaaaatgcggattgtattattgccttgggagcaagatttgatgatagagtcacgggtaatattagtaaatttgcccccgaggcaaaattagctgcttctgaaggtagaggtgggattttacattttgaaatatctcctaaaaatattaataaagttgttgaagcgactgaagctattgaaggtgatgtcaccgccaatttacaatcatttattccattagttgattctattgaaaatagacccgaatggttcaataaaattaatgaatggaaaaagaaatatccttattcttatcaattagaaacccctggttctttaattaaacctcaaactttaattaaagaaatttctgatcaagctcaaacttataataaagaagttattgttactactggggtaggacaacatcaaatgtgggccgctcaacatttcacttggactcaaccaagaactatgattacttctggtggattaggtactatgggttatggattacctgctgctattggggctcaagtagctaaaccagatgctattgtcattgatattgatggtgatgcttcatttaatatgactttaaccgaattatcttctgccgttcaagctggtgcccctattaaagtatgtgttttaaataatgaagaacaagggatggtgactcaatggcaatcattattttatgaacatagatatagtcatactcatcaatctaatcctgattttatgaaattggctgaatcaatgaatgttaaggggataagaattactaatcaacaagaattgaaatctggtgttaaggaatttttagatgctactgaaccagttttattagaagttattgtggaaaagaaagtccctgttttacctatggttcctgctggtaaagctttagatgattttattttatgggatgctgaagttgaaaaacaacaaaatgatttaaggaaagaaagaactggtggtaaatattag

SEQ ID NO: 137957 - protein, 683 aa, Candida albicans SC5314
MISRNLRTSSTKTFYGSILRSQIRSISKNNSQQAAAQSTSRPQPSPAFNTADTSTQPIINDPTLNKHKSSAISRKKKEQLMDDSFIGLTGGEIFHEMMLRHKVDTVFGYAGGAILPVFDAIYNSDKFKFVLPRHEQGAGHMAEGYARASGKPGVVLVTSGPGATNVITPMADALMDGVPLVVFSGQVPTTAIGTDAFQEADIVGISRSCTKWNVMVKNVAELPRRINEAFEIATTGRPGPVLVDLPKDVTASILRESIPINTTLPSNALSQITKKAVSEFTSEAIKRAANILNKAKKPIIYAGAGILNNEQGPKLLKELADKANIPVTTTLQGLGAFDQRDPKSLDMLGMHGSAAANTAIQNADCIIALGARFDDRVTGNISKFAPEAKLAASEGRGGILHFEISPKNINKVVEATEAIEGDVTANLQSFIPLVDSIENRPEWFNKINEWKKKYPYSYQLETPGSLIKPQTLIKEISDQAQTYNKEVIVTTGVGQHQMWAAQHFTWTQPRTMITSGGLGTMGYGLPAAIGAQVAKPDAIVIDIDGDASFNMTLTELSSAVQAGAPIKVCVLNNEEQGMVTQWQSLFYEHRYSHTHQSNPDFMKLAESMNVKGIRITNQQELKSGVKEFLDATEPVLLEVIVEKKVPVLPMVPAGKALDDFILWDAEVEKQQNDLRKERTGGKY

SEQ ID NO: 137958 - DNA, 2211 bp, Ustilago maydis 521
  CDS (1)..(2211)
atgacaagcttcgccgtgcagtttgcacgccagcaaaggcatgctttccaggcagcctcaaaattttcggctgcttccacttcatccattgccgtctcggccgctgcttccacgtcgtacgcatctacaccttgtgccaccagggcattctccaccgccaggaacaacctgtctcgctctgcgcagctcgcaagatcgcaacgtagccagctagccctcacaagacacatctccacaaatcagcccaaggaacaggctgctgccgctgctcagaccgcggccagtgtccgtcccgagccttcgcctgcgttccagcagtctccccaaaacattgctcctctcgcttctagatacgatgccaacgctctcgatgagtcatttgttggtctctcgggtggtgccatctttcacgagatgatgctccgacacaacgtcaagcacgtctttggttaccccggtggcgctatccttcccgtctttgacgccatctacaactcgaagcactttgactttgtccttccacgaagagaggacggtgccggccacatggctgaaggctacgcccgtgttaccggcaagcccggtgtcattctcgtcacttcgggccccggtgccaccaacgtcatcacaccgatgcaggacgccatgagtgatggaacccccctggtcgtcttctgtggtcaggtcgcaacctctgccatcggctcggatgctttccaggaagccgatgtcgtcggcatttcgaggtcatgtacaaagtggaacgtcatggtcaaggacattgccgaactaccgcgtcgcatcaacgaggctttcaagatcgccacctctggccgtcctggtcccgttctcgtcgacctacccaaagacgtcacggctggtatccttcgccaggccatcccatacagccagacgcagcccaacatgatcaccaacctgcctagccgacaggttgcacgcaaccgtcggggcgccaccttccagcagagcgccaacctgcgctcctctgaacaggacatcctcacctctgagctgcaagaagccgctcgtctcattggtattgccaaacgacccatcatttatgccggtcagggtatcctctcttcccccgagggtcccaagctgcttgccaagctcgccaaggagcacaacattcctgttaccaccacactccagggtctgggtgccttcgacgagctcgactctctcagtctgcacatgctcggaatgcacggttcggcgtacgccaaccttgccatgcaagatgctgatctcatcatcgcgcttggcgctcgattcgatgaccgtgttacgggtaagatcgacaagttcgctcctcatgcccgtgcggctgcgcttgagaaccgcggtggtatcatccactttgaagtcatgcccaagaacatcaacaaggtggtccaggccacctgcgctattgagggtgatgtcgtcaccaacctcggcaagctgatgccttacctcaaaagcaacgctcccgacaggagcgagtggcaccagctcatcaagtcgtggaaggaggcttaccccttcacctatgagccatctaaggaaggagagcttatgaagcctcaggaagtgattgaagcccttgatgctgccgttgccgatcagaaggacaacgtcatcatctcgactggtgtcggacagcaccagatgtgggctgcacagcactaccgctggcgtcatcctcgcacctgggtgtcgtctggtggtctcggaaccatgggtttcggcctgccctcgtgcattggtgccaaggtcgctgctccggaaaagattgtcgttgacatcgatggcgatgcgtccttttccatgactgctatggagctcgccacagcagcccagtacaacatcggcgtcaaggtgcttgtgctcaacaacgagttccagggaatggtggtgcagtggcaagatctcttctacgagaaacgttactctcacaccgagatgcacaaccctgattttgtcaagctcgccgaaagtatgggcgtcaaggccatccgctgtgacacgatcgctgaactgccagccaagatgaaggagttcatcgagtatgacaacaacaagcccgtcctgttcgaggcaagaatcaccaagaacgagcacgtctatccattctgccccgccaacgccggtttgcacgagctgattgttcatcccagtctcaagcctgtacctaagaggagctaa

SEQ ID NO: 137959 - protein, 736 aa, Ustilago maydis 521
MTSFAVQFARQQRHAFQAASKFSAASTSSIAVSAAASTSYASTPCATRAFSTARNNLSRSAQLARSQRSQLALTRHISTNQPKEQAAAAAQTAASVRPEPSPAFQQSPQNIAPLASRYDANALDESFVGLSGGAIFHEMMLRHNVKHVFGYPGGAILPVFDAIYNSKHFDFVLPRREDGAGHMAEGYARVTGKPGVILVTSGPGATNVITPMQDAMSDGTPLVVFCGQVATSAIGSDAFQEADVVGISRSCTKWNVMVKDIAELPRRINEAFKIATSGRPGPVLVDLPKDVTAGILRQAIPYSQTQPNMITNLPSRQVARNRRGATFQQSANLRSSEQDILTSELQEAARLIGIAKRPIIYAGQGILSSPEGPKLLAKLAKEHNIPVTTTLQGLGAFDELDSLSLHMLGMHGSAYANLAMQDADLIIALGARFDDRVTGKIDKFAPHARAAALENRGGIIHFEVMPKNINKVVQATCAIEGDVVTNLGKLMPYLKSNAPDRSEWHQLIKSWKEAYPFTYEPSKEGELMKPQEVIEALDAAVADQKDNVIISTGVGQHQMWAAQHYRWRHPRTWVSSGGLGTMGFGLPSCIGAKVAAPEKIVVDIDGDASFSMTAMELATAAQYNIGVKVLVLNNEFQGMVVQWQDLFYEKRYSHTEMHNPDFVKLAESMGVKAIRCDTIAELPAKMKEFIEYDNNKPVLFEARITKNEHVYPFCPANAGLHELIVHPSLKPVPKRS

SEQ ID NO: 137960 - DNA, 2157 bp, Cryptococcus neoformans var. neoformans B-3501A
  CDS (1)..(2157)
atgcttacacgccaatctcgtcttctcagacgcatccctcccccgaacgcagtccttcagtcgggcctccaaagaagacacaggtccactgaccgttattccaacaacatccacacgtcttccactcaaaacgccccagctcccgtgtacgatgctcccatccgcgagaaaggtatgactgtcgaggccaaggagcgtgtccgggcccatgccaggaaaattcaaagcagcgcttctactgctgctgcaagtcctgctgtcagacctcaacctgcccaacactttcaggcagcgcctcagcccatgcctgctaatacgcctcgttttgaaagcgacggccaggtaaagaacgggttggactactcatttatcggtctctccggtggccaaatcttccaagagatgatgcttcgtcacgacgtaaagcaggtctttggttatcccggcggcgccattcttcctgtctttgacgccatctataactcccctcacttcgatttcgttcttccaagacacgagcagggtgctggccacatggcggaaggctacgctcgcgtttctggcaaaccaggtgttgtccttgtcacttctggtcctggcgctaccaatgtcattaccccgatgcaagatgccttgagtgacggtgtgcctatggttgtcttctgtggtcaggtcgccacgaacctgattggttccgatgctttccaagaagccgatgtcgtcggtatttctagaagttgcacaaagtggaacgttatggtcaaagacatcgctgagctcccgagaagaatcaacgaagctttcaagattgctaccaccggccgtcctggccccgttttggttgatcttcccaaggatgtgaccgctgctatcctccggacaccaatccccgctaaatctgctcaacctggtcactctccttaccttccttccaatcctctcaacccgtcatctcaaccgtctgacccccttccaggcgatgccgatttgattacagaggctgcgcagatgatcaacaaggctaagagacccattatcttcgccggtaacggtgtcctttcgtcccctgaaggccctaaacttctcaaggagctctctgacaaggggaggattcctgtgaccaccactcttcagggtctgggagccttcgacgagagagacgagaagagtttacacatgatcggtatgcatgggtctgcatacgccaactttgcgatgcaagaggcggacgtgctgattgccttgggagtgagatttgatgatcgtgtgacagggaaggttgataccttcgctcccgctgccaaagctgctgctgctgagggccgaggtggtatcattcacttcgaaatccaacccaaaaacatcaataagattgttgaggcccagatccctgtgctcggcgatgtcgttgcctctctcgcagagcttgtccctcaaattgaagccgtcgaccgatctgcctggattggccgatgcaaggctactaaggaaaggtaccccttcacatacactcctagccaggagggccagaagttgaagccccaagaggttgttcaggagcttgaccgacaggctgaagctctcggcaaggagaagtttatcatctcgactggtgttggtcaacatcaaatgtgggcctgtcagtactaccgatggactgagcctcgttcgtgggtctcttctggtggtcttggtactatgggctttggtcttccctcagctatcggcgccaaggttgccgctcctgaaaagtatgtgatagacatcgacggtgatgcaagcttttccatgactgccatggagctagccactgcaagccagtacgacatcggtgtcaaggtattgttgttcaacaatgaattccaagggatggttgagcaatggcaagaccttttctacgaaaaccgatactcccatacccgaatgaccaaccccgacttcgttaagctctcagagtctatgggaaccaaaggactcaggtgcacgaagctcgaagatctgcctcgaatgatgaaggagttcctggagtacgatggcaagaggcctatcgtacttgaatgtctcgtttctagcgaacacgtatatcctatgattcctgcaggcaaagccttacatgagcagcttctccaccctcttcttcgaaacggctctgagtaa

SEQ ID NO: 137961 - protein, 718 aa, Cryptococcus neoformans var. neoformans B-3501A
MLTRQSRLLRRIPPPNAVLQSGLQRRHRSTDRYSNNIHTSSTQNAPAPVYDAPIREKGMTVEAKERVRAHARKIQSSASTAAASPAVRPQPAQHFQAAPQPMPANTPRFESDGQVKNGLDYSFIGLSGGQIFQEMMLRHDVKQVFGYPGGAILPVFDAIYNSPHFDFVLPRHEQGAGHMAEGYARVSGKPGVVLVTSGPGATNVITPMQDALSDGVPMVVFCGQVATNLIGSDAFQEADVVGISRSCTKWNVMVKDIAELPRRINEAFKIATTGRPGPVLVDLPKDVTAAILRTPIPAKSAQPGHSPYLPSNPLNPSSQPSDPLPGDADLITEAAQMINKAKRPIIFAGNGVLSSPEGPKLLKELSDKGRIPVTTTLQGLGAFDERDEKSLHMIGMHGSAYANFAMQEADVLIALGVRFDDRVTGKVDTFAPAAKAAAAEGRGGIIHFEIQPKNINKIVEAQIPVLGDVVASLAELVPQIEAVDRSAWIGRCKATKERYPFTYTPSQEGQKLKPQEVVQELDRQAEALGKEKFIISTGVGQHQMWACQYYRWTEPRSWVSSGGLGTMGFGLPSAIGAKVAAPEKYVIDIDGDASFSMTAMELATASQYDIGVKVLLFNNEFQGMVEQWQDLFYENRYSHTRMTNPDFVKLSESMGTKGLRCTKLEDLPRMMKEFLEYDGKRPIVLECLVSSEHVYPMIPAGKALHEQLLHPLLRNGSE

SEQ ID NO: 137962 - DNA, 1707 bp, Tribolium castaneum
  CDS (1)..(1707)
atggaagaaatcgatggaaacgcaatacttgcccaagccctcaaagaacagggcattgagtacgtcttcggcatctgcggctttccggtaatcgagctcagcatggccctccaaacggccggcatccactacatcggcatgcgtaacgagcaagccgcctgctacgccgctcaggccatcggctacctaaccggagtccccggcggcgtcctcgtcgtctccggccccggcctcctccacgtgtgcgccggcatggccaacgcccaagtcaactgctggcccgtggtggtcattggcggctcctgcccgcaggaccacgaaggcatcggcggcttccaggagtgctaccaagtggagctagcccgcccttactgcaaatactccgcccggccgcccagcctcgccctcatcccccagcacgtggaaaaggccgtgcgcttggccacatacggccgacccggagccgtctacttggactttcccgggaacctgctccaggcccgcaccactatcgacaaaatccccaagcagtacaccgcgcctgaaatcccggtgatttacccggagccgcggaaaatcgacgaggccgccgctttgatcatgggggcccagcgaccgctggtgatagtcgggaaaggggcggcgtatgcacgtgccgaggggcaagtccgggagttggtcgattcgaccaacttacccttcttggccacgccgatgggaaaaggggtggtttcggacaccaaccctaactccatccagcctgctagatccctagcgttgcaacgagccgacgttgttttgttattaggggctaggctgaactggatcttgcacttcgggcgccccccgaggtacaaccccaacgtcaaggtcatccaaattgatgtttgtgccgaagaattgaacaacagtgtcaaggcggctgtggccatccaatccgaccttaaaccagcagtggggcaattggtccaaagcctcaaaaggcgtaacttcacctttagcaaaaactccgattggtggaacgatcttaacaagaaaatccaagacaataagaggaaagtgcaagaaatgacgcttgatgtttccgaacctttgaactactatgccgttttccaccacttgcaagaagttttgccccagaaccccatcatagtgagcgagggcgccaataccatggatattgggcgagctgtgctaatgaacggcctaccacggcatagactggacgctggtacttttggtaccatgggtgtgggtctaggttttgccatcgcggcggccctttattgccgccattttgagcccaagaaaagggttatttgtgtggagggcgactcagcgtttggcttctcggggatggagattgagaccatggtacggtacaaactcccggtgattatagtcgtggtcaacaactcggggatttacggaggcttgccccaggaagtctacaaggatttgcaggagagtggagaagtcacaaaagtgacacctccgaccactctgttcacgagcacccattacgagaaaatgatgacgatgtttgggcgtcaggggtaccactgcacgaccattgccgagctgcagaaagccgtcaaggaagcactgaaggagaccgaaggtcccagcattatcaacgttattatcagtccttcagccgacagaaaaccgcaagatttcaactggttgactgaatcaaaattgtaa

SEQ ID NO: 137963 - protein, 568 aa, Tribolium castaneum
MEEIDGNAILAQALKEQGIEYVFGICGFPVIELSMALQTAGIHYIGMRNEQAACYAAQAIGYLTGVPGGVLVVSGPGLLHVCAGMANAQVNCWPVVVIGGSCPQDHEGIGGFQECYQVELARPYCKYSARPPSLALIPQHVEKAVRLATYGRPGAVYLDFPGNLLQARTTIDKIPKQYTAPEIPVIYPEPRKIDEAAALIMGAQRPLVIVGKGAAYARAEGQVRELVDSTNLPFLATPMGKGVVSDTNPNSIQPARSLALQRADVVLLLGARLNWILHFGRPPRYNPNVKVIQIDVCAEELNNSVKAAVAIQSDLKPAVGQLVQSLKRRNFTFSKNSDWWNDLNKKIQDNKRKVQEMTLDVSEPLNYYAVFHHLQEVLPQNPIIVSEGANTMDIGRAVLMNGLPRHRLDAGTFGTMGVGLGFAIAAALYCRHFEPKKRVICVEGDSAFGFSGMEIETMVRYKLPVIIVVVNNSGIYGGLPQEVYKDLQESGEVTKVTPPTTLFTSTHYEKMMTMFGRQGYHCTTIAELQKAVKEALKETEGPSIINVIISPSADRKPQDFNWLTESKL

SEQ ID NO: 137964 - DNA, 1629 bp, Clostridium thermocellum ATCC 27405
  CDS (1)..(1629): transl_table=11
atgaaactttcaggtgcgcaggcaattgtgaaagctttggaattggaaggcgtggaagttgttttcggttatccgggagctgcaatttgtcctttctatgatgcgctgatggaatctaaaataaggcatatactcaccaggcatgaacagggagctgcccatgccgccagcggatatgccagaacaacgggaagggttggtgtgtgtgttgccacatcaggaccgggagcaaccaaccttattacaggcattgctgacgcatacatggactcaataccgttggtggccatcaccgggcaggttaattcggagctgattggaagagacgtgttccaggaggctgacattaccggcgcgacggatcctttctgcaagcataattatttggtaaaaaacgcaaaggatttgccccgggttttaaaggaagccttttacatagcatccaccggaaggccgggccctgttcttatcgacgtacccatagacgtgcagacaaaagagattaattttgagtacccggaaagtgttgatataaaaggctacaagccaaatttaaaaggccattctcttcagataaaaaagattgctcaagctattgaaaaggcaaaaaaaccggttatttgcgccgggggaggagtgattaattccaatgcatccgaggagcttttaactctttcccgaaagtgcggcatacctgttgttacaactttgatgggtatcgggtccgtgccgtatgattatgagctcaatttaggaatgcttgggactcacggagtatatattgcgaattatgccgtaaacaatgctgaccttttgattatcatcggcgcgagggttgcggacagggctataagcaatccccagcaggttgcaaagagaaagcagatagttcatattgacatagatcctgcggagataggcaaaaatatcgatgtttcaataccggtggtaggagatgtgaagcaggtattaaaagagcttatagatatttcccaaaagggagatacggaagaatggataaagacaactcaaaaagaaagagaaaaacatgccgaaaaacctgaaccaaggcccggtataggttttgtgaatcccaaatatttgttgtctgttttgaccgggcttttgggtgatgatgatataattacaacagaagtgggacagaaccagatatgggctgcaaactattttggtgtcaaaaagccccggacctttataacgtccggaggtctgggtaccatgggatacgggcttcccgccgcggtgggggcaaaaattggctgtcccgaccgcaaagtggtatgtgtgggaggagacgggagcttccagatgaacatgcaggagcttggcaccatcaagcaaaacaggctgggagtgaaagtaatcttattcaacaactcaaggctgggaatggtaagggagctgcaaaagacaaagtactgcggccgttatttccaggtatttttggacgacaatcctgactttataaagttgtttgacgcttatggtttcaagggcaggagaatagacgacgattcccaggtggaagatgcgttgaaagagatgctgtcggacgacaaaccttaccttctcgagtgcaaaattgacccggaagaatcaacactatga

SEQ ID NO: 137965 - protein, 542 aa, Clostridium thermocellum ATCC 27405
MKLSGAQAIVKALELEGVEVVFGYPGAAICPFYDALMESKIRHILTRHEQGAAHAASGYARTTGRVGVCVATSGPGATNLITGIADAYMDSIPLVAITGQVNSELIGRDVFQEADITGATDPFCKHNYLVKNAKDLPRVLKEAFYIASTGRPGPVLIDVPIDVQTKEINFEYPESVDIKGYKPNLKGHSLQIKKIAQAIEKAKKPVICAGGGVINSNASEELLTLSRKCGIPVVTTLMGIGSVPYDYELNLGMLGTHGVYIANYAVNNADLLIIIGARVADRAISNPQQVAKRKQIVHIDIDPAEIGKNIDVSIPVVGDVKQVLKELIDISQKGDTEEWIKTTQKEREKHAEKPEPRPGIGFVNPKYLLSVLTGLLGDDDIITTEVGQNQIWAANYFGVKKPRTFITSGGLGTMGYGLPAAVGAKIGCPDRKVVCVGGDGSFQMNMQELGTIKQNRLGVKVILFNNSRLGMVRELQKTKYCGRYFQVFLDDNPDFIKLFDAYGFKGRRIDDDSQVEDALKEMLSDDKPYLLECKIDPEESTL

SEQ ID NO: 137966 - DNA, 1740 bp, Herminiimonas arsenicoxydans
  CDS (1)..(1740): transl_table=11
atgacctcggaaacaaacaatgccgtcggcgaagagctgaccggcgcagaaatcgtcgtacgctgtctggctgaagaaggtgtcgaacatgtgttcggttatcctggcggcgcagtactgtacatctacgacgccatctacaatcaagacaaattccagcacattctggtacgccatgaacaggcggccgtacatgctgccgatgcctattcccgcagttccaaaaaagtcggcgtgtctatcgtgacttccggccccggcgtgaccaatgcggtcacaggtctggcgactgcgtatatggattcgattccgatggtgatcatttcaggtcaggtgcctacgcacggcatcggtctggatgcattccaggaatgcgacaccgtcgggattacccgtccgtgcgtcaaacacaacttcctcgtcaaggacgtgagggatttggcggcgacgatgaaaaaagcattttatatcgccacgaccggccgtccaggtccggtgctggtcgatattcctaaagacgtgtctatgcacaaatgcatgttctcgtatccgaaggaagtcgagatgcgttcgtacaaaccggtcgacaagggacataccggtcagatccgcaaggcggtgcaactgttgctgcaagccgagcgtccgatgatctataccggcggcggcgtgattctggcgaatgcgtcggaagaactgacgcaactggtcgataagctcggtttcccttgcaccaacaccctgatgggtctgggttcgtatcgcgcatccagcgacaagtttgtcggcatgccaggcatgcacggcacttacgaagccaatatggcgatgcagcactcggacgtgatgattgcgatcggtgcgcgtttcgacgatcgcgtgatcggtaatccgaaacacttttcgtcgaatccgcgcaagatcattcatatcgatatcgatccgtcgtcgatttcgaagcgcgtcaaggttgacattcccatcgtcggcaacgtcaaggaagtgctggtggaattgctggcacaactcgatgctgctgaagccaagccgaacagcgttgcgctgtcgaactggtggaaacaaatcaatgagtggcgcaagcgcgattgcctgaagtttgaaaactcgacgaccgtcatcaagccgcaatcggtgatccagaaagtctgggacgtcaccaagggcgatgcctttgtgacctcagatgtcgggcagcatcaaatgtgggcagcacaatactatccattcgacaaaccacgccgctggatcaattccggtggtttgggcacgatgggtgtgggcttgccgtacgcgatgggcgtgcagatggccaatccggatgcgactgtcgcctgtatcactggtgaagcatcgatccagatgtgcatccaggagctcgcgacctgcaagcaatatcacctgacaccgaagatcattctgttgaacaatcgcttcctcggcatggtgcgtcagtggcagcaactggaatatggatcgcgctattccgaatcgtatatggattccctgcccgacttcgacaaactggtcgaagcgtatggtcacgtgggcatgacgattgaaaatcctgccgatgtcgatggtgccttgaaagaagcgtttgcaatgaaagaccgtttggtattcatgaatttcattactgatcaaaccgaaaacgtctggcccatggtcaaggcaggtcagggcttgactgaaatgctgctgggttcggaggatctgtga

SEQ ID NO: 137967 - protein, 579 aa, Herminiimonas arsenicoxydans
MTSETNNAVGEELTGAEIVVRCLAEEGVEHVFGYPGGAVLYIYDAIYNQDKFQHILVRHEQAAVHAADAYSRSSKKVGVSIVTSGPGVTNAVTGLATAYMDSIPMVIISGQVPTHGIGLDAFQECDTVGITRPCVKHNFLVKDVRDLAATMKKAFYIATTGRPGPVLVDIPKDVSMHKCMFSYPKEVEMRSYKPVDKGHTGQIRKAVQLLLQAERPMIYTGGGVILANASEELTQLVDKLGFPCTNTLMGLGSYRASSDKFVGMPGMHGTYEANMAMQHSDVMIAIGARFDDRVIGNPKHFSSNPRKIIHIDIDPSSISKRVKVDIPIVGNVKEVLVELLAQLDAAEAKPNSVALSNWWKQINEWRKRDCLKFENSTTVIKPQSVIQKVWDVTKGDAFVTSDVGQHQMWAAQYYPFDKPRRWINSGGLGTMGVGLPYAMGVQMANPDATVACITGEASIQMCIQELATCKQYHLTPKIILLNNRFLGMVRQWQQLEYGSRYSESYMDSLPDFDKLVEAYGHVGMTIENPADVDGALKEAFAMKDRLVFMNFITDQTENVWPMVKAGQGLTEMLLGSEDL

SEQ ID NO: 137968 - DNA, 1689 bp, Thermus thermophilus HB27
  CDS (1)..(1689): transl_table=11
atgaagggagcggaggcacttttaagggcgctggagcgggaaggggtggaggtgatcttcggccacccgggcggggcgatcatgcccacctacgacgccctctacgacagccccatccgccacatcctggtgcggcacgagcagggcggggtccatgcggccaccgcctacgcccgcgcctcaggccgggtgggggtggtcatggccacctcgggccccggggccctgaacctggtcacgggcctcgcggacgccatgatggactccaccccggtggtggccatcaccgggaacgtcccccgggccctcatcggcaccgacgccttccaggaggcggacgtcaccggggtcaccatgcccatcaccaagcacaactacctggtccaggacgtgaacgagatcccccgggtggtgaaggaggccttccacatcgccgccaccggccgccccggccccgtgctcattgacatccccaaggacgtgcagcttgcggagttcacggggagctttgacgtgaagctggacctccccgggtacaagcccaccctgaagggccaccccaagcagattgagagggccctggacgccctggagaaggcggagcgccccgtcctcatggtggggggtggggcgcagcacgctcacgccgagcttctcgccttcgccgagaagacggggcttcccgtgatcaccaccctcatgggcctcggggccttccccgggaaccaccccttgtggctcgggatgccggggatgcacggcaccgtggccgccaaccgggccatccaccacgcggacgtgatcctcgccatcggcctccgctttgacgaccgggtcacgggcaaggtctcccgcttcgccccccacgcccacaccatcatccacgtggacatagaccccgccgagatcggcaaggtggtgcgcacccacatccccatcgtgggggactcgaggctcgtcctcaaggagctcctcaagggggcgaaggccttgaggcttgccgcctggtggcgggagctcgaggagtggcgcacccgctaccccttgcgctacaggcccaagccccacctgcagagccaggaggtgatccgggccttctacgaggccacgggaggacacgccatcgtcaccacgggggtggggcagcaccagatgttcgccgcccagttcttccccgtgacgaggccgaggagcttcctcaccagtgggggcctcggcaccatgggggtggggcttcccttcgccatcggggccaagatcgcccgccctgaggagctcgtcattgactttgacggggacggctccttccagatgaccctgcaggagctggccacggtggtgaagtacaagctggacgtgaaggtcgtcatcctgaacaacggctacctgggcatggtgcgccagtggcaggacctcttccacgccaagcgctacagcgaggtctacctggcggactccaaccccgacttcgcccgcctcgccgaggcctacgggatcaagggggtgagggtggagcggaaggaggacctcatgaagggggtggaggccgtcctgaacgccgacggccccgtggtggccgagttcaaggtctaccacgaggagggggtcttccccatgatccccgccgggggcgcggccgaggacatgatcctcgagcctcccgaggagaaggaggaggtgggggcgtga

SEQ ID NO: 137969 - protein, 562 aa, Thermus thermophilus HB27
MKGAEALLRALEREGVEVIFGHPGGAIMPTYDALYDSPIRHILVRHEQGGVHAATAYARASGRVGVVMATSGPGALNLVTGLADAMMDSTPVVAITGNVPRALIGTDAFQEADVTGVTMPITKHNYLVQDVNEIPRVVKEAFHIAATGRPGPVLIDIPKDVQLAEFTGSFDVKLDLPGYKPTLKGHPKQIERALDALEKAERPVLMVGGGAQHAHAELLAFAEKTGLPVITTLMGLGAFPGNHPLWLGMPGMHGTVAANRAIHHADVILAIGLRFDDRVTGKVSRFAPHAHTIIHVDIDPAEIGKVVRTHIPIVGDSRLVLKELLKGAKALRLAAWWRELEEWRTRYPLRYRPKPHLQSQEVIRAFYEATGGHAIVTTGVGQHQMFAAQFFPVTRPRSFLTSGGLGTMGVGLPFAIGAKIARPEELVIDFDGDGSFQMTLQELATVVKYKLDVKVVILNNGYLGMVRQWQDLFHAKRYSEVYLADSNPDFARLAEAYGIKGVRVERKEDLMKGVEAVLNADGPVVAEFKVYHEEGVFPMIPAGGAAEDMILEPPEEKEEVGA

SEQ ID NO: 137970 - DNA, 1722 bp, Listeria monocytogenes str. 4b F2365
  CDS (1)..(1722): transl_table=11
gtgattgatacgacgaagacaaatgaaaaagcgacaaaaaagcaaaataaaagtggtgcggaacttttaattgactccttgaaaaagcaacaagtcgagatgatttttggctatccgggtggtgcggttctccctctctacgatgctttttacgactgtgatattccgcatattctaacaagacacgagcaaggagcgattcatgctgcggaaggttatgcacgtgttactgggaaacccggtgtggtagttgtaacaagtggacctggggcgacaaatgtattaactggtattgcggatgcaatgagtgattcgattccattagtgattttcaccggacaagttcatacgcctggtatcggaaaagatgccttccaagaagccgatatgattgggctaaccattccaattactaaatataattaccaagtgcgtgatgttcgtgacttaccaaaaattgtcaatgaagcttttcatattgcaagcactggtcgtaaaggtcctgttgtcgtggatattccaaaagacatggggattatccaaacagagtctgtacgaccagatacgattgatctgccgggttatcaaccgacttattcaccgaacccacttcaactggaaaaactaatgcaatctctttctgccgcaagcaagccactaatacttgccggagctggcgtcaatcatgcgagagctacagctgaattactagaattcgctgaacgctatcaaattccaatcgtgaatacgctgcttggtctaggaagtttcccgcaaagtcatgatttgttccttggtatgggcggcatgcacggttcatacgcggcaaacatggcacttacagattgcgatttgctcattaattttggttcccgcttcgatgacaggcttgccagtgcgccaaaagaatttgccacaaaagcaacgattgcacatatcgatattgatcctgctgaaattggcaaaattatcgaaacacaaattccgattgtagctgatattaacgaaacacttacacaactactacaaatggaacttccggttcatcctgatacatcccattggtacaaattaaatatgacccgtaaaaaccgtcatccttttaattttgatagaacgaaaaaagcagaaattaaaccacagcgtgtgattgagctaattggtgaaattacgcaaggtgaagcgcttgtttctaccgatgttggccagcatcaaatgtgggcggcacagttttatccattccaatttgatcatcaaattattacgagtggcgggcttggcacaatgggctttggctttccagcagctgttggtgcgcaacttgctttcccagataaaacggtagtcgccattgttggggacggtggtttccaaatgaccaatcaagaactagcgattttaaatgattaccaaatcaatgtgaaaacggtcattatcaataacggttcgctcggcatggttcgtcagtggcaagaaaaattccacggcgaaagatattctcattcgattttcacgagccaaccagattttgttaaactagctgaagcttacggtgtcaaaggggttcgcttgacgaatcctgaaacgctagaaaaagatctaagaaaagccttcgctcaccctggaccgattgtcattgacgttcatgtggccaaagatgagctagtacttccaatggttccaagcggcaaaccaaatcaccaaatggaaggagtggaataa

SEQ ID NO: 137971 - protein, 573 aa, Listeria monocytogenes str. 4b F2365
MIDTTKTNEKATKKQNKSGAELLIDSLKKQQVEMIFGYPGGAVLPLYDAFYDCDIPHILTRHEQGAIHAAEGYARVTGKPGVVVVTSGPGATNVLTGIADAMSDSIPLVIFTGQVHTPGIGKDAFQEADMIGLTIPITKYNYQVRDVRDLPKIVNEAFHIASTGRKGPVVVDIPKDMGIIQTESVRPDTIDLPGYQPTYSPNPLQLEKLMQSLSAASKPLILAGAGVNHARATAELLEFAERYQIPIVNTLLGLGSFPQSHDLFLGMGGMHGSYAANMALTDCDLLINFGSRFDDRLASAPKEFATKATIAHIDIDPAEIGKIIETQIPIVADINETLTQLLQMELPVHPDTSHWYKLNMTRKNRHPFNFDRTKKAEIKPQRVIELIGEITQGEALVSTDVGQHQMWAAQFYPFQFDHQIITSGGLGTMGFGFPAAVGAQLAFPDKTVVAIVGDGGFQMTNQELAILNDYQINVKTVIINNGSLGMVRQWQEKFHGERYSHSIFTSQPDFVKLAEAYGVKGVRLTNPETLEKDLRKAFAHPGPIVIDVHVAKDELVLPMVPSGKPNHQMEGVE

SEQ ID NO: 137972 - DNA, 1725 bp, Acinetobacter sp. ADP1
  CDS (1)..(1725): transl_table=11
ttggaacttttatctggtggtgaaatgctcgttcgcgcactcgcggatgagggcgttgagcacgtttttggatacccaggcggcgcagttttacatatttatgatgcgctttttcaacaagacaaaatcaatcattatcttgtacgtcatgagcaagctgctggtcatatggctgatgcttattcacgtgtcacaggtaaaacgggtgttgtgcttgttacgtctggcccaggggcaaccaataccgtaactccaattgcaactgcatatatggactcgattccgatggtcatcttatcgggtcaggttgcttcacatctgattggtgaagatgcctttcaggaaacagatatggtcggaatctccagaccaatcgtaaagcatagtttccaagtccgccatgcaagcgaaattcctgcaattattaaaaaagcattttatatcgcatcctctggccgtcctggccctgtcgtgattgatattccaaaggatgcaaccaatccagcagaaaagtttgcctatgaatatccagaaaaggtaaaactacgctcttatcaaccgccttcgcgtggccattcgggtcaaattcgtaaggctgtcgacgagcttctgactgcaaaacgtccaatgatctatacgggcggtggtgtagtgcagggtaatgcctctgaattgctgactgagcttgcccatctgctgggtttccctgtaaccaataccttgatgggactgggtggctttccaggggatgatccgcaatttgtaggcatgcttggtatgcatggtacttatgaagccaatatggcgatgcataatgctgatgtgatcttggcaattggtgcgcgttttgatgaccgtgtgaccaataatcctgcgaaattttgtcaaaatgccaaagtcatccatgtggatatcgatccagctgcgatttctaaaaccatcatggcgcatatcccaattgtaggtgctgttcagcctgttcttcaggaaatgttgacacagttaaagcaattgaatgtttctaagccaaatccagaagcgattagcgcgtggtgggatcagattaatgaatggcgtaaagttcatggtctgcaatatcaagctggtcaggatggcattatgaagcctcaacaagtggttgaagctttatataaagcaacagatggcaatgcgattatcacctcggatgtagggcagcatcaaatgtttggcgcgctgtattacaagtacaagcgtccgcgtcagtggatcaactcgggtggtcttggcaccatgggcgttggtttgccgtatgcgatggcagccaaactggcttgtccagaccaacaagtcgtctgtatcacgggtgaagcctcaattcagatgtgtattcaggaattatcaacctgtaagcaatatggcttaaacgttaagattctgtgcctcaataaccgtgcactgggaatggtcaaacagtggcaagacatgaactatgaaggacgtcattcaagttcttatgtagaatcattgcctgattttgccaaattgatggaagcttatggccatgtcggaatccagattgaccataccgatgagcttgagtctaaactcgcagaagcgatggccattaatgataaatgtgtatttatcaatgtgatggttgatcgtactgaacatgtgtatccaatgttgattgctgggcaatcgatgaaagatatgtggttagggaaaggggagcgtacataa

SEQ ID NO: 137973 - protein, 574 aa, Acinetobacter sp. ADP1
MELLSGGEMLVRALADEGVEHVFGYPGGAVLHIYDALFQQDKINHYLVRHEQAAGHMADAYSRVTGKTGVVLVTSGPGATNTVTPIATAYMDSIPMVILSGQVASHLIGEDAFQETDMVGISRPIVKHSFQVRHASEIPAIIKKAFYIASSGRPGPVVIDIPKDATNPAEKFAYEYPEKVKLRSYQPPSRGHSGQIRKAVDELLTAKRPMIYTGGGVVQGNASELLTELAHLLGFPVTNTLMGLGGFPGDDPQFVGMLGMHGTYEANMAMHNADVILAIGARFDDRVTNNPAKFCQNAKVIHVDIDPAAISKTIMAHIPIVGAVQPVLQEMLTQLKQLNVSKPNPEAISAWWDQINEWRKVHGLQYQAGQDGIMKPQQVVEALYKATDGNAIITSDVGQHQMFGALYYKYKRPRQWINSGGLGTMGVGLPYAMAAKLACPDQQVVCITGEASIQMCIQELSTCKQYGLNVKILCLNNRALGMVKQWQDMNYEGRHSSSYVESLPDFAKLMEAYGHVGIQIDHTDELESKLAEAMAINDKCVFINVMVDRTEHVYPMLIAGQSMKDMWLGKGERT

SEQ ID NO: 137974 - DNA, 1719 bp, Erwinia carotovora subsp. atroseptica SCRI1043
  CDS (1)..(1719): transl_table=11
atggagatgttgtcaggcgccgaaatggtggtccgatcgttgatcgatcagggcgtaaaacatgtgttcggttatccgggcggtgcggtgctggatatttacgacgccctgcatacggttggcggtatcgaacatattttggtgcggcatgagcaaggtgcggtacatatggcggatggctatgcgcgtgcgacgggtgaggtcggcgtcgtgctggtcacctccggtcctggtgcgacaaacgccatcaccggtatcgctactgcgtatatggactccattcctatggtggtgttgtccggtcaggtggccacctcgctgattggctatgattcctttcaggaatgcgacacggtgggaatttcccgccctatcgtaaagcatagctttctggtcaagaaagctgaagatgtcccgacgatcctgaaaaaagccttttatctggcatcaaccggacgtccggggccggtggtcgtcgatctaccaaaagacatcatgagtccggcgaataaactgccgtacgtttatcccgaaagcgtcagcatgcgctcctatagcccaacggttcaagggcacaaaggtcagattcgccgtgcgttgcaaaccctgctggcggcagaaaagccgattatctacagtggtggtggcgtgattaacgcagagtgtcacgaagagctgctgacgcttgcggaaaaactgaacctgccagtgacaacctccctaatggggctgggcggattccctggaacgcaccgtcagtgcctcggcatgctgggaatgcacgggacgtatgaagccaacctagctatgcataacgctgatgtgattttcgccgtaggggtgcgcttcgacgaccgtacgacgaacaatctggcgaagtactgtccgaatgcgacggtattgcatattgatatcgatcctgcgtcgatttccaaaacggtaaacgcggatatccctatcgttggcgatgccaaacaggtactaagcctgatgctggagttgctggcacaggatggcgcacagcagcagtttgatgcgctacgtgactggtggcaaggtatcgagcagtggcgtgggcgtcactgcctgaaatacaacaccgaaagcgacaagattaaaccgcaggcggtgattgaaacgctgcatcggctgaccgaaggtaaagcgtatgtggcatcggatgtcggccagcatcagatgtttgctgcactgtattatcctttcgatttgccgcgccgttgggtgaactccggtggactgggcacgatgggctttggcttgcctgcggcattgggcattaagctcgcgctaccggaagaaacggtaatttgcgtaacgggtgacggcagcattcagatgaatattcaggagctctctacagcactgcaatatgatctgccggttgtggtgatcaacctgaacaaccgtttcctcggcatggtgaagcagtggcaggacatgatttattctggccgccattccagttcttatatggaatcgttaccggatttcgtcaagctggctgaagcgtacggtcacgtcgggatttctatcgatacgccggacgaactggaaagtaagctgtctcaagcactggcgcagaaagatcgtctggtatttgttgatatcaacatcgatagcagcgagcatgtttaccctatgcagattcgcggcggggcgatggatgaaatgtggttgagcaaaacggagaggacctga

SEQ ID NO: 137975 - protein, 572 aa, Erwinia carotovora subsp. atroseptica SCRI1043
MEMLSGAEMVVRSLIDQGVKHVFGYPGGAVLDIYDALHTVGGIEHILVRHEQGAVHMADGYARATGEVGVVLVTSGPGATNAITGIATAYMDSIPMVVLSGQVATSLIGYDSFQECDTVGISRPIVKHSFLVKKAEDVPTILKKAFYLASTGRPGPVVVDLPKDIMSPANKLPYVYPESVSMRSYSPTVQGHKGQIRRALQTLLAAEKPIIYSGGGVINAECHEELLTLAEKLNLPVTTSLMGLGGFPGTHRQCLGMLGMHGTYEANLAMHNADVIFAVGVRFDDRTTNNLAKYCPNATVLHIDIDPASISKTVNADIPIVGDAKQVLSLMLELLAQDGAQQQFDALRDWWQGIEQWRGRHCLKYNTESDKIKPQAVIETLHRLTEGKAYVASDVGQHQMFAALYYPFDLPRRWVNSGGLGTMGFGLPAALGIKLALPEETVICVTGDGSIQMNIQELSTALQYDLPVVVINLNNRFLGMVKQWQDMIYSGRHSSSYMESLPDFVKLAEAYGHVGISIDTPDELESKLSQALAQKDRLVFVDINIDSSEHVYPMQIRGGAMDEMWLSKTERT

SEQ ID NO: 137976 - DNA, 1821 bp, Leifsonia xyli subsp. xyli str. CTCB07
  CDS (1)..(1821): transl_table=11
atgtcctcggatgcgaaccacacgaccgcgtcgcccagcacggtggcgctctccgcgtcgaccggcacagcggcgcccgaacaactgaccggctccgagtcggtcgtccgcaccctcgagctcctcggcgtcaccgatgtcttcggactccccggcggcgccatcctgccgatctacgacgcgatcatggactcggacacgatccgtcacatcctggtccggcacgaacagggcggtggccacgcggccgaagggtacgctgccgcctcgaacaaggtcggcgtcgcaatggcgacctccggccccggtgcgacgaacctcgtcacggcgatcatggacgcccacatggactcggttccggtggtgttcatcaccggccaggtcttctccacgctgatgggcacggacgccttccaggaggcggacatcgtcggcatcaccatgccgatcaccaagcactccttcctcgtcaagagcgccgaggagatcccggtgacgatcgcggcggcgtaccacatcgccggcaccggccgtcccggcccggtgctggtcgacatcaccaaagacgcccagcagagcagagcaccgttcgtgtggccgcttaaggtcgacctgccgggctaccggccggtcaccaaggcacatggcaaacagatcctcgcggcggcgcagctgcttgccgaggccaagaagcccatcctgtacgtgggcgggggcgtcatccgctcacgcgcctcgcaggagctgctcgagctcgccgagaccaccggcttgccggtcacgaccacgctcatggcccgcggggccttccccgacactcatgcgcagcatctggggatgccggggatgcacgggacggtcccggccgtcctcgccctgcaggagtcggatctcatcgtgtcgctcggcgcgcggttcgacgaccgtgtgaccggcaaaaccagcctgttcgctcctcacgcgaagatcgtccacgtcgacgtcgaccccgccgagatctccaagatccgcgtcgccgacgtccccatcgtcggcgacgccaaagaggtcatcgtcggtctgaccgtggcctaccgggacgtcgctaaggacggcgaacccgacctcgccgagtggtggacctacctgaacggcctccgtgaggagttccccctcgggttcacgcccaccagcgacggcctcctggccccgcagcacatcatccagcgcatcggcgagctgacgggaccggaggcgatctacgccgccggtgtcggccagcaccagatgtgggccgcgcagttcatcaagtacgagcgtcccaactcgtggctgaactcgggcggcgcgggcaccatgggctactccgtgcctgccgcgatgggagcgaaggtcgcccagcccgactgcgtcgtgtgggcgatcgacggcgacggttgcttccagatgaccaaccaggagctcgccacctgcacgatcaacgacatcccgatcaaagtggcgatcatcaacaactcgtcgctcgggatggtgcggcagtggcagacgctgttctacgacggccgctactccaacaccgacctcaacaccgggcacgacactgtgcgggtccctgatttcgtgactctggccgaggcgtacggcgctctcggcatccgcgtcacgaaagaagacgaggtggacgacgccatcaggctcgccctcgagacgaacgaccgcccggtcgtcatcgacttcgtcgtcagcgccgacgcgatggtgtggccgatggtccctcagggcgtcagcaacagctatgtccagtacgcccgcgaccacagcccgtccttcggagaggagtga

SEQ ID NO: 137977 - protein, 606 aa, Leifsonia xyli subsp. xyli str. CTCB07
MSSDANHTTASPSTVALSASTGTAAPEQLTGSESVVRTLELLGVTDVFGLPGGAILPIYDAIMDSDTIRHILVRHEQGGGHAAEGYAAASNKVGVAMATSGPGATNLVTAIMDAHMDSVPVVFITGQVFSTLMGTDAFQEADIVGITMPITKHSFLVKSAEEIPVTIAAAYHIAGTGRPGPVLVDITKDAQQSRAPFVWPLKVDLPGYRPVTKAHGKQILAAAQLLAEAKKPILYVGGGVIRSRASQELLELAETTGLPVTTTLMARGAFPDTHAQHLGMPGMHGTVPAVLALQESDLIVSLGARFDDRVTGKTSLFAPHAKIVHVDVDPAEISKIRVADVPIVGDAKEVIVGLTVAYRDVAKDGEPDLAEWWTYLNGLREEFPLGFTPTSDGLLAPQHIIQRIGELTGPEAIYAAGVGQHQMWAAQFIKYERPNSWLNSGGAGTMGYSVPAAMGAKVAQPDCVVWAIDGDGCFQMTNQELATCTINDIPIKVAIINNSSLGMVRQWQTLFYDGRYSNTDLNTGHDTVRVPDFVTLAEAYGALGIRVTKEDEVDDAIRLALETNDRPVVIDFVVSADAMVWPMVPQGVSNSYVQYARDHSPSFGEE

SEQ ID NO: 137978 - DNA, 1725 bp, Mannheimia succiniciproducens MBEL55E
  CDS (1)..(1725): transl_table=11
gtgaaaatgaaaaaattatctggtgcggaaatggttgtgcagtcattgcgtgatcaaggcgttaaatatttgttcggctatccgggcggttcggttttagacatttatgacgcgattcatactttaggcggaatcgaacacgtactggttcgtcatgaacaagccgcggtgcacatggcggacggttacgcccgttcaaccggtgaggtggggtgcgtattagtaacttcaggcccgggttcaactaacgcggtaacaggtattttaaccgcttataccgattcggtgcctctcgttattattaccggtcaggtgcgttccaatttaattggtaccgatgctttccaggaatgcgacactatcggcttaacccgtccggttgttaaacacagttttatggttaaacatgcggaagatattccggaaaccattaaaaaagcgttttatattgcgtcttccggtcgcccgggtccggtagttattgatattccgaaagatgtggtcaaccctgccaataaatatacttacgaatatccgaaagaagtaagcttgcgttcttataacccgaatgtacaaggacacaaaggccaaatcaaaaaagcgttgaaagcgttattggtggcgaaaaaaccggtattatttatcggcggcggtgtaattatcggcaacagcagcgaaaaattaacccaatttgcccagttgcttaatttgccggtgacttcctcattaatgggcttgggcggttatcccggcacggataaacaattcctcggtatgctgggtatgcacggaacttaccaagccaacatggcaatgcacaatgcggatttaattttaggtatcggcgtacgttttgacgaccgtaccaccaataatgtagagaaatattgtccgcatgcaaaagtgatccacgtggatatcgacccgacatccatttctaaaaatatcgcggcggatattccgattgtaggtagcgtggataatgtattaaccgaatttttatctttactggaagatgacaatttatcaaaatcacaatcggatttaacggaatggtggaaacaaattgatgaatggaaggcgaaaaaatgtctggaattcgaccgcacttctcaagcgattaaaccgcaagccgtggttgaagcgatttatcgtttaaccaaaggtgaggcttatattgcttccgatgtaggccagcaccaaatgtttgccgcattgcattatccgtttgataagcctcgtcattggatcaattccggcggcgcaggtacaatgggattcggtttgccggcggcgatcgggacgaaattcgcccatccggacagccgggttgtgtgtattaccggtgacggtagtattcaaatgaatattcaagagctttcaaccgcaaaacaatatggtacgccgattgtgattgtaagtctgaacaatcgcttcttaggcatggtaaaacaatggcaggatttgatttattcgggccgtcattcacaggtttatatgaattcgttacctgattttgccaaattggcggaagcttacggtcatgtagggattcaaatcaatacggcagacgagttagaggaaaaactgactcaagcctttgcggttaaagataaattagtgtttgtcgatgtacttgtggatgccacggaaaatgtatatccaatgcaaattacaggcggcggaatgaatgaaatgcttttaggtaaaccagcggagaaataa

SEQ ID NO: 137979 - protein, 574 aa, Mannheimia succiniciproducens MBEL55E
MKMKKLSGAEMVVQSLRDQGVKYLFGYPGGSVLDIYDAIHTLGGIEHVLVRHEQAAVHMADGYARSTGEVGCVLVTSGPGSTNAVTGILTAYTDSVPLVIITGQVRSNLIGTDAFQECDTIGLTRPVVKHSFMVKHAEDIPETIKKAFYIASSGRPGPVVIDIPKDVVNPANKYTYEYPKEVSLRSYNPNVQGHKGQIKKALKALLVAKKPVLFIGGGVIIGNSSEKLTQFAQLLNLPVTSSLMGLGGYPGTDKQFLGMLGMHGTYQANMAMHNADLILGIGVRFDDRTTNNVEKYCPHAKVIHVDIDPTSISKNIAADIPIVGSVDNVLTEFLSLLEDDNLSKSQSDLTEWWKQIDEWKAKKCLEFDRTSQAIKPQAVVEAIYRLTKGEAYIASDVGQHQMFAALHYPFDKPRHWINSGGAGTMGFGLPAAIGTKFAHPDSRVVCITGDGSIQMNIQELSTAKQYGTPIVIVSLNNRFLGMVKQWQDLIYSGRHSQVYMNSLPDFAKLAEAYGHVGIQINTADELEEKLTQAFAVKDKLVFVDVLVDATENVYPMQITGGGMNEMLLGKPAEK

SEQ ID NO: 137980 - DNA, 1731 bp, Methylococcus capsulatus str. Bath
  CDS (1)..(1731): transl_table=11
gtggaactcagcggtgcggaaatcgtcgtccaatgccttaaagacgagggtgtggaatacatcttcggctatccgggcggtgcagtactgcatatttacgatgcgctgttcaaacaggacgatgtaaagcacatcctggtgcgccacgaacagggcgcgacccacgcggcggacggttacgcccgctccaccggcaaacccggcgtggtcctggtgacttcgggccccggtgcgaccaatgccgtcaccggcatcgccaccgcctacatggattcgatcccgctggtggtcatcacgggccaggtgcccctgcccgtcatcggcagcgacgccttccaggaggccgacatcgtcggtatcactcggccgtgcgtgaagcacaacttcctggtcaaggacatccacaagctggccgaaactttcaagaaggccttctacatcgcgaccacgggacgcccggggcccgtcgtgatcgacatccccaaggatgtcaccgatccgaacgtcaagattccctacgagtatccacgcagcgtatcgctgaggtcctacaatccttcggtgaaggggcatccgatccagatcaagaaggcggtggagctcatgctgtcggctcgccgcccgatgatctacagcggcggcggcgtcatcctcggcaatgccgcggacgaactgaccacgctgacgcggctgctcgacttccccatcaccaacaccctgatgggtctgggcggctaccccgccaccgaccgccagttcgtcggcatgctgggcatgcacggcacctacgaggccaacatggcgatgcacgactgcgacgtgctgctcgccgtgggcgcccgcttcgatgaccgcgtcaccggcaagatcgccgaattctgtcccggcgccaaaatcatccacatcgacgtcgacccggcctcgatctccaaaacggtcaaagtggacatccccatcgtcggcgacgtcgcgccggtgctggccgacatgatcgagctgatcaagacttccggccgcacccccgatgccgaggcgctgaaggcctggtgggcaaggatcgaccagtggcgcagcctcgactgcctgcgctacgaccgcagcagcgacaggatcaagccgcagttcgtcatcgaacagttatgggaactgacgcggggcgacgccttcgtggcctccgacgtcggtcagcaccagatgtgggcggcccaatactacaaattcgacaagccgcgccgctgggtcaattccggcggcctgggcacgatgggcttcggactgccggccgccatcggcatcaaattggcgcatccgcaggaagaggtcatctgcatcaccggcgaagcgagcatccagatgtgcatccaggaactggccaccgccttgcagtaccgcaccccggtcaagatcgtcaacctgaacaacggctacatgggcatggtgcgacaatggcaggaattcatctatgaaagccgctattcgcattcctacctggagactctgccggacttcgtcaaactggcggaggcctacggtcacgtcggcatgcgcatcgacagaccggccgacgtgcgcccggccctggaagaagccctgaaactcaaggaccgcaccgtgttcatggatttcctcaccgatcccaccgaaaacgtctaccccatggtcgaatccggcaaggcccatcacgagatgcggctggcgcccggtactgcggttgacagggagctcgcctga

SEQ ID NO: 137981 - protein, 576 aa, Methylococcus capsulatus str. Bath
MELSGAEIVVQCLKDEGVEYIFGYPGGAVLHIYDALFKQDDVKHILVRHEQGATHAADGYARSTGKPGVVLVTSGPGATNAVTGIATAYMDSIPLVVITGQVPLPVIGSDAFQEADIVGITRPCVKHNFLVKDIHKLAETFKKAFYIATTGRPGPVVIDIPKDVTDPNVKIPYEYPRSVSLRSYNPSVKGHPIQIKKAVELMLSARRPMIYSGGGVILGNAADELTTLTRLLDFPITNTLMGLGGYPATDRQFVGMLGMHGTYEANMAMHDCDVLLAVGARFDDRVTGKIAEFCPGAKIIHIDVDPASISKTVKVDIPIVGDVAPVLADMIELIKTSGRTPDAEALKAWWARIDQWRSLDCLRYDRSSDRIKPQFVIEQLWELTRGDAFVASDVGQHQMWAAQYYKFDKPRRWVNSGGLGTMGFGLPAAIGIKLAHPQEEVICITGEASIQMCIQELATALQYRTPVKIVNLNNGYMGMVRQWQEFIYESRYSHSYLETLPDFVKLAEAYGHVGMRIDRPADVRPALEEALKLKDRTVFMDFLTDPTENVYPMVESGKAHHEMRLAPGTAVDRELA

SEQ ID NO: 137982 - DNA, 1752 bp, Silicibacter pomeroyi DSS-3
  CDS (1)..(1752): transl_table=11
atgacacgtgagatgaccggcgcaaagatggtggtccaggccctcaaggatcagggcgtggatacggtattcggctatccgggcggcgccgtcctgccgatctatgacgagatctttctgcaaaacgacatccgccacatcctggtgcggcacgaacagggcgcagtgcacgcggccgaaggatatgcccgctcgaccggcaagcccggcgttgtgctggtgacctcgggccccggcgccaccaacgcggtgaccggtctgaccgatgcgcttctggactcgatcccgctggtggtgctgaccggacaggtgccgaccttcatgatcggctcggacgccttccaggaagccgacaccgtgggtatcacccgcccctgcaccaagcataactggctggtcaaggaaaccgacaagctggccaagaccatccacgaggggttccacgtggccacctcggggcggcccggcccggtgctgatcgacatccccaaggacgtgcagttcgcaaccggccagtaccagggccccaagggcctgacatcccattacaacccgcccgtcaagggcgacatggaggagatcaccgagctggtcgccgccatcgaaaaggccaagcgcccggtgttctataccggtggtggcgtgatcaactcgggtccggcggccagccagctgctgcgcgagctggtggatgcgaccggctttccgatcacctcgaccctgatgggtctgggcgcctacccggcctcgggcaagaactggctgggcatgctgggcatgcacgggctttacgaggcgaacatggccatgcatggctgtgacctgatgatcaatatcggcgcccggttcgacgaccggatcaccggccgcatcgacgcgttcagcccgaaatcgaagaaggcccatatcgacatcgaccccagctcgatcaacaaggtgatccgggtcgatatccccatcgtcggcgatgtgggtcatgtgctggaagacatcctgaaggtctggaaagcgcgcgggcgcaagaccaatgccgaagcagtgcagaaatggcaggcccagatcaccgaatggcgcaaggtgagctgcctgacctacaagccctcggaaaagaccatcaagccgcaatacgcgctggagcgtctggaggcgctgaccaaggggcgtgaccgctatgtctgtaccgaggtcggccagcaccagatgtgggcggcgcaatacctgggctttgaggacccgaaccgttggatgacctccggtggcctgggcaccatgggctatggcttccccgcctcgatcggcgtgcagatggcgcatcccgacgctctggtgatcaacgtggcgggagaggcgtcgtggctgatgaacatgcaggaaatgggcaccgccgtgcagtaccgtctgccggtgaaacagttcatcctcaacaacgaacgtctgggcatggtgcgccagtggcaggaactgctgcatggcgagcgctattcgcaatcctggtccgaggcgctgcccgatttcgtgaaactggccgaggcttttggcgccaagggcatcctgtgcaaggaccccgccgatctggacgatgcgatcatggagatgctgaactatgacgggccggtgatcttcgattgccttgtcgaaaagcacgagaactgcttcccgatgatcccgtcgggcaaggcgcataacgagatgctgctgggcgatgccgagacccagggcgtgatccaggccggcggcgcggtcctcgtctga

SEQ ID NO: 137983 - protein, 583 aa, Silicibacter pomeroyi DSS-3
MTREMTGAKMVVQALKDQGVDTVFGYPGGAVLPIYDEIFLQNDIRHILVRHEQGAVHAAEGYARSTGKPGVVLVTSGPGATNAVTGLTDALLDSIPLVVLTGQVPTFMIGSDAFQEADTVGITRPCTKHNWLVKETDKLAKTIHEGFHVATSGRPGPVLIDIPKDVQFATGQYQGPKGLTSHYNPPVKGDMEEITELVAAIEKAKRPVFYTGGGVINSGPAASQLLRELVDATGFPITSTLMGLGAYPASGKNWLGMLGMHGLYEANMAMHGCDLMINIGARFDDRITGRIDAFSPKSKKAHIDIDPSSINKVIRVDIPIVGDVGHVLEDILKVWKARGRKTNAEAVQKWQAQITEWRKVSCLTYKPSEKTIKPQYALERLEALTKGRDRYVCTEVGQHQMWAAQYLGFEDPNRWMTSGGLGTMGYGFPASIGVQMAHPDALVINVAGEASWLMNMQEMGTAVQYRLPVKQFILNNERLGMVRQWQELLHGERYSQSWSEALPDFVKLAEAFGAKGILCKDPADLDDAIMEMLNYDGPVIFDCLVEKHENCFPMIPSGKAHNEMLLGDAETQGVIQAGGAVLV

SEQ ID NO: 137984 - DNA, 1839 bp, Synechococcus elongatus PCC 6301
  CDS (1)..(1839): transl_table=11
gtgcaactgcagacggtcaccattcaacagcgtgcgaccggtgcttatgcgctgattgatagtctctgtcagcacggagttaagcacatctttggctatccaggtggggcaatcctgcccatctacgacgagctgcatcgggctgaggcggctggccgtgttcaacatattttggtacgccacgagcagggtgcagtccatgcggcagatgcctactcgcgagccacgggtgaagtcggggtttgctttgcgacttctggtcctggtgcaaccaatctcgtaaccgggattgctacggcccagatggactcgatcccgatggtggtggtgacggggcaggtgcctcgcacggcgatcggaaccgacgctttccaagagacagacatctacggcatcacgctaccaatcgtcaaacactcctacgtggtgcgcgatccacgggacatggcgcggattgtggcggaagccttccacattgcccaatcgggtcgtcctggccctgtcttgatcgatgtgcccaaggatgtcggcactgaggaatttgattatgtgcctgtggctccgggggatattcgactgccgggctatcgtccgacaactcggggcaacccacgtcagattgctcaggcgatcgctcttgtgagagtagcccgtcggcccttgctctacgttggtggcggcgcaattacggccggcgcccatgcggagctgcgggcctttgcagagcgcttccaactgccggtaacaacgactctgatgggcaaaggggcctttgatgagcggcaccccttggcgcttggcatgctggggatgcacggcacggcctatgccaacttcgccgtcagcgaatgtgatctgctgattgcggtgggtgcccgctttgacgatcgtgtcacgggcaaactggatgagttcgcctccaaagcgcaagttattcacgttgatatcgatccggccgaagtcggtaaaaaccgcgtgccggaagtgccaatcgtgggcgatgtccgccaggtgctgaatgagcttctggcgcgtgccgaagagcaaatcagcgccgatgatgcgactcgaactcagccttggctcgatcgcattgcctactggaagcgggaatatcctctgcagattccctactacgctgatgtgctctcaccccaacaagtgattcacagtttgggagaagcagcaccggatgcttacttcaccacggatgtgggtcagcaccaaatgtgggctgctcagttcatcaagaatggtccccgtcgttggatctctagtgcaggtctcggtacgatgggctttggtatgccggccgctatgggagcacaaatggctctgccggatgacaccgtcatctgtgtggctggggatgccagcatcctgatgaatattcaggagctggggaccctagcgcagtacaacatcccgatcaaggtcgttgttgtcaataatggctggcaggggatggtgcgccagtggcaagaagcgttctacgacgagcgctattccaactccaacatggagcggggcatgcccgactttgtgaaactggcagaagcctttggtatcaaagggatgcgcgttagtcatccagacgagctgcaagcagcgatcgctgaaatgttggcctttgatgggccggtgttcttggatgcgatcgtcaagagggatgaaaactgttatccgatggtgccctctggtcacagcaatgcgcagatgctgggcttgcccaaggacccgacgctggatttggatttggcgatcgcgacctgttcgagctgcggcgcgaaaaccctgcccagccacaagttctgtccggactgcggcgctaagctctag

SEQ ID NO: 137985 - protein, 612 aa, Synechococcus elongatus PCC 6301
MQLQTVTIQQRATGAYALIDSLCQHGVKHIFGYPGGAILPIYDELHRAEAAGRVQHILVRHEQGAVHAADAYSRATGEVGVCFATSGPGATNLVTGIATAQMDSIPMVVVTGQVPRTAIGTDAFQETDIYGITLPIVKHSYVVRDPRDMARIVAEAFHIAQSGRPGPVLIDVPKDVGTEEFDYVPVAPGDIRLPGYRPTTRGNPRQIAQAIALVRVARRPLLYVGGGAITAGAHAELRAFAERFQLPVTTTLMGKGAFDERHPLALGMLGMHGTAYANFAVSECDLLIAVGARFDDRVTGKLDEFASKAQVIHVDIDPAEVGKNRVPEVPIVGDVRQVLNELLARAEEQISADDATRTQPWLDRIAYWKREYPLQIPYYADVLSPQQVIHSLGEAAPDAYFTTDVGQHQMWAAQFIKNGPRRWISSAGLGTMGFGMPAAMGAQMALPDDTVICVAGDASILMNIQELGTLAQYNIPIKVVVVNNGWQGMVRQWQEAFYDERYSNSNMERGMPDFVKLAEAFGIKGMRVSHPDELQAAIAEMLAFDGPVFLDAIVKRDENCYPMVPSGHSNAQMLGLPKDPTLDLDLAIATCSSCGAKTLPSHKFCPDCGAKL

SEQ ID NO: 137986 - DNA, 1722 bp, Haemophilus influenzae 86-028NP
  CDS (1)..(1722): transl_table=11
atgaagaagttatctggcgcagagatggtggttcaatctttacgtgatgaaggcgtagagtatgtatttggttatcccggaggcgcggtattagatatttatgatgcaattcatacgctgggtggtattgaacatattttagttcgccacgaacaagccgcggtgcatatggcggatggttacgcacgttcaacgggtaaagttggatgtgtgctagtgacttcggggcctggtgcaacaaatgctatcactggtattttaacggcttataccgattctgtgcctatggttatcatttcgggtcaggttatgagcaatttaattggcagtgatgctttccaagaatgtgatatgctgggtatttctcgtcccgttgtgaagcatagctttattgtcaaaaaggcggaagatattccatctactttgaaaaaagccttttatattgcatctacgggtcgtccaggccctgttgttgtggatattccaaaagacactgtaaatccgaattttaaatatccttatgaatatcctgaatctgtcgagttacgttcttataatcccacagtaaatggacacaaaggtcaaattaaaaaagcgttaaaagcacttttagtggcgaagaaaccaatactttttgtcggtggtggcgcaatcactgctgaatgtagtaagcagttaattcagtttgcacaacgtttaaatttaccagtgacttcctcattaatgggattgggtgcttatccaagtacggataaacaattcttaggtatgttgggtatgcatggtactttagaagcgaatacggcaatgcacgaaagtgatcttattttggggattggcgttcgttttgatgatcgtacgacaaataatttagaaaaatattgcccaaatgcaaaagtgattcatattgatattgatccaacctcaatttctaaaaatgtgccagtagcgattccaattgtcggaaatgcgaaaaatgtattggaagaatttttgggtttattgaatgaagagggattaaaatctcaaacggatcttgaaagttggtggcaagaaatcaaccaatggaaagcaaaaaaatgtttggaatttgaccgcacttctggcgtgattaaaccgcaacaagtcgtggaagcggtatatcgcctcacgaaaggacaagcttatgtggcttctgatgtaggtcagcaccaaatgtttgctgcgttacattatccattcgatgaaccgcgtcattggattaattctggtggtgcaggcacaatgggttttggttttcctgcggcacttggtgtgaaattagctcatcctgaaggaactgttgtttgcgttactggcgatggtagtattcaaatgaatattcaagagctttctaccgcaacgcagtatggtattcctgttgtcattatttgtttgaataatcatttcttgggaatggtaaaacaatggcaagatttgatttattctggtcgccattcgcaaacctatatgaattccttgcctgattttgcgaaattggcagaatcttacggtcacgtaggaataaaaattgctacccccgatgaacttgaaagcaaattgcaagaagcattcagtattaaaaataaattagtctttgtagatattaatgtagatgaatctgaacacgtttatccaatgcaaattcgtggtggagcaatgaatgaaatgattttaagtaaacctcaagaggagacaaactaa

SEQ ID NO: 137987 - protein, 573 aa, Haemophilus influenzae 86-028NP
MKKLSGAEMVVQSLRDEGVEYVFGYPGGAVLDIYDAIHTLGGIEHILVRHEQAAVHMADGYARSTGKVGCVLVTSGPGATNAITGILTAYTDSVPMVIISGQVMSNLIGSDAFQECDMLGISRPVVKHSFIVKKAEDIPSTLKKAFYIASTGRPGPVVVDIPKDTVNPNFKYPYEYPESVELRSYNPTVNGHKGQIKKALKALLVAKKPILFVGGGAITAECSKQLIQFAQRLNLPVTSSLMGLGAYPSTDKQFLGMLGMHGTLEANTAMHESDLILGIGVRFDDRTTNNLEKYCPNAKVIHIDIDPTSISKNVPVAIPIVGNAKNVLEEFLGLLNEEGLKSQTDLESWWQEINQWKAKKCLEFDRTSGVIKPQQVVEAVYRLTKGQAYVASDVGQHQMFAALHYPFDEPRHWINSGGAGTMGFGFPAALGVKLAHPEGTVVCVTGDGSIQMNIQELSTATQYGIPVVIICLNNHFLGMVKQWQDLIYSGRHSQTYMNSLPDFAKLAESYGHVGIKIATPDELESKLQEAFSIKNKLVFVDINVDESEHVYPMQIRGGAMNEMILSKPQEETN

SEQ ID NO: 137988 - DNA, 1725 bp, Pseudomonas fluorescens Pf-5
  CDS (1)..(1725): transl_table=11
gtggagcttttatctggcggtgagatgctcgtccgctttttgcgtgacgaaggcgtcaaatatatctacgggtacccgggtggtgctctccttcatgtttacgatgccctgttcaaagaaccggaagtgacccacatcctggttcgtcacgaacaagcggcgacccatatggctgacggctatgcccgtgccaccggtaaagccggcgtggtactggtgacctccggcccgggcgcgaccaatgccattaccggtattgccaccgcctatatggactcgattcccatggtgatcatttccggccaggtgcccagcaccatggtgggcaccgacgcgttccaggaaaccgacatgatcggtatctcccggccgatcgtgaagcacagcttcatgatcaagcacgcttcggaaatcccggaagtcatgaagaaagccttctacctggcgcaatccggtcgtcctggtccggtggtggtcgatatccccaaggacatgaccaacccggctgaaaagttcgaatacgttttccccaagaaagccaagctgcgctcctacagcccagctgttcgcggtcactccgggcaaatccgcaaggcggcagaaatgctcctggcggccaagcgccctgtgctttatgccggcggcggcgtgattctcggcggcggttccgcaccgctgaccgaactggccaagatgctcaatctgccagtgaccaataccttgatgggcctgggcgcctatccgggcaccgaccggcagttcgtgggcatgctcggcatgcacggcagctacaccgccaacctgaccatgcaccatgccgacgtgatcctggccgtgggcgcgcgcttcgatgaccgggtgatcaacggtgcgccgaagttctgcccgaatgccaagatcatccatgtcgatatcgacccggcttccatctccaagaccatcaaggccgatgtgcctatcgtcggtccagtggagagcgtcctgaccgaaatggtcgcggcactcaaggaaatcggcgataccccgaacaaggaaacggtcgccagttggtggaagcagatcgatgagtggcgcggcgatcgcggcctgttcccttacgacaagggcgacggcagcatcatcaagccacagaccgtgatcgaaaccctgtgcgaagtcaccaagggcgatgcctatgtgacctccgacgtggggcagcaccagatgttcgcggcgcagtactaccggttcaacaagcccaaccgctggatcaactccggtggcctgggcaccatgggcttcggttttccggcggccatgggcgtgaaattgagctttccggataatgatgtcgcctgcgtcaccggtgaaggcagtatccagatgaacatccaggagctgtcgacctgcctgcagtacgatctgccagtcaagatcatcaatctgaacaatggtgtgcttgggatggtgcgccagtggcaggacatgagctacggcagccgtcattcgcactcctacatggaatcgctgcctgacttcgtcaagctggtcgaagcctatggtcacgtgggcatgcgtatcacggatctgaaggatctgaagccgaagatggaagaagcgttcgccatgaaggatcgcctggtgttcctcgatatccaggtcgacaccagcgagcacgtctatccgatgcagatcaaagacggctccatgcgcgatatgtggctgagcaagacggagcgtacttaa

SEQ ID NO: 137989 - protein, 574 aa, Pseudomonas fluorescens Pf-5
MELLSGGEMLVRFLRDEGVKYIYGYPGGALLHVYDALFKEPEVTHILVRHEQAATHMADGYARATGKAGVVLVTSGPGATNAITGIATAYMDSIPMVIISGQVPSTMVGTDAFQETDMIGISRPIVKHSFMIKHASEIPEVMKKAFYLAQSGRPGPVVVDIPKDMTNPAEKFEYVFPKKAKLRSYSPAVRGHSGQIRKAAEMLLAAKRPVLYAGGGVILGGGSAPLTELAKMLNLPVTNTLMGLGAYPGTDRQFVGMLGMHGSYTANLTMHHADVILAVGARFDDRVINGAPKFCPNAKIIHVDIDPASISKTIKADVPIVGPVESVLTEMVAALKEIGDTPNKETVASWWKQIDEWRGDRGLFPYDKGDGSIIKPQTVIETLCEVTKGDAYVTSDVGQHQMFAAQYYRFNKPNRWINSGGLGTMGFGFPAAMGVKLSFPDNDVACVTGEGSIQMNIQELSTCLQYDLPVKIINLNNGVLGMVRQWQDMSYGSRHSHSYMESLPDFVKLVEAYGHVGMRITDLKDLKPKMEEAFAMKDRLVFLDIQVDTSEHVYPMQIKDGSMRDMWLSKTERT

SEQ ID NO: 137990 - DNA, 1827 bp, Psychrobacter arcticus 273-4
  CDS (1)..(1827): transl_table=11
gtgacgcaaaccacgcaaagtccgaatatgactggacatacccaaacgggtcatgctgccaaaaacttcgaagaaaagcagcaacctcttgctgaaggtagcaatgagcctgtgatgctatctggcgctgagatgttggtgcaagcactaacggatgagggcgtcaaatacatttttggctatccaggcggtgcggtacttcatatttatgatgccttgtttcaacaagacaatgttgagcatattctggtgcgtcatgaacaagccgcaggtcacatggcagatgcttattcgcgagtaactggcaacactggtgtggtgctagcgacttcaggtcctggtgctaccaacaccgtgacggctattgccactgcttttatggattctgtaccgatggtgatcatcgcaggtcaggtacctagcagtttaatcggtgaggatgccttccaagaaacagatatgatcggtgtgtcacgccccatcgtgaagcatagctttcaagttcgccatgccagcgaaattccaatgattgtcaaaaaagccttttatattgcacaatctggacgtccgggtcctgttgtaatcgatgtgccaaaagacatgactgcgcctagcgagaaatttgcttatgaatatccaaaagaggtgtttattcgctcatatcagccgtcattaaaaggtcatagtggtcaaatcaaaaaagcggttgaaaccctacttgctgccaaacgcccgattgtttactccggtggtggtgttgttttgggtaatgcctataaagagttaacggctcttgcgcatcgtttaaacttaccagtcaccaatactttaatgggcttgggtgcctttcctggctctgatgagcagttcttgggtatgcttggcatgcatggcacttatgaagccaatatgaccatgcatcattctgacgttatattggcagttggtgcacgttttgatgaccgtgtgaccaataacgtcaaaaaattctgtccaaatgcgacgattattcatattgatattgacccgacgtctatctcaaaaactatctttgctcatattcctattgttggtgatgtcaagtcagtgcttactgacatgatagatattataggcgaagataaagagctagaccaaccggcgctattggattggtggtcacagattaatgagtggcgtaagcgtcatggtctgcgctatgacaccagtaccgataatggtattaagccacaagcggtcgttcaagccttagataaagtgactaatagtaacgcgattatcactagtgacgttggtcagcatcagatgtttgcggctttgtactatacttataatgagccgcgtcaatggctgaactcaggtgggcttggtactatgggcgttggcttgccgtatgcaatggcggcgaaacttgctaaccctgatcgtgatgtggtctgtattaccggtgaaggctctattcagatgaatatccaagagctgtcaacctgtttgcagtatgatttgccagttaaaatcctaaacttaaataatgcacagttgggtatggtgaaacagtggcaagatatgctgtatgaaggtcgtcacgcgcattcttacatgaattctttaccagactttgtaaaactggctgaaagctatggtcacgtcggtatcaagattaccgatcctgcgactatggaagcacagttggctgaagccatggcaataaaagacagattggtatttattgacgtttatgtcgatcgtaatgagcatgtgtatccgatgcaaatcgctgggcaaacgatgcgtgatatgtggttaacaaaaggggagcgtacctaa

SEQ ID NO: 137991 - protein, 608 aa, Psychrobacter arcticus 273-4
MTQTTQSPNMTGHTQTGHAAKNFEEKQQPLAEGSNEPVMLSGAEMLVQALTDEGVKYIFGYPGGAVLHIYDALFQQDNVEHILVRHEQAAGHMADAYSRVTGNTGVVLATSGPGATNTVTAIATAFMDSVPMVIIAGQVPSSLIGEDAFQETDMIGVSRPIVKHSFQVRHASEIPMIVKKAFYIAQSGRPGPVVIDVPKDMTAPSEKFAYEYPKEVFIRSYQPSLKGHSGQIKKAVETLLAAKRPIVYSGGGVVLGNAYKELTALAHRLNLPVTNTLMGLGAFPGSDEQFLGMLGMHGTYEANMTMHHSDVILAVGARFDDRVTNNVKKFCPNATIIHIDIDPTSISKTIFAHIPIVGDVKSVLTDMIDIIGEDKELDQPALLDWWSQINEWRKRHGLRYDTSTDNGIKPQAVVQALDKVTNSNAIITSDVGQHQMFAALYYTYNEPRQWLNSGGLGTMGVGLPYAMAAKLANPDRDVVCITGEGSIQMNIQELSTCLQYDLPVKILNLNNAQLGMVKQWQDMLYEGRHAHSYMNSLPDFVKLAESYGHVGIKITDPATMEAQLAEAMAIKDRLVFIDVYVDRNEHVYPMQIAGQTMRDMWLTKGERT

SEQ ID NO: 137992 - DNA, 1728 bp, Colwellia psychrerythraea 34H
  CDS (1)..(1728): transl_table=11
atgacaacagaactttttactggtgcagaaatggtagttaaatcactatcggcactgaaagttaaatacattttcggctaccccggtgggtccgttttagatatctatgacgctatatttcaacaagatgaaattgaacatatattagttcgtcatgaacaagcagccactcatatggccgatggttatacgagagcaacgggtgaagttggtgttgtattagcaacgtcaggcccaggagcaactaactgcgttacgggtattgcgactgcttatatggactcaattcctatggtagtgcttgcaggtcaagttgctacttcacttatcggtaacgatgcatttcaggaaactgatatcgtcggttgtacgcgtcctatcattaagcatagctttagctgtagaagcttggcagacatcccagatgccatatcgaaagctttttatatagcaagcacgggtagaccgggtcccgttgttgtcgaactgccaaaagatattttgattcctcaaaataaagggccatttactatcgaaacagatattaaaatacgctcttataaccctaatattaaggggcacccgaaacaaatcaaaaaagcggcacaaacgatttctaatgccaaaagactggtagtgtattcgggtggtggtattgttttagctgatgcatctgaattactcactaagttagttgagacattaaaagcgcccattactaatacattaatggggctgggtggtatttcaggaacccacaaacagtttattggtatgttgggtatgcatggtagtttagaagcgaataagagcatggcgaatgctgatgttattttagcacttggtgcacgttttgatgacagggttactaataatgtcgagaaattttgccctaacgccactatcgttcatgttgacattgacccaacctcaatctcaaaaacgattaatgctcatatccctattgttggtttagtcgatgtggttatgcagcagttattagatgaattaactgatattaacttctcaccagatgaagcggcattgagccaatggtggcaacaaataaacttatggcgcaatgtaaaaagcattagctatgagcaagatgaaaatgaaatgataaaacctcagcgagttgttgaggcgttatataaaataacagagggtgatgcatacgtttgctcagatgttggtcaacaccagatgtttgcagcacaatactacccttttgctaaaccacgccgatggattaactccggtggtgcaggcactatgggctttggattaccagcagcaatgggcgtaaagttagcctatccagacaaacatgttgtttgtattactggtgatggttcaattcaaatgaacatccaagagctttctacctgttcacaatataatctacccgtcgttattgtcactcttaacaatcgctcactaggtatggtacgccaatggcaggatatggtttatggtggtcgtcattcatcttcctacatggaatcccttcctgattttgttaaaatcgccgaagcttatggtcatgttggtattcagattgacaccttagatgaattagaagaaaaattaacacaagcttttactatcaaagatcgtttagtgtttgtcgatgtcatggtggatgagaaagaacatgtttacccaatgcaaatacgtacgggtgcaattgatgaaatgtggttaaaaaaaggggttaaatcataa

SEQ ID NO: 137993 - protein, 575 aa, Colwellia psychrerythraea 34H
MTTELFTGAEMVVKSLSALKVKYIFGYPGGSVLDIYDAIFQQDEIEHILVRHEQAATHMADGYTRATGEVGVVLATSGPGATNCVTGIATAYMDSIPMVVLAGQVATSLIGNDAFQETDIVGCTRPIIKHSFSCRSLADIPDAISKAFYIASTGRPGPVVVELPKDILIPQNKGPFTIETDIKIRSYNPNIKGHPKQIKKAAQTISNAKRLVVYSGGGIVLADASELLTKLVETLKAPITNTLMGLGGISGTHKQFIGMLGMHGSLEANKSMANADVILALGARFDDRVTNNVEKFCPNATIVHVDIDPTSISKTINAHIPIVGLVDVVMQQLLDELTDINFSPDEAALSQWWQQINLWRNVKSISYEQDENEMIKPQRVVEALYKITEGDAYVCSDVGQHQMFAAQYYPFAKPRRWINSGGAGTMGFGLPAAMGVKLAYPDKHVVCITGDGSIQMNIQELSTCSQYNLPVVIVTLNNRSLGMVRQWQDMVYGGRHSSSYMESLPDFVKIAEAYGHVGIQIDTLDELEEKLTQAFTIKDRLVFVDVMVDEKEHVYPMQIRTGAIDEMWLKKGVKS

SEQ ID NO: 137994 - DNA, 1725 bp, Pseudomonas syringae pv. phaseolicola 1448A
  CDS (1)..(1725): transl_table=11
gtggagcttttatctggcgctgaaatggtcgtccgctttttgcgtgacgaaggcgttgagcatatctatgggtacccgggtggtgctctcctgcatgtctacgatgccctgttcaaagaaccggcggtaagccatatccttgttcgccatgagcaggctgccacgcacatggccgatggctatgcgcgggctaccggcaaggcgggcgtggtgctggtgacgtccggcccaggtgcaaccaatgccattaccggtatcgccacggcgtacatggactccattccgatggtggttctgtctggtcaggtagcgagtacgctggtgggtaccgatgccttccaggagaccgacatgatcggtatctcccggccaatcgtgaagcacagcttcatgatcaagcacccgtcggaaatcccggaagtcctgaaaaaggctttctacctggcgcagtccggtcgtccgggccctgtagtagtcgacattccgaaagacatgactaacccggccgagaaattcgaatacgtctttccgaaaaaagccaagctgcgctcctacagcccggcggttcgtggccattccggccagatccgcaaagccgtcgagatgctgctggcggccaagcgtcctatcgtctacgccggtggcggcgtgatcatgggcaatgcttcggcgcaactgaccgaactggcgcaactgctcaatgctccggtcaccaataccctgatggggcttggctgctatccgggcacggatcgtcagttcgtcggtatgctcgggatgcacggcagctacaccgccaacctcgcgatgcaccacaccgacgtcattctggctgtaggcgcgcgctttgatgaccgtgtcatcaatggcgcgagcaagttctgcccgaacgcaaaaatcatccacatcgacatcgacccggcttcgatctccaagaccatcaaggccgacgtgcctatcgtcggtcctgtcgaaagcgtgctgaccgaaatggtcgccactttgaaagagatcggcgagacacctgacaaggcatccgttgccgcgtggtggaagcagattgacgagtggcgcggtgcgggtgatctgttcccgtacaaccgtggcgatggcacggtcatcaagccgcaagccgttatcgaaacgctgtgcgaagtcaccaagggcgacgcttacgtcacctcggacgttggccagcatcagatgttcgctgcgcagtactaccgtttcaacaagccgaaccgctggatcaactcgggcggtctgggcacgatgggctttggcttcccggctgcgatgggcgtcaagctgagctttccggatgcgcacgttgcctgtgtgaccggtgaaggcagtatccagatgaacattcaggaactgtcgacctgtctgcaatacggcttgccggtgaagatcatcctgctcaataacggtgttctgggcatggtccgtcagtggcaggacatgagctatggctcgcgtcactcgcattcctacatggaatcgctgcctgatttcgtcaagctggtcgaagcctatggccacgtcggcatgcgtatcactgacctgaaggacttgaagccgaagatggaagaagcttttgccatgactgatcgtctggtgttcatggatattcaggtcgatgtgaccgagcacgtctacccgatgcagatcaaggacggctccatgcgcgatatgtggttgagcaagacggagcggacataa

SEQ ID NO: 137995 - protein, 574 aa, Pseudomonas syringae pv. phaseolicola 1448A
MELLSGAEMVVRFLRDEGVEHIYGYPGGALLHVYDALFKEPAVSHILVRHEQAATHMADGYARATGKAGVVLVTSGPGATNAITGIATAYMDSIPMVVLSGQVASTLVGTDAFQETDMIGISRPIVKHSFMIKHPSEIPEVLKKAFYLAQSGRPGPVVVDIPKDMTNPAEKFEYVFPKKAKLRSYSPAVRGHSGQIRKAVEMLLAAKRPIVYAGGGVIMGNASAQLTELAQLLNAPVTNTLMGLGCYPGTDRQFVGMLGMHGSYTANLAMHHTDVILAVGARFDDRVINGASKFCPNAKIIHIDIDPASISKTIKADVPIVGPVESVLTEMVATLKEIGETPDKASVAAWWKQIDEWRGAGDLFPYNRGDGTVIKPQAVIETLCEVTKGDAYVTSDVGQHQMFAAQYYRFNKPNRWINSGGLGTMGFGFPAAMGVKLSFPDAHVACVTGEGSIQMNIQELSTCLQYGLPVKIILLNNGVLGMVRQWQDMSYGSRHSHSYMESLPDFVKLVEAYGHVGMRITDLKDLKPKMEEAFAMTDRLVFMDIQVDVTEHVYPMQIKDGSMRDMWLSKTERT

SEQ ID NO: 137996 - DNA, 1701 bp, Dechloromonas aromatica RCB
  CDS (1)..(1701): transl_table=11
atgatgatcagcggtgcagaaattgtaatcaggtgcctgcaagaagaaaaggtcgaatatgtgttcggttaccctgggggttccgttttgcacatttatgatgcccttttcaagcaggatcaggtcaagcacattctcgttcgccacgagcaggctgctgtccacgcagcagacgctttttcgcgttcctcgcagagggtcggcgtcgcgctggtgacctcgggtcctggtgtgaccaacacggtgacgggcattgccactgcttacatggactcaatcccgatggtggtcatctgcggtcaggtgccgacccagtatatcgggcaagatgctttccaggagtgcgataccgtcggtattacccgtccctgtgtcaaacacaatttcctggtcaaggacgtcaaggatttggccttgacgatcaagaaagccttccatatcgctgccacaggccgccccggtccggtcgttgttgatgttccgaaggacatcacggctcagatgtgtgagttcgactatccgaaaacggtccagatgcgctcctacaaccccgtggtcaaggggcatttgggtcagatcaagaaagccgtccagattctgcaggaagccaagcgcccgatcatttatacgggtggtggcgtgattctttcggatgccgcagaaaagctgacccagctggcgcgcaagctgaacttcccggtgaccaacacgctgatgggtttgggcggctacccggccaccgatcgtcagtttgtcggcatgctcggtatgcatggcacgtttgaagccaataatgcgatgcactacgccgatgtgatcctggcgattggtgcacgtttcgatgatcgcgttattggtaaccccgatcacttcggcagcgagaagcgtcgggttattcatatcgatatcgacccgtcgtcgatttccaagcgggtcaaggttgatgtccctattgttggcaatgtgaccgatgtgctggatgaaatcctgaagttgctcgacggcggattcaagaccgatccggaagtcgccgactggtggaaacagatcgacgagtggcgtggtcgtgattctctgcgttacaagcagggcgagcacatcatgccgcagtacgtcgttgagaaactgtacgaagtgactgggggcgatgccttcattacttccgacgtcggccagcaccagatgtttgctgcgcagtactacaagttcgataagccgcgtcgctggatcaattccggcggtctgggcaccatgggtgttggcctgccttacggcatgggggttctgctggccaatccgggggcgcaggtggcttgcgtgaccggcgaaggctcgatccagatgtgtattcaggagatgtcgacctgcaagcagtacgaactgccggtcaagatcatcaatctgaacaacggcatgctcggcatggtccgtcagtggcaggagatgttctactccaagcgctattcacagtcctacgtcacttcgctgccagatttcgtcaagttggctgaagcctatggccacgtcggcatgcgcattgaaaagccggaagacgtcgaaccagcactgcgcaaggccttcaccgaacacaagaacgatctggtcttcatggacttcatcatcgacccgggcgccaatgtgttcccgatggtcgcggcaggcaagggcctgaccgaaatgatcctcgctgaagatctgtaa

SEQ ID NO: 137997 - protein, 566 aa, Dechloromonas aromatica RCB
MMISGAEIVIRCLQEEKVEYVFGYPGGSVLHIYDALFKQDQVKHILVRHEQAAVHAADAFSRSSQRVGVALVTSGPGVTNTVTGIATAYMDSIPMVVICGQVPTQYIGQDAFQECDTVGITRPCVKHNFLVKDVKDLALTIKKAFHIAATGRPGPVVVDVPKDITAQMCEFDYPKTVQMRSYNPVVKGHLGQIKKAVQILQEAKRPIIYTGGGVILSDAAEKLTQLARKLNFPVTNTLMGLGGYPATDRQFVGMLGMHGTFEANNAMHYADVILAIGARFDDRVIGNPDHFGSEKRRVIHIDIDPSSISKRVKVDVPIVGNVTDVLDEILKLLDGGFKTDPEVADWWKQIDEWRGRDSLRYKQGEHIMPQYVVEKLYEVTGGDAFITSDVGQHQMFAAQYYKFDKPRRWINSGGLGTMGVGLPYGMGVLLANPGAQVACVTGEGSIQMCIQEMSTCKQYELPVKIINLNNGMLGMVRQWQEMFYSKRYSQSYVTSLPDFVKLAEAYGHVGMRIEKPEDVEPALRKAFTEHKNDLVFMDFIIDPGANVFPMVAAGKGLTEMILAEDL

SEQ ID NO: 137998 - DNA, 1770 bp, Thermobifida fusca YX
  CDS (1)..(1770): transl_table=11
atgaccgagcagatgaccggagcccaatcgctcatcagggcgctggagcatgtcggcgtcgatgtcgtgttcggaatccctgggggggcgatcctccccgcctacgacccgctgtacgactccaccaaggtgcgccacatcctcatgcgccacgagcagggggccgggcacgcagccgaaggatatgcctacgccacgggacgaccaggggtgtgtatcgccaccagtggccccggcgcgaccaacctggtgaccccgcttgcagacgcctacatggactcggtccccgtggtcgcgatcaccgggcaggtggccagcccggcgatcggcaccgacgcgttccaggaagccgacatctgcggcatcaccatgccgatcaccaagcacaacttcctggtccgggacccctccaagatcgccagcaccatcgccgaggccttccacatcgcctccaccggccgtcctggcccggtcctcgtggacatcgccaaggacgcgctgcaagcacagacccgcttcgaatggccgcaacggcccgaactgcccggctaccgccccgtcaccaaaccgcacggtaagcaggtgcgggaggcggcacggctgatcgccgaagccaaacgccccgtgctctacgtcggcggcggagtgttcaaatcgggtgcgtccaaagaactgcgtgtactggctgaactgacagggattccggtcgtcaccaccctcatggcactgggcaccttccccagcagccatccccagaacctcggcatgccgggaatgcacggcaccgtcgccgcggtcggcgccctgcagcgcgccgacctgatcgtggcgctgggcgcccggttcgatgaccgggtcaccggcaagctcagctcgttcgccccccacgccaccatcgtgcacgccgacatcgacccggccgagatctccaagaaccggtacgccgacgtgccgatcgtgggcgactgccgggaggtcatcgcggatctgatcgtggcggtccgtgccgaccaagccgccggacgccagggcgactacaccgcgtggtgggagcagctcaaccgaatgcgcgagacctacccgctgggctacaccgagccggaggacggttcgctcgccccccagtacgtgatcaagcgcatcggccagatcgtcggccccgacgccacctacgtcgccggagtgggccagcaccagatgtgggctgcccagttcatcgaccaccagcgtcccggctccttcgtcaactcgggcggcgccggaacgatgggcttcgccatccccgcggccctcggcgccaaggtcggcgaccccgatcgggtcatctgggcgatcgacggcgacggctgcttccagatgaccaaccaggagctggccacctgcgcgatcgaaggcatcccgatcaaggttgcggtgatcaacaacggcaacctcggtatggtccgccagtggcagaccctgttctacgacggccgctactccaacaccaacctgcacaccgcgcccacccccgaagacgggaaggtgcgcattccggacttcgtccgcctcgcagaggcgtacggttgtgtcgggctgcgttgcgaccgcgcagaagacgtggacgccaccatcgagaaagccatggccatcaacgacgtgcccgtggtgatcgatttcacggtccaccacgacgcaatggtctggccgatggtcccggctggagtcagcaacgacgacatccagtacgcgcgcgacatggcgcctgaatgggacgacgaggaagaatag

SEQ ID NO: 137999 - protein, 589 aa, Thermobifida fusca YX
MTEQMTGAQSLIRALEHVGVDVVFGIPGGAILPAYDPLYDSTKVRHILMRHEQGAGHAAEGYAYATGRPGVCIATSGPGATNLVTPLADAYMDSVPVVAITGQVASPAIGTDAFQEADICGITMPITKHNFLVRDPSKIASTIAEAFHIASTGRPGPVLVDIAKDALQAQTRFEWPQRPELPGYRPVTKPHGKQVREAARLIAEAKRPVLYVGGGVFKSGASKELRVLAELTGIPVVTTLMALGTFPSSHPQNLGMPGMHGTVAAVGALQRADLIVALGARFDDRVTGKLSSFAPHATIVHADIDPAEISKNRYADVPIVGDCREVIADLIVAVRADQAAGRQGDYTAWWEQLNRMRETYPLGYTEPEDGSLAPQYVIKRIGQIVGPDATYVAGVGQHQMWAAQFIDHQRPGSFVNSGGAGTMGFAIPAALGAKVGDPDRVIWAIDGDGCFQMTNQELATCAIEGIPIKVAVINNGNLGMVRQWQTLFYDGRYSNTNLHTAPTPEDGKVRIPDFVRLAEAYGCVGLRCDRAEDVDATIEKAMAINDVPVVIDFTVHHDAMVWPMVPAGVSNDDIQYARDMAPEWDDEEE

SEQ ID NO: 138000 - DNA, 1749 bp, Prochlorococcus marinus str. NATL2A
  CDS (1)..(1749): transl_table=11
gtgaccctgacttctacgcctaatcaaatagaagattcagggacacaaactcaatatgagatgtcaggagctgatgccttgatggattctcttcgtaggcatggagtcgatactatttttggttatcctggcggagcaatcctcccaatatatgacgcggtttttaaagcggagcaagagggatggttaaaacacattcttgttcgacatgaacaaggtggaactcatgctgcagatggttttgctagagcgacggggaaagttggggtttgttttggcacatcaggtccaggcgctacgaatctagtcacaggaatagcaaccgctcagatggattctgtacctcttgtcgtcataacagggcaagttcctagacctgctattggaactgatgcttttcaagaaacagatatttttggaataacacttccaattgttaaacattcatgggtcgtaagagatccctctgaaattgcaaaagttgtagcacaagcctttctcatcgcttcgtcgggtagaccaggccctgttttgattgacataccgaaagatgttggacaagagatgtttaaatatgttcctgttgagcctggttcaataaagccactagggtttgaactaccattcgcgccagaacataaagccataagttcagccttagatctaattgaaaatgctgagcaaccactcctttacgttggcggcggtgttatttcttcgggggcacatgaaactctggctgcgattgctaatagatatcaaatacctgtaacaacaactttaatgggcaaaggcgcttttgatgaacgtgatcctttatcagttggaatgcttggtatgcatggaacagcttatgccaactttgctgtgactgaatgtgatttgttgattgccattggagcaagatttgacgacagagttacaggtaaattagatacttttgctcctaaagcaaaagtaattcattttgagattgatcctgctgaaataaataaaaatagagttgttgaagtttctgtattaggtgatgttggaattagccttgttaaattattagatctcagcaaccaaaggaaaacaaatccaagaacttctcaatggcttaacaaaattaaaaactggaaaaataattttcctttgataactccccctaaagaaggagaaatttatccacaggaagttttaattgcgttgagagatttggctcaagatgcttacattacaactgatgttggacaacatcagatgtgggctgctcagtacttgttaaatggaccaagacaatggattagcagtgccggacttgggacaatgggctttggaatgcccgctgcaatgggagtcaaagttgctttgcctaaggagaaagtaatttgtatcgccggtgatgcaagtatcctcatgaatattcaggagcttggaactattgctcaatataagttgaatttaaaagtaattatcatcaataatcattggcaagggatggttaggcaatggcaagaaagtttttacgatgaacgatattcggcatctaacatgtctgttggggagcctgactttatttcgctatctaaggcttttggaattgagggtatagtaatttcagaaagagaaaacctaattcctcaactccaaaaagcattggaaaatgaaggaccagttcttgttaacgtaaatgtaagaaaaggtgaaaattgttaccctatggtgccacccgggaaaagtaatgctgaaatggttggcatataa

SEQ ID NO: 138001 - protein, 582 aa, Prochlorococcus marinus str. NATL2A
MTLTSTPNQIEDSGTQTQYEMSGADALMDSLRRHGVDTIFGYPGGAILPIYDAVFKAEQEGWLKHILVRHEQGGTHAADGFARATGKVGVCFGTSGPGATNLVTGIATAQMDSVPLVVITGQVPRPAIGTDAFQETDIFGITLPIVKHSWVVRDPSEIAKVVAQAFLIASSGRPGPVLIDIPKDVGQEMFKYVPVEPGSIKPLGFELPFAPEHKAISSALDLIENAEQPLLYVGGGVISSGAHETLAAIANRYQIPVTTTLMGKGAFDERDPLSVGMLGMHGTAYANFAVTECDLLIAIGARFDDRVTGKLDTFAPKAKVIHFEIDPAEINKNRVVEVSVLGDVGISLVKLLDLSNQRKTNPRTSQWLNKIKNWKNNFPLITPPKEGEIYPQEVLIALRDLAQDAYITTDVGQHQMWAAQYLLNGPRQWISSAGLGTMGFGMPAAMGVKVALPKEKVICIAGDASILMNIQELGTIAQYKLNLKVIIINNHWQGMVRQWQESFYDERYSASNMSVGEPDFISLSKAFGIEGIVISERENLIPQLQKALENEGPVLVNVNVRKGENCYPMVPPGKSNAEMVGI

SEQ ID NO: 138002 - DNA, 1842 bp, Thiobacillus denitrificans ATCC 25259
  CDS (1)..(1842): transl_table=11
ttgccgtcgccagcatttttttccattcccacagctggaaacgcgccacgcgaaggcgttttcttgaccgaaacgcggcaaaacgattaccctcacgggttcaccaacgaattgattttttgccagtttatggaagccacgggcgccgagatcgtcgtacgttgtctggctgaagagggggtcgagttcgtcttcggctatcccggcggagccgtgctcaacatctacgacgagatcttcaagcagaacaggttcaagcacgtgctggtgcgccacgaacaggcggccgtccacgctgccgacgcctatgcgcgctcgaccggccgcgtcggcgtggcgctcgtcacctcggggcccggcgtcaccaacgctgtgaccggcatcgccacggcgtatatggattcggtgccgatcgtcgtcgtcaccggccaggtgccgacgcccgcgatcgggctcgacgccttccaggaagtcgacaccgtcggcatcacacggccctgcgtcaaacacaatttcctcgtcaaggacgtcaaggatctggccgcgacgatgaagaaggccttcatcatcgcagccaccggtcgccccggcccggtggtcgtcgacgtacccaaggacgtgacctaccacgtgaccgagttcgaatatccggccacggtcgagatgcgttcgtacaaccccgttgtcaaaggccacagcggtcagttgaagcgcgccgtgcagatgctgctcgaagccaagcgcccgatgatctacgcgggcggcggcgtcgtcctcggcgacgcgtcggcgcagctgaccgaactcgcgcgcctgctcggctttccctgcaccaatacgctgatgggtctcggcggttatcctgcgaccgacaggcagaacctcggcatgctcggcatgcacggcacctatgaagcgaacatggcgatgcagcactgcgacgtgctgctggccgtcggcgcgcgcttcgacgaccgcgtgatcggcaaccccgcgcacttcgccaaggagcagcgtcgcatcatccacatcgacatcgacccgtcttcgatctcgaagcgcgtcaaggtcgacgtgcccatcgtcggcgacgtcaggaacgtgctgcgcgacatgctgagcctgctgaagcaggccaaggaagtgcccgacgctgcggcgctcaacgcgtggtggacgcagatcgaattgtggcgctcgaagaactgcctcaagtacaaccgcaacagcccgatcatcaagccgcagtatgtggtcgaaaagctgtgggaagtcaccaagggcgacgccttcatcacctccgacgtcggccagcaccagatgtgggcggcccagtactacaagttcgacaagccgcgccgctggatcaattccggtggcctcggcaccatgggcgtcggcctgccgtatgcaatgggcgtgcaactcgcgcatccggaggcgcaggtcgcctgcatcaccggcgagtcgtcgatccagatgaacatccaggagctttcgacctgcaagcagtaccgcattccggtcaaggtcgtcacgctcaataaccgctacatgggcatggtgaggcagtggcaggagttcttctacggcagccgctacgccgagtcgtacatggagtcgctgcccgacttcgtcaagctcgccgaagcctacggccacgtcggcatgcgcatcgacaagcccgaggacgtcgaagcggcgctcaaggaagccttctcgcctgtactcaaggaaagaatggtgttcatggacttccagaccgaccagaccgagaacgtcttcccgatggtcgaaggcggcaagggcctgtcggaaatgattctggcggaggagctgtga

SEQ ID NO: 138003 - protein, 613 aa, Thiobacillus denitrificans ATCC 25259
MPSPAFFSIPTAGNAPREGVFLTETRQNDYPHGFTNELIFCQFMEATGAEIVVRCLAEEGVEFVFGYPGGAVLNIYDEIFKQNRFKHVLVRHEQAAVHAADAYARSTGRVGVALVTSGPGVTNAVTGIATAYMDSVPIVVVTGQVPTPAIGLDAFQEVDTVGITRPCVKHNFLVKDVKDLAATMKKAFIIAATGRPGPVVVDVPKDVTYHVTEFEYPATVEMRSYNPVVKGHSGQLKRAVQMLLEAKRPMIYAGGGVVLGDASAQLTELARLLGFPCTNTLMGLGGYPATDRQNLGMLGMHGTYEANMAMQHCDVLLAVGARFDDRVIGNPAHFAKEQRRIIHIDIDPSSISKRVKVDVPIVGDVRNVLRDMLSLLKQAKEVPDAAALNAWWTQIELWRSKNCLKYNRNSPIIKPQYVVEKLWEVTKGDAFITSDVGQHQMWAAQYYKFDKPRRWINSGGLGTMGVGLPYAMGVQLAHPEAQVACITGESSIQMNIQELSTCKQYRIPVKVVTLNNRYMGMVRQWQEFFYGSRYAESYMESLPDFVKLAEAYGHVGMRIDKPEDVEAALKEAFSPVLKERMVFMDFQTDQTENVFPMVEGGKGLSEMILAEEL

SEQ ID NO: 138004 - DNA, 1899 bp, Anabaena variabilis ATCC 29413
  CDS (1)..(1899): transl_table=11
gtgactgtgagcttgccttccccgactagtccctcacaaacagagaaacatactcagtctgttaattcgccatcggtggttgtgacaccacaacgggtaactggtggcttcgcgctacttgatagcctgctgcgccacggtgttgagtatatctttggttatcctggtggggcgattctgccgatttatgatgatctgtataaggtggaagcaactggcagccttaaacatattctagtgagacacgaacaaggggcagctcatgctgctgatggttatgctcgtgcaaccggaaaagtaggtgtatgctttggtacttctgggcctggggcaactaacttggtgacaggaatcgctacagcctatatggattcgattccaatggtgattgtcactgggcaagtaccccggaaaatgatcggtacagatgcgttccaagaaaccgatatctacggtattactctacccatcgttaagcattcctatgtagtgcgtgacccccaagatatggcgcgaattgtggcagaagcgttccacatcgccagcacaggccgtccagggccagtgttaattgatgtgcctaaagatgtggcttttgaacaatttgattatgtgcctgtagaaccaggttcaattaaattacgcggatatcgccccacggtgaaggggaatccacgccaaattaacgccgcgattgaattgatccgcgaaagccgtcgtcctttactatacgttggtggtggagcgatcgcatccggcgctcatgcagaaattcaggaactcgccgaattatttaatatccccgtcactaccaccttgatgggtatcggtgcttttgatgaacatcatcctttatctttggggatgttggggatgcacggcacagcttacgctaactttgctgtgactgattgtgatttgttgatttgcgtcggtgcgaggtttgatgaccgcgttaccggcaaattagatgagtttgcatcccgcgccaaagttattcatatcgatattgaccccgccgaagttggtaaaaaccgcattcctgaagtccctattgttggcgatgtacggaaagttttacttgatttgttgcgtcgttgtaaacaaacaggtgccaaaaatacccccaaccaaaaccaagaatggctcaacttaattaaccgttggcgggaagattaccctctagtaattccccaacatccagacagcattcccccacaagaagtaattgtggaagttggtagtcaagcaccccatgctttctacaccacggatgttggtcaacatcaaatgtgggcagcccaattcctcaagaacggccccagacgttggatttctagcgcaggcttgggaacgatgggttttggtttacctgccgccattggcgctaaagtggccttcccagatgaacaagtaatctgtattagcggtgatgccagtttccaaatgtgtctgcaagagcttggcactgcttcacaatatggaataaatgtcaagaccgtaattttaaataacggttggcaagggatggtacgccaatggcagcaagccttccacggcgaacgctactcctgctcaaatatggaagtagggatgccagatgtggagttattggcaaaagcctacggcattaagggtattgtagttacgcaaagagagcaattgaaagatgcgatcgctcaaatgttagcctacgatggcccagttattttggatgtccgcgtcacaaaagacgagaactgttacccaatggtagctcctggtaagagtaatgctcaaatgattggcttaccaaagcaaccacaaaggaccagtgttgaaccagtttattgcagccattgtggtacgtcgaatttacctaatcacaatttctgttctgaatgtgggactaagttgtaa

SEQ ID NO: 138005 - protein, 632 aa, Anabaena variabilis ATCC 29413
MTVSLPSPTSPSQTEKHTQSVNSPSVVVTPQRVTGGFALLDSLLRHGVEYIFGYPGGAILPIYDDLYKVEATGSLKHILVRHEQGAAHAADGYARATGKVGVCFGTSGPGATNLVTGIATAYMDSIPMVIVTGQVPRKMIGTDAFQETDIYGITLPIVKHSYVVRDPQDMARIVAEAFHIASTGRPGPVLIDVPKDVAFEQFDYVPVEPGSIKLRGYRPTVKGNPRQINAAIELIRESRRPLLYVGGGAIASGAHAEIQELAELFNIPVTTTLMGIGAFDEHHPLSLGMLGMHGTAYANFAVTDCDLLICVGARFDDRVTGKLDEFASRAKVIHIDIDPAEVGKNRIPEVPIVGDVRKVLLDLLRRCKQTGAKNTPNQNQEWLNLINRWREDYPLVIPQHPDSIPPQEVIVEVGSQAPHAFYTTDVGQHQMWAAQFLKNGPRRWISSAGLGTMGFGLPAAIGAKVAFPDEQVICISGDASFQMCLQELGTASQYGINVKTVILNNGWQGMVRQWQQAFHGERYSCSNMEVGMPDVELLAKAYGIKGIVVTQREQLKDAIAQMLAYDGPVILDVRVTKDENCYPMVAPGKSNAQMIGLPKQPQRTSVEPVYCSHCGTSNLPNHNFCSECGTKL

SEQ ID NO: 138006 - DNA, 1767 bp, Rhodobacter sphaeroides 2.4.1
  CDS (1)..(1767): transl_table=11
atggagagagagatgaccgaggtgatgagcggcgcgcggatggtggtccaggccctgaaggatcagggggtggacacggtgttcggctatccgggcggtgccgtgctgccgatctacgacgagatcttccagcagaacgacatccggcacatcctcgtgcggcacgaacagggcgcggtccatatggccgagggctatgcgcgctcgacgggcaagccgggcgtcgtcctcgtcacctccggccccggcgccacgaatgccgtcaccggcctcgtcgatgcgctgatggattcgatcccgctcgtcgtcctctcgggtcaggtccccaccttcatgatcggcaccgacggcttccaggaggccgatacggtgggcatcacccgcccctgcaccaagcacaactggctggtgaaggacacggccaggctcgccgagacgatccatcaggccttccatgtggcgacccacggccggccggggccggtgctggtcgacatcccgaaggatgttcagttcgcgaccgcgacctaccagccgccgcagaaggcgcgggtcgatcattaccagccgaaggtgaagggcgacatcgaggccatcacgcgcatggtcgagctgatcgagaccgccgagcggccggtcttctacaccggcggcggcgtcatcaactcgggcagcgcggccagccagctcttgcgcgagttcgtcgatgcgacgggcttcccgatcacctcgaccctgatggggctcggggcctatccggccagcggcaagggctggctggggatgctcgggatgcacggcctctacgaggccaacctcgcgatgcacggctgtgacctgatgatcaatgtgggcgcgcgcttcgacgaccggatcaccggccgggtgaaggatttctcgcccttctcgcagaaggtccatatcgacatcgatccctcctcgatcaacaaggtgatccgggcggacgtgccgatcatcggcgacgtgggccatgtgctcgaggatgcgctgcgcctgtggaagtcgcgcgggcgcaaggtgaaccgcgaggccttggccgagtggtggaagcagatcgccgaatggaaggcggtgaactgcctcgactacgcgccctcctcgaagctcatcaagccgcagcatgcgctgcagcggctcgaggcgctgacgaaggggatggaccgctacatcaccaccgaagtgggccagcatcagatgtgggcggcgcagttcctgggcttcgagggcccgaaccgctggatgacctcgggcgggctcggaaccatgggctacggcctgcccgcctcgatcggcgtgcaggtggcccatcccgaggcgctggtcatcaatatcgcgggcgacgcctcgttcctgatgaacatgcaggagatcggcacggcgatgcagttccgcctgccggtgaagcagttcatcctgaacaacgagcggctcggcatggtgcggcagtggcagcagcttctgcacggccagcgctattcgcaatcctggagcgagagcctgcccgacttcgtgaagctcgccgaggccttcggggccaagggcatccagtgcgcggatccggccgatctcgacgatgcgatccgcgagatgatcgcctatgacgggccggtggtgttcgactgcctcgtcgagaagcacgagaactgcttcccgatgatcccctcggggcggccgcacaacgagatgctgctgggcgatgccgagaccgagggcgccatcggcgccaagggggcggtgcttgtctga

SEQ ID NO: 138007 - protein, 588 aa, Rhodobacter sphaeroides 2.4.1
MEREMTEVMSGARMVVQALKDQGVDTVFGYPGGAVLPIYDEIFQQNDIRHILVRHEQGAVHMAEGYARSTGKPGVVLVTSGPGATNAVTGLVDALMDSIPLVVLSGQVPTFMIGTDGFQEADTVGITRPCTKHNWLVKDTARLAETIHQAFHVATHGRPGPVLVDIPKDVQFATATYQPPQKARVDHYQPKVKGDIEAITRMVELIETAERPVFYTGGGVINSGSAASQLLREFVDATGFPITSTLMGLGAYPASGKGWLGMLGMHGLYEANLAMHGCDLMINVGARFDDRITGRVKDFSPFSQKVHIDIDPSSINKVIRADVPIIGDVGHVLEDALRLWKSRGRKVNREALAEWWKQIAEWKAVNCLDYAPSSKLIKPQHALQRLEALTKGMDRYITTEVGQHQMWAAQFLGFEGPNRWMTSGGLGTMGYGLPASIGVQVAHPEALVINIAGDASFLMNMQEIGTAMQFRLPVKQFILNNERLGMVRQWQQLLHGQRYSQSWSESLPDFVKLAEAFGAKGIQCADPADLDDAIREMIAYDGPVVFDCLVEKHENCFPMIPSGRPHNEMLLGDAETEGAIGAKGAVLV

SEQ ID NO: 138008 - DNA, 1659 bp, Carboxydothermus hydrogenoformans Z-2901
  CDS (1)..(1659): transl_table=11
atggagttaaccggagcgcaaattttaattaaagtattagaggatttaggagtggatactgtatttggctatcccggtggagcggtactgcccatttacgatgccctttatgattcaaaaattacccattacttgacccggcacgaacagggagcggcccatgctgccgatggctatgcccgcgcttcggggaaggtaggggtatgttttgcaacttccggcccaggagccactaacctggtaaccggtcttgccactgcctatatggattcggttccggtggttgccattaccggacaggtggcaacctcgcttttgggacgggattcctttcaggaagcggatattaccggcataaccatgccgattaccaaacataattatttggtaaaagatccgggggaactggcccagacggtggtggaagcattttacattgcccggacgggacgaccggggccggttttaattgatattcccaaggatgtttcggcggcccgggcgcgctatgaatttcccgaaaaagttgagcttccagggtacaaaccggttttaactcccggcgaggaagaggttaataaggctatagcgttaattaattcctccgagcgtccgttaatttttagcggaggcgggactgttaacgccggggccgagcaattattgctggcttttgccgagaaaatcaatgcaccggtggttgcaagtttaatgggtttaggaggatttcccggagaccatcccttattcttgggaatgctgggtatgcacgggaccaagccggccaattatgcggtcagcgaatgtgatgtcctgatagccgtgggagtgcgctttgacgaccgggtaaccggagatgttaaaagctttgcccctaatgccaagattgttcacatagatattgacccggcggaaatcaataagaatgtgctggtggaagtgcctttggtgggggatgtaaagaacagcttagagcttttaattaaaggggtaaaggaaaaaaagccggagaaatggcttaagtatgtttttggtttaaaggaaaaatatcctttaacttataaccgggagtgtggcttaaaaccccaaaaagttatcgaaactctttataagataaccggaggcgaagcaattatcgttaccgatgtgggacagcatcagatgtgggctgcccagttttacaaatttaataagccgaggagatttatttcctccggtgggttaggaacgatggggtttggtttaccggcaggaattggggctcaggtggcaagaccggagcagcaggtaatagtggtatcgggcgatggtagtatccagatgaatagccaggaactaatgaccgttgcggcctataatatccccgttaaggttattatcttaaacaacggttacctggggatggtgcggcagtggcaggaacttttccatcagcgccgttattcgcatacggaacttaaaaatcccgactttgttaagttagccgatgcttacgggataaggggtttgcgcattaaaaaagaagaaaacttggaagaaaaacttttggaggcaataaattatgccggaccggtagtggtagatgtttgggtagaccgggaggaaaatgtttttcccatggtgccaccgggaggcgcaattcacaaaatgatcggttaa

SEQ ID NO: 138009 - protein, 552 aa, Carboxydothermus hydrogenoformans Z-2901
MELTGAQILIKVLEDLGVDTVFGYPGGAVLPIYDALYDSKITHYLTRHEQGAAHAADGYARASGKVGVCFATSGPGATNLVTGLATAYMDSVPVVAITGQVATSLLGRDSFQEADITGITMPITKHNYLVKDPGELAQTVVEAFYIARTGRPGPVLIDIPKDVSAARARYEFPEKVELPGYKPVLTPGEEEVNKAIALINSSERPLIFSGGGTVNAGAEQLLLAFAEKINAPVVASLMGLGGFPGDHPLFLGMLGMHGTKPANYAVSECDVLIAVGVRFDDRVTGDVKSFAPNAKIVHIDIDPAEINKNVLVEVPLVGDVKNSLELLIKGVKEKKPEKWLKYVFGLKEKYPLTYNRECGLKPQKVIETLYKITGGEAIIVTDVGQHQMWAAQFYKFNKPRRFISSGGLGTMGFGLPAGIGAQVARPEQQVIVVSGDGSIQMNSQELMTVAAYNIPVKVIILNNGYLGMVRQWQELFHQRRYSHTELKNPDFVKLADAYGIRGLRIKKEENLEEKLLEAINYAGPVVVDVWVDREENVFPMVPPGGAIHKMIG

SEQ ID NO: 138010 - DNA, 1764 bp, Burkholderia sp. 383
  CDS (1)..(1764): transl_table=11
atgaacatgcccagcgcggaattctccacgtcggaacccctttcccctcccgatagcgactccatcggcggtaccgtgctcatgaaggcactggccgatgaaaacgtcgaattcatctggggctaccccggcggctcggtactctacatctacgacgagctttacaagcaggacaagattcagcacgtgctggtgcgccatgaacaggcggccgtgcacgcagccgatgcgtatgcgcgttccaccggcaatgtcggcgtctgtctcgtgacgtcgggccccggtgtcaccaatgcggtgaccggcatcgccacggcgtacatggattcgatcccgatggtcgtgatcagcggccaggtgcccacggccgcgatcggccaggatgcattccaggagtgcgacaccgtcggcatcacgcgtccgtgcgtgaagcacaacttcctcgtgaaggacgtgcgcgacctcgcggaaaccgtcaagaaggcgttttatatcgcccgcaccggccgtccgggcccggtgctgatcgacatcccgaaggacatctcgaagacgccgtgcgaatacgagcccgtcaagagcgtgtcgctgcgttcgtacaacccggtcacgaagggccattcgggccagatccgcaaggccgtgtcgctgctgctgaccgcgaagcgtccgtacatctacacgggtggcggcatcatcctcgccgacgcgtcgcgtgaactgaaccagttcgcggacctgctcggctacccggtcaccaacacgctgatgggcctcggcggctatcgcgcgtcggacaagaaattcctcggcatgctcggcatgcacggcacctacgaagcgaacatggcgatgcagcactgcgacgtgctgatcgcgatcggtgcccgcttcgatgaccgcgtgatcggcgacccggcgcacttcgcgtcgcgtccgcgcaagatcatccacatcgacatcgacccgtcgtcgatctcgaagcgcgtgaaggtcgatatcccgatcgtcggcgacgtgaaggaagtgctgaaggaactgatcgagcaactgcagacggccgagcatggccccgacaccgaggcgctcgcgcaatggtggaaggacatcgagggctggcgctcgaaggactgcctgaaatacgaccgcgaaagcgagatcatcaagccgcaatacgtggtggagaaggcgtgggagctgacggacggcaatgcgttcgtgtgctcggacgtcggccagcaccagatgtgggcggcgcagttctaccgtttcaacaagccgcgtcgctggatcaactccggcggcctcggcacgatgggcttcggcctgccggcagcgatgggcgtcaagatggcgcacccggacgacgacgtgctgtgcatcacgggcgaaggctcgatccagatgtgcatacaggaactgtcgacctgcctgcagtacgacacgcccgtgaagatcatttcgctgaacaaccgctatctcggcatggttcgccagtggcagcagatcgaatacagcaagcgctattcgcattcgtacatggatgcgctgcctgatttcgtgaagcttgccgaagcgtacggccatgtcggcttgcggatcgaaaagacctcggatgtggagccggcgctgaaggaagcgctgcgcctgaaggatcgcaccgtgtttctcgacttccagactgatccgaccgaaaacgtctggccgatggtacaggccggcaagggcatcaccgagatgctgctcggatcggaagatctgtaa

SEQ ID NO: 138011 - protein, 587 aa, Burkholderia sp. 383
MNMPSAEFSTSEPLSPPDSDSIGGTVLMKALADENVEFIWGYPGGSVLYIYDELYKQDKIQHVLVRHEQAAVHAADAYARSTGNVGVCLVTSGPGVTNAVTGIATAYMDSIPMVVISGQVPTAAIGQDAFQECDTVGITRPCVKHNFLVKDVRDLAETVKKAFYIARTGRPGPVLIDIPKDISKTPCEYEPVKSVSLRSYNPVTKGHSGQIRKAVSLLLTAKRPYIYTGGGIILADASRELNQFADLLGYPVTNTLMGLGGYRASDKKFLGMLGMHGTYEANMAMQHCDVLIAIGARFDDRVIGDPAHFASRPRKIIHIDIDPSSISKRVKVDIPIVGDVKEVLKELIEQLQTAEHGPDTEALAQWWKDIEGWRSKDCLKYDRESEIIKPQYVVEKAWELTDGNAFVCSDVGQHQMWAAQFYRFNKPRRWINSGGLGTMGFGLPAAMGVKMAHPDDDVLCITGEGSIQMCIQELSTCLQYDTPVKIISLNNRYLGMVRQWQQIEYSKRYSHSYMDALPDFVKLAEAYGHVGLRIEKTSDVEPALKEALRLKDRTVFLDFQTDPTENVWPMVQAGKGITEMLLGSEDL

SEQ ID NO: 138012 - DNA, 1689 bp, Desulfovibrio desulfuricans G20
  CDS (1)..(1689): transl_table=11
atggagtcgagcggggcccggatcctgttggagtgtcttaaaaaggaaggcgttgatgtcattttcggctaccccggcggggccgtgatcgacatttacgacgaacttccccggcatgacctgcgtcatgtgctggtgcgccacgaacaggccgcagtacatgccgcggacggttatgcccgtgcttccggtcgagtgggggtctgtctggtcacttcgggacccggcgccaccaataccgtgaccggaatcgctacagcgtactgcgactccattcctctggtggtgctaaccggacaggtgccgcgtgcgctgataggcaatgacgcttttcaggaagtggatatagtgggcattacgcgtccctgcaccaagcataattatctggtgaaggaactgagcgacttgccgcgtattatccgcgaagctttttatcttgcccgttccggcaggccgggtcccgttcttgtcgacctgccaaaagatatcatggtagcccgtgcagagtttcagattcctgaagaagtcaagctgcgcagctacaacccgacatacagaccgaatcttaaccagctgcgcagagcggcggaactggttctttctgccagacggccgctgctgttcgccggtggcggggttgtggggtccgatgccagcgaagagcttggctggctggcccgcacgttgcagattccggtaacttcaagtctgatggggcttggttcttttcccggtgacgacccgctctttctgggcatgctgggtatgcacggcacctttgccgccaacaaggcggtgaatagctgtgacgtgcttattgccgccggtgcgcgctttgacgacagagtgacaggaaagctttcggcttttgccgccggtgccaagattatccacatagacatcgaccccacatccatcagaaaaaatgtgggcgtagaggtgcctgtggtgggcgactgccgtatggcgcttgctggcatgcgcgagattctttcggcccgctttgaagagaacattcccgtaccccgctggactgagtggcttgccacggtgcacgattgggcgcagagtcatcctctggggtatgtgccttctgaaggtattaaaccgcagcaggttgtggaaactgttttcggtattaccagaggcgagtgtattgtcaccaccgaggtggggcagaaccagatgtgggccgcacagtttttcaaataccgtaaaccgcgcacgctgctgacttccggcggactaggcaccatgggatacggttttccggcggctataggtgcgcagatggcgtttccggggcatctggtgattgattttgcgggcgacggttccattcagatgaatattcaggaactggccacagcggtttgtaacaagctgccggttaaaataattattctgaacaacggctatctgggtatggtgcgccagtggcaggagttgttctatcagcgtaattactgttcaacctgcatggaggcccagcctgattttgtgaaactggctgaagcctacggagcggaagggtaccgcatcacagcacaggctgatcttgagccggtgttgcggcaggccctgcaaagcccggctccggctattgttgatgtgcgcgtggagcgcgaggaaaatgtctatcccatggttccggccggtgcggcgctggacgagatgctgcttgtgtag

SEQ ID NO: 138013 - protein, 562 aa, Desulfovibrio desulfuricans G20
MESSGARILLECLKKEGVDVIFGYPGGAVIDIYDELPRHDLRHVLVRHEQAAVHAADGYARASGRVGVCLVTSGPGATNTVTGIATAYCDSIPLVVLTGQVPRALIGNDAFQEVDIVGITRPCTKHNYLVKELSDLPRIIREAFYLARSGRPGPVLVDLPKDIMVARAEFQIPEEVKLRSYNPTYRPNLNQLRRAAELVLSARRPLLFAGGGVVGSDASEELGWLARTLQIPVTSSLMGLGSFPGDDPLFLGMLGMHGTFAANKAVNSCDVLIAAGARFDDRVTGKLSAFAAGAKIIHIDIDPTSIRKNVGVEVPVVGDCRMALAGMREILSARFEENIPVPRWTEWLATVHDWAQSHPLGYVPSEGIKPQQVVETVFGITRGECIVTTEVGQNQMWAAQFFKYRKPRTLLTSGGLGTMGYGFPAAIGAQMAFPGHLVIDFAGDGSIQMNIQELATAVCNKLPVKIIILNNGYLGMVRQWQELFYQRNYCSTCMEAQPDFVKLAEAYGAEGYRITAQADLEPVLRQALQSPAPAIVDVRVEREENVYPMVPAGAALDEMLLV

SEQ ID NO: 138014 - DNA, 1761 bp, Rhodospirillum rubrum ATCC 11170
  CDS (1)..(1761): transl_table=11
atggctgaccagcagaagtccggtgcggagatcgtccttaaggctcttgccgatcagggtgtggaggtaatcttcggctatccgggcggcgccgtccttccgctctatgacgagatcttcaagcaaaatcagatccgtcacgtgctggtccgtcacgaacaggccgccgtccacgccgccgaaggctatgcccgctcgaccggcaagaccggcgtggtcctggtgaccagcggcccgggcgccaccaatgcggtgaccggcctgaccgacgccatgctcgattccattcccgtggtctgcctgaccggtcaggtgccgacccatctgatcggcaacgatgcctttcaggaggccgacaccaccggcatcacccgccagtgcaccaagcacaattatctggtgaaaaagggcgaggatctggcccgggtgatccacgaggccttccaggtcgccggcagcggccggcccggcccggtggtcatcgatctgcccaaggatatcctgatgggaccggcgccctatgtcgccccgtcgcgggtcaagcacaaaagctaccgtccccagctcaagggcgatatcaccgccattgaaaaggcggtcgagatcatcgccaaggccaagcggccgattttctattgcggcggcggcgtcgtcaattccgggccccaggccagccagttgctgacccagttcgtgaagatgaccggctatccgattaccctgaccctgatggggctgggcatctatccggccagcgatccgcaatatctgggcatgctgggcatgcatggcaccttcgaggccaatcacgccatgcatgactgcgacgtgatggtggcgatcggggcgcggttcgacgaccgggtgaccggccggcttgacgccttctcgcccaattcgaccaagatccagatcgacatcgatcccagttcgatcaacaagaacgtggcggtcgatctggggatcgtcggcgatgtcggtcatgtccttgaagacatgatcaaggtgtggaaggcccggcagtatcaccccgatgtcgccgccctgaaaaactggtgggggcggatcgccgattggcagcgccgcgactgcctgcactatcagccctccgacgaggttaccaagccccaatacgccatcgagcgcctctacgccctgacccgcgaccgcgagaccttcatcaccaccgaggtcggccagcatcagatgtgggcggcccagtacttcaaattcgacaagcccaatcagtggatgacctcgggcgggctcggcaccatgggctatggtttcccggcggcgatcggcgttcagatggcccatcccggcgccctggtcgtcgatatctcgggcgaggcgtcgttcatgatgaacatgcaggaactggccacggccgtgcagtatcgcctgccggtcaaggtgttcatcctcaataaccggtacatgggcatggttcgccagtggcaggaactgctccatggcgggcgttattcggaaagctattccgaatgcctgcccgatttcgtcaagctggccgaggccttcggcgccgtcggcttgcggtcggaaaagcccgccgatcttgatgacgtgatcgccgagatgatcgccgtcgatcggccggtgctggtcgatgtggcggtcgatccttcggaaaacgtctttccgatgatcccctcgggcgcgccccacaaccagatgctgctcggccccgaagacagcctgggtcagccgatttccaaggagggggcgatcctcgtctag

SEQ ID NO: 138015 - protein, 586 aa, Rhodospirillum rubrum ATCC 11170
MADQQKSGAEIVLKALADQGVEVIFGYPGGAVLPLYDEIFKQNQIRHVLVRHEQAAVHAAEGYARSTGKTGVVLVTSGPGATNAVTGLTDAMLDSIPVVCLTGQVPTHLIGNDAFQEADTTGITRQCTKHNYLVKKGEDLARVIHEAFQVAGSGRPGPVVIDLPKDILMGPAPYVAPSRVKHKSYRPQLKGDITAIEKAVEIIAKAKRPIFYCGGGVVNSGPQASQLLTQFVKMTGYPITLTLMGLGIYPASDPQYLGMLGMHGTFEANHAMHDCDVMVAIGARFDDRVTGRLDAFSPNSTKIQIDIDPSSINKNVAVDLGIVGDVGHVLEDMIKVWKARQYHPDVAALKNWWGRIADWQRRDCLHYQPSDEVTKPQYAIERLYALTRDRETFITTEVGQHQMWAAQYFKFDKPNQWMTSGGLGTMGYGFPAAIGVQMAHPGALVVDISGEASFMMNMQELATAVQYRLPVKVFILNNRYMGMVRQWQELLHGGRYSESYSECLPDFVKLAEAFGAVGLRSEKPADLDDVIAEMIAVDRPVLVDVAVDPSENVFPMIPSGAPHNQMLLGPEDSLGQPISKEGAILV

SEQ ID NO: 138016 - DNA, 1710 bp, Moorella thermoacetica ATCC 39073
  CDS (1)..(1710): transl_table=11
gtgctttttaccattggggatcgagctgaaggcaaaaaactaaccggagcggagattattgttcaggccctccaggcagagggagtggataccgtatttggtatcccggggggctccgtcctgcccctttatcatgagctggcggtagccagcatacgccatattttaacgcggcatgagcaggcagccgcccatgccgccgacggttatgcccgcgccagcggcaaacccggtgtgtgtattgctacttccggccctggagcaaccaacctggtgacggggatcgccaatgcctatatggattccatccccctggttgccattaccggccaggtcagtgttcctatgattggccatgattccttccaggaagccgacattaccggcattaccctccccattaccaaggccaattacctggtcaagaacgtccacgacctggcagctaccatccacgaggctttttacatcgctaccaccggccgtccgggtccggtgttgatcgatattcccaaggatattaccacccagcgggcactgtttcgctaccctcccagactccaccttccaggttaccggtgcaaggtgcaaccccacgccctccaggtagcccaggcggctgccgctatcggggctgcggaaaaacctttactctttattggtggcggcgtaatcacctcagaagcccatgaagaagtacggcaactggctgagggccaggatattcccgtagtcatgagcatgatgggcaagggcggtttcccggaaacccatcctttatttgtaggcatggtgggcatgcatggtacagcggcagccaactacgccatgtgtgagacggatctcattatcggtgtgggtgtccgttttgacgaccgggtcacgggtaaagtcgaagcctttgctccgaaagctaaaattatccacatcgatattgatgccgctgagatcggcaaggtggttcaggcccatattcccattgtcagcgatgctcgtcaggggttggccgccatcctggagaaattgtcgggaaaaggcgatcaccaggcctggcggcagcaaatccggcgctggcaggaagaaaatccgttacgctatgaaaagagtggcctgaaaccccagtatgtcctggaggaattatataatcttactaaggggcaggccattatctgcactgatgtcggccagcaccagatgtgggcggtgcagtattatcccctgagccggccccgcgccttcctttcgtcctgcggattaggaaccatgggctttggcgtcccggcagccatgggagccgctgttgcccggccgggggagccgattgtggttattactggcgacggtagtttccagatgaatatccaggagctcgctaccattagccattaccagttgccactcaagattattatcatgaacaacggttacctgggtatggtgcgtcagtggcaggaattcttttttaaccgccgctatgcctactcggagatgctcggtaatccggactttgtcaaggtggctgaggcctaccgcattccggggcggctggttaacgaaagccgggaggttgttcccgctctggaagaagccctggctgcagaaggccccttcctggttgatgtcaggatcgacagggaggagaacgtctttcccatggtgccgccggggggcaccctcaataagatggtgacgggaggtaagggagcatga

SEQ ID NO: 138017 - protein, 569 aa, Moorella thermoacetica ATCC 39073
MLFTIGDRAEGKKLTGAEIIVQALQAEGVDTVFGIPGGSVLPLYHELAVASIRHILTRHEQAAAHAADGYARASGKPGVCIATSGPGATNLVTGIANAYMDSIPLVAITGQVSVPMIGHDSFQEADITGITLPITKANYLVKNVHDLAATIHEAFYIATTGRPGPVLIDIPKDITTQRALFRYPPRLHLPGYRCKVQPHALQVAQAAAAIGAAEKPLLFIGGGVITSEAHEEVRQLAEGQDIPVVMSMMGKGGFPETHPLFVGMVGMHGTAAANYAMCETDLIIGVGVRFDDRVTGKVEAFAPKAKIIHIDIDAAEIGKVVQAHIPIVSDARQGLAAILEKLSGKGDHQAWRQQIRRWQEENPLRYEKSGLKPQYVLEELYNLTKGQAIICTDVGQHQMWAVQYYPLSRPRAFLSSCGLGTMGFGVPAAMGAAVARPGEPIVVITGDGSFQMNIQELATISHYQLPLKIIIMNNGYLGMVRQWQEFFFNRRYAYSEMLGNPDFVKVAEAYRIPGRLVNESREVVPALEEALAAEGPFLVDVRIDREENVFPMVPPGGTLNKMVTGGKGA

SEQ ID NO: 138018 - DNA, 1707 bp, Syntrophus aciditrophicus SB
  CDS (1)..(1707): transl_table=11
gtgaaactcaccggatcacaagtcctttttaaagccttgcgggaagaaaaagtagatactattttcggttatcccgggggctccgtcatcgatctttatgatgaattgttccatcaggaaggaatcaaacactatctggtgcggcatgaacagggggccgtccacgccgcggacggttatgcgcgcgctaccggcaaagtcggggtctgcctggtgacttccggtcccggcgccaccaacaccgtaaccggcattgccaatgcctatgcggattccatcccgatcgtcatcctgaccgggcaggttcccacccatatgatcggcaaggatgcctttcaggaagtggacattacaggcattacccgtccctgcagtaagcataactttctggtcagaaaaatcgatgacctgggccgtactataagagaagccttctacatcgcgcacagcgggcgtcccggtcccgttctggtcgatatccctaaagatattctacagggaacgctggaagaaacagagcttttcatggaaattcatctgcctccggagccgcccaaagagccgatcgacgaggcctgcgccgcagccctgaccatgatccggaccgcacgcaaaccggttattttcgccggcggcggggttctgcggggaaaagccgtttccgagctgatgacctttgccaattgcatccatgctccggtcacggcatcgctcatgggactgggagcttttcccggaactcacccgcgctggctgggcatgctgggcatgcacggaacttattacgccaacatggccgtcagtcactgtgacctgttgattgccgtgggtgtgcgctttgacgaccgtgtcacctccaaggtggcggaattcgcgcctcacgccaaaattattcatatcgacatcgatcccgtttcaatcaacaagatcgtcaagtctcatgtttctatcatcagcgactgccgggaagctctgcagcgtcttctttccatggccggtggcgaagttctgctttccgcggatcaaacccgggaatggctggagcagattgaaaaatggaagaaggcggttcctctgagctattgccgcagcgcgaagatcaagcctcagtatgtcatcgaaaagctctacgaactgacgcggggggaggccatcattaccactgaagtcggtcagaatcagatgtgggcagcccagttctaccggttcgatcaccccgataccttcatctcctcgggcggactgggaacgatgggattcgggcttccggcggcgattggcgcccaggtagcctttccggaccggttggtcgtcgacattgccggagacggcagcattcagatgaacatccaggaactggctaccgccgtgcattacaatctgccggtcaaggtcgtcatcctgaacaacggcttcctgggaatggtccggcagtggcaggaaatgttttacggcagacgctattcccagaccgagatgaaacaggcgctggatttcgtcaaactggccgaggcattcggtgccgtcgggttaagggccacaaaaccggaagaagtggaagaggttctgcgcaaggggctggaaactccgagggccgtcatgatggatttccacgtggaaccggaagagcaggtataccccatggtcagcccgggtgcgggactgacggacatgaagctgggaaacctgcgtcgggatgccgattaa

SEQ ID NO: 138019 - protein, 568 aa, Syntrophus aciditrophicus SB
MKLTGSQVLFKALREEKVDTIFGYPGGSVIDLYDELFHQEGIKHYLVRHEQGAVHAADGYARATGKVGVCLVTSGPGATNTVTGIANAYADSIPIVILTGQVPTHMIGKDAFQEVDITGITRPCSKHNFLVRKIDDLGRTIREAFYIAHSGRPGPVLVDIPKDILQGTLEETELFMEIHLPPEPPKEPIDEACAAALTMIRTARKPVIFAGGGVLRGKAVSELMTFANCIHAPVTASLMGLGAFPGTHPRWLGMLGMHGTYYANMAVSHCDLLIAVGVRFDDRVTSKVAEFAPHAKIIHIDIDPVSINKIVKSHVSIISDCREALQRLLSMAGGEVLLSADQTREWLEQIEKWKKAVPLSYCRSAKIKPQYVIEKLYELTRGEAIITTEVGQNQMWAAQFYRFDHPDTFISSGGLGTMGFGLPAAIGAQVAFPDRLVVDIAGDGSIQMNIQELATAVHYNLPVKVVILNNGFLGMVRQWQEMFYGRRYSQTEMKQALDFVKLAEAFGAVGLRATKPEEVEEVLRKGLETPRAVMMDFHVEPEEQVYPMVSPGAGLTDMKLGNLRRDAD

SEQ ID NO: 138020 - DNA, 1827 bp, Frankia sp. CcI3
  CDS (1)..(1827): transl_table=11
atgacacgagagatcaccggagcccagtcgctcgtccactcccttgaagcggtcggagccgatgtggtcttcggcatccccggcggcgcgatcctgcccgcatatgatccactgttcgactccacccgggtgcgacatgtccttgtccggcacgagcagggcgcgggtcatgcggccgaggggtacgcgcaggccaccgggcgggtcggggtgtgcatggcgacgtcggggccgggggcgaccaacctggtgactccgatcgccgacgcctacatggactcggtgccgatcgtggccgtcaccgggcaggtccccagtccctcgatcgggaccgacgccttccaggaggcggacatctgcggcatcaccctgccgatcaccaagcacaacttcctggtccagtccgccgacgacatcccgcggatcatcgcggaggcgttccacctggcggcgacgggccggcccggaccggtgctcgtcgacctgcccaaggacatcctgcagtcggccacctccgtgctgccgcacgatgtctggccgccggctctcgacctgcccggttatcgtccggtcacccgcccgcacggcaagcaggtgcgggaggcggcgaagatgatcagtgctgcccggcgtccggtgctctatatcggtgggggagtgctcagggcccgcgctgccgcggagctgcggacactggcggagctcaccggcatcccggtggtcaccaccctcatggcccgcggcgccttccccgactcccatccccagcacctgggcatgcccggcatgcacgggtcggtcgccgcggtgaccgcgttgcagaaggcggatctgctgatcactctcggggcccgcttcgatgaccgggtgaccggcaggctgtcctccttcgcgcccggtgccgcggtcattcacgccgacatcgacccggccgagatcggcaagaaccggaccgcggacgtaccgatcgtcggtgactgccgtgatgtgatcaacgagctcgtcgccgcgctcgtcctggaggagcggccggacctcgccgcctggtggcggacgctggacggctggcgccggacctacccgctgggctacgaccagccggctgacggctcgctggccccgcagtacgtcatcgagcggctcgggaagatcgcgggaccggagaccatcttcgccgccggcgtcgggcagcaccagatgtgggccgcgcagttcatctcctacgagaacccctacacctggctgaactccggcggcgccggcacgatgggctacgccgtgccggccgcgatgggcgccagggtcggccgccccgacgccacggtgtgggccgtcgacggtgacggctgcttccagatgaccaaccaggagcttgcgacctgcgcgctggagggaatcccgatcaaggttgccgtcatcaacaacgggtcgctcggcatggtccgccagtggcagaccctcttctacgacaagcggtactccaacacggagctcgggacgcacccggactccccgcggaccggcggcgcaggggcgtctgggcggggctcaggggcgtccaggagggtgcgggtgcccgacttcgtccggctggccgaggcgttgggctgcgtcgggctgcgctgcgagacggcggcggatgtcgacgcgacgatcgagaaggcgatggcgatcgacgacgccccggtcgtggtggacttcgtcgtgcatcccgacgccatggtgtggccgatggtcgccgccggcgccagcaacgacgacatccgcatcgcgcgcgacaccgcgccggacttcgactactccggcgacgccgaggtgaacatctga

SEQ ID NO: 138021 - protein, 608 aa, Frankia sp. CcI3
MTREITGAQSLVHSLEAVGADVVFGIPGGAILPAYDPLFDSTRVRHVLVRHEQGAGHAAEGYAQATGRVGVCMATSGPGATNLVTPIADAYMDSVPIVAVTGQVPSPSIGTDAFQEADICGITLPITKHNFLVQSADDIPRIIAEAFHLAATGRPGPVLVDLPKDILQSATSVLPHDVWPPALDLPGYRPVTRPHGKQVREAAKMISAARRPVLYIGGGVLRARAAAELRTLAELTGIPVVTTLMARGAFPDSHPQHLGMPGMHGSVAAVTALQKADLLITLGARFDDRVTGRLSSFAPGAAVIHADIDPAEIGKNRTADVPIVGDCRDVINELVAALVLEERPDLAAWWRTLDGWRRTYPLGYDQPADGSLAPQYVIERLGKIAGPETIFAAGVGQHQMWAAQFISYENPYTWLNSGGAGTMGYAVPAAMGARVGRPDATVWAVDGDGCFQMTNQELATCALEGIPIKVAVINNGSLGMVRQWQTLFYDKRYSNTELGTHPDSPRTGGAGASGRGSGASRRVRVPDFVRLAEALGCVGLRCETAADVDATIEKAMAIDDAPVVVDFVVHPDAMVWPMVAAGASNDDIRIARDTAPDFDYSGDAEVNI

SEQ ID NO: 138022 - DNA, 1749 bp, Novosphingobium aromaticivorans DSM 12444
  CDS (1)..(1749): transl_table=11
gtgacaaccgagcgcagcggcgccgagatcctggtcgaaagcctcgtcgcaaagggggtcgagttcgtgttcggctatccgggcggcgcggtgctcccgatctacgatgcgctgttcggcgatgaacgcctccgccacatcctagtccgccacgaagccggcgctgcccacgccgccgaaggctacgcgcgcgccaccggcaagcccggcgtcgtgctcgtcacctcgggcccgggcgcgaccaacgccgtcaccggcattgccgatgcgttcatggattcgattccgatggtcgtcatcaccggccaggtccccacggccctgatcggttcggatgcgttccaggaagccgacacgatcggcatcacgcgccactgcacgaagcacaactacctcgtgaaggacccgtcgcagctggcggcgaccatcgacgaagcgttccgcatcgccaccgagggccgccccggcccggtcgtgatcgacatccccaaggatgtgcagatcgcgacggccgcgtggagcagcgccgccccgcagcagcgcaaccgctatgctccccagaccgagggcggcgcgaaggagattgccgaagcgatcgaactgatcgccaaggccaaggcgccggtcttctacacgggcggcggcgtgatcaatgccggcccggaagcggcccgcctgctgcgcgaactccagtcgctgaccggcgcgcccgtgacctccacgctgatgggccttggcgcgtttccggcggaccacccggcatggctcggcatgctcggcatgcacggcacctacgaagccaacatgacgatgaaccgcgccgacctcgtcgtctgcatcggcgcccgcttcgacgaccgcgtcaccggccggctcgatgccttctcgcccaacagcaagaagatccacatcgacatcgaccgggcctcgatcaacaagaccgtccaggtcgaccttccggtcatcggcgattgcggcaaggtccttgcccagctcatcgaagcatggctcgagcgcggctaccagaagcaggacctgactgaatggaacgcccgcatcgatggctggcgtgcccggcagagcctcgccttcccgcgtcgcggcaaggaaatcatgccccagctggcgatcgaacgtctctatgagctgaccaggcacaaggagccgatcatcagcaccgaagtcggccagcaccagatgtgggctgcccagcacttccacttcatgaagccgaacaagtggctgacctcgggcggcctcggcacgatgggctatggccttcccgccgcgatcggtgcacaggccggcttccccgatgcgctggtcatcgacatcgcgggcgatgcttcgatccagatgaacatccaggaactcggcacggccacccagtaccgccttccggtcaaggtcttcgtgctgaacaacgaatggatgggcatggtccgccagtggcaggaactcacctacgagagccgctactcgaactcctactcggacagcctgcccgatttcgtgaagctcgccgaagcctacggctggaagggcatccgcatcaccgacgaaagcgagctggacgccggcatccaggcgatgatcgatcatgacggcccggtcttcgtcgactgcctcgtcgccaaggaagcgaattgcttcccgatgatcccgtcgggggctgcgcacaccgacatgatcctctacggggacgaagtcgccggcacgatggacgacgaagccaaggcgctggtctga

SEQ ID NO: 138023 - protein, 582 aa, Novosphingobium aromaticivorans DSM 12444
MTTERSGAEILVESLVAKGVEFVFGYPGGAVLPIYDALFGDERLRHILVRHEAGAAHAAEGYARATGKPGVVLVTSGPGATNAVTGIADAFMDSIPMVVITGQVPTALIGSDAFQEADTIGITRHCTKHNYLVKDPSQLAATIDEAFRIATEGRPGPVVIDIPKDVQIATAAWSSAAPQQRNRYAPQTEGGAKEIAEAIELIAKAKAPVFYTGGGVINAGPEAARLLRELQSLTGAPVTSTLMGLGAFPADHPAWLGMLGMHGTYEANMTMNRADLVVCIGARFDDRVTGRLDAFSPNSKKIHIDIDRASINKTVQVDLPVIGDCGKVLAQLIEAWLERGYQKQDLTEWNARIDGWRARQSLAFPRRGKEIMPQLAIERLYELTRHKEPIISTEVGQHQMWAAQHFHFMKPNKWLTSGGLGTMGYGLPAAIGAQAGFPDALVIDIAGDASIQMNIQELGTATQYRLPVKVFVLNNEWMGMVRQWQELTYESRYSNSYSDSLPDFVKLAEAYGWKGIRITDESELDAGIQAMIDHDGPVFVDCLVAKEANCFPMIPSGAAHTDMILYGDEVAGTMDDEAKALV

SEQ ID NO: 138024 - DNA, 1686 bp, Desulfitobacterium hafniense Y51
  CDS (1)..(1686): transl_table=11
ttggggaatgagaaggagagtactacctatgccacaggggcggctcttttgctggattctttggtccaggaaggagtagaggtcatgtttgggtatcccggcggagctgttttgcccatctatgatgccctgatcaacagcccgatccggcatctgctgccccggcatgagcagactgccattcatgccgccgacgcctttgcccgggtcagcggcaaagtaggggtttgcctggccacttccgggccgggagcaacgaatttagtcacagggattgccaatgcctatatggattccatacccgttgtgatcttaaccgggcaagtccccaccagccttttggggacggattccttccaagaggtggatatcacagggattacccttcccatcaccaaacattcttatcttgtcaaggacccgcggcagatcccgcggattgtcaaggaagctttttatattgccagcacaggacgtcccggccccgtcttaatcgacttgcccaaaaacgttctggccgcaacggatgtccgcccggccccggcggaattgaatctgaaaagctataaatactttaccaaggggaatgccgggcagatcgaagaagcagcccgggtcatcgcccaatcccagcggccggttctctatgccgggggaggagtgatcacggccggagccagtgaaatccttcagcaagtcgtggaaagggccaaccttccggtggtcactaccctgatggggataggaagcctgcccacaaaccaccccaatgttttggggatggtagggatgcacggaaccgtgacggcaaattatgcagtagatgattgtgatctgctgattgctataggggtccgcttcgacgaccgggtcaccagcggtttaggccatcgttttgccacgaaagccaaaatcattcatatcgacattgatcccgccgaaattggcaaagttgcaagaaccaaggtccccattgtcggcaatgccaaattggttttggaagagcttctctctaaagtcagcaaaccggaaatttctccttggtgggagcaaatccgcttgtggcaggaagaaaaactcaagaccgataatcccaatcttaatcctcaggtgattattgagaccctgggcgaaattgccggagaagaaaccatcgtcaccaccgatgtgggccagcatcagatgtgggctgcccaaggctatccggttccagctccccggcattttatcaccagcggcggtctgggcaccatgggttttggattgccggcagccctcggagctcaagtcgctgctcctgaaagcaccgtttttctggttacaggggacggctccttccagatgagcattcaggagctggctaccgcagtacaataccagcttccggtaaagattatcctcatgaataacggggttttaggtatggtgcgccagctgcagatggtcttttgcgatgagcgttatagtcagattcagcttaccgccaaccctgattttatcaagattgccgaagcttacggcattcgcggaattcgcgttacggagacttccgaagtccgcaacgctctcttggaagctattaatcatcccggtccggttctcatggatttcattatatccgaagatgaagtggtctccccgatggttcccccagggaagggactcacagaaatgttggggtggtga

SEQ ID NO: 138025 - protein, 561 aa, Desulfitobacterium hafniense Y51
MGNEKESTTYATGAALLLDSLVQEGVEVMFGYPGGAVLPIYDALINSPIRHLLPRHEQTAIHAADAFARVSGKVGVCLATSGPGATNLVTGIANAYMDSIPVVILTGQVPTSLLGTDSFQEVDITGITLPITKHSYLVKDPRQIPRIVKEAFYIASTGRPGPVLIDLPKNVLAATDVRPAPAELNLKSYKYFTKGNAGQIEEAARVIAQSQRPVLYAGGGVITAGASEILQQVVERANLPVVTTLMGIGSLPTNHPNVLGMVGMHGTVTANYAVDDCDLLIAIGVRFDDRVTSGLGHRFATKAKIIHIDIDPAEIGKVARTKVPIVGNAKLVLEELLSKVSKPEISPWWEQIRLWQEEKLKTDNPNLNPQVIIETLGEIAGEETIVTTDVGQHQMWAAQGYPVPAPRHFITSGGLGTMGFGLPAALGAQVAAPESTVFLVTGDGSFQMSIQELATAVQYQLPVKIILMNNGVLGMVRQLQMVFCDERYSQIQLTANPDFIKIAEAYGIRGIRVTETSEVRNALLEAINHPGPVLMDFIISEDEVVSPMVPPGKGLTEMLGW

SEQ ID NO: 138026 - DNA, 1767 bp, Saccharophagus degradans 2-40
  CDS (1)..(1767): transl_table=11
atgaaatatgatggacatcagaggataaagcaggtggaaaaactctccggcggagacatgttaattcgcgcgcttgcagacgaaggcgttgaatatttatttggttacccaggcggtgccgcactgcatatatatgatgcagtatttcgtcagaagcgagtccagcacattttggtgcgccacgagcaagctgcaacacacgctgcagatggctacgcacgttcaaccggtaaggtgggcacggtgctggtgacttctggtccaggtgctaccaatgccattacgggtattgctacagcctatatggattcaattccaatggttgtaatttcggggcaggtggcttccgataagattggtgaagacgcgttccaagaaaccgatatggtgggggtgtcgcgcccaatcgttaagcacagctttcttgttaagcatgccaaagacatacccgagattgtcaaaaaagctttctatattgcttctactggccgccctgggcctgtggttattgatatccccaaagatattactaacccagtagataagtttgaatacagctacccagacaaagtaaaaattcgctcttacacgcctgcagcgaaaggtcatactggtcaaatcaaaaaggccgttcagcttttactaggcgctcgacgccctattatttatgccggcggcggtgttgtgcagggtaatgctagtaatcaacttactgaaatagccaagctacttaacttccccgttaccaatacgttgatggggctaggtgcatttcctggtaccgataagcaatttttgggcatgttgggcatgcacggcacggtagaggcgaatacagcaatgcatcacgccgatgtgatatttgccgtaggtgctcgctttgatgaccgcgtaactaacacgccgtcaaagttctgcccgtctgccaaaattattcatattgatatagacccagcatcaatatctaaaacagtaaccgcagacgtgccaattgttggccccgtggaaggtgtgttagatgaaatgctcgagctggttaaagctactaaagagcgcccagatacctcagcgattgcctcttggtggaagcaaatagacgaatggcgcgaccgctatagcatcatagataccccgcgttacgacacgggcggcatgattaagccgcaagaagtagtgcgcatggttcacgaagtgacaggtggcgacgcttatgtgtgttccgatgtgggtcagcaccaaatgtttagtgcgcagtactaccagtttgataagccgcgccgctggatcaactctggtggcttgggcactatgggctttggtttacctgctgcgatgggcgtgcaaattgcacatcgtgacgccaatgtggtgtgtgtaacaggtgaaggcagtatacaaatgtgtattcaagagctttctacctgcacgcagtatcacttgccggttaagattatttgtatcaataaccaagcgctaggtatggttagacagtggcaagatatgcaatacgaaagccgctactcagaaagcttgtacgaagattctctgccagattttgttaagttgatggaagcctacggccatgttggtatgaaggtaaccaagcgtgaagagcttaaaagcaagctagaagagtgttttgccatgaaagacaaaactgtgtttatggatatctatgtcgacccgaacgagcatgtttaccccatgcaggtagcacctaacggttctatgcgcgatatgtggttgagtaagtcggagcgtacataa

SEQ ID NO: 138027 - protein, 588 aa, Saccharophagus degradans 2-40
MKYDGHQRIKQVEKLSGGDMLIRALADEGVEYLFGYPGGAALHIYDAVFRQKRVQHILVRHEQAATHAADGYARSTGKVGTVLVTSGPGATNAITGIATAYMDSIPMVVISGQVASDKIGEDAFQETDMVGVSRPIVKHSFLVKHAKDIPEIVKKAFYIASTGRPGPVVIDIPKDITNPVDKFEYSYPDKVKIRSYTPAAKGHTGQIKKAVQLLLGARRPIIYAGGGVVQGNASNQLTEIAKLLNFPVTNTLMGLGAFPGTDKQFLGMLGMHGTVEANTAMHHADVIFAVGARFDDRVTNTPSKFCPSAKIIHIDIDPASISKTVTADVPIVGPVEGVLDEMLELVKATKERPDTSAIASWWKQIDEWRDRYSIIDTPRYDTGGMIKPQEVVRMVHEVTGGDAYVCSDVGQHQMFSAQYYQFDKPRRWINSGGLGTMGFGLPAAMGVQIAHRDANVVCVTGEGSIQMCIQELSTCTQYHLPVKIICINNQALGMVRQWQDMQYESRYSESLYEDSLPDFVKLMEAYGHVGMKVTKREELKSKLEECFAMKDKTVFMDIYVDPNEHVYPMQVAPNGSMRDMWLSKSERT

SEQ ID NO: 138028 - DNA, 1707 bp, Methylobacillus flagellatus KT
  CDS (1)..(1707): transl_table=11
atggaattatctggcgcagaaatcgtcattcgctgcttgcaggaagaaaacgtcaaatacgttttcggctatcctggcggcgcagtgctcaatatttatgatgaaatattcaaacaggacaagttcaagcacattcttgtccggcatgagcaagccgctgtccacgcggcagacgcctattctcgcgccacgggtgaggtcggggtcgccctggtgacatccggccctggtgccaccaatgccattaccggcattgccactgcccatatggactccatccccttggtcgtcattagcggccaggcgcctacgcctgccattggccaggatgccttccaggaagtggacatgatcggcatctcacggccctgcgtgaagcacaacttcctggtcaaggacgtgaaagacatcgctcccaccatcaagaaggcattcttcattgccgcgactggccgtcccggcccagtggtcgtcgacatccccaaggatattactgcgcacctcggccattatgaatatcccgagagtgtagagatgcgctcctacacgcctatcctcaagggacactctggccagatcaagaaggccatcaagctcatgctcgaagctaagcgccccatgctgtataccggcggcggcgtagtgctcggcgatgcctcggagcagctgatcaagctcgcacgcagactgggcttccccgttaccaataccctgatgggattgggcggctatcctgctacggacaagcagttcgtcggcatgctcggcatgcacggcactctggaagccaatatggcgatgcagaactgtgacgtgctggttgccatcggcgcgcgctttgacgaccgcgtcatcggcaatccgcagcacttctacaacaaggaccgcaccatcatccatgtcgatgtggatccttcctctatctccaagcgcgtcaaggtggatgtgcccatcgtcggccacgtgcagtccgtgctggccgaaatgaacgacttgctggacgccgaaacccgcgcacccgacgctgccgcgctcaaggcctggtggacgcagatcgaggaatggcgtggccgcaactgcctgggctacaaccgcaacagcgagatcatcaagccgcagttcgtcatcgaaaaattgtgggaagtcaccaagggcgaggcctatgtaacgtccgacgtcggccagcaccagatgtgggccgcgcaatattacaagttcgacaagccgcgccgctggatcaactcgggcggcctgggcaccatgggcgtcggcctgccctacgccatgggcgtgcagtttgccgatcccaaagccaaagtcgcctgtattaccggcgagggcagtatccagatgaacatccaggagctgtcgacctgcaagcaattccacctgccgatcaaggtgatcctgctcaacaaccgctatctgggcatggtgcgccaatggcagcaattcttctacgaaaaccgctattcggaatcctacatggacagcctgccggatttcgtcaagcttgcagagtcctacggccatgtcggcatgaacatcgagaagcctgccgacgttgaaggcgccctgaccgaggcattcaacctcacggacaggtttgtcttcatgaacttcatcaccgaccagaacgagaacgtgttcccaatggtgccgaacggcaagggcttgtctgaaatcatcctggctgaagacctgtaa

SEQ ID NO: 138029 - protein, 568 aa, Methylobacillus flagellatus KT
MELSGAEIVIRCLQEENVKYVFGYPGGAVLNIYDEIFKQDKFKHILVRHEQAAVHAADAYSRATGEVGVALVTSGPGATNAITGIATAHMDSIPLVVISGQAPTPAIGQDAFQEVDMIGISRPCVKHNFLVKDVKDIAPTIKKAFFIAATGRPGPVVVDIPKDITAHLGHYEYPESVEMRSYTPILKGHSGQIKKAIKLMLEAKRPMLYTGGGVVLGDASEQLIKLARRLGFPVTNTLMGLGGYPATDKQFVGMLGMHGTLEANMAMQNCDVLVAIGARFDDRVIGNPQHFYNKDRTIIHVDVDPSSISKRVKVDVPIVGHVQSVLAEMNDLLDAETRAPDAAALKAWWTQIEEWRGRNCLGYNRNSEIIKPQFVIEKLWEVTKGEAYVTSDVGQHQMWAAQYYKFDKPRRWINSGGLGTMGVGLPYAMGVQFADPKAKVACITGEGSIQMNIQELSTCKQFHLPIKVILLNNRYLGMVRQWQQFFYENRYSESYMDSLPDFVKLAESYGHVGMNIEKPADVEGALTEAFNLTDRFVFMNFITDQNENVFPMVPNGKGLSEIILAEDL

SEQ ID NO: 138030 - DNA, 1764 bp, Ralstonia metallidurans CH34
  CDS (1)..(1764): transl_table=11
atgaacatgcccagcgcggaattttcccacgccgatagcaattcatcctccgctcgcgaaatgatcggagcggaaatcctcgtcaacgcacttgccgaagaaggcgtcgaatacgtctggggttatcccggcggcgcagtgctctatatctacgacgagctccacaagcaaaccaaattcgaacatatcctggtgcgccacgagcaggccgccgtccatgccgctgacgggtacgcccgtgcgaccggcaaggtgggcgttgcgctggtgacctcgggtccgggcgtgaccaatgccgtgaccggcatcgctaccgcctatctggattcgattccgatggtggtgatcaccggcaacgtgccgactcacgcgatcggtcaggatgcattccaggaatgcgacaccgttggcatcacgcgcccgatcgtcaagcacaacttcctcgtgaaggacgtgcgtgacctggccgccacgatcaagaaggcgttcttcattgccgccaccggccgtcccggccctgtggtggtcgatatcccgaaggacgtgtcgcgcaacagctgcaagtacgagtatccgaagtcgattgacatgcgctcgtacagcccggtgaacaagggccattcgggtcagatccgcaaggccgtggcgttgctgcaatcggccgagcgcccgtacatctattcgggcggtggcgtggtgctggccaacgcaagcgaagagctgcgcgagctggccgcgctcaccggtcatccggtcaccaatacgctgatgggcctgggcgcgttccccggcacgagcaagcagttcgttggcatgctcggcatgcacggcacgtacgaggccaacatggccatgcagaactgcgacgtgctgattgccatcggcgcccgattcgatgaccgcgtgatcggcaacccgtcgcacttcactgcgcaggcccgcaagatcatccacatcgacatcgacccgtcgtcgatctcgaagcgcgtcaaggtggacattcccatcgttggcaacgtcaaggacgtgctgcaggaactgatttcccagatcaagacgagcgatatcaagcccaagcgcgaggctctggccaagtggtgggaacagatcgagaagtggcgctcggtggactgcctcaagtacgaccgcagttccgagatcatcaagccgcagtacgtggtggaaaagatctgggaactgacgcacggcgacgcattcatctgctccgacgtgggccagcaccagatgtgggccgcgcagttctacaagttcaacgagccgcgtcgctggatcaattccggtggcctcggcacgatgggcgtgggtctgccgtacgcaatgggcatcaagaaggcattcccggacaaggaagtcgtcaccatcactggtgaaggctcgatccagatgtgtatccaggaactgtcgacctgcctgcagtacgacaccccggtcaagatctgctcgctgaacaacggatatctgggcatggtgcgccagtggcaggaaatcgagtacgacaatcgttactcgcattcctacatgcaggcattgcccgacttcgtcaaactcgccgaagcctatggccacgtggggatgcgcatcgagaagagctccgatgtggaacccgcgttgcgcgaggctttccgactcaaggaccgtaccgtgttcctggacttccagaccgaccccactgaaaacgtgtggccaatggttcaggctggcaagggtatctccgaaatgctgcttggcgcggaggacctgtaa

SEQ ID NO: 138031 - protein, 587 aa, Ralstonia metallidurans CH34
MNMPSAEFSHADSNSSSAREMIGAEILVNALAEEGVEYVWGYPGGAVLYIYDELHKQTKFEHILVRHEQAAVHAADGYARATGKVGVALVTSGPGVTNAVTGIATAYLDSIPMVVITGNVPTHAIGQDAFQECDTVGITRPIVKHNFLVKDVRDLAATIKKAFFIAATGRPGPVVVDIPKDVSRNSCKYEYPKSIDMRSYSPVNKGHSGQIRKAVALLQSAERPYIYSGGGVVLANASEELRELAALTGHPVTNTLMGLGAFPGTSKQFVGMLGMHGTYEANMAMQNCDVLIAIGARFDDRVIGNPSHFTAQARKIIHIDIDPSSISKRVKVDIPIVGNVKDVLQELISQIKTSDIKPKREALAKWWEQIEKWRSVDCLKYDRSSEIIKPQYVVEKIWELTHGDAFICSDVGQHQMWAAQFYKFNEPRRWINSGGLGTMGVGLPYAMGIKKAFPDKEVVTITGEGSIQMCIQELSTCLQYDTPVKICSLNNGYLGMVRQWQEIEYDNRYSHSYMQALPDFVKLAEAYGHVGMRIEKSSDVEPALREAFRLKDRTVFLDFQTDPTENVWPMVQAGKGISEMLLGAEDL

SEQ ID NO: 138032 - DNA, 1803 bp, Mesorhizobium sp. BNC1
  CDS (1)..(1803): transl_table=11
atggaacagcgggcgccggagccaagggcacacgaaacgggcagacaggaaatgacaggcgcggagatggtcgtgcaggcgctgaaggacaacggcgtcgagcacatcttcggctatcctggcggcgcggtgctccccatttatgatgagctcttccagcaggaccagatacagcacattctcgtgcgccatgagcaaggcgcagggcacgccgcggaaggttatgcgcggtcgaccggcaaggccggcgtgatgctggtgacctccggtcccggcgcgaccaacgccgtcacgccgcttcaggacgcgttgatggattccatcccgcttgtctgcatcaccggccaggtgccgacgccgctcatcggctccgacgctttccaggaatgcgatacggtgggcatcacgcgcccatgcaccaaacacaattggcttgtgcgggacgtcagcgatctcgcggctattctgcatgaggctttccatgtcgccaccacgggccggcccggcccggtcgtggtcgacatccccaaggacgtgcaatttgcgcgtggcatctacaccccgccgcagaccgctccgcggacaagttaccagccgacgctcgacggagatcaggaaaagatccgtgcggccgtcgcgctgatggcttccgcccgccggccgatcatctataccggcggcggcgtcatcaatgccggaccggaggcgagccatcttctgcgcgaactggtggggctgacgggtttcccgattacgtcgacgctgatgggccttggcgcctacccggcctccggcgagaactggctcggcatgctcggcatgcacgggacctatgaagccaatatggccatgcatgactgcgacgtgatgctatgcatcggcgcacggttcgacgaccgcatcaccggccggctcgatgccttctcgccgaactcgcgcaagatccatgtcgatgtggacccttcatcgatcaataagaatgtgcgggtcgatattcccatcatcggcgatgctggccgggtgcttgaggacatggtgcggctctggcgggcgagcgccaatgccgacaaggcggcgctcaagccttggtgggagcagatcaacaggtggcgcgcgcgccagtcgctggcctataaaaccaacagcgacgtgatcatgccgcaatacgcggtcgagcggctttatgaactgacgaaggggcgcgacgtctacgtcaccaccgaggtgggccaacaccagatgtgggcggcgcagcacttcggcttcgatcagcccaatcggtggatgacctctggcggcctcgggacaatgggatatgggctgccggccgcgctgggggtgcagatcgcgcatccggacgcgttggtcatcgacatcgccggcgacgcctccgtcctgatgaccatgcaggaaatgagctcggcggtgcagcatgacgcgccgatcaagatctttatcctcaataaccagtatatggggatggtgcggcagtggcagcagcttttgcatggaaaccggctgtcgcattcctataccgaagcattgcctgatttcgtgaagctggctgaagcctacgggtgtcacggtattcgctgcgagaaaccgggcgaactcgacgacgcgatccgcgagatgatcgatgtgaagaagccggtgatcttcgattgccgggttgcgaatctcgccaactgcttcccgatgatcccttccggcaaggcgcataacgagatgctgctgccggacgaggcaaccgacgaggccgtggcgaatgcaatcgatgccgagggcagggcgctggtgtag

SEQ ID NO: 138033 - protein, 600 aa, Mesorhizobium sp. BNC1
MEQRAPEPRAHETGRQEMTGAEMVVQALKDNGVEHIFGYPGGAVLPIYDELFQQDQIQHILVRHEQGAGHAAEGYARSTGKAGVMLVTSGPGATNAVTPLQDALMDSIPLVCITGQVPTPLIGSDAFQECDTVGITRPCTKHNWLVRDVSDLAAILHEAFHVATTGRPGPVVVDIPKDVQFARGIYTPPQTAPRTSYQPTLDGDQEKIRAAVALMASARRPIIYTGGGVINAGPEASHLLRELVGLTGFPITSTLMGLGAYPASGENWLGMLGMHGTYEANMAMHDCDVMLCIGARFDDRITGRLDAFSPNSRKIHVDVDPSSINKNVRVDIPIIGDAGRVLEDMVRLWRASANADKAALKPWWEQINRWRARQSLAYKTNSDVIMPQYAVERLYELTKGRDVYVTTEVGQHQMWAAQHFGFDQPNRWMTSGGLGTMGYGLPAALGVQIAHPDALVIDIAGDASVLMTMQEMSSAVQHDAPIKIFILNNQYMGMVRQWQQLLHGNRLSHSYTEALPDFVKLAEAYGCHGIRCEKPGELDDAIREMIDVKKPVIFDCRVANLANCFPMIPSGKAHNEMLLPDEATDEAVANAIDAEGRALV

SEQ ID NO: 138034 - DNA, 1944 bp, Rhodococcus sp. RHA1
  CDS (1)..(1944): transl_table=11
gtgagcgcaccaaccgcacggcctcaacccacgccgcgcaagtcgggggcagcaagcccgacgaccgcggccgccgcgactcagaccggtagccgccgccaactcgcccccgagcgggtcagcggcgcccagtccgtggtccgagccctcgaggagctcgaggtcgacacggtattcggcattccgggtggtgccgttctgcctgtctacgacccgctcttcgactcgaagaaggtccggcacgtgctcgtccgtcacgagcagggcgcaggccacgccgccaccgggtacgcccaggcgaccggcaaggtcggcgtctgtatggcgacgtccggtcccggtgcgaccaacctcgtgacgccgctcgccgacgcgcagatggactccgttccggtcgtggccatcaccggccaggtcggccgcagtctcatcggcacggacgcgttccaggaagccgacatctccggcatcacgatgccgatcaccaagcacaacttcctcatcaccgacggcgtcgacatcccccggatcatcgcggaggccttctacctcgcctccagcggtcgtcccggcgcggtgctcgtcgacatcccgaaggacgtcctccaggcgcagaccacgttctcgtggccgccggagatgcggctgcccggataccgtcccgtcaccaagccgcacggcaagcaggtccgcgaggcggcccgcctgatcgccgacgcgaagcacccggtgctgtacgtcggtggcggcgtcatcaagtcggaatcgtctccggaactgctcgaactggccgagctcactggcattccggtggtcaccaccctcatggcgcgcggcgcgttcccggacagccacacgctgaactgcggcatgcccggcatgcacggcacggtcgcggcggtggcggcactgcagcgcagcgacctgctgatcacgctcggtgcgcgcttcgacgaccgcgtcaccggtcagctcgattcgttcgcccccgatgccaaggtcatccacgccgacatcgacccggcggagatcggcaagaaccggtacgcggacgtcccgatcgtcggcgactgcaaagaggtcatcgtcgaactgatcgaggcgatcaaggccgacctggccacgggaaccacgctggacctcaccgagtggtgggcgtacctcgacggaatccgtcgcacgtacccgctcagctacgaccgtccctccgacggggcgctgtccccggagtacgtgatccaggcggtcggcaagctcgccggtcccgacgcgatctactgcgccggcgtcggacagcaccagatgtgggcggcgcagttcgtcaactacgaaaagccgcgcacctggctgaactccggcggtctcggcacgatgggctacgccgttcccgccgcgatgggcgccaagatgggcatgcccgacaccgaggtgtgggccatcgacggtgacggctgcttccagatgaccaatcaggaactcgccacctgcgcgctcgagggcatcccgatcaaggttgcgctcatcaacaacggcaacctcggcatggtgcgccagtggcagacgctgttctacgacgagcgctactccaacaccaacctcggcacgcatggcgcaatccgcatccccgacttcgtcaagctggcggaggcgttgggctgccacggcattcgcgtcgagcgcgaagaagacgtcgaggcggcgatccgtgaggcgcaggccatcaacgacaagccggtggtgatcgacttcatcgtcggcgccgacgcccaggtgtggccgatggtcgctgcgggcacgagcaacgacgagatcatggcggcgcggggcatccgtccgctgttcgacgacgacgaggcggccgccgagccggccgtcattcacgaggccatggagcgcgagcagcgttcgggcacggccgcagcggccggggaggaagatcagtga

SEQ ID NO: 138035 - protein, 647 aa, Rhodococcus sp. RHA1
MSAPTARPQPTPRKSGAASPTTAAAATQTGSRRQLAPERVSGAQSVVRALEELEVDTVFGIPGGAVLPVYDPLFDSKKVRHVLVRHEQGAGHAATGYAQATGKVGVCMATSGPGATNLVTPLADAQMDSVPVVAITGQVGRSLIGTDAFQEADISGITMPITKHNFLITDGVDIPRIIAEAFYLASSGRPGAVLVDIPKDVLQAQTTFSWPPEMRLPGYRPVTKPHGKQVREAARLIADAKHPVLYVGGGVIKSESSPELLELAELTGIPVVTTLMARGAFPDSHTLNCGMPGMHGTVAAVAALQRSDLLITLGARFDDRVTGQLDSFAPDAKVIHADIDPAEIGKNRYADVPIVGDCKEVIVELIEAIKADLATGTTLDLTEWWAYLDGIRRTYPLSYDRPSDGALSPEYVIQAVGKLAGPDAIYCAGVGQHQMWAAQFVNYEKPRTWLNSGGLGTMGYAVPAAMGAKMGMPDTEVWAIDGDGCFQMTNQELATCALEGIPIKVALINNGNLGMVRQWQTLFYDERYSNTNLGTHGAIRIPDFVKLAEALGCHGIRVEREEDVEAAIREAQAINDKPVVIDFIVGADAQVWPMVAAGTSNDEIMAARGIRPLFDDDEAAAEPAVIHEAMEREQRSGTAAAAGEEDQ

SEQ ID NO: 138036 - DNA, 1764 bp, Trichodesmium erythraeum IMS101
  CDS (1)..(1764): transl_table=11
gtgcagttacaaactaaagtaagcatcaagcaagctactggtgcctttgcactaatagatagtcttaagcgccatggagttaaacacatatttggctacccaggtggtgctattttgcccatctatgatgaactttaccgcgcagaagcagcaggagacttacaacatatcttagtccgacacgaacaaggagcttcccatgccgctgatggatatgcccgtgctactggtgaagtaggtgtatgttttgctacatccggtcctggagcaacaaacctagtaacaggtattgctactgctcatatggactcaattcccatggttataattacagggcaagtaggccgaccaatgattggtactgatgccttccaagaaacagacatttatggtattaccttacccatagtcaaacattcttatgtcgtccgagaccccagggatatggccagaattgtggctgaagcattccatattgctagtacaggtcgtccaggtccagttttgattgacatacctaaagatgtgggattagaagaatttgagtatgaaccagtagaacctgattctatcacactacctggatatcgtcccactataaaagggaaccctcgccagattaatcaagcaattaatttaatccaagaagcacgtcgtcctttattatatataggtggtggtgcaatttctgctagtgctcatggagaaattcaagaattagcagaacgttttaatattcctgtgactactacattgatgggtaaaggtgcttttaatgaacatcatcccctatcagtgggaatgttaggaatgcacggcactgcttatgccaactatgctgtgagtgagtgtgacttgttaattgctgttggtgctcgttttgatgaccgagtcacaggaaagttggaccaatttgcttcttacgcgaaagtaattcatattgatattgaccccgcagaagtgggtaaaaaccggagccctgaggttcctatagtcggagatgtgcgccaagttttgatcgatatgctagagcgttgtcagaagattgatactaatgttagttctaatcaaacccaaacttggttagaacgtattaaacgttggaaacaagattatccattagttgttccccactactcagatagtatgtcgccccaagaggtgattgatcaaataggtaaaatggctccagatgcttactatactactgatattggtcagcaccaaatgtgggcagctcaatttctcaaaaatggtcctcggcaatgggtttctagtggaggtttgggcacgatgggttatgggatgcctgctgctataggtgtgaaagtagcactgccaaaccgagaggtgatttgtattagtggtgattctagtattcagatgaatattcaggagttgggtactctggcccattatggtattaatgttaaaacagtgattattaataatggttggcagggtatggtgcgccagtggcaacaggcattttttggcgagcgttattcttcgtctaatatggaagtaggaatgcctgattttgttaagttggctgaagcttatggggtgaaagggatgatgatttctcatcgtgatcagctcaaggaggcgatagaggaaatgttagcatacgatcaacctgttttgatggatgctcatgtgaccagggatgaaaattgttatccaatggttgctcctggtaagagtaatgctcaaatgattggtttacctattcgcaaacagcttgagcaagcggtggaataa

SEQ ID NO: 138037 - protein, 587 aa, Trichodesmium erythraeum IMS101
MQLQTKVSIKQATGAFALIDSLKRHGVKHIFGYPGGAILPIYDELYRAEAAGDLQHILVRHEQGASHAADGYARATGEVGVCFATSGPGATNLVTGIATAHMDSIPMVIITGQVGRPMIGTDAFQETDIYGITLPIVKHSYVVRDPRDMARIVAEAFHIASTGRPGPVLIDIPKDVGLEEFEYEPVEPDSITLPGYRPTIKGNPRQINQAINLIQEARRPLLYIGGGAISASAHGEIQELAERFNIPVTTTLMGKGAFNEHHPLSVGMLGMHGTAYANYAVSECDLLIAVGARFDDRVTGKLDQFASYAKVIHIDIDPAEVGKNRSPEVPIVGDVRQVLIDMLERCQKIDTNVSSNQTQTWLERIKRWKQDYPLVVPHYSDSMSPQEVIDQIGKMAPDAYYTTDIGQHQMWAAQFLKNGPRQWVSSGGLGTMGYGMPAAIGVKVALPNREVICISGDSSIQMNIQELGTLAHYGINVKTVIINNGWQGMVRQWQQAFFGERYSSSNMEVGMPDFVKLAEAYGVKGMMISHRDQLKEAIEEMLAYDQPVLMDAHVTRDENCYPMVAPGKSNAQMIGLPIRKQLEQAVE

SEQ ID NO: 138038 - DNA, 1719 bp, Shewanella sp. MR-4
  CDS (1)..(1719): transl_table=11
atggagaagttatccggcgccagcatgattgtgcgatcccttatcgatgaaggtgtaaagcacatatttggttatcctggcggctcagtgttagatatctacgacgccctgcaccttatccccggtattgaacatattctggttcgtcacgaacaagctgccgtgcatatggccgatggttatgcccgcgccacgggtaaagtgggcgtggtactcgtgacctcaggcccaggtgccaccaatgctattaccggcatcgccaccgcctatatggattcaattccattagtggtgttatcaggccaagtgccgagcaatttaatcggtaacgatgcgttccaagaatgcgacatgattgggatttcacgcccagtcgtcaaacacagctttttagtacaagatcccactcaaattcctgagatcattaaaaaagccttttatattgcttccacaggtcgccccggccccgtggttgtcgacttgccaaaggattgcctcaatccagcattactgcacgactatatttaccccgagagcattaaaatgcgctcctataatccaacgacatcgggccataagggtcaaattcgccgtggattacaggcattactcgccgcgaaaaaacctgtgctttatgtgggtggaggcgccattatctcaagcagtgaaaagcagatcttagccctagcggaaaaattaaatatccccgttgtcagcaccttgatgggccttggcgccttccctggcacccataaaaacagcttaggaatgctggggatgcacggtcgttatgaagccaacatgaccatgcataactgcgatcttatcttcgggattggcgtgcgttttgatgacagaaccaccaacaacatcgaaaaatactgccctaatgccaccattttacatattgatatcgacccttcatcgatttcaaaaaccgtgcgagtggatatccccatcgttggctccgccgatatcgtactagacagcatgctagctttgctggaggaatcaaaggagagcaacgatagcgaggcaattaatcaatggtggcaagaaatcacggtttggcgtaaccgcaactgcttggcatacgataaggaaagccatcggatcaaaccacagcaagtgattgaaaccctttacaaactcactaatggtgaggcctatgtcgcctcggatgtaggccagcatcaaatgtttgccgcgctgtattatccctttgataaacctcgtcattggattaactccggcggccttggcaccatgggctttggtctacccgctgccatgggagtcaaaatggcaatgccggacgaaaccgttgtgtgcgtcacgggcgatggttcgattcagatgaatattcaagagctttcaaccgctctgcaatacgatacgccggttaaaattatcaacttaaacaaccgtttccttggcatggtgaaacaatggcaggatatgatctactcgggtcgccattcccattcctatatggattcggtccccaactttgccaaaattgccgaagcctatggccatgttggtatgacgattagcgatcctgctgagcttgagtctaagatggccgaagcccttgccatgaaagacagactggtatttatcgacattatggtggatgagactgagcacgtgtatcccatgcttatccgcggcggcgcgatgaatgaaatgtggttaagcaaaacggagaaatgctaa

SEQ ID NO: 138039 - protein, 572 aa, Shewanella sp. MR-4
MEKLSGASMIVRSLIDEGVKHIFGYPGGSVLDIYDALHLIPGIEHILVRHEQAAVHMADGYARATGKVGVVLVTSGPGATNAITGIATAYMDSIPLVVLSGQVPSNLIGNDAFQECDMIGISRPVVKHSFLVQDPTQIPEIIKKAFYIASTGRPGPVVVDLPKDCLNPALLHDYIYPESIKMRSYNPTTSGHKGQIRRGLQALLAAKKPVLYVGGGAIISSSEKQILALAEKLNIPVVSTLMGLGAFPGTHKNSLGMLGMHGRYEANMTMHNCDLIFGIGVRFDDRTTNNIEKYCPNATILHIDIDPSSISKTVRVDIPIVGSADIVLDSMLALLEESKESNDSEAINQWWQEITVWRNRNCLAYDKESHRIKPQQVIETLYKLTNGEAYVASDVGQHQMFAALYYPFDKPRHWINSGGLGTMGFGLPAAMGVKMAMPDETVVCVTGDGSIQMNIQELSTALQYDTPVKIINLNNRFLGMVKQWQDMIYSGRHSHSYMDSVPNFAKIAEAYGHVGMTISDPAELESKMAEALAMKDRLVFIDIMVDETEHVYPMLIRGGAMNEMWLSKTEKC

SEQ ID NO: 138040 - DNA, 1878 bp, Alkalilimnicola ehrlichei MLHE-1
  CDS (1)..(1878): transl_table=11
atggacagcgcaaccgcgaagaccgaagagtacaccgacaaccaggttcatcccatggccggccagaccatgtccggttccgacatgatcgtagaggtactggcccaggaaggtgtcgacacggtattcggttacagcggcggcgccatcctccccacctacgacgcgatcttccgcttcaacgagcggcaccgcccggcgggcgccggggacgatcccatcaagctgatcgtgcccgccaacgagcagggtgccggtttcatggccgcgggctacgcgcgggccagtggcaaggtgggggtgttcatggtgacctccggcccgggggcgaccaacaccgtcacccccatccgcgattgcatggccgactccgtgccggtggtggccatcaccgggcaggtgcccacccacgccatgggcaccgacgctttccaggaggcgcccatcgtcaacatcatgggggcttgcgccaaacacgtcttcctggtgaccaagcccgagcagttggaggccaccatccgcaccgccttcgaggtggcccgttccggccggccggggccggtggtggtggacgtgcccaaggactcgcagaactggattggccagttccagggcagcgggttgctggacatgcgcggctaccgccagcgtatggagtcgctgcgctcggccaagctctccgaccgcaagtgtcgccagttctttgaaatgctggagcgctcccgccggcccctgatctatgccggcgggggcgtgatcaacggcaatgcggccgagcagcttcgcgagtttgctcgtaccttccgcatcccggtggtgaccaccctgatggggctgggcgctgtggataccaccgacgaactttgtatgggcatgctcggcatgcacgggttcgcccacgccaactacgccgtcgaggactgtgacttcctgatcgccgtgggctcgcgctttgacgatcgcgtggccggaaaggtggcggagttcgcgcccctggccgagcagatcgcgcacatcgacatcgacgccgccgagatcggcaaggttaaatcggtggactgggcccatgtgggcgaggccgggcggagcctgcgccagctgctgcgttatggcgagtccatgggcttcaagggcgagttccagccctggctggaccactgcaccgccctgcgcgagcgccacggcatggactacgaccgggagagcgaactcattcagccccactacgtcatcgaggagatgaacaagctcaccgacgggcgggcgattgtggccaccggcgtaggccagcaccagatgtgggcggcccagtactgcgacttccgggagccgcggctgtggctcacctccggcagtatgggcaccatgggctttgggctgcccgccgccatcggcgcccagttcgcccgcccggacgccctggtcatcgacgtggacggcgatggcagcctgcgcatgaacctgggcgagttggagaccgccaccacctacggcctgccggtcaaggtcctgctgttgaacaactgcggcgatggcatggtgcgccagtggcagcggctgtatttcggcgaccgcttctccggctccgacaagtccctgcaccggaaggacttcatcaagtgtgccgagtcggatggcttcgagttcgcgcgccgggtcagcgacaaggccgaagtgacggaggcactcaaggccttcctcaacttcgacggtccggccttcctggaggtcctgattgaccccgaggcctcggtgctgcccatggtggggccgggtgccggctacaaggagatggtgaccggtgactggattaccccgcgggagcggccgttacagccccgcgatagggacgagcaggaggccccggacctgttctga

SEQ ID NO: 138041 - protein, 625 aa, Alkalilimnicola ehrlichei MLHE-1
MDSATAKTEEYTDNQVHPMAGQTMSGSDMIVEVLAQEGVDTVFGYSGGAILPTYDAIFRFNERHRPAGAGDDPIKLIVPANEQGAGFMAAGYARASGKVGVFMVTSGPGATNTVTPIRDCMADSVPVVAITGQVPTHAMGTDAFQEAPIVNIMGACAKHVFLVTKPEQLEATIRTAFEVARSGRPGPVVVDVPKDSQNWIGQFQGSGLLDMRGYRQRMESLRSAKLSDRKCRQFFEMLERSRRPLIYAGGGVINGNAAEQLREFARTFRIPVVTTLMGLGAVDTTDELCMGMLGMHGFAHANYAVEDCDFLIAVGSRFDDRVAGKVAEFAPLAEQIAHIDIDAAEIGKVKSVDWAHVGEAGRSLRQLLRYGESMGFKGEFQPWLDHCTALRERHGMDYDRESELIQPHYVIEEMNKLTDGRAIVATGVGQHQMWAAQYCDFREPRLWLTSGSMGTMGFGLPAAIGAQFARPDALVIDVDGDGSLRMNLGELETATTYGLPVKVLLLNNCGDGMVRQWQRLYFGDRFSGSDKSLHRKDFIKCAESDGFEFARRVSDKAEVTEALKAFLNFDGPAFLEVLIDPEASVLPMVGPGAGYKEMVTGDWITPRERPLQPRDRDEQEAPDLF

SEQ ID NO: 138042 - DNA, 1791 bp, Rhizobium leguminosarum bv. viciae 3841
  CDS (1)..(1791): transl_table=11
atgagcacggacaatcaggcggcaggcaatcggatgacgggagcggagatcgttctcaaggcgttgaaggacaacggcgtcgaacatatcttcggctatcccggcggcgccgttctgccgatctatgacgagatcttccagcaggaggatgtcaagcacatcctcgtccgccacgagcagggggcaggccacgcggccgaaggttacgcccgctctaccggcaaggtcggcgtcatgctggtgacttcgggcccgggcgctaccaatgcggtcacgccgctgcaggacgcgctgatggattcgatcccgctcgtctgcctgaccggccaggttccgacctcgctgatcggctccgacgccttccaggaatgcgacacagtcggcattacccggccctgcaccaagcacaactggctggtcaaggacgtcaacgaactcgccgccgtcattcacgaggccttccgcatcgcccagtccggccgtccgggccctgtcgtcgtcgatattccgaaggacgtgcagtttgcgaccggcacctacacgccgccggcagattactcgatccagaaaagctaccagccgaaggtccagggcgacctcaaccagatccatgcggcgatcgagctgatggcgaatgcgcgccgtcccgtcatctattccggcggcggcgtcgtcaattccggccccgaggcatccaagctgctgcgcgagctggtcgagctcaccgatttcccgatcacctcgacgctgatgggcctcggcgcctatcccgcttcgggcaagaactggctgaagatgctgggcatgcacggctcctacgaagccaacatggcgatgcacgactgcgacgtcatggtctgcatcggcgcgcgtttcgacgaccgcatcaccggccgtctcaatgccttttcgccgaactcgaagaagatccatatcgatatcgatccgtcctcgatcaacaagaacgtccgggtcgatatcggcatccgtggcgatgtcggccatgtcctcgaagacatggtccgcctgtggcgggcgctgccgaaaaagccggaaaagggtcgcctggacgactggtggaccgatatcgcccgctggcgggcacgcaactccttcgcctatacgaagagcaatgacgtcatcatgccgcaatatgcgctggagcggctcttcgcccacaccaaggaccgcgatacctacatcaccaccgaagtcggccagcaccagatgtgggcggcacagttcttcggtttcgagcagccaaaccgctggatgacctcgggcggcctcggcacgatgggctacggtctgccggccgcgctcggcgtgcagatcgcccatcccgacagcctcgtcatcgacattgccggcgacgcctcgatccagatgtgtatccaggaaatgtcggcagcgatccagcacgatgcgccgatcaagatcttcatcatgaacaaccagtatatgggcatggtgcgccagtggcagcagctgctgcacggcaaccgtctgtcgaattcctatacggaggcgatgcccgacttcgtcaagctggcggaagcctatggcgccgtcggcctgcgctgcgaaaagccggatgcgcttgatgacaccattctggagatgatcgaggtcagaaagcctgtcatcttcgattgccgcgtcgccaatctcgccaattgcttcccgatgatcccctcgggcaaggcccataacgaaatgctgttgccggacgaagccaccgacgaagcggtcgccaatgcgatcgacgccaagggccgcgcgctcgtctaa

SEQ ID NO: 138043 - protein, 596 aa, Rhizobium leguminosarum bv. viciae 3841
MSTDNQAAGNRMTGAEIVLKALKDNGVEHIFGYPGGAVLPIYDEIFQQEDVKHILVRHEQGAGHAAEGYARSTGKVGVMLVTSGPGATNAVTPLQDALMDSIPLVCLTGQVPTSLIGSDAFQECDTVGITRPCTKHNWLVKDVNELAAVIHEAFRIAQSGRPGPVVVDIPKDVQFATGTYTPPADYSIQKSYQPKVQGDLNQIHAAIELMANARRPVIYSGGGVVNSGPEASKLLRELVELTDFPITSTLMGLGAYPASGKNWLKMLGMHGSYEANMAMHDCDVMVCIGARFDDRITGRLNAFSPNSKKIHIDIDPSSINKNVRVDIGIRGDVGHVLEDMVRLWRALPKKPEKGRLDDWWTDIARWRARNSFAYTKSNDVIMPQYALERLFAHTKDRDTYITTEVGQHQMWAAQFFGFEQPNRWMTSGGLGTMGYGLPAALGVQIAHPDSLVIDIAGDASIQMCIQEMSAAIQHDAPIKIFIMNNQYMGMVRQWQQLLHGNRLSNSYTEAMPDFVKLAEAYGAVGLRCEKPDALDDTILEMIEVRKPVIFDCRVANLANCFPMIPSGKAHNEMLLPDEATDEAVANAIDAKGRALV

SEQ ID NO: 138044 - DNA, 1734 bp, Solibacter usitatus Ellin6076
  CDS (1)..(1734): transl_table=11
atgtcaacgttgatgagcggcgcgagaatgctcgccgaatgcctggcccgcgagggcgtggattgcatgttcggttatcccggcggcgtcacccttcccttctacgatgttctttacgaccaccagatccggcacgtgctggtgcgtcacgaggagaacgccgctttcgccgccgaaggctacgcgcgctccaccggcaaggtgggcgtttgctgcgccacctccggccccggcgcgacaaacctgactaccggcctggtggacgcgatgatggattcgatcccgatcgtggcgatcaccgggcaggtcacgagcaagctgattggcagcgacgcgttccaggaggccgacaccttcggaatcacgcggccctgtaccaagcacaactacctggtgaagaagctcgacgagctgccgcagatcattcacgaagccttctacatcgcggccacagggcgtccgggtccggtgctggtggacatcacgaaggacgtgctgcagggaatggggcattatcagccggtcacatcgattcatcttcccgggtacaaggtcttcacggaagggcacacggggcagatccggcgcgcgctgcagttgattcaggagtccgagcggccgctggtttacgccgggggcggcattgtggcggcgaacgcttcggacgagctgcgcgaattcgtgcaactcacggacgcgcccgcggtgaatacgctgatgggcctgggcgcgatgccgagcagcgatccgaattttatttcgatgccaggcatgcacggcagctacgcggcgaacatggcgatgtctaacgcggacctgctgatcgcactgggcgtgcgcttcgacgatcgcgtcacgggacggctggccgcgttcgcgccccacgcgaaggtgatccatgtggatatcgacccagccgaagtggggaagatccgcaatccggaagttccgattgtgggagatgtgaagcgcgtgctcgccaagctgaacaagatgatggtggagacgccggccgagccggatgaaaagcgcagcgcagcgcgacgcgcgtggtggcaccagatccgcgagtggaaggccgagcatccctacgacacgcccacgagcacgacggagatcaagccgcagcacctgatggcagagatcgaccggctctccggcggcgaggcgattatcacgagcgatgtgggccagcaccagatgtgggccgcgcagttgtgccgcttcaacgagccgcgactgtggatcaactcgggcggcttgggctccatgggtttcggattgccctcggcgattggagcgcagttcgcacgtcccgacaagctggtgttttcgatctgcggcgatggcggctttcagatggcgattccggagttggcgacgatcgcaagccacgcgctgcccatcaagatcatcgtaatgaacaacggctacctgggcatggtgcgccaatggcagacgctcttctataacgatcgcctgagctcggtggagctggacgcgttcccggacgcggaaaagctcgcgggcgcgtacggcttcaagggacgcacgatcgacaagccgtgggaactggcggcggcgctggaagaggcggtgcgcgagcccggtccttaccttctcaatgtgaaggtgacgccgtttgaatgcgtctacccgatggtgcccgccggcggcgcgatcaacgagatggtgctcggcccgccgcaaccggtggccgtgcccgcgaaataa

SEQ ID NO: 138045 - protein, 577 aa, Solibacter usitatus Ellin6076
MSTLMSGARMLAECLAREGVDCMFGYPGGVTLPFYDVLYDHQIRHVLVRHEENAAFAAEGYARSTGKVGVCCATSGPGATNLTTGLVDAMMDSIPIVAITGQVTSKLIGSDAFQEADTFGITRPCTKHNYLVKKLDELPQIIHEAFYIAATGRPGPVLVDITKDVLQGMGHYQPVTSIHLPGYKVFTEGHTGQIRRALQLIQESERPLVYAGGGIVAANASDELREFVQLTDAPAVNTLMGLGAMPSSDPNFISMPGMHGSYAANMAMSNADLLIALGVRFDDRVTGRLAAFAPHAKVIHVDIDPAEVGKIRNPEVPIVGDVKRVLAKLNKMMVETPAEPDEKRSAARRAWWHQIREWKAEHPYDTPTSTTEIKPQHLMAEIDRLSGGEAIITSDVGQHQMWAAQLCRFNEPRLWINSGGLGSMGFGLPSAIGAQFARPDKLVFSICGDGGFQMAIPELATIASHALPIKIIVMNNGYLGMVRQWQTLFYNDRLSSVELDAFPDAEKLAGAYGFKGRTIDKPWELAAALEEAVREPGPYLLNVKVTPFECVYPMVPAGGAINEMVLGPPQPVAVPAK

SEQ ID NO: 138046 - DNA, 1695 bp, Magnetococcus sp. MC-1
  CDS (1)..(1695): transl_table=11
gtgagattgaccggcgcagaaatcattgttcagtgcctgcttgagcagggggttaaaaccgtgtttggttaccccggtggggccgtgctgaacatctatgatgaaatctataagtgtaaggatctccagcatgtgctgggtcgccatgaacagggtctgctgcatgcggcggatggttatgcccgggtgacgggtgaggtcggggtggccctggtgacgtcgggccctggtgcgaccaatgcggtaacgggtctggcaaccgcttatatggattcgatccctatggtctgcattaccggtcaggtgccggtggcgctcattgggaacgatgcctttcaagaggccgacacggtaggcattacccgctcctgtaccaagcataactacttggttaaggatgtgaaggatctggcgcgggtgctgcgggaggccttttatattgccagaaccgggcgtccaggcccggtgttggtggatatccccaaggacatcaccatcgcggcgaccgagtatagcccggctaagggtgaggtgagcattcgctcctacaaacccagtatttcgggccataccgggcagatccgtaaggcggcggggcttatggccaaggccaagcgtccgctcttctataccggtggaggggtaatcctctccaacgcggctgaagagctgacccaactggtgcgtaaattgggtgcccccattaccaatacgttgatgggtttgggcggctttccctgcaccgataagcagtttgtcggcatgttgggcatgcacggtacctacgaggccaacatggcggtaagccgctgcgatctgttggtggccattggggcgcgctttgatgatcgcgtcaccggtaaaatctcccagtttgccccagaggcgaagattatccatctggatgtcgaccccacctcaatctccaaaaatgtggaggtggatgtgcccattgtgggtgacattaagacggtgttgggtaaaatgctcgccatgatggaagatggtaaatatcagtccgaattgcccgatctgggggattggtgggctgaaattgagcagtggcggcgcaaagagtgtctaaaattcacccagggcgacgaggtgatcgaggcccaatatgtgatccagaaactctatgagttgaccaagggcaacgccattgtggccaccgatgtggggcagcaccaaatgtgggccgcccagttttatggctttgaaaaaccccgtcgttggcttacctcgggtggtttgggcaccatgggttatggtctgccagcggccatcggtgcgcagatggcttttccccatgagacggtagtgttgattaccggtgaaagctccattcagatgaacattcaggagctggctaccctcaagcagtacaatctgcccgtgaagattgccatcctcaataacagctttttgggtatggtgcggcagtggcaagagctcttttatgagcgccgttattctgagtcggacatgacggttcaccccgattttgtgcagttggcccaggcttatggcgccaccggcatgatgacggcccgtccggctgaggtaagtggcatcattgaaaaggcgctggccattgatggaccggtattgatggattttcgggtcaatcgcgaagccaatgtctatcctatggtgcccgccggtgcggcccttaacgaaatgatcctgctgtaa

SEQ ID NO: 138047 - protein, 564 aa, Magnetococcus sp. MC-1
MRLTGAEIIVQCLLEQGVKTVFGYPGGAVLNIYDEIYKCKDLQHVLGRHEQGLLHAADGYARVTGEVGVALVTSGPGATNAVTGLATAYMDSIPMVCITGQVPVALIGNDAFQEADTVGITRSCTKHNYLVKDVKDLARVLREAFYIARTGRPGPVLVDIPKDITIAATEYSPAKGEVSIRSYKPSISGHTGQIRKAAGLMAKAKRPLFYTGGGVILSNAAEELTQLVRKLGAPITNTLMGLGGFPCTDKQFVGMLGMHGTYEANMAVSRCDLLVAIGARFDDRVTGKISQFAPEAKIIHLDVDPTSISKNVEVDVPIVGDIKTVLGKMLAMMEDGKYQSELPDLGDWWAEIEQWRRKECLKFTQGDEVIEAQYVIQKLYELTKGNAIVATDVGQHQMWAAQFYGFEKPRRWLTSGGLGTMGYGLPAAIGAQMAFPHETVVLITGESSIQMNIQELATLKQYNLPVKIAILNNSFLGMVRQWQELFYERRYSESDMTVHPDFVQLAQAYGATGMMTARPAEVSGIIEKALAIDGPVLMDFRVNREANVYPMVPAGAALNEMILL

SEQ ID NO: 138048 - DNA, 1719 bp, Shewanella sp. ANA-3
  CDS (1)..(1719): transl_table=11
atggagaagttatccggcgccagcatgattgtgcgatcccttatcgatgaaggtgtaaagcacatatttggttatcctggcggctcagtgttagatatctacgacgccctgcaccttatccccggtattgaacatattctggttcgccacgaacaagccgccgtacatatggccgatggttatgcccgcgccacgggtaaagtaggcgtggtactcgtgacctcaggcccaggtgccaccaatgccattaccggcatcgctaccgcctatatggattcaattccattagtggtgttatccggccaagtacccagcaatcttatcggtaatgatgcgttccaagaatgcgacatgattgggatttcacgcccagtcgtcaaacacagctttttagtacaagatcctactcaaatacctgaaatcattaaaaaagccttttatattgcttccacggggcgccccggccccgtcgttgtcgacttgccaaaggattgcctcaatcctgcattgctgcacgactatatttaccccgagagcattaaaatgcgttcctataatccaacgacatcgggccacaaggggcaaattcgccgtggattacaggcattactggcggcgaaaaaacccgtgctttatgtgggtggcggcgccattatctccagctgtgaaaagcaaatcttagccctagcggaaaaattaaatatccccgttgtcagcaccttgatgggccttggcgctttccctggcacccataaaaacagcttaggcatgctggggatgcacggtcgctatgaagccaacatgaccatgcataactgcgatcttatcttcgggattggcgtgcgtttcgatgacagaaccaccaacaacatcgagaaatactgcccaaatgccactattttgcatatcgatatcgacccttcatcgatttcaaaaaccgtccgagtggatatccccatcgttggctcggcagacatcgtactggacagcatgttagccctgctggaggagtcgaaggagagcaacgatagcgaggcaattaatcaatggtggcaagaaatcacagtatggcgtaaccgcaattgcttggcatacgataaggaaagcaaccggatcaaaccacagcaagtgattgaaactctttataaactcactaatggcgaggcctatgttgcctcggatgtgggccagcatcaaatgtttgccgcgctctattatccctttgataaacctcgccattggattaactccggcggccttggcaccatgggctttggtttacccgctgccatgggagtcaaaatggcaatgcctgacgaaaccgttgtgtgcgtcacgggcgatggttcgattcaaatgaatattcaagagctttcaaccgctctgcaatacgatacgccggttaaaattatcaacttaaacaaccgtttcctcggcatggtgaaacagtggcaggatatgatctactcgggtcgccattcccattcctatatggattcggtacccaactttgccaaaattgccgaagcctatggccatgttggcatgacgattagcgatcccgctgagcttgagtctaagatggccgaagccctcgccatgaaagacagactggtatttatcgacattatggtggatgagactgagcacgtgtatcccatgcttatccgcggcggcgcgatgaatgaaatgtggttaagcaaaacggagaaatgctaa

SEQ ID NO: 138049 - protein, 572 aa, Shewanella sp. ANA-3
MEKLSGASMIVRSLIDEGVKHIFGYPGGSVLDIYDALHLIPGIEHILVRHEQAAVHMADGYARATGKVGVVLVTSGPGATNAITGIATAYMDSIPLVVLSGQVPSNLIGNDAFQECDMIGISRPVVKHSFLVQDPTQIPEIIKKAFYIASTGRPGPVVVDLPKDCLNPALLHDYIYPESIKMRSYNPTTSGHKGQIRRGLQALLAAKKPVLYVGGGAIISSCEKQILALAEKLNIPVVSTLMGLGAFPGTHKNSLGMLGMHGRYEANMTMHNCDLIFGIGVRFDDRTTNNIEKYCPNATILHIDIDPSSISKTVRVDIPIVGSADIVLDSMLALLEESKESNDSEAINQWWQEITVWRNRNCLAYDKESNRIKPQQVIETLYKLTNGEAYVASDVGQHQMFAALYYPFDKPRHWINSGGLGTMGFGLPAAMGVKMAMPDETVVCVTGDGSIQMNIQELSTALQYDTPVKIINLNNRFLGMVKQWQDMIYSGRHSHSYMDSVPNFAKIAEAYGHVGMTISDPAELESKMAEALAMKDRLVFIDIMVDETEHVYPMLIRGGAMNEMWLSKTEKC

SEQ ID NO: 138050 - DNA, 1758 bp, Nocardioides sp. JS614
  CDS (1)..(1758): transl_table=11
atgagcgagcagatgacaggggcccagagcctggtcaggtcgctggaggcagtgggcaccgagcacatcttcggaatcccgggcggcgccatcctcccggcgtacgacccgctgatggactcctcgatccggcacatcctggtccgccacgagcagggcgccggccacgccgcccaggggtacgccgccgccaccggccgggtcggggtctgcatggccacctccggtccgggtgcgaccaacctggtcacgccgctcgccgacgcgcacatggactcggtgccgatcgtggcggtcaccggccaggtcggcgccgcccagatcggcaccgacgccttccaggaggccgacatccgcggcatcacgatgccgatcaccaagcacaacttcctggtcaccgaccccgccgagatcccgcgcacgatcgccgaggccttccacatcgcctcgaccggccgcccgggcccggtgctcgtcgacgtcgccaagtcggcgctgcaggcggcgaccgacttcgcgtggcccaccgagctcgcgcttcccggctaccgacccgtgaccaggccgcactccaagcagatccgcgaggccgccaagctgatgctggagtcgcgccgaccggtgctctacgtcggcggcggcacgatccgggccggcgcctcgaaggagctgcgtgtgctcgcggagctcaccggcatcccggtggtgacgaccctgatggcccggggggcgttccccgacagccacccgcagcacctcggcatgcccggcatgcacggcacggtcgccgccgtggcgggcctgcagcgcagcgacctgatcatcagcctgggcgcccgcttcgacgaccgggtgaccggcaagctcgactcgttcgcccccggcgcccgggtcatccacgccgacatcgacccggccgagatcggcaagaaccgcgcggtcgacgtcccgatcgtcggcgactgtcgggaggtgatcagcgacctggtcgtcgccctcaaggccgaggccgacgccggtcacaccggcgactacgaggcctgggtggacttcctggccggggtgaagaagaagtacccgctcgggtacgacgcccccaccgacggcggcctggccccgcagtacgtcctcgagcggctcggcgcgatcgccggcccggaggccatctactgcgccggcgtcggccagcaccagatgtgggccgcgcacttcgtcggctacgagaacccgaacacctggatcaactccggcggactgggcaccatgggcttctccgtgcccgccgcgatgggcgccaaggtcggccgccccgacgcgaccgtgtggtcgatcgacggcgacgggtgcttccagatgaccaaccaggagctcgccacctgcgcgatcaacgacatcccgatcaaggtcgcgatcatcaacaacgagtcgctgggcatggtccggcagtggcagacgctgttctacaacgagcgctactccaacaccgatctgcactccaagcgggtcccagacttcgtcaagctggccgacgcctacggctgcgtgggcctgtcctgcgacagcccggacgacgtggacgccacgatccgcaaggcgatggagatcgacgacgcccccgtcgtggtggacttccgggtgcaccgcgacgcgatggtctggccgatggtcgccgccggcaccagcaacgacgagatcaagtacgcccgcaacctggccccgaagttcgacgacgacgcagatctggagctccggccgtga

SEQ ID NO: 138051 - protein, 585 aa, Nocardioides sp. JS614
MSEQMTGAQSLVRSLEAVGTEHIFGIPGGAILPAYDPLMDSSIRHILVRHEQGAGHAAQGYAAATGRVGVCMATSGPGATNLVTPLADAHMDSVPIVAVTGQVGAAQIGTDAFQEADIRGITMPITKHNFLVTDPAEIPRTIAEAFHIASTGRPGPVLVDVAKSALQAATDFAWPTELALPGYRPVTRPHSKQIREAAKLMLESRRPVLYVGGGTIRAGASKELRVLAELTGIPVVTTLMARGAFPDSHPQHLGMPGMHGTVAAVAGLQRSDLIISLGARFDDRVTGKLDSFAPGARVIHADIDPAEIGKNRAVDVPIVGDCREVISDLVVALKAEADAGHTGDYEAWVDFLAGVKKKYPLGYDAPTDGGLAPQYVLERLGAIAGPEAIYCAGVGQHQMWAAHFVGYENPNTWINSGGLGTMGFSVPAAMGAKVGRPDATVWSIDGDGCFQMTNQELATCAINDIPIKVAIINNESLGMVRQWQTLFYNERYSNTDLHSKRVPDFVKLADAYGCVGLSCDSPDDVDATIRKAMEIDDAPVVVDFRVHRDAMVWPMVAAGTSNDEIKYARNLAPKFDDDADLELRP

SEQ ID NO: 138052 - DNA, 1713 bp, Azoarcus sp. BH72
  CDS (1)..(1713): transl_table=11
atggtgctgaccggagcagaaattgtaatcaggtgtctgcaggaagaaaaggtcgaatacgtgttcggctaccccggcggcgccgtgctctacatctacgacgcgctcttccagcaggaacaggtccgccacgttctcgtccgccacgaacaggccgctgtgcacgccgccgacggcttcgcgcgcagcaccgaaaaggtcggcgtcgcgctggtcacctccggtccgggtgccaccaatgccgtcaccggcatcgccaccgcgttctgcgactcgatcccgatggtcatcatctccggccaggtgcccacggcggcaatcggccaggatgccttccaggaagtggacaccgtcggcatcacccgcccctgtgtgaagcacaacttcctggtgaaggacgtgcgcgacatcgccgccaccatcaagaaggccttctacctcgccaagaccggtcgtcccggtccggtgctggtcgacatccccaaggacatcaccatcgccaagtgcgacttcgagtatccgaaggaaatctcgatgcgctcgtacagcccggtggtcaagggccaccagggccagatcaagaaggcggtgcagctgctgctcgaagccaagcgcccgatgatctataccggcggcggcgtggtgctggccaatgcggccgaacaactcaccaagctcacccgcctgctcgggttcccggtcaccaacacgctgatgggcctgggcggctatcccgcctccgatcgccagtacctcggcatgccgggcatgcacggcacctacgaagccaacatggcgatgcactacagcgacgtgctgctcgccgtcggcgcccgcttcgacgaccgcgtgatcggcaacccggccaatttcgccgaagagccgcgcaagatcatccacatcgacatcgacccctcgtcgatctccaagcgcgtcaaggtggacgtgcccatcgtcggcgacctcaaggacgtgctcgacgagatgatccgccagctcgaagctgcgcccacccgcccggacgcgagcaatctcgccgcgtggtggaagcaggtcgaggaatggcgcagccgcaagtgcatggaatacaagaactcggacgagatcatcaagccgcagttcgtggtccagaagctgtgggaagtgaccggcggcgacgccatcgtcacctccgacgtcggccagcaccagatgtgggcctcgcagtactaccgcttcgacaagccgcgccgctggctcaactccggcggcctcggcaccatgggcgtcggcctgccctatgccatgggcgcccagttcgcccatccggacatgccggttgcctgcgtcaccggcgaggcctcgatccagatgtgcatccaggaactgtccacctgcaagcagttccgcctgccgatcaagatctgcaacctcaacaaccgctacctcggcatggtccggcagtggcagcagctcttccacggcggtcgctactccgagtcctacatggattcgctgccggacttcgccaagctggcctcggcctacggccacgtcggcatccgcgtggacaagcccgcggacgtggaaggcgcgctgcgcgaagccttcacgacgcacaagaacgacctcgtcttcctcgatttccaggtggatccgaccgagaacgtctatccgatggtgcagggtggcaagggcctgaccgagatgatcctctcggccgaagacctgtaa

SEQ ID NO: 138053 - protein, 570 aa, Azoarcus sp. BH72
MVLTGAEIVIRCLQEEKVEYVFGYPGGAVLYIYDALFQQEQVRHVLVRHEQAAVHAADGFARSTEKVGVALVTSGPGATNAVTGIATAFCDSIPMVIISGQVPTAAIGQDAFQEVDTVGITRPCVKHNFLVKDVRDIAATIKKAFYLAKTGRPGPVLVDIPKDITIAKCDFEYPKEISMRSYSPVVKGHQGQIKKAVQLLLEAKRPMIYTGGGVVLANAAEQLTKLTRLLGFPVTNTLMGLGGYPASDRQYLGMPGMHGTYEANMAMHYSDVLLAVGARFDDRVIGNPANFAEEPRKIIHIDIDPSSISKRVKVDVPIVGDLKDVLDEMIRQLEAAPTRPDASNLAAWWKQVEEWRSRKCMEYKNSDEIIKPQFVVQKLWEVTGGDAIVTSDVGQHQMWASQYYRFDKPRRWLNSGGLGTMGVGLPYAMGAQFAHPDMPVACVTGEASIQMCIQELSTCKQFRLPIKICNLNNRYLGMVRQWQQLFHGGRYSESYMDSLPDFAKLASAYGHVGIRVDKPADVEGALREAFTTHKNDLVFLDFQVDPTENVYPMVQGGKGLTEMILSAEDL

SEQ ID NO: 138054 - DNA, 1797 bp, Acidovorax sp. JS42
  CDS (1)..(1797): transl_table=11
atggaaatctccaaggccgaactcacgtcggcggctgcggcctctcgcggcggcaactcctcatcctctcccggcgcccaggacctcatggggtccgagatccttgtcaaggctctgcaggccgagaatgtccagtacatctggggctaccccggcggcgccgtgctgtacatctacgacgcgctgtacaagcaggacaccattcagcacgtgctggtgcgccacgaacaggcggcggtgcacgcggccgacggttatgcccgcgcgacgggcgaggtcggggtggcgctggtgacttccggccctggattaacgaatgccgtgacgggcatcgccacggcgtatatggattcgatccccatggtgatcatctccggccaggtgcctacgcccgcgatcgggctggatgccttccaggagtgcgacaccgtgggcatcacgcgtcccatcgtcaagcacaacttcctggtcaaagatgtgcgcgacctggcggtgacgctcaaaaaagccttccatatcgcgcgcaccggccgccccggccccgtggtggtggatatcccgaaggatgtgtcgttcaagaagacggctttccatggttatccgcagagcgtggaaatgcgctcttacaaccccgtcaagaaggggcatggcggtcagattcgcaaggcgctgcaactgctgctggccgcgaaacgaccttatatctacaccggcggcggcgtgctgctgggcaatgcggtgcccgagctgcgcacgctggtcgacatgctgggctatccggtcacccacacgctgatgggtctgggtgcctacccggccaccgaccgcaaattcctgggcatgctgggcatgcacggcacgatcgaggccaacaatgccatgcagaactgcgacgtgctgctggccgtgggcgcgcgctttgatgaccgcgtgatcggcaatcccaagcatttcgcgcagaacgagcgcaagatcatccatatcgacatcgatccctcgagcatttccaagcgcgtgaaggtggacattccgatcgtgggcgatgtcaaggacgtgttgactgagctgatctctatgatccgcgagaccacgacacgccccgacgctggtgcgctgtcggcgtggtgggatcagatcgaggcttggcgcggccgcgactgcctgaagtacgaccgcgggaacaccgaggtgatcaagccgcagtacgtgatcgagacgctgtggaatatgacccgcgatgcggacgcatacgtcacctccgatgtgggccagcatcagatgtgggccgcccagttctacaaattcgacgagccgcgccgctggatcaactccggcggcctgggcaccatgggcgtgggcattccctatgccatgggcatcaagctggccaagcccgagtctgaggtgttctgcgtgacgggcgaaggctcggtgcagatgaacatccaggagctctccacctgcctgcagtacaacacccccatcaaggtgctgtctctcaacaaccgctacctgggcatggtgcgccagtggcaagaaattgagtactccggccgctacagccacagctacatggacgcgctgcccaacttcgtgaagctggccgaggcctatggccacgtgggcatgctcatcgagcgcccgcaggacgtggagccggcgctgcgcgaagcgcgcaagctcaaggaccgcacggtgttcctggacttccggaccgaccccaccgagaacgtgttcccgatggtgcaggctggcaaaggcatcaccgagatgctgctggggtcggaagacctttaa

SEQ ID NO: 138055 - protein, 598 aa, Acidovorax sp. JS42
MEISKAELTSAAAASRGGNSSSSPGAQDLMGSEILVKALQAENVQYIWGYPGGAVLYIYDALYKQDTIQHVLVRHEQAAVHAADGYARATGEVGVALVTSGPGLTNAVTGIATAYMDSIPMVIISGQVPTPAIGLDAFQECDTVGITRPIVKHNFLVKDVRDLAVTLKKAFHIARTGRPGPVVVDIPKDVSFKKTAFHGYPQSVEMRSYNPVKKGHGGQIRKALQLLLAAKRPYIYTGGGVLLGNAVPELRTLVDMLGYPVTHTLMGLGAYPATDRKFLGMLGMHGTIEANNAMQNCDVLLAVGARFDDRVIGNPKHFAQNERKIIHIDIDPSSISKRVKVDIPIVGDVKDVLTELISMIRETTTRPDAGALSAWWDQIEAWRGRDCLKYDRGNTEVIKPQYVIETLWNMTRDADAYVTSDVGQHQMWAAQFYKFDEPRRWINSGGLGTMGVGIPYAMGIKLAKPESEVFCVTGEGSVQMNIQELSTCLQYNTPIKVLSLNNRYLGMVRQWQEIEYSGRYSHSYMDALPNFVKLAEAYGHVGMLIERPQDVEPALREARKLKDRTVFLDFRTDPTENVFPMVQAGKGITEMLLGSEDL

SEQ ID NO: 138056 - DNA, 1788 bp, Magnetospirillum magnetotacticum MS-1
  CDS (1)..(1788): transl_table=11
atggaggagtcgatgagcggcgaggtcatgaccggggcccagatggtcatccgggcgttccaggatcagggggtggacaccctgttcggttatccgggcggtgccgtgcttccgatctacgacgcgctcttcgacgagaccacgattcagcacgtgctggtgcgccacgagcagggcgccgtccacgcggcggagggctatgcccgctccagcggcaaggtcggcgtcgtcctcgtcacctccggccccggcgccaccaacatcatcaccggcctgaccgacgcgatgctggattcgatcccgctcgtcgccgtcacgggccaagttccgacgcacctgatcggctccgacgcgttccaggaatgcgatacggtcggcatcacgcgccactgcaccaagcacaactacctcgtgaaatcgatcgaggacctgccgcgcatcctgcacgaggcgttctacgtcgcgagccacggccgtcccggcccggtcgtcatcgatctgccgaaggacgtgcagttcgccaccggcgtctacagccggccgacgcagaacgggcacaagacctacaacccgccggtcaagggcgattccgagaagatccgcgcggcgatcgagctgatggcgggtgcgcgccggccggtcttctataccggcggcggcgtcatcaattcgggcccggaagcttcccgcctcctgcgtgagctggtcgccgagaccggcttcccggtcacctcgacgctgatgggtctgggtgccttcccagcctccgacgacaagttcctcgggatgctgggcatgcacggcacctacgaggccaacctcgcgatgcacgattgcgacgtgatgatctgcatcggcgcgcgcttcgacgaccgcatcaccggccgcctcgatgccttcgcgccctactcgaagaagatccacgtcgatgtcgacgcctcctcgatcaacaaggtcgtgaaggtcgatgtcggcatcctcggcgactgcgcggcggtgctggaggagatgctcgcccagtggcgcgcgctgccgaagcagcccgacaagggacgcatggaggattggttcaacaagatcagccgctggaagtcgcgcgactgcctcgcctactggccgtccggcacgatcatcaagccgcaatacgcggtgcagcgcctctacgaggcctgcaaggatcgcaagaccttcgtcaccaccgaggtcggccagcaccagatgtgggcggcgcagtacttcaagttcgatgagccgaaccgctggatgacctccggcggcctcggcaccatgggctacggcctgcccgccgccatcggcacgcagctcgccaacccggacgggctcgtcatcgacatcgcgggtgaagcctcgatcctgatgaacatgcaggaattgtcgacggcggtgcagtaccgtctgccggtcaagatcttcatcctgaacaacgagtacatgggcatggtgcgccagtggcaggagctgctgcacggctcgcgctactcgcagagctactcggagagcctgccggacttcgtgaagctggccgaggcctacggcgccaagggcatccgctgcgagaagcccggcgaactcgacgccgcgatccaggagatgctggcctatgacggcccggtgatcttcgattgcgtggtcgacaagaccgagaactgcttcccgatgattccctcgggcaaggcgcataacgagatgctgctgtcggactatctcggcgagaccggggtggaactcggcgacgtcatctcggccgaaggcaagatgctggtctga

SEQ ID NO: 138057 - protein, 595 aa, Magnetospirillum magnetotacticum MS-1
MEESMSGEVMTGAQMVIRAFQDQGVDTLFGYPGGAVLPIYDALFDETTIQHVLVRHEQGAVHAAEGYARSSGKVGVVLVTSGPGATNIITGLTDAMLDSIPLVAVTGQVPTHLIGSDAFQECDTVGITRHCTKHNYLVKSIEDLPRILHEAFYVASHGRPGPVVIDLPKDVQFATGVYSRPTQNGHKTYNPPVKGDSEKIRAAIELMAGARRPVFYTGGGVINSGPEASRLLRELVAETGFPVTSTLMGLGAFPASDDKFLGMLGMHGTYEANLAMHDCDVMICIGARFDDRITGRLDAFAPYSKKIHVDVDASSINKVVKVDVGILGDCAAVLEEMLAQWRALPKQPDKGRMEDWFNKISRWKSRDCLAYWPSGTIIKPQYAVQRLYEACKDRKTFVTTEVGQHQMWAAQYFKFDEPNRWMTSGGLGTMGYGLPAAIGTQLANPDGLVIDIAGEASILMNMQELSTAVQYRLPVKIFILNNEYMGMVRQWQELLHGSRYSQSYSESLPDFVKLAEAYGAKGIRCEKPGELDAAIQEMLAYDGPVIFDCVVDKTENCFPMIPSGKAHNEMLLSDYLGETGVELGDVISAEGKMLV

SEQ ID NO: 138058 - DNA, 1701 bp, Actinobacillus pleuropneumoniae serovar 1 str. 4074
  CDS (1)..(1701): transl_table=11
atggttgttcaatccttgaaagacgaaggcgtagagtacgttttcggctatccgggtggttcggtattagatatttatgatgcgattcatacgctggataatattaaccacgttcttgtgcgccatgagcaagccgcggtccatatggcggacggttacgctcgctcaaccggtaaagtcggttgtgtattagtaacatccggtcccggtgcaaccaatgcgatcacaggtattgccaccgcttatgccgattctgtcccgcttgtgatcttaaccggtcaagtgccttccgctttaatcggtacggatgctttccaagaatgcgatatgctcggtatttcacgccctgtggttaaacacagttttatgatcaaaaatccggaagatattccttcaataatcaaaaaagccttttatattgcttcaaccggtcgccccggtccggtcttaattgatattccgaaagatatggtaaatccggcgaataaatttacctatgaatatccgaaagaagtctcactacgttcatataacccgaccgtacaaggccataaagtgcaaattaaaaaggcattaaaagccctattagtggcaaaaaaaccggttttatacattggtggagggattatctctgcggaatgtgcaacgcaacttaccgactttgcaacgaagttaaacttaccggtaaccagttcgttaatgggcttaggcgctttccctgcatcaaacaaacaatttttaggtatgctcggtatgcacggtacttacgaagcgaataacgcaatgcacgaaagcgatttgattctcggcattggcgtacgttttgatgaccgtaccacgaataatttagcaaaatattgcccgaatgcaaaagtcattcacgtggatattgatccggcttctatttcaaaaaccgttccggcttatattccgattgtgggtagcgcaaaaaatgtcttggaagaatttctcagccttttagaagaagaaaatcttgcaaaaaatcaagcggatttgaccgcttggtggcaacagattaatgaatggaaagctcgtcagtgcttaaattttgaagtaagtaaagatgtaatcaaaccgcagcaagtcattcgattaattcataaaattaccaatggtgatgcctatgttgcttcggatgtcggtcagcaccaaatgtttgccgcactccattatccgtttgaaaaacctcgtcgctggatcaactcgggcggagccggtaccatgggattcggtttaccggcagcaatcggcgtaaaattcgcccatccggaagcaactgtagtatgtgtaaccggtgacggctcgattcagatgaatattcaagagctttctacggcgaaacaatatgatacgccggttgtgattgtgagcttaaacaatcgcttcttaggtatggtgaagcagtggcaagatctgatctactccggtcgccattcacaggtatatatgaattcactgcctgattttgccaaattagccgaagcttacggtcatgtcggcattacgattgatcacccgaacgaattggaagaaaaactcacccaagcctttgctatcaaagacaaattagtgtttgtcgatgtaaaagtagatgaaaccgaacacgtttacccgatgcaaattcgcggcggtgcgatgaatgagatgattttaagcaaaacggagagaacagatgcgtag

SEQ ID NO: 138059 - protein, 566 aa, Actinobacillus pleuropneumoniae serovar 1 str. 4074
MVVQSLKDEGVEYVFGYPGGSVLDIYDAIHTLDNINHVLVRHEQAAVHMADGYARSTGKVGCVLVTSGPGATNAITGIATAYADSVPLVILTGQVPSALIGTDAFQECDMLGISRPVVKHSFMIKNPEDIPSIIKKAFYIASTGRPGPVLIDIPKDMVNPANKFTYEYPKEVSLRSYNPTVQGHKVQIKKALKALLVAKKPVLYIGGGIISAECATQLTDFATKLNLPVTSSLMGLGAFPASNKQFLGMLGMHGTYEANNAMHESDLILGIGVRFDDRTTNNLAKYCPNAKVIHVDIDPASISKTVPAYIPIVGSAKNVLEEFLSLLEEENLAKNQADLTAWWQQINEWKARQCLNFEVSKDVIKPQQVIRLIHKITNGDAYVASDVGQHQMFAALHYPFEKPRRWINSGGAGTMGFGLPAAIGVKFAHPEATVVCVTGDGSIQMNIQELSTAKQYDTPVVIVSLNNRFLGMVKQWQDLIYSGRHSQVYMNSLPDFAKLAEAYGHVGITIDHPNELEEKLTQAFAIKDKLVFVDVKVDETEHVYPMQIRGGAMNEMILSKTERTDA

SEQ ID NO: 138060 - DNA, 1950 bp, Bifidobacterium longum DJO10A
  CDS (1)..(1950): transl_table=11
ttgcaggcattcagcggtgtaccgaaaatcaacacggcccccgataagcagaccatcgtcgatggcgagaagatgactggcgcccaggcgctgattcgttcgctggaggacctcggcgtcgaggacgtcttcggcattcctggcggcgcgattctgcccgtctaccacgagatcaaagacaacacgaagttccgcttcgtgcttatgcgccacgagcaggccgccggccacgccgccgaaggctacgcactggccactggcaaggtgggcgtgtgcatcgtgacttccggcccgggtgccacaaacgtggtcacggccattgcggacgcgaacatggactccgtgcccatggtcgtgattaccggtcaggtgggcgtgcaagccatcggcactgatgccttccaggaggcggatatcgtgggcatcacctacccggtgtccaagcactccttcctcgtgacccgcgcgcaggacattcctcgcgtgctttccgaggcgtactacatcgccaacaccggccgccccggcccggtggtcgtggatctgaccaagaccgcacagaccggcgacatgtactactcatggccgcagcgcatgattctgcccggctacaaccccaccaccaaggcgcacggccgtgtgctgtccgacgcggcgaagctgttctctcagtcgtaccgcccggtgctgtatgtgggtggcggcgccgcccgctccaacgccggcgcacaggtcaaggctctggccgacctgaccggcgctcccgtggtcacgaccctgcccgcacgcggcatcattcccgactccgacccgaagaacctcggcatgctaggcatgcacggtacgattgccgcaaccggcgccgtgcagcgcgctgacctgcttgtggccatcggtgcacgtttcgacgaccgcgtgaccggcaagctcgacgccttcgcaccgaccgcccgcgtgattcacattgacatcgacccggctgaaatcggcaagaaccgtcagcccgacgtgccgatcgtgggcgatgtggctaccgtgctcgacgacttgattcccgagattcagcgtacgcaggccattcagggcaagccgaatctggccccctggtggaaggcgatcgacggctggcgcgaggaatacccgatgacgtgggatgagccgaccgacggatcgctggccccgcagtgggtcatcaagaagctctctgagatggccgacccgtccaccatctgggtgaccggtgtgggccagcaccagatgtgggcttcgcagttcatcgattttgagaaccagcacgcttggatctcctccggaggcctcggcacgatgggctacggtctgccggctgccatcggcgcatccgtgggctcggcccgtgaattcgagggcaagaagccggtgtggctgatcgatggtgacggttccttccagatgacctctgaggagctggccgccgcgttcctggaccacgctccggtgaagatcgcgattctgaacaactccgtatacggcatggtccgtcagtggcagacgctgttctacgagcaccactactcgcagaccaacctgctcgatggtgaagcgcacggtgccgatggtgcggcggcactggccgacggcgatgcgccgctcgaagtgcctgatttcatcaagttggccgaggcatacggctgcgtgggtatccgcgcgttcaccgaggaagaggcgattgccgccatcgaaaaggcgaaccagatcaacgaccgcccggtgctgatcgacttccgcgtgtggaaggatgcgatggtgtggccgatggtagccgccggcgcccccaacgacgaggtgacgtacaagcccggcatcaagccgctggctggcggcaccccggctccgggaaccggtccggacgagcatgcgaccggcgtgttcgagcacgagaccgccgctgccactgcgagcgagcactga

SEQ ID NO: 138061 - protein, 649 aa, Bifidobacterium longum DJO10A
MQAFSGVPKINTAPDKQTIVDGEKMTGAQALIRSLEDLGVEDVFGIPGGAILPVYHEIKDNTKFRFVLMRHEQAAGHAAEGYALATGKVGVCIVTSGPGATNVVTAIADANMDSVPMVVITGQVGVQAIGTDAFQEADIVGITYPVSKHSFLVTRAQDIPRVLSEAYYIANTGRPGPVVVDLTKTAQTGDMYYSWPQRMILPGYNPTTKAHGRVLSDAAKLFSQSYRPVLYVGGGAARSNAGAQVKALADLTGAPVVTTLPARGIIPDSDPKNLGMLGMHGTIAATGAVQRADLLVAIGARFDDRVTGKLDAFAPTARVIHIDIDPAEIGKNRQPDVPIVGDVATVLDDLIPEIQRTQAIQGKPNLAPWWKAIDGWREEYPMTWDEPTDGSLAPQWVIKKLSEMADPSTIWVTGVGQHQMWASQFIDFENQHAWISSGGLGTMGYGLPAAIGASVGSAREFEGKKPVWLIDGDGSFQMTSEELAAAFLDHAPVKIAILNNSVYGMVRQWQTLFYEHHYSQTNLLDGEAHGADGAAALADGDAPLEVPDFIKLAEAYGCVGIRAFTEEEAIAAIEKANQINDRPVLIDFRVWKDAMVWPMVAAGAPNDEVTYKPGIKPLAGGTPAPGTGPDEHATGVFEHETAAATASEH

SEQ ID NO: 138062 - DNA, 1860 bp, Crocosphaera watsonii WH 8501
  CDS (1)..(1860): transl_table=11
gtggtttcttcaatagcaaaaataactccattcttagcagaaactccccaacgctgtacaggggcttacgccctcatagatagcctagttcgtcacggcgttaaacacatttttggctatcccgggggagccattctccccatttatgacgaattataccgagccgaagccaggggagagcttcaacatttcttagtacgtcacgaacaaggtgcgtcccacgcggccgacggttatgctcgggccactggtaaagtgggagtatgtttcgggacctctgggcctggggcaacaaatttagtaacagggatcgctacagcacatctcgattctatcccgatggtggtagtaaccggacaggtgggaagagcggccattggcagcgatgcgttccaagaaacggatatttttggcattactctacccatagtcaaacattcctacgtggtacgctacgcccaagatatggctgggatcgtggctgaagctttccatatcgccagtaccggacggcctggccctgtgttgatcgatgtgccgaaagatgtgggactcgaagaatgcgactatatccctgttgaaccgggacaggttaaattacctgggtatcatcccacggtaaaaggaaacccccgtcaagttaatggggccttatctttaatcgaaacttcacaacgtcccttactctatgtgggaggtggggcgatcgccgccaatgctcacgtacaaatacaagaatttgccgaacgttttcaaatacccgtaaccacgacgttaatgggacttggctcctttgatgagcatcatcccctatccgtgggaatgttgggaatgcacggcaccgcttacgctaactttgcggtgagtgagtgcgatctgttgatcgctgtgggagcgagatttgacgatcgcgtaaccggaaaattagatgagtttgcctcccgtgcgcgagtgatccatatcgatatcgatccggcggaagtgggtaaaaaccgaagacctgatgttcccattgtgggagatgtagctcaggtactcgaacagttattacagcgatcgcgagagatcgatgttcccctagatcctcagaaaaccgaagcttggttacatcgcattaaccgttggcgccaacaatatcccctggttgccccccattatgacggtaccatatccccccaagaagtaatcgcggaaattgctcaacaagcacctcacgcttactacacaacggatgtgggacaacatcaaatgtgggccgcccaattcttaaataacgggccccgtcgttggatttctagcgcagggttaggaaccatgggttatggaatgccggcagccatgggggctaaagttgctttaccagaagaagaggtaatctgtattagtggtgatgctagttttcagatgaatctgcaagagttggctactttatctcagtatgggatcgcagcgaaaaccgtgattattaataacggttggcagggaatggtgcgtcaatggcaacaagcctttttcggtgagcgttactcctcgtctaatatgcagtcaggaatgcccgattttgaactgttggctaaagctttcgggatcaagggtataacggttacagagcattctcaattgtctggtgcgatcgctgaaatgttagcccatgacggtcctgtgttgatggatgttcatgtgaaaaaggatgaaaattgttatcctatggttgctcctgggaaaagtaatgcccaaatgttgggacttcctgagttaaaaccgacaatttttatgaaggaattaacccgttgtacttcctgtggtgtggataaccctgtaactaacaagttttgtcctgaatgtggcgcaaaagtttaa

SEQ ID NO: 138063 - protein, 619 aa, Crocosphaera watsonii WH 8501
MVSSIAKITPFLAETPQRCTGAYALIDSLVRHGVKHIFGYPGGAILPIYDELYRAEARGELQHFLVRHEQGASHAADGYARATGKVGVCFGTSGPGATNLVTGIATAHLDSIPMVVVTGQVGRAAIGSDAFQETDIFGITLPIVKHSYVVRYAQDMAGIVAEAFHIASTGRPGPVLIDVPKDVGLEECDYIPVEPGQVKLPGYHPTVKGNPRQVNGALSLIETSQRPLLYVGGGAIAANAHVQIQEFAERFQIPVTTTLMGLGSFDEHHPLSVGMLGMHGTAYANFAVSECDLLIAVGARFDDRVTGKLDEFASRARVIHIDIDPAEVGKNRRPDVPIVGDVAQVLEQLLQRSREIDVPLDPQKTEAWLHRINRWRQQYPLVAPHYDGTISPQEVIAEIAQQAPHAYYTTDVGQHQMWAAQFLNNGPRRWISSAGLGTMGYGMPAAMGAKVALPEEEVICISGDASFQMNLQELATLSQYGIAAKTVIINNGWQGMVRQWQQAFFGERYSSSNMQSGMPDFELLAKAFGIKGITVTEHSQLSGAIAEMLAHDGPVLMDVHVKKDENCYPMVAPGKSNAQMLGLPELKPTIFMKELTRCTSCGVDNPVTNKFCPECGAKV

SEQ ID NO: 138064 - DNA, 1722 bp, Prosthecochloris aestuarii DSM 271
  CDS (1)..(1722): transl_table=11
atggttacatcaggccaaacaatgaacggctctgaaatattgttcgaatgtctccgacgcgaacatgttgagtatattttcggctaccccggcggagccctgctgcaggtttatgaaaccctctatgatgtcaaggacatcaagcacattcttgttcgtcacgaacagggcgctgcccatatggctgaaggctatgcgcgtgcaaccggaaaacccggcatcgttctggttacctcaggtcccggagccaccaatacggttaccggcattaccaatgcttacatggattcatcgccgatggttgttttcaccggccaggtaccgagcaatctcatcggcaacgacgcttttcaggaagccgatattgtcggcattacgcggcctataacaaaacataacttcctggtcaaggatgtcaaagatctggctctgaccatcagaaaagcattttatctggcaacacatggcagaccaggcccggttctcgttgacctgcctaaggatgtcatgaattccgaatgcatcttcgactggccaaaaacaattgacataagagggttcaagccgaccataaagacccatgaaaatcaggtcaaaaaagctgcaaaaatgattgcaaaagcaaaaaaaccgttgctctatgtcggtgggggcgtcattgctgccgaggcatcggaggaactgagaaagcttgcaatcgcacagaacattccggtcaccatgacgctgcagggtctgggcgcgtttcccggcaacgacccgctcagcatgggtatgctcggtatgcatggcacctactgggcaaaccaggccgtcaacaactgcgatctcctgatctccgtcggagctcgttttgacgacagggtaacgggcaaaaccgaaacctttgcaacgcacgcatataaaattcataacgacatcgatccgacaaatatcgataagaacataaaagtcgatcttcctgttgtcggagacgcaaaacagttccttcagggaatactggatgcacttcccaaaaccaaagaaaaccgaaagccctggctggcagagatcgaaaagtggcgctcgcaatgtccgctcacttacacgatcgacgatgactcgctgaaaaccgaatttgtcatagaggaggtttcacgacagacacacggtgatgcggttatcaccaccgatgtcggccagcaccagatgtggacgagccagtactattcattcagaaacccgagatctatactgaccagcggcggcctgggaacaatgggctacgggcttccggcagcaataggagctgctttcggcgttcacgacaggcctgtagtgctcttttgcggtgatggagggttcatgatgaacattcaggaacttgtcaccgcggtatactacaagcttccgataaaaatattcctgatcaacaacaattttctcggcatggtccgtcagtggcaggagctgtttcatcaggaaaaatattcatttaccgaccttgaggacagcaatcccgatttcatccgggttgtcgaagcatttggatgcaaggcgcgcagagcggaaaatcctgaggaggcccgccaggctatcagcgaggcacttgcctacaatgacggtccgtgctttgttgaattccgggtcgtcaaaaaagatatggtttttccgatggttcctgcaggcgcatcaatttcagatatgcttcttgacaggctgaatcctaaaacaatggtttaa

SEQ ID NO: 138065 - protein, 573 aa, Prosthecochloris aestuarii DSM 271
MVTSGQTMNGSEILFECLRREHVEYIFGYPGGALLQVYETLYDVKDIKHILVRHEQGAAHMAEGYARATGKPGIVLVTSGPGATNTVTGITNAYMDSSPMVVFTGQVPSNLIGNDAFQEADIVGITRPITKHNFLVKDVKDLALTIRKAFYLATHGRPGPVLVDLPKDVMNSECIFDWPKTIDIRGFKPTIKTHENQVKKAAKMIAKAKKPLLYVGGGVIAAEASEELRKLAIAQNIPVTMTLQGLGAFPGNDPLSMGMLGMHGTYWANQAVNNCDLLISVGARFDDRVTGKTETFATHAYKIHNDIDPTNIDKNIKVDLPVVGDAKQFLQGILDALPKTKENRKPWLAEIEKWRSQCPLTYTIDDDSLKTEFVIEEVSRQTHGDAVITTDVGQHQMWTSQYYSFRNPRSILTSGGLGTMGYGLPAAIGAAFGVHDRPVVLFCGDGGFMMNIQELVTAVYYKLPIKIFLINNNFLGMVRQWQELFHQEKYSFTDLEDSNPDFIRVVEAFGCKARRAENPEEARQAISEALAYNDGPCFVEFRVVKKDMVFPMVPAGASISDMLLDRLNPKTMV

SEQ ID NO: 138066 - DNA, 1836 bp, Kineococcus radiotolerans SRS30216
  CDS (1)..(1836): transl_table=11
atgccacagcaactgcccctggacccgaagctccccgtcgccgagctcaccggcgcgcagagcctcatccgttcgctggaggcggtaggggtcgaggtcgtcttcggtctgcccgggggcgcgatcctgcccgcctacgacccgctgatggactccccgcacgtccggcacgtcctggtgcgccacgagcagggcgccggccacgccgccgagggctacgcggtggccaccggcaaggtcggcgtctgcatggccacctcgggcccgggggcgacgaacctcgtcacccccatcgccgacgccaacatggactccgtcccgatggtcgcgatcaccggtcaggtggccgccaaggccatcggcaccgacgcgttccaggaagccgacatcgccggcatcaccatcccgatcaccaagcacaactacctggtgaccgacccggccgacatcccccgcgtgatcgccgaggccttccacctcgccgccaccgggcgccccggccccgtcctcgtcgacgtcgcgaagtccgcgctgacggcgacgacctccttcgcctggcccgagacggtcgacctgcccggctaccgcccggtgacgcgcccgcacggcaagcagatccgcgaggccgcccggctcatcgccgcggccgagcgccccgtcctctacgtcggcggcggcgtcatcaaggccgacgcctccgcggagctggcggcgctggccgacctcaccggcatccccgccgtcacgaccctgatggcccgcggcgcgctgccggactcccacccgaacaacctgggcatgcccggcatgcacgggacggtcgcggccgtgaccgcgctgcagaagtccgacctgctcatcaccctcggcgcccgcttcgacgaccgcgtcaccggcgagctgtccagcttcgcccccggcgccaaggtcatccacgccgacatcgacccggccgagatcggcaagaaccgcgccgtcgacgtcccgatcgtgggcgacgccaagctcgtcatcgccgagctcaccacggccgtggccgccgagttcgagaacggccgcgcggacctcacggcctggaccgccctgacgcagtcgtggaaggagacgtacccgctgggctacgccgagtccgacgacggcacgctcgccccgcagcacgtcatcgcccggatcggggcgatcgccgggcccgaggccatctacgtctccggggtcggccagcaccagatgtggtccgcgcagttcgtccagtacgagaacccgcgcacctggctcaactccggcggcctggggaccatgggctacgcggtccccgcggccatgggcgccaaggtgggcaagcccgacaccgtcgtgtgggccatcgacggcgacggctgcttccagatgaccaaccaggaactggcgacctgcaccctcaacgggatccccgtcaaggtcgcgatcatcaacaactccagcctgggcatggtccggcagtggcagacgctcttctactccgagcgctactccaacaccgacctgaactccggcgaccaccacggcacccacgccgcgccgatccccgacttcgtcaagctcgccgaggcctacggctgcgtggggctgcgctgcgaccgggccgaggacgtcgacgcgacgatcgagaaggccatggcgatcgacgacgtgcccgtggtcatcgacttccgcgtccaccgcgacgccatggtctggcccatggtcgaggccggcgtgagcaacgacgccatccagtacgcgcggggggtctccccggtctgggaccgcgaggaagagggcgacaacgagtccggtcccgagaaggtgatctcctga

SEQ ID NO: 138067 - protein, 611 aa, Kineococcus radiotolerans SRS30216
MPQQLPLDPKLPVAELTGAQSLIRSLEAVGVEVVFGLPGGAILPAYDPLMDSPHVRHVLVRHEQGAGHAAEGYAVATGKVGVCMATSGPGATNLVTPIADANMDSVPMVAITGQVAAKAIGTDAFQEADIAGITIPITKHNYLVTDPADIPRVIAEAFHLAATGRPGPVLVDVAKSALTATTSFAWPETVDLPGYRPVTRPHGKQIREAARLIAAAERPVLYVGGGVIKADASAELAALADLTGIPAVTTLMARGALPDSHPNNLGMPGMHGTVAAVTALQKSDLLITLGARFDDRVTGELSSFAPGAKVIHADIDPAEIGKNRAVDVPIVGDAKLVIAELTTAVAAEFENGRADLTAWTALTQSWKETYPLGYAESDDGTLAPQHVIARIGAIAGPEAIYVSGVGQHQMWSAQFVQYENPRTWLNSGGLGTMGYAVPAAMGAKVGKPDTVVWAIDGDGCFQMTNQELATCTLNGIPVKVAIINNSSLGMVRQWQTLFYSERYSNTDLNSGDHHGTHAAPIPDFVKLAEAYGCVGLRCDRAEDVDATIEKAMAIDDVPVVIDFRVHRDAMVWPMVEAGVSNDAIQYARGVSPVWDREEEGDNESGPEKVIS

SEQ ID NO: 138068 - DNA, 1725 bp, Sulfitobacter sp. EE-36
  CDS (1)..(1725): transl_table=11
atgatcgttcaagccctgattgatcagggtgtcgataccgtatttggctatcccggcggcgctgtcctaccgatctatgacgaggtgttccaacaaaacagcatcaaacacgtgctggtgcgtcacgaacaaggggcggtgcatgccgccgaaggctatgcgcgctcgaccggtaaaccgggcgttgttcttgtcacctcgggccccggtgccaccaatgcggtgaccggcctgacggatgccttgctcgattccattccgctggtggtcctgacaggtcaggtgccgaccttcatgatcggctctgacgcgtttcaagaggccgataccgtgggcatcacccgcccctgcaccaagcacaactggctggtgaaagagaccgacaagctgggcggcgtcctgcacgaggcgttccatgtggccaccagcgggcgccccggccccgttctggtcgacatcccgaaagacgtgcaattcgccacgggggaatacacgcccaagaagccgtccacctcgcattaccagccgcccgtcaaaggcgacatgaccgagatcaccgaactggtggccgccatcgaaaccgccaagcgcccgattttctataccggcggcggcgtcatcaactccggccctgcggcgtcgcaactgctgcgcgaattggtcgaggcgacaggctttcccatcacctccaccttgatggggcttggcagctatccggcgtcgggtgacaaatggttggggatgctcggcatgcatggtctttacgaggccaatatggcgatgcacgactgcgatctgatgatcaacatcggcgcgcgcttcgacgaccggatcaccggcgttgtcgacatgttcagcccgaaatccaagaaagcgcatatcgacatcgacccctcgtcgataaacaagatcatccgcgtggacatccctatcgtcggcgacgtgggccatgtgctggaagatctgcttaaggtctggaaatcgcgcggccgcaagacaaacaccgaagccgttggcaaatggtggaagaagatcgaggaatggcgcaacgttgactgcctcaagttcgaacaaaagggcaagatcatcaaaccccaatacgcgctctcgcgacttgaagcgctgaccaaggggcgtgaccgctatgtcaccaccgaggtgggccagcaccagatgtgggccgcgcaataccttggtttcgaggatccgaaccgttggatgacctctggcgggttggggaccatgggctatggtttcccggcctccatcggcgtgcagatggcgcatcctgaggcgttggtcatcaacgttgcgggcgaagcctcctggctgatgaacatgcaggaaatgggcaccgccatgcaatacggtctgccggtgaaacagttcatcctgaacaacgaacgcctcggcatggtccgccagtggcaagagctgctgcacggcgagcgctattcccaaagctggtctgaatccctgcccgatttcgtcaagctggccgaagccttcggggccaaggggatcatctgttcggaccccgatgatctggacgacgcgatcatggagatgctcgattatgacggtccggtgatctttgactgtctggtggaaaaacacgaaaactgtttcccgatgatcccgtcgggcaaagcgcataacgacatgatgctggccggtgtcgatacgcaaggtgtgatcgacgccaaaggatcggtcttggtctaa

SEQ ID NO: 138069 - protein, 574 aa, Sulfitobacter sp. EE-36
MIVQALIDQGVDTVFGYPGGAVLPIYDEVFQQNSIKHVLVRHEQGAVHAAEGYARSTGKPGVVLVTSGPGATNAVTGLTDALLDSIPLVVLTGQVPTFMIGSDAFQEADTVGITRPCTKHNWLVKETDKLGGVLHEAFHVATSGRPGPVLVDIPKDVQFATGEYTPKKPSTSHYQPPVKGDMTEITELVAAIETAKRPIFYTGGGVINSGPAASQLLRELVEATGFPITSTLMGLGSYPASGDKWLGMLGMHGLYEANMAMHDCDLMINIGARFDDRITGVVDMFSPKSKKAHIDIDPSSINKIIRVDIPIVGDVGHVLEDLLKVWKSRGRKTNTEAVGKWWKKIEEWRNVDCLKFEQKGKIIKPQYALSRLEALTKGRDRYVTTEVGQHQMWAAQYLGFEDPNRWMTSGGLGTMGYGFPASIGVQMAHPEALVINVAGEASWLMNMQEMGTAMQYGLPVKQFILNNERLGMVRQWQELLHGERYSQSWSESLPDFVKLAEAFGAKGIICSDPDDLDDAIMEMLDYDGPVIFDCLVEKHENCFPMIPSGKAHNDMMLAGVDTQGVIDAKGSVLV

SEQ ID NO: 138070 - DNA, 1755 bp, Roseovarius nubinhibens ISM
  CDS (1)..(1755): transl_table=11
atgacacgtcagatgaccggagcgaaaatggtggttcaggccctcaaggatcagggtgtggacgtcgtattcgggtatcccgggggcgccgtgctaccgatttatgacgagatctttcagcaaaatgacattcgtcacgttctggtgcgccatgaacagggcgcggtgcatgccgccgaaggctatgcccgctcgaccggcaagccgggcgtggtgctggtgacatctggccccggcgccaccaatgcggtgaccggcctcaccgatgcgctgctcgactcgatcccgctcgtggtgctgaccggccaggtgccgaccttcatgatcggcaatgacgccttccaggaggccgacacggtgggcatcacccggccttgcaccaagcacaattggctggtgagcgacaccaaccgtctgtcgggcacgctgcatgaggcgttccatgtggcgaccaccggccgtcccggtccggtgctcgtcgacatcccgaaggatgtgcaattcgccaatggcgactatacccccccggccaaggcgcgggtctcgcattatcagccgcaggtcaaaggcgatatggaagagatcaccgaactggtggaggcgctcgagaccgccgaacgcccggtgttctacaccggcggcggcgtgatcaattcgggcccggcggcgagccagctcttgcgggaactggttgaggccaccggcgtgccgatcacctcgacgctgatggggcttggcgcctatccggccaatggcgagcattggctcggcatgctcgggatgcacggtctctacgaggccaatatggcgatgcatgattgcgatctgatgatcaatgtcggcgcccggttcgacgaccggatcaccggccgcgtcgatgcctttagcccgcattccaccaaggcccatatcgacatcgatcccagctcgatcaacaaggtgatcaaggccgatatcccgattgtcggcgatgtggcgcatgttctcgaagatattctcaaggtctggaaggcgcgcggccgcaagaccaatgccgcggccatcgccaaatggcgcgccaagatcgacgaatggcgcaaggtcgattgcctcgccttcaaacagaccggcaaggtgatcaaaccgcagcacgcgctggcgcggctcgaggcgctgacccgcgaccacgaccgctatgtcaccaccgaggtgggccagcatcagatgtgggcggcgcagtatctcaacttcaacgatcccaaccgctggatgacctcgggcgggctcggcaccatgggctatggcttccccgcctccatcggggtgcagatggcgcatcccgaggccttggtgatcaatgtcgcgggcgaggcctcgtggctcatgaacatgcaggagatgggcaccgcggtgcaattccgcctgccggtgaaacagttcatcctcaacaatgaacgtctcggcatggtgcgccagtggcaggaactcttgcatggcgagcgctattcgcacagctggtccgaggcgctgcccgatttcgtcaagctcgccgaagcctttggcgccaagggcatccgctgtagcgatcccgccgatctcgatgacgcgatcatggagatgatcacctacgacgggccggtcatctttgactgcctggtcgagaagcacgagaactgtttcccgatgatcccgtcgggcgagccccataacaagatgctgctgggcgaggcctccaccaaggatgccatcaagtccggcggcgcggtgctggtgtga

SEQ ID NO: 138071 - protein, 584 aa, Roseovarius nubinhibens ISM
MTRQMTGAKMVVQALKDQGVDVVFGYPGGAVLPIYDEIFQQNDIRHVLVRHEQGAVHAAEGYARSTGKPGVVLVTSGPGATNAVTGLTDALLDSIPLVVLTGQVPTFMIGNDAFQEADTVGITRPCTKHNWLVSDTNRLSGTLHEAFHVATTGRPGPVLVDIPKDVQFANGDYTPPAKARVSHYQPQVKGDMEEITELVEALETAERPVFYTGGGVINSGPAASQLLRELVEATGVPITSTLMGLGAYPANGEHWLGMLGMHGLYEANMAMHDCDLMINVGARFDDRITGRVDAFSPHSTKAHIDIDPSSINKVIKADIPIVGDVAHVLEDILKVWKARGRKTNAAAIAKWRAKIDEWRKVDCLAFKQTGKVIKPQHALARLEALTRDHDRYVTTEVGQHQMWAAQYLNFNDPNRWMTSGGLGTMGYGFPASIGVQMAHPEALVINVAGEASWLMNMQEMGTAVQFRLPVKQFILNNERLGMVRQWQELLHGERYSHSWSEALPDFVKLAEAFGAKGIRCSDPADLDDAIMEMITYDGPVIFDCLVEKHENCFPMIPSGEPHNKMLLGEASTKDAIKSGGAVLV

SEQ ID NO: 138072 - DNA, 1755 bp, Oceanicola batsensis HTCC2597
  CDS (1)..(1755): transl_table=11
atggcacggcagatgactggtgcgaaaatggtggttcaggcgctcaaggatcagggcgtcgacacggtattcgggtatccgggcggcgccgtgctaccgatctacgacgaaatctttcagcagaacgacattcgccacatccttgtgcgtcacgaacagggcgcggtgcatgcggccgagggctatgcccgctcgaccgggaaacccggcgtggtgctggtgacctcggggcccggggccacgaatgccgtgacggggatggcggatgcgctgctcgattccattccgctcgtcgtgctgaccggccaggtccccaccttcatgatcggctcggacgcgttccaggaggccgataccgtcggcatcacgcgcccctgcaccaaacacaactggctggtcagggacacagacgccctgtccggcgtcctgcacgaggcctttcacgtcgcgaccgccggccggcccggcccggtgctgatcgacattcccaaggatgtgcagttcgccacgggcagctatgcgccgccggtcaagggcggacccaagcggtatcagccgcaggtcaagggcgatatcgagacgatcaccgaactggtcgaggcgctggaaacggcgaagaaaccgatcctctacaccgggggcggcgtcatcaactcgggcgatgcggcaagccagctgctgcgcgaactggtggatgcgaccaacacgcccatcacctcgaccctgatgggactgggcgcctaccccggttcggggaagaactggctgggcatgctggggatgcacggcctctacgaggcgaacatggcgatgcacgactgcgatctgatgatctgcatcggggcgcggttcgacgaccggatcacggggcggatcgacgccttcagcccgcactcgcgcaaggcgcacatcgacatcgacccctcttcgatcaacaaggtcgtgcacacggacatcccgatcgtcggggacgtggcgcatgtgctcgaggatctgctgaagatctggaaagcgcgcgggcgcaagaccgaccgcgaggcgctggacaggtggtggaagcagatcgacgaatggcgcgcggtcaactgcctgacctacaagacctccgatcaggtcatcaaaccgcagtatgcgctgcagcggctggaagagctgacccggggccacgaccgctatatcacgaccgaggtgggccagcaccagatgtgggcggcccagttcctgaccttcgacgaacccaagcgctggatgacctcgggcgggctgggaaccatggggtacggctttcccgcctcgatcggggtgcagatggcgcatcgcgacagcctggtgatcaatgtcgcgggcgaggcctcgtggctgatgaacatgcaggagatggggacggcggtgcagttccgcctgccggtgaagcagttcatcctgaacaacgagcggctcggcatggtgcggcaatggcaggaattgctgcacggcgagcgctattcgcattcctggtccgaggctctgcccgatttcgtcaagctggccgaggccttcggcgccaagggcattctctgcaccgatcccaaggacctggacgacgcgatcatggagatgatcgaatacgacgggccggtgatcttcgactgcctggtggaaaagcacgaaaactgcttcccgatgatcccgtcgggcgaaccgcacaacaagatgcttttgggcgaggtctcgaccaaggacgcgatcaaggagggcggcgcggtcttggtgtga

SEQ ID NO: 138073 - protein, 584 aa, Oceanicola batsensis HTCC2597
MARQMTGAKMVVQALKDQGVDTVFGYPGGAVLPIYDEIFQQNDIRHILVRHEQGAVHAAEGYARSTGKPGVVLVTSGPGATNAVTGMADALLDSIPLVVLTGQVPTFMIGSDAFQEADTVGITRPCTKHNWLVRDTDALSGVLHEAFHVATAGRPGPVLIDIPKDVQFATGSYAPPVKGGPKRYQPQVKGDIETITELVEALETAKKPILYTGGGVINSGDAASQLLRELVDATNTPITSTLMGLGAYPGSGKNWLGMLGMHGLYEANMAMHDCDLMICIGARFDDRITGRIDAFSPHSRKAHIDIDPSSINKVVHTDIPIVGDVAHVLEDLLKIWKARGRKTDREALDRWWKQIDEWRAVNCLTYKTSDQVIKPQYALQRLEELTRGHDRYITTEVGQHQMWAAQFLTFDEPKRWMTSGGLGTMGYGFPASIGVQMAHRDSLVINVAGEASWLMNMQEMGTAVQFRLPVKQFILNNERLGMVRQWQELLHGERYSHSWSEALPDFVKLAEAFGAKGILCTDPKDLDDAIMEMIEYDGPVIFDCLVEKHENCFPMIPSGEPHNKMLLGEVSTKDAIKEGGAVLV

SEQ ID NO: 138074 - DNA, 1725 bp, Erythrobacter sp. NAP1
  CDS (1)..(1725): transl_table=11
atggaatgcctggtcgatcagggggtcgaattcgtcttcggctatcccggcggcgcagtgctgcccatttacgacgagctttttggtgatgagcgcatccgtcacatcctcgtgcgccatgaagcgggcgcagggcatgccgcagagggctatgcacgcgcaaccggtaagccaggcgtcgtgctggtcacgagcggcccgggcgcgaccaatgcggtcacggcgattgccgatgcctacatggattcgatccccatggttgtcatcactggacaagttcccactgccctgatcgggacagacgcgtttcaggaagcggacacggtcggcatcacccgccactgcaccaagcacaattatctcatcaaagaccccgccgatcttgttgccacggtcgaggaagcttttcgcatcgccaccacgggccgccccggccctgtcgttgtcgacatcccaaaagacgttcagattgcggtgccatcgcaaagcagcgcgtatgtcgcgcccggctcgcaccgatatgctccgcagatggttgctccagccgaacaaattgcggaggctatcgagctgatcgaaaacgctcaggcgccgatcctctacaccggcggcggtgttatcaattcagggccggaagcaagcgaattgctgcgcaaattgcaggacctgaccaacgctccgatcacctcgacgttgatggggcttggcgcattcccgaacacgcatcccgactggctcggcatgctgggaatgcacggaacttacgaagccaacatggcaatgaacaagtgcgacgtaatgatctgcgtcggtgcgcggtttgacgaccgggtcaccggcaggctcgacgcattttcgcctgacagcaagaagatccacatcgacatcgaccgcagctcgatcaacaagacggttcccgtcgacatcgggatcgtcggcgactgcgcgaccgtgctcggccaattggttgaagcatggggcacacgcaaaccgcaagatctcggcgaatggaaagcccggatcgcaggctggcgcgctcgcgaatgtctcgcctacccacagcgttcgaagaagaaccccgaagcaatcatgccgcaaaaggcggtcgagcggctctatgcgctgaccaaggacagaaagcccattgtttcgaccgaagtcggccagcaccagatgtgggctgcgcaatatttcggtttcgatgaacccaacaagtggctcaccagcggcgggctcggcaccatgggctacggcatgccagcggccatcggtgcgcaactgggttgcccagatgcgttggtgatcgacattgccggagaagcttcgatccagatgaatattcaggagcttggcacggcgtcgcaataccgcctgccgatcaaggtcttcatccttaacaacgaatatatgggtatggtccgtcagtggcaggaactgacctatgaaagccgttattcgaactcctacagcgacagcctgcccgatttcgtcgctctcgcagaagcctatggctggaaaggcatccgcatcaccgaagaagcgggcctcgatgcaggcatcaaggcgatgatcgaccacgacggcccggtgatcgtcgattgctgtgtagccaaggatgccaattgccttccgatgatcccgtcgggggctgcgcataccgacatgctgctatatggcgacagcgtcgatgggaccatggacgacgaagcaaaggccctggtttag

SEQ ID NO: 138075 - protein, 574 aa, Erythrobacter sp. NAP1
MECLVDQGVEFVFGYPGGAVLPIYDELFGDERIRHILVRHEAGAGHAAEGYARATGKPGVVLVTSGPGATNAVTAIADAYMDSIPMVVITGQVPTALIGTDAFQEADTVGITRHCTKHNYLIKDPADLVATVEEAFRIATTGRPGPVVVDIPKDVQIAVPSQSSAYVAPGSHRYAPQMVAPAEQIAEAIELIENAQAPILYTGGGVINSGPEASELLRKLQDLTNAPITSTLMGLGAFPNTHPDWLGMLGMHGTYEANMAMNKCDVMICVGARFDDRVTGRLDAFSPDSKKIHIDIDRSSINKTVPVDIGIVGDCATVLGQLVEAWGTRKPQDLGEWKARIAGWRARECLAYPQRSKKNPEAIMPQKAVERLYALTKDRKPIVSTEVGQHQMWAAQYFGFDEPNKWLTSGGLGTMGYGMPAAIGAQLGCPDALVIDIAGEASIQMNIQELGTASQYRLPIKVFILNNEYMGMVRQWQELTYESRYSNSYSDSLPDFVALAEAYGWKGIRITEEAGLDAGIKAMIDHDGPVIVDCCVAKDANCLPMIPSGAAHTDMLLYGDSVDGTMDDEAKALV

SEQ ID NO: 138076 - DNA, 1725 bp, Pseudoalteromonas tunicata D2
  CDS (1)..(1725): transl_table=11
atggaacaagaaataatgtcaggagccgcacttgttgtgcgagcgctgaaggagcttgaggtaaaatatgtttttggttaccccggtggctcagtattggatatttatgatgcattgtacgtacaaaacgatgttgaacatattctagtaagacatgaacaagctgcgacccacatggccgatggtttttcacgtgcaactgggcaggtgggtgtcgtattagcaacgtcaggacccggtgcgaccaactgcgtaacagggattgctactgcttatatggactcaattccaatggtggtactggcaggtcaagttccgagtaatttaatcggtgatgacgcctttcaagaaactgatatcgtcgggtgttcaagaccgatagtgaaacatagtttcaactgtcgcagcgccgttgaaattcctgagattttagctaaagctttttacattgctaaaacgggtcgtcccggtcctgtcgtagtcgaactgccaaaagatattctaaaccctgcgcttgagtttccatttatcatgcctaaagacatttctttgcgttcatacaacccgagtaaaaaaggtcattcgaaacaaattcgcaaagctgtgcaggcaattttaaatgctaaacgtctcgttgtttattctggcggcggtattattttatctgatacatcagagcaactgactcagcttgtagagtcactgaacgcccctatcactaataccttaatgggattaggaggtatttctggtactcatccgaactttatcgggatgttggggatgcatggtaatttggaagcaaataaagccatggccaacgccgatgtaatcttagcactcggtgcacgctttgatgaccgtgtaaccaataacgtgaaaaagttttgtccaaacgcaacgattgttcatgttgatgtagacccaacatctatctcaaaaactatttcagcccacattccagtagtcggtgatttagcaacggtatttgagcaacttcaaattgaaattgataaaagtgagctgcaaattgaccgtgcagcacaagaggattggtggcgtaccattaataattggcgtgagcaaaaatgtctaagctacaccaaagtcgaaggtaaaattaaaccacaaacagtgattgaaacgctatacaaagtaactcaaggcaaagcctatataagctccgatgttggtcaacatcagatgtttgcagcgcaatactacccttttgataaacctcgccaatggatcaatagtggcggcttagggactatgggttttggtctaccggcggcaatgggagtaaaacttgcttttcctgataaagaatctgtctgtgttacaggcgatggttcgattcaaatgaatattcaagagctctcaacctgtatgcaatatggattagccgttaagattatttcccttaacaatcgatcactaggtatggttcgacaatggcaagacatgatttattcgggtcgccattcatcatcgtacatggattctttacctgactttgtcaaactagcagaaagctatggtcatgttgggatcagagttgattatcctgaacaattagaagatgccctagcaacagcgatggcgattactgacagattagtctttgttgatgtctgtattgatgaatcagagcatgtgtatccgatgcaaattcgtttaggagcaattgatgagatgtggcttaaaaaaggagtaaaagcataa

SEQ ID NO: 138077 - protein, 574 aa, Pseudoalteromonas tunicata D2
MEQEIMSGAALVVRALKELEVKYVFGYPGGSVLDIYDALYVQNDVEHILVRHEQAATHMADGFSRATGQVGVVLATSGPGATNCVTGIATAYMDSIPMVVLAGQVPSNLIGDDAFQETDIVGCSRPIVKHSFNCRSAVEIPEILAKAFYIAKTGRPGPVVVELPKDILNPALEFPFIMPKDISLRSYNPSKKGHSKQIRKAVQAILNAKRLVVYSGGGIILSDTSEQLTQLVESLNAPITNTLMGLGGISGTHPNFIGMLGMHGNLEANKAMANADVILALGARFDDRVTNNVKKFCPNATIVHVDVDPTSISKTISAHIPVVGDLATVFEQLQIEIDKSELQIDRAAQEDWWRTINNWREQKCLSYTKVEGKIKPQTVIETLYKVTQGKAYISSDVGQHQMFAAQYYPFDKPRQWINSGGLGTMGFGLPAAMGVKLAFPDKESVCVTGDGSIQMNIQELSTCMQYGLAVKIISLNNRSLGMVRQWQDMIYSGRHSSSYMDSLPDFVKLAESYGHVGIRVDYPEQLEDALATAMAITDRLVFVDVCIDESEHVYPMQIRLGAIDEMWLKKGVKA

SEQ ID NO: 138078 - DNA, 1719 bp, Photobacterium sp. SKA34
  CDS (1)..(1719): transl_table=11
atggagatgttgtccggcgctgatatgatcgtacgttctatgatcgatcaaggcgttaagcatatattcggctaccctggtggctctgttcttgatatctacgatgcccttcatgagaaaagcgatattgaacatgttcttgttcgtcatgaacaagctgctgttcatatggctgatggttatgcgcgtgctacgggtgatgttggcgttgtactggtgacctctggtcctggcgcaaccaatgccattactggtattgcaacggcttatatggattcaattcctatggtcgtgctatcagggcaagtaatgagtagcttaattggtaacgatgcattccaagaatgtgacatggttgggatctcacgcccagtagttaaacatagctttcttgtaaccaaacctgaagacatccctgaaatcatcaaaaaagccttctatatagcatctacaggccgtcctggtcccgttgtggttgatatccctaaagatatgttaaaccctgctgaagcgtatccatatcaatatccagaatcgatttcattacgttcatataatccgacgacccaaggtcataaaggacaaattaaacgtggtgttaaagcgctattatcagcgaaaaagccagtattgtacgtcggtggcggtgccatcatgtcatcgtgtagcgagcaattgattgagcttgctgagtcattaaacattcctgttgtaaatacccttatgggactaggggcgttccctggctcacataaacagtgtttaggtatgttgggtatgcatggcacttatgaagctaatatggcaatgcataacgcagatcttatatttggtattggagtgcgttttgatgatcgtacgaccaacaacttagaaaagtactgccctgatgcaacgatcatgcacatagatattgatccatcatcaatatctaaaaccgtatcagcagatattcctatcgtgggctcggcggataccgtattaaatagtatgcttaaattattgaaagagcatgaagttaaaaatgatcaacaggagatcgcgcaatggtggcaatcaattgaatcgtggcgtgaacgtgaatgtttaagttatgacacagatagcgatcgcattaaaccacagcaagtcattgaagtgcttcaccgcttaactaatggcgaagcttatgtctcttctgatgttggtcagcatcaaatgtttgccgcgctgtattacccatttgataagccgcgtcgttggattaactctggtggtttaggcacgatgggctttggtttacctgctgcgatgggagtgaagtttgctttgcctgatgctgaagtggtatgcgtaaccggtgatggcagtattcagatgaatattcaagagctatctacagcgttgcaatacgatattcctgttaagatcattaatttaaataaccgattcttaggcatggtgaagcagtggcaggatatgatctatcaaggtcgtcactcacattcatacatggattctgtgcctgattttgcggctattgctgaagcttatggccatgtcggtgtacgaatttcagatcctaataaattagaaagtgaactagagaaggctttagcacttaaagataaattagtctttattgatatcagtgttgatgaaacagaacacgtatacccaatgcttatccgtggtggtgcaatgaatgagatgtggttaagcaagacggagagaacataa

SEQ ID NO: 138079 - protein, 572 aa, Photobacterium sp. SKA34
MEMLSGADMIVRSMIDQGVKHIFGYPGGSVLDIYDALHEKSDIEHVLVRHEQAAVHMADGYARATGDVGVVLVTSGPGATNAITGIATAYMDSIPMVVLSGQVMSSLIGNDAFQECDMVGISRPVVKHSFLVTKPEDIPEIIKKAFYIASTGRPGPVVVDIPKDMLNPAEAYPYQYPESISLRSYNPTTQGHKGQIKRGVKALLSAKKPVLYVGGGAIMSSCSEQLIELAESLNIPVVNTLMGLGAFPGSHKQCLGMLGMHGTYEANMAMHNADLIFGIGVRFDDRTTNNLEKYCPDATIMHIDIDPSSISKTVSADIPIVGSADTVLNSMLKLLKEHEVKNDQQEIAQWWQSIESWRERECLSYDTDSDRIKPQQVIEVLHRLTNGEAYVSSDVGQHQMFAALYYPFDKPRRWINSGGLGTMGFGLPAAMGVKFALPDAEVVCVTGDGSIQMNIQELSTALQYDIPVKIINLNNRFLGMVKQWQDMIYQGRHSHSYMDSVPDFAAIAEAYGHVGVRISDPNKLESELEKALALKDKLVFIDISVDETEHVYPMLIRGGAMNEMWLSKTERT

SEQ ID NO: 138080 - DNA, 1722 bp, Oceanospirillum sp. MED92
  CDS (1)..(1722): transl_table=11
gtggaattactttcaggcgcagaaatggttgttcgcgcgcttcgtgatgaaggcgttaaatacatctacggttatccgggtggtgcactactgcacatctatgatgctatcttcactcaggaagaagtcgaacatgttctggtccgccacgaacaagctgccactcatatggcagatgcgtatgcgcgtgctacaggtaaagcaggtgtagcgctggttacttctggtccaggtgcaactaatgccgttacaggtattgctaccgcatacatggactctattcctatggtcgttatcacgggtcaggtaatgtcacacctgattggtgaagacgctttccaggaaaccgatatgatcggtgtctctcgtccaatcgttaagcacagtttcagcgtgcaacgtccggaagagatccctgagatcattaaaaaagctttccacattgctgaaagcggtcgtccaggaccggttgtcgttgatattcctaaggatatgacaacgccgactgaacgttacgagtatgagtaccctaagagcgtgaaaatgcgttcttacaacccgatctctaaaggccatactggacagatcaaaaaagcagtagatatgctactggcggctaagcgcccagttatctacaccggcggtggtgtcattatgggtaacgcgagtcaggaactgactgcactcgcgcaagagcttggctaccccgtaacgaataccttgatgggtctgggtggttacccgggcactgacaaacagttcattggcatgttgggtatgcatggtagctatgaagctaacatggcgatgcaccatagcgatatgattctggcagtaggcgcacgttttgatgatcgtgtgactaacggtactgacaagttctgtccgacagcgaagattgttcacatcgatattgatccggcttctatctctaagacgattaaagctgatgtaccaatcgtaggtcctgctcaggcagtactgaaagagatgctggaacaggttcaggctgcaaagaaagctccttgtgctgacagcatgaaactgtggtgggagcagatcgaagagtggcgtgcgcgccatggtggtcgttataagaccgatgactctgagctgatgaagcctcagcaggtgatcgaaatgcttagcaaagtgaccaatggtgatgcgtacgtttgttctgacgtaggtcagcatcagatgtttgctgctcagtactacaagttcaataagccaaaccgttggattaactccggtggccttggcacgatgggctttggtctgccagctgcgatgggcgttaagatgaacttccctgaagaagaggtggtttgtgtaacgggcgaaggcagtatccagatgaatatccaggagctgtctacgatcagtcagtacgatatcccggttaaggttatctgcctgaacaaccagtctctcggtatggttcgtcagtggcaggacatgaactatgagtctcgtcactctcagtcttacatgaagtcgctacctgactttatgaaactggttgagtcttatggacatgtaggtatcaaagttgaacgctacgaagatctggaaggcgcaatgcgcgaagcctttgcaatgaaagatcgtatggtattcatggatattgcagtggatccgtttgagcacgtttacccaatgcaggtaccgcgtggttctatgcgtgacatgtggctgagcaaaacggagagaacataa

SEQ ID NO: 138081 - protein, 573 aa, Oceanospirillum sp. MED92
MELLSGAEMVVRALRDEGVKYIYGYPGGALLHIYDAIFTQEEVEHVLVRHEQAATHMADAYARATGKAGVALVTSGPGATNAVTGIATAYMDSIPMVVITGQVMSHLIGEDAFQETDMIGVSRPIVKHSFSVQRPEEIPEIIKKAFHIAESGRPGPVVVDIPKDMTTPTERYEYEYPKSVKMRSYNPISKGHTGQIKKAVDMLLAAKRPVIYTGGGVIMGNASQELTALAQELGYPVTNTLMGLGGYPGTDKQFIGMLGMHGSYEANMAMHHSDMILAVGARFDDRVTNGTDKFCPTAKIVHIDIDPASISKTIKADVPIVGPAQAVLKEMLEQVQAAKKAPCADSMKLWWEQIEEWRARHGGRYKTDDSELMKPQQVIEMLSKVTNGDAYVCSDVGQHQMFAAQYYKFNKPNRWINSGGLGTMGFGLPAAMGVKMNFPEEEVVCVTGEGSIQMNIQELSTISQYDIPVKVICLNNQSLGMVRQWQDMNYESRHSQSYMKSLPDFMKLVESYGHVGIKVERYEDLEGAMREAFAMKDRMVFMDIAVDPFEHVYPMQVPRGSMRDMWLSKTERT

SEQ ID NO: 138082 - DNA, 1806 bp, Xanthobacter autotrophicus Py2
  CDS (1)..(1806): transl_table=11
gtgagcccggcggggccgaaggcgcccctgatggagttgcagaccatgagcatccagatgaccggcgccgaaatggtgatgcgcgccttcgccgaccagggggtcgagcatttcttcggctatccgggcggggcggtgctgccgatctatgacgcgctgttccagcagaacgccatcgagcacatcctggtgcgccacgagcaggcggcggtccatgcggcggagggctatgcccgctcctccggcaaggtcggcgtggtgctggtcacctccggccccggcgcgaccaatgcggtcaccggcctcaccgacgcgctgatggattcgattcccctcgtctgcatcaccgggcaggtggcgacccacctcatcggcaatgacgcgttccaggaatgcgacacggtgggcatcacccggccctgcaccaagcacaattacctcgtgcgcgacgtgaacgacctcgcacgcgtgctgcacgaggccttctacgtggcgcagaacggccggcccggcccggtggtcgtcgacattcccaaggatgtccagttcgccaccggcacctacatcggccgcgagaacatccagcacaagacctaccgccccaagctgaaggccgaggacgcgcagatctccgccgcggtggagatgatcgcgggcgcgaagaagccgatcttctacaccggcggcggcgtcatcaattccgggccggaggcgagccgcctgctgcgcgagctggcgcgcctcaccggcgtgccggtcacctcgacgctgatgggcctcggcgccttcccggcggcgaaccggcagtggctgggcatgctgggcatgcacggcacctatgaagccaacatggccatgcacgattgcgacgtgatggtctgcatcggcgcgcgcttcgacgaccgcatcaccggccgcctcgacgccttcgcgccgggctcgaagaagatccacatcgacatcgatccctcctccatcaacaagaacgtgaaggtggacctgcccatcatcggcgactgcacccgcgtgctcgccgacatggtcgaggcctggaacgcaaggtcgctgaagatcgaccagccggcgctcgccgcctggtggacgcagatcgagcgctggcgctcgcgcaactgcctcgcctatcgcccgtccgacgagatcatcaagccgcagttcgccatcgagcggctgtacgaggcgaccaaggacaaggacgtctacatctccacggaagtgggccagcaccagatgtgggcggcgcagttcttccgcttcgaggagccgaaccgctggatgacctccggcggcctcggcaccatgggctacggcctgcccgccgccatcggcgcgcagaaggcccacccgaacgcgctgtgcatcgacatcgcgggcgaggcctccatcctcatgaacatgcaggagatgtccacggcggtgcagttcgacctgccggtgaagatcttcatcctcaacaaccgctacatgggcatggtgcgccagtggcaggaactgctgcacggcgggcgctattcccactcctattcggaagcgctgcccgacttcgtgaagctggccgacgcctacggcggcgtgggcatccgctgcgagaagcccggcgacctcgacgcggcgatccaggagatgatcaacgtgaagcggccggtgatcttcgactgcatcgtggaccagcaggagaattgcttccccatgatcccgtcgggccgcgcccacaacgagatgatcctcggcgacatggccatcgacctcgacgatgccatcaccgacgagggcaagatgctggtctga

SEQ ID NO: 138083 - protein, 601 aa, Xanthobacter autotrophicus Py2
MSPAGPKAPLMELQTMSIQMTGAEMVMRAFADQGVEHFFGYPGGAVLPIYDALFQQNAIEHILVRHEQAAVHAAEGYARSSGKVGVVLVTSGPGATNAVTGLTDALMDSIPLVCITGQVATHLIGNDAFQECDTVGITRPCTKHNYLVRDVNDLARVLHEAFYVAQNGRPGPVVVDIPKDVQFATGTYIGRENIQHKTYRPKLKAEDAQISAAVEMIAGAKKPIFYTGGGVINSGPEASRLLRELARLTGVPVTSTLMGLGAFPAANRQWLGMLGMHGTYEANMAMHDCDVMVCIGARFDDRITGRLDAFAPGSKKIHIDIDPSSINKNVKVDLPIIGDCTRVLADMVEAWNARSLKIDQPALAAWWTQIERWRSRNCLAYRPSDEIIKPQFAIERLYEATKDKDVYISTEVGQHQMWAAQFFRFEEPNRWMTSGGLGTMGYGLPAAIGAQKAHPNALCIDIAGEASILMNMQEMSTAVQFDLPVKIFILNNRYMGMVRQWQELLHGGRYSHSYSEALPDFVKLADAYGGVGIRCEKPGDLDAAIQEMINVKRPVIFDCIVDQQENCFPMIPSGRAHNEMILGDMAIDLDDAITDEGKMLV

SEQ ID NO: 138084 - DNA, 1662 bp, delta proteobacterium MLMS-1
  CDS (1)..(1662): transl_table=11
ctggagacaggggttgaggttatctttggctttcccggcggggcggtgatcgatctttatgacgaactgcttagaaccgacaagctgacccatgttttggtccgccatgagcaggccgcgatccacgccgccgacgcctacggacgggtcagaggcgaggtcggggtggccctggtcacctccgggcccggcgccaccaataccgtcaccggaatcgcctcggcctattgcgactcgatcccgctggtggtcttcaccgggcaggtgcccaccatgctgatcggcaacgacgccttccaggaggtcgatatcgtcggcatcacccggccggtgaccaaacacaactacctggtcaaaaagcccgaggatctgatccccaccattcgtgaagccttccatctggcccgcagcggccggcccggcccggtgctggtggatctgcccaaggacgtcatcggggcgatggtcaaatacaccgaacccaagcccatcaagatgcgaacctaccggcccacctacgagccccatcccgggcagatcgaaaaggcctgcaagaccatcctcaaggccaagaagccggtgctctacgtcggcggcggggtgatcaacgccaatgcctccgaggaactcaccgccctggccaagaagctcgatattccggtgaccatgaccctgatggggttgggcgctttccccggcaccgaccccctctccatggggatgctgggcatgcacggcacctattacgccaatatggcggtggcccattgcgatctgctgatcgccgtcggcgcccgtttcgatgaccgggtcaccggccggatcgacgccttcgcgccccatgccaagattatccatatcgatatcgatcccagttcgatcagcaagaatgtcaaggtcgatattcccatcgtcgccgattgtaaccatgccctggcggcgatgaattcctggttcaacaacagccaggagttcaaccaggaagaggcccgccagcgtcatcggccctggcatgagcagatcaaggaatggaaaaacaagcatcccttgggttacatcgaagagaccaacgtcatcaaaccccagttcgtggtccagaagctccatgaactgaccgggggcaacgccattatcaccaccgaggtcggccagaaccagatgtgggcggcccagttttattatttcaacaagccgcgccactttatgacctccggcggcctgggggttatgggttacggcttccccgccgccatcggcgcccagatggccgctcccaatgaggtggtgatcgatgtcgccggcgacggttcgatccagatgaatatccaggagttggccaccgcccggcagtacaagtgcccggtcaaaatcgccatcttgaacaacaactacctgggcatggtccgccagtggcaggaactgttctacgacaaacagtacgcccataccaccctggatgtggctcccgatttcgtcaagctggccgaggcctacggggccgtgggcctgcgggccaccaagcccagcgaggtcgagccggtgatcaaggaggccttaaagaccaataacaccgtgctgatggatttcgtgatttcccgcgaggagggggtttaccccatggttccggccggcaaggccaccaccgaaatgctgttggtataa

SEQ ID NO: 138085 - protein, 553 aa, delta proteobacterium MLMS-1
METGVEVIFGFPGGAVIDLYDELLRTDKLTHVLVRHEQAAIHAADAYGRVRGEVGVALVTSGPGATNTVTGIASAYCDSIPLVVFTGQVPTMLIGNDAFQEVDIVGITRPVTKHNYLVKKPEDLIPTIREAFHLARSGRPGPVLVDLPKDVIGAMVKYTEPKPIKMRTYRPTYEPHPGQIEKACKTILKAKKPVLYVGGGVINANASEELTALAKKLDIPVTMTLMGLGAFPGTDPLSMGMLGMHGTYYANMAVAHCDLLIAVGARFDDRVTGRIDAFAPHAKIIHIDIDPSSISKNVKVDIPIVADCNHALAAMNSWFNNSQEFNQEEARQRHRPWHEQIKEWKNKHPLGYIEETNVIKPQFVVQKLHELTGGNAIITTEVGQNQMWAAQFYYFNKPRHFMTSGGLGVMGYGFPAAIGAQMAAPNEVVIDVAGDGSIQMNIQELATARQYKCPVKIAILNNNYLGMVRQWQELFYDKQYAHTTLDVAPDFVKLAEAYGAVGLRATKPSEVEPVIKEALKTNNTVLMDFVISREEGVYPMVPAGKATTEMLLV

SEQ ID NO: 138086 - DNA, 1725 bp, Oceanobacter sp. RED65
  CDS (1)..(1725): transl_table=11
gtggaaatgctttccggtggagaaatgttagttcgctccttgcatgaggaaggagttgaatatatttatggttacccaggtggtagcttgttacacgtgtatgatgctatttatcagcaaagcgcggtcaagcacgtcctggtccgtcatgaacaagcggcagcccatatggctgacggttacgcacgtgcatctggcaaacctggcgtcgtcatggtgacctcgggtcccggcgcaacaaatactattacaggtattgcaacagcctttacagactcaattccaatgatcgttatctctggacaggtaatgagtcacttgattggtgatgatgcattccaagagaccgatatgatgggtatctctcgtccaatcgttaaacatagttttagcgtaacggatcctcgtgatatcccagagattgtcaaaaaagcgttttatatagcgacttctggtcgccctggtccggtagtaatagacgtaccgaaagatatgactatgccgaacgaacgctttgaatacgaataccctaagaaagtaaaaattcgttcttacacaccaccaacgaaaggtcacgccggtcagattcgtaaagcagttgaactaatggtgaatgccaaacgtccgatcatttattccggtggtggcgttattttaggtggtgcccatgagcaactacgtaaactgactcgtgaattaaatgcgcctattacgcaaacattgatgggactaggcgcttatccagcaactgacaggcagtctcttggtatgttgggtatgcatggtagctatgaagcaaacatggcgatgcatcatgcggatgtaattttggcggttggcgcacgttttgacgatcgtgtaactaattcaactgctaagttctgtccagatgccactatcgttcatatcgacatcgatccatcttctatctcgaaaacggtagaggttgatgtaccaatcgttggcccagtggattcagtattgaatgatatgctggatatcttgagcaaaatgaaagagaggccagacgcggatgcattggcgtcttggtggaaacaaatcgaagagtggcgcaagcgtcatggtggtcattacgataaaaatgacaacggcttacttaaaccacaagaagctattgaaggcctttgggaagctacaaatggtcaagcgtacatcacttctgatgtaggccagcaccaaatgtttgctgctcaatattataagtttgatgagcctaacaaatggatcaattccggtggtcttggcaccatgggtttcggtttgccagccgctatgggtattaaactgaactatcaagacgatatggtggtttgtgtaactggcgaaggctctattcagatgaatattcaagagctttctacctgtttgcagtatggtattccggtaaaaatcttctgcttgaataacggctatcttggtatggttcgtcaatggcaggatatgaactatgaaggtcgtcactctagctcttatatggagtcactgccggattggacgaaactggttgaatcttatggtcacgttggtatcaatgtagaaaccaaggatcaacttaaaggtgcactggatgattgctttaacaaatacaaagatcgcttggtatttgtcaatgtagcggttgatccagaagaacatgtatacccaatgcaggttccaatgggagccatgcgtgatatgtggttaagcaaaacggagcgcacctaa

SEQ ID NO: 138087 - protein, 574 aa, Oceanobacter sp. RED65
MEMLSGGEMLVRSLHEEGVEYIYGYPGGSLLHVYDAIYQQSAVKHVLVRHEQAAAHMADGYARASGKPGVVMVTSGPGATNTITGIATAFTDSIPMIVISGQVMSHLIGDDAFQETDMMGISRPIVKHSFSVTDPRDIPEIVKKAFYIATSGRPGPVVIDVPKDMTMPNERFEYEYPKKVKIRSYTPPTKGHAGQIRKAVELMVNAKRPIIYSGGGVILGGAHEQLRKLTRELNAPITQTLMGLGAYPATDRQSLGMLGMHGSYEANMAMHHADVILAVGARFDDRVTNSTAKFCPDATIVHIDIDPSSISKTVEVDVPIVGPVDSVLNDMLDILSKMKERPDADALASWWKQIEEWRKRHGGHYDKNDNGLLKPQEAIEGLWEATNGQAYITSDVGQHQMFAAQYYKFDEPNKWINSGGLGTMGFGLPAAMGIKLNYQDDMVVCVTGEGSIQMNIQELSTCLQYGIPVKIFCLNNGYLGMVRQWQDMNYEGRHSSSYMESLPDWTKLVESYGHVGINVETKDQLKGALDDCFNKYKDRLVFVNVAVDPEEHVYPMQVPMGAMRDMWLSKTERT

SEQ ID NO: 138088 - DNA, 1725 bp, Vibrio sp. Ex25
  CDS (1)..(1725): transl_table=11
atgacagcaatgttgtcaggcgcagagatggtggttcaatctctgatagaagagcacgtagagcagatctttggctacccaggtggctctgttttggatatctacgatgcactgcatgccaaaaccgatcaaatcaaacacgtacttgtaaggcatgagcaagccgccactcatatggcagatggttacgctcgcgctaccggtaaaccgggtgtcgtactggtatgttcaggtccgggcgcgaccaataccattactggtattgcaacggcttatatggactccatcccaatgatcgttatctcgggtaacgtacctaatagcctaattggtaatgatgctttccaagaatgtgacatcgttggtgtttctcgcccagtggtcaaacacagctttttagtgaaaaaagcggaagatattcctgaaacgatcaagaaagcgttttatatcgcgaccacaggtcgacctggtccagtagtgattgacttgccgaaagatgtaatgaatccgcaaatcaaactgccttaccaatacccagaaacgctttcaatgcgttcttacaagccgacgacgtcgggtcataaaggccagattaaaaaagcgcttaaatcactgttagaagcgaaaaaaccagtgctttatatcggtggtggtgctgtgatttctggcgctcatgaacatattttagagctctccgacaagctgaaccttccagtagtcagtacgttgatgggactaggcgcattccctgggacacataaaaactcactgggcatgctgggtatgcacggtacttacgaagccaatatggcgatgcatgaagcggatctcatttttggtatcggtgtgcgttttgatgatcgcacgacgaacaaccttgaaaaatactgcccaaacgcaaaagtcatgcatattgatatcgatccatcatcgatctcgaaaaacgtgaaggtggatttacctatcgtaggctctgcggaaaaagtgcttacaaccatgcttggcctgctggcagagcaagaaggtgggaacgatgaagatgccatcaccgcatggtgggatgacattcaggtgtggcgtgaccgcaactgtttggcttatgagaagtcaccagagcgaattaagccacagcaagtgattgaaaccttgcacaagctgaccaatggtgatgcgtatgttgcttctgatgtgggccagcaccagatgtttgcagcactttactacccatttaacaaaccacgccgttggatcaactcgggtggattgggcactatgggatttggccttccggctggtatgggtgttaagtttgccatgccacaagaagaagtcgtagttgttacgggcgatggcagtattcaaatgaatatccaagagctttcgacagccatgcaatacgatattccagtgaagatcatcaacctgaacaaccgattcctaggcatggtaaaacaatggcaagacattatttatcaaggtcgtcactctaattcttacatgagttctgttcctgattttgcagcgattgcagaagcttatggtcacgtcggtattcgtatcgaaacgcctgatcagctcgaagaagggctacaaaaagcgttggatatgaaagatcgtctggtgtttgtagacatcaacgtagacgaaaccgaacacgtatacccgatgcaaattaaaggtgagggtatggataaaatgtggctaagcaaaacggagagaacttaa

SEQ ID NO: 138089 - protein, 574 aa, Vibrio sp. Ex25
MTAMLSGAEMVVQSLIEEHVEQIFGYPGGSVLDIYDALHAKTDQIKHVLVRHEQAATHMADGYARATGKPGVVLVCSGPGATNTITGIATAYMDSIPMIVISGNVPNSLIGNDAFQECDIVGVSRPVVKHSFLVKKAEDIPETIKKAFYIATTGRPGPVVIDLPKDVMNPQIKLPYQYPETLSMRSYKPTTSGHKGQIKKALKSLLEAKKPVLYIGGGAVISGAHEHILELSDKLNLPVVSTLMGLGAFPGTHKNSLGMLGMHGTYEANMAMHEADLIFGIGVRFDDRTTNNLEKYCPNAKVMHIDIDPSSISKNVKVDLPIVGSAEKVLTTMLGLLAEQEGGNDEDAITAWWDDIQVWRDRNCLAYEKSPERIKPQQVIETLHKLTNGDAYVASDVGQHQMFAALYYPFNKPRRWINSGGLGTMGFGLPAGMGVKFAMPQEEVVVVTGDGSIQMNIQELSTAMQYDIPVKIINLNNRFLGMVKQWQDIIYQGRHSNSYMSSVPDFAAIAEAYGHVGIRIETPDQLEEGLQKALDMKDRLVFVDINVDETEHVYPMQIKGEGMDKMWLSKTERT

SEQ ID NO: 138090 - DNA, 1728 bp, Alteromonadales bacterium TW-7
  CDS (1)..(1728): transl_table=11
atgagcaaacaagagtataatggctctgaactagtcgttcaggcattaaaagaattaaaggtaaaatatatatttggctacccaggtggctcagtattagatttatacgatgcactttttcaacaaaatgatattgagcacatcttagttaggcatgaacaagcagcaacacacatggctgacggttatgcacgtgctactggtgaggtcggtgttgttcttgctacttcaggccctggtgctacaaattgtataaccggtattgcaactgcgtacatggactcaattccgatggttgtattatctgggcaggtacctactagtctaattggtgacgacgccttccaagaaacagacatagtgggttgctctcgaccaattgtaaaacacagctttaactgcagaagtgcacaagaaatacctgcaatattggcaaaagctttttatattgcaagcactggtcgccctgggcctgttgttgttgagctaccaaaagatatgcttaaccctgctgtcaaatttgaatacgacttccctgcaacgactgaacttcgaacttacagcccaaataccaaaggccattcaaaacaaattagaaaagcagtggccgctatattggaagctaaaaagctagttatatattctgggggtggcattatcatttcaaacacctcagagcaattaacacgcttagtagaatcattgaatgcacctattaccaacactttaatgggtttaggtggtatttcaggggttcaccctaactttatcggtatgctcgggatgcacggcacgctagaggccaacaaagctatggcaaatgccgacgttatattggcattaggcgctcgctttgatgatcgggttacaaataacgttaaaaagttttgccctaatgcgactattgttcacgtagatgtagaccctacctctatttctaaaaccattaaagcgcatatacctgttgtaggttgtttagacactgtacttaaacagctacaagacggcatagacaaaagcacaattcaaatagatcgcagtgcacaagaagattggtggcgacaaattattagctggcgtgaacaaaaatgtttgggttacaaacaaagcccttcagaaaaaatcaagcctcaagctgtcattgaagcgctttataaagcaacagacggcgaagcatacatcagctctgatgtagggcagcatcaaatgtttgcagcacagtattacccatttaaataccctcgccaatggatcaattccggcggattaggcactatgggctttggtttaccggctgccatgggcgttaagctcgcatttcctgataaagagtcggtgtgcgtaactggcgatggttctattcaaatgaacattcaagagctttctacgtgcttgcagtacaacttagccgttaaagtcgtctctcttaacaaccgctcattaggaatggtacgccaatggcaagatatggtgtacggcggtcgtcattcatcatcttacatggactcactacctgactttataaaattagttgaaagctatggccacgttggtattcaggtaaacactcttgacgagcttcaacccgcgattgacaaagcaatgagtataacggatcgtctagtatttttagacatacttgtcgacgaaaaagaacatgtgtacccaatgcaaattaaattaggtggcattgacgaattgtggttacgtaaaggagttaaagcataa

SEQ ID NO: 138091 - protein, 575 aa, Alteromonadales bacterium TW-7
MSKQEYNGSELVVQALKELKVKYIFGYPGGSVLDLYDALFQQNDIEHILVRHEQAATHMADGYARATGEVGVVLATSGPGATNCITGIATAYMDSIPMVVLSGQVPTSLIGDDAFQETDIVGCSRPIVKHSFNCRSAQEIPAILAKAFYIASTGRPGPVVVELPKDMLNPAVKFEYDFPATTELRTYSPNTKGHSKQIRKAVAAILEAKKLVIYSGGGIIISNTSEQLTRLVESLNAPITNTLMGLGGISGVHPNFIGMLGMHGTLEANKAMANADVILALGARFDDRVTNNVKKFCPNATIVHVDVDPTSISKTIKAHIPVVGCLDTVLKQLQDGIDKSTIQIDRSAQEDWWRQIISWREQKCLGYKQSPSEKIKPQAVIEALYKATDGEAYISSDVGQHQMFAAQYYPFKYPRQWINSGGLGTMGFGLPAAMGVKLAFPDKESVCVTGDGSIQMNIQELSTCLQYNLAVKVVSLNNRSLGMVRQWQDMVYGGRHSSSYMDSLPDFIKLVESYGHVGIQVNTLDELQPAIDKAMSITDRLVFLDILVDEKEHVYPMQIKLGGIDELWLRKGVKA

SEQ ID NO: 138092 - DNA, 1755 bp, marine gamma proteobacterium HTCC2143
  CDS (1)..(1755): transl_table=11
gtggaaatgttatcaggcggccaaatggtcgcgcgcgcgttggaagacgagggcgtagaatttatcttcggctacccaggtggcgcagttttacacatatacgacgccctttttcagtcgtgtaaggtgccccatattttagtcaggcacgagcaggccgctacgcatgcagccgacggctatgcgcgagccacgggtaaaccgggcgttgtgcttgtgacttccggcccaggggcaacaaacgctataacggggattgctacagcgtacatggattctatccctatggttgttttatcgggtcaggttccaagccatttaattggtagtgatgcttttcaggaaaccgatatggtgggtatatcccgacccattgttaagcatagttacctggtcaagcgcacggaagatatccctgccatcatcaaggaagcgttctaccttgccgctacaggcaggcccggccccgtcgttgtcgatttgccgaaagacctgaccaacccgattgataaatacgagtatgtctatcccgaaacagtcaagatgcgttcgtacacaccggcgctaaggggtcactccgggcagataaaaaaagcgatacagttattgctgggtgctaaacgtccggtcatatacagtggcggcggcgttattctgggtaacggcagtgaattgttaactgagttggccagagagctgaattaccccgttaccaatacgctcatgggcttgggtgcttaccctgcaaccgatcgacagtttttgggtatgctcgggatgcacggtttttacgaagctaatcatgccatgcataacagcgacgtgattttagctattggcgccagattcgatgatcgcgttactaatacaattagcaaattctgcccgtctgcaaaaattatccacgtggatattgatccggcttcaatctcaaaaacggtgactgcagatattcctatcgttggcccagtgaatgctgtgctaaaagaaatgctcactcaaatacgagccaccagaacttcccagggcgctgacgcgggccctgatgaagaggcgataggcagatggtggacacagatcgacgcatggagagcatcccatggcttgtggacggcgccacgctacgatacagaaactggcctgattaagccgcaacaggttattgagtcactgtatcgcgcgactaaaggcgatgcttatgttacctcggatgttggtcagcatcagatgtttgccgctcagttttataagttcgacaagccgcgacgttggattaactccggtggcttgggaacaatgggctttggtttaccggcggcaatgggggtgaagttggcatttccagacgatgatgttgcctgtgtgacgggtgagggtagtattcaaatgaacattcaggaattgtcgacctgtagtcaatattctgtgccgataaaaataattaacctcaataatggctatctcggaatggttaaacaatggcaggacatgaattactccagccgatattccgagagtgtgtacgaggattcattgcctgattttgttaagttggcagaggcttacgggcatgttggtatcaaagttgaccgtctggaagatctcgatgcagcgatggatgaggctttcaggttgaaagacaaattggtttttctcgatgtttacgttgatcgtcacgaacacgtttatccgatgcagattgccccagatggctccatgagagacatgtggttgagtaaaacggagcgaacataa

SEQ ID NO: 138093 - protein, 584 aa, marine gamma proteobacterium HTCC2143
MEMLSGGQMVARALEDEGVEFIFGYPGGAVLHIYDALFQSCKVPHILVRHEQAATHAADGYARATGKPGVVLVTSGPGATNAITGIATAYMDSIPMVVLSGQVPSHLIGSDAFQETDMVGISRPIVKHSYLVKRTEDIPAIIKEAFYLAATGRPGPVVVDLPKDLTNPIDKYEYVYPETVKMRSYTPALRGHSGQIKKAIQLLLGAKRPVIYSGGGVILGNGSELLTELARELNYPVTNTLMGLGAYPATDRQFLGMLGMHGFYEANHAMHNSDVILAIGARFDDRVTNTISKFCPSAKIIHVDIDPASISKTVTADIPIVGPVNAVLKEMLTQIRATRTSQGADAGPDEEAIGRWWTQIDAWRASHGLWTAPRYDTETGLIKPQQVIESLYRATKGDAYVTSDVGQHQMFAAQFYKFDKPRRWINSGGLGTMGFGLPAAMGVKLAFPDDDVACVTGEGSIQMNIQELSTCSQYSVPIKIINLNNGYLGMVKQWQDMNYSSRYSESVYEDSLPDFVKLAEAYGHVGIKVDRLEDLDAAMDEAFRLKDKLVFLDVYVDRHEHVYPMQIAPDGSMRDMWLSKTERT

SEQ ID NO: 138094 - DNA, 1749 bp, marine gamma proteobacterium HTCC2080
  CDS (1)..(1749): transl_table=11
atggaacaattatctggcggcgaaatgatcgtccgggctttggaagacgaaggcgttgagtatgttttcggatatccaggcggagcagccctgcatatttatgatgcaatttttaagctcgatgccgtccctcatattttagtgcgccacgaacaagcggcaacccacgcggcagacggctatgcgcgcgccaccggcaagcccggtgtagtgttagtgacctcgggtcctggtgcgacaaacgcaatcactggtattgctacggcctacatggattcgattcccatggttgtgctggcggggcaggttcaaacgcatttaatcggtgaagacgcgtttcaggaaaccgatatggtgggggtttctcgcccaatcgtaaaacacagcttcatggttaagcgcactgaagatattccctcaattattaagaaagcgttttacatagcgaccaccggaagacctggccctgttgtgattgacatccccaaggatctcactcaccccgagcacaagtttgattatcactaccccgaaagtgtcacgttgcggtcttatcagccttctagcagagggcatacaggacagattcgcaaggcggctaggctactgctgtctgctaagcggcccattatctatgccggcgggggtgttattcagggcgaaggctgtgaactgctaacgactttggcgcaaaagttgaactacccggtcactaataccttgatgggcctgggtgcctaccccgggtctgatcggcaatttctggggatgctgggcatgcatggcttttatgaggccaatatggctatgcatcattctgatgtcatcttggcggtgggtgctcgttttgatgatcgagtgactaatacagtgggtaagttttgtcccggagccaaaattattcatatcgatgtcgacccggcatccatcgccaagatagtgcccgtcgatatacccatcgtgggtcctgtacagaccgttttaactgagcttttggcgcagatcgatgcccatttacaagggagtgatcgtgagatgcccgagcccgcagcactagctcagtggtggcagcagatcgagagttggcgtgaagctcatgggctttggcacggtcgccggtatggggaaagtgaattggctatgcctcaagacgttatcaaatgcctatatgaggtcactgaaggcgacgcttatgtcacatccgatgtcggacaacatcagatgtttgcggctcaatattacaaatttgataagcctcgtcgttggattaattcggggggcttaggaaccatgggctttggtttgccggctgctatgggcataaagctggctctgcccgatgcagaggtggcctgcgtcaccggtgagggcagtattcaaatgaatattcaggagctttcaacctgcgcgcagtacggcaccccaatcaaaatagttagcttgcggaacaattatttgggcatggttaagcagtggcaggatatgcagtacgagggtcggtattctgagagccattacgccgcttccctccccgattttgtaaagcttgctgaatcctttggccacgttggtattaaagttgagaagcgggatgatcttgaggcagcgatgcgcgaggcttttgccctgaaggatcgattggtgtttcttgatgttttcgttgagcctcatgagcatgtctacccaatgcatgtggctcctagtggtgctatgaaagatatgtggctcagcaaaacggagagaacttaa

SEQ ID NO: 138095 - protein, 582 aa, marine gamma proteobacterium HTCC2080
MEQLSGGEMIVRALEDEGVEYVFGYPGGAALHIYDAIFKLDAVPHILVRHEQAATHAADGYARATGKPGVVLVTSGPGATNAITGIATAYMDSIPMVVLAGQVQTHLIGEDAFQETDMVGVSRPIVKHSFMVKRTEDIPSIIKKAFYIATTGRPGPVVIDIPKDLTHPEHKFDYHYPESVTLRSYQPSSRGHTGQIRKAARLLLSAKRPIIYAGGGVIQGEGCELLTTLAQKLNYPVTNTLMGLGAYPGSDRQFLGMLGMHGFYEANMAMHHSDVILAVGARFDDRVTNTVGKFCPGAKIIHIDVDPASIAKIVPVDIPIVGPVQTVLTELLAQIDAHLQGSDREMPEPAALAQWWQQIESWREAHGLWHGRRYGESELAMPQDVIKCLYEVTEGDAYVTSDVGQHQMFAAQYYKFDKPRRWINSGGLGTMGFGLPAAMGIKLALPDAEVACVTGEGSIQMNIQELSTCAQYGTPIKIVSLRNNYLGMVKQWQDMQYEGRYSESHYAASLPDFVKLAESFGHVGIKVEKRDDLEAAMREAFALKDRLVFLDVFVEPHEHVYPMHVAPSGAMKDMWLSKTERT

SEQ ID NO: 138096 - DNA, 1695 bp, Candidatus Desulfococcus oleovorans Hxd3
  CDS (1)..(1695): transl_table=11
atgcaattcacaggcgcgcagatcatgatgaaggtgctcaaggaagagaaggtggagaccatcttcggctatcccggcggcgcggtgctggatgtttataacgagctgctcaacaccgattttgcacatatcctggtccgccaggaacagggggccgttcacgcggccgacgcctatgcccgggtctccggcaaaaccggggtctgcctggtcacctccggccccggtgccaccaacaccatcaccggcattgcttctgcctactgcgactccattccggtggtgattttcaccggccaggtgccaacgcccctgatcggcaacgacgcctttcaggaggtggatatcgtgggcatctcccggccctgcaccaagcacaactacctggtcaaggatgtcaaagacctggccggggtcattcgggaggccttttacatcgcccgttccggccggccgggaccggtgctgatcgacatgcccaaggacgtgatcaacgcaaagaccacctatgagccgccgaagccgatggcgctcaagtcttacaacccgacctacgagcccaacgtcaaacagctgaaaaaggtgatcgacctggtgaaaaccgccaaaaagccggtgatcttttccggcgggggcatcatcttttccggcgcggccaaagaactgacccggtttgcaaaaaaagcccgcattccggtcacctcgacgctgatgggtctgggcgcctttccggccaccgacgacctgtggctgggcatgccgggcatgcacggcacctaccgggccaacctgtccctttcctcatgcgaccttctcatcgcggtgggggtgcggtttgatgaccgggttaccggcaagaccagcgagtttgcggccaacgccaccattgtgcatatcgacatcgaccccacctccattcagaaaaacgtgagggtggccattcccatcgtgggcgactgcaaagcggccatggcccggctcaataaaatggctgatgaggacaaagacctgctgagcgacaaggtcaaaaaagagcggaccgcctgggccaaacagattgcggactggaaaaaaaccaagcccctggcctacacccagacggatgtgatcaaaccccagtacgtggtggaacagctttatgaactgacaaagggccaggccatcatcaccaccgaggtgggccagaaccagatgtgggcggcccagtattaccattatacctggcccggccagttcatcacctccggcggactgggcgtgatggggttcggcctgcccgcggccgtgggcgcccaggtggcggccccggacaaagtggtcattgatattgccggcgacggcagcattcagatgaacattcaggagatgatgacagcggtgagccacaacctgccggtgaaaatcgccattctcaacaacggattcctcggcatggtgcgccagtggcaggagctgttctacgaccggcgctatgcctggaccgacatggccgcggccccggactttgtcaagctggccgaggcctacggtgcggtgggcctacgggccaccaaacccagcgaggtggcgaaggtgattaaaaaggccctggcaacgcccaaaccggtgatcatggactttgtggtggaaaaagaagaaaacgtctatcccatggtgccggccggctctcccattaccaacatgatccttgtataa

SEQ ID NO: 138097 - protein, 564 aa, Candidatus Desulfococcus oleovorans Hxd3
MQFTGAQIMMKVLKEEKVETIFGYPGGAVLDVYNELLNTDFAHILVRQEQGAVHAADAYARVSGKTGVCLVTSGPGATNTITGIASAYCDSIPVVIFTGQVPTPLIGNDAFQEVDIVGISRPCTKHNYLVKDVKDLAGVIREAFYIARSGRPGPVLIDMPKDVINAKTTYEPPKPMALKSYNPTYEPNVKQLKKVIDLVKTAKKPVIFSGGGIIFSGAAKELTRFAKKARIPVTSTLMGLGAFPATDDLWLGMPGMHGTYRANLSLSSCDLLIAVGVRFDDRVTGKTSEFAANATIVHIDIDPTSIQKNVRVAIPIVGDCKAAMARLNKMADEDKDLLSDKVKKERTAWAKQIADWKKTKPLAYTQTDVIKPQYVVEQLYELTKGQAIITTEVGQNQMWAAQYYHYTWPGQFITSGGLGVMGFGLPAAVGAQVAAPDKVVIDIAGDGSIQMNIQEMMTAVSHNLPVKIAILNNGFLGMVRQWQELFYDRRYAWTDMAAAPDFVKLAEAYGAVGLRATKPSEVAKVIKKALATPKPVIMDFVVEKEENVYPMVPAGSPITNMILV

SEQ ID NO: 138098 - DNA, 1701 bp, Escherichia coli B
  CDS (1)..(1701): transl_table=11
atggtcgtccgatcgcttatcgatcagggcgttaaacaagtattcggttatcccggaggcgcagtccttgatatttatgatgcattgcataccgtgggtggtattgatcatgtattagttcgtcatgagcaggcggcggtgcatatggccgatggcctggcgcgcgcgaccggggaagtcggcgtcgtgctggtaacgtcgggtccaggggcgaccaatgcgattactggcatcgccaccgcttatatggattccattccattagttgtcctttccgggcaggtagcgacctcgttgataggttacgatgcctttcaggagtgcgacatggtggggatttcgcgaccggtggttaaacacagttttctggttaagcaaacggaagacattccgcaggtgctgaaaaaggctttctggctggcggcaagtggtcgcccaggaccagtagtcgttgatttaccgaaagatattcttaatccggcgaacaaattaccctatgtctggccggagtcggtcagtatgcgttcttacaatcccactactaccggacataaagggcaaattaagcgtgctctgcaaacgctggtagcggcaaaaaaaccggttgtctacgtaggcggtggggcaatcacggcgggctgccatcagcagttgaaagaaacggtggaggcgttgaatctgcccgttgtttgctcattgatggggctgggggcgtttccggcaacgcatcgtcaggcactgggcatgctgggaatgcacggtacctacgaagccaatatgacgatgcataacgcggatgtgattttcgccgtcggggtacgatttgatgaccgaacgacgaacaatctggcaaagtactgcccaaatgccactgttctgcatatcgatattgatcctacttccatttctaaaaccgtgactgcggatatcccgattgtgggggatgctcgccaggtcctcgaacaaatgcttgaactcttgtcgcaagaatccgcccatcaaccactggatgagatccgcgactggtggcagcaaattgaacagtggcgcgctcgtcagtgcctgaaatatgacactcacagtgaaaagattaaaccgcaggcggtgatcgagactctttggcggttgacgaagggagacgcttacgtgacgtccgatgtcgggcagcaccagatgtttgctgcactttattatccattcgacaaaccgcgtcgctggatcaattccggtggcctcggcacgatgggttttggtttacctgcggcactgggcgtcaaaatggcgttgccagaagaaaccgtggtttgcgtcactggcgacggcagtattcagatgaacatccaggaactgtctaccgcgttgcaatacgagttgcccgtactggtggtgaatctcaataaccgctatctggggatggtgaagcagtggcaggacatgatctattccggccgtcattcacaatcttatatgcaatcgctacccgatttcgtccgtctggcggaagcctatgggcatgtcgggatccagatttctcatccgcatgagctggaaagcaaacttagcgaggcgctggaacaggtgcgcaataatcgcctggtgtttgttgatgttaccgtcgatggcagcgagcacgtctacccgatgcagattcgcgggggcggaatggatgaaatgtggttaagcaaaacggagagaacctga

SEQ ID NO: 138099 - protein, 566 aa, Escherichia coli B
MVVRSLIDQGVKQVFGYPGGAVLDIYDALHTVGGIDHVLVRHEQAAVHMADGLARATGEVGVVLVTSGPGATNAITGIATAYMDSIPLVVLSGQVATSLIGYDAFQECDMVGISRPVVKHSFLVKQTEDIPQVLKKAFWLAASGRPGPVVVDLPKDILNPANKLPYVWPESVSMRSYNPTTTGHKGQIKRALQTLVAAKKPVVYVGGGAITAGCHQQLKETVEALNLPVVCSLMGLGAFPATHRQALGMLGMHGTYEANMTMHNADVIFAVGVRFDDRTTNNLAKYCPNATVLHIDIDPTSISKTVTADIPIVGDARQVLEQMLELLSQESAHQPLDEIRDWWQQIEQWRARQCLKYDTHSEKIKPQAVIETLWRLTKGDAYVTSDVGQHQMFAALYYPFDKPRRWINSGGLGTMGFGLPAALGVKMALPEETVVCVTGDGSIQMNIQELSTALQYELPVLVVNLNNRYLGMVKQWQDMIYSGRHSQSYMQSLPDFVRLAEAYGHVGIQISHPHELESKLSEALEQVRNNRLVFVDVTVDGSEHVYPMQIRGGGMDEMWLSKTERT

SEQ ID NO: 138100 - DNA, 1788 bp, Pseudomonas putida GB-1
  CDS (1)..(1788): transl_table=11
atgaccggcacggtaggcgactttctggtggagcgtttgtatcaatggggcgttcggcgcatcttcggttaccccggcgatggcatcaatggagtgttcggcgcgctgagccgggccaacggcaagattgaattcatacaggcccgccatgaggaaatggccgccttcatggccagcgcccatgccaagttcaccggcgagctcggcgtttgcatggccacctccggcccaggcgcctcgcacctgcttaccggtctgtacgatgcacgcatggaccaccagccggtgctggccatcgtcggtcaacaggcccgtgcggcactgggcgggcattaccagcaggagctggacctgctgtcgatgttcaaggacgtcgccggtgcgttcgtccagcaggcatcgacaccggagcaggtgcgccacctgctcgaccgtgcagtgcgcacggccgtcggcgaacgccgcgtgaccgccgtcatcctgcccaacgacctgcaggacctgccctacaatgaaccaccgagagcccacggtacggtgcattccggcatcggttacagcaagcccagggtggtaccgttcgacgaagacctgcagcgagccgccgatgtgctcaacgccgggcacaaggtggcgatactggtaggcgccggcgcactgcaggcgacagaccaggtcattgcaattgccgaaaagctcggcgccggggtggccaaagccctgctgggcaaggctgtgctgccggacgatctgccgtgggtcaccgggtcgatcggcctgctcggcacagaacccagttatcagctgatgaccgaatgcgacaccttgctgatgatcggctccggctttccctacgccgagttcttgcccaaggaaggccaggcgcgtggcgtgcagatcgacctgcaacccgacatgctcagcctgcgctatccgatggaggtcaacctggtcggcgacgccagcgaaacattgcgcgcactgttgccgttgcttgagcacaagaccgatcggcgctggcgcgacaaggtggagacctggcgtgcgcagtgggacaagaccgtggccaagcgcgcgctggtcaaggctgacccgatcaacccgcaacgcgtggtccatgagctgtcccctcgcctgcccgaccacgccatcatcaccagcgattccggttcctgtgccaactggtttgcccgcgacctgcaaattcgccaggggatgcagtgctcgctgtccggcggcctggcttgcatgggcgcagccgtgccctacgcgattgcagccaagttcgcccacccgcaacgggctgtggtcgctttggtgggcgatggggcgatgcagatgaacaacctcgccgaactgatcaccgtggccaaatactggcagcagtgggacaacccacaatggatctgtgccgtgttcaacaatgaggacctcaaccaggtaacgtgggagcaacgggcgatggagggcgaccccaagttcgaagcttcgcagtcgatccctgacgtgccctaccatttgttcgccatttccattggcctgcaaggtatctacgtagatcgcgaagaggacgttgccgctgcgtgggagcgcgcgctggctgctgatcggccagtactgatcgagttcaagaccgacccgaacgtgccacccctgccaccccacatcaagctggagcaggcaaagaagtttgccagtaccttgctaaagggggaccccgaccaggcgggcatcatcgtgcagacagccaagcaggtgctcagctcggtactgcctggcaagaagtga

SEQ ID NO: 138101 - protein, 595 aa, Pseudomonas putida GB-1
MTGTVGDFLVERLYQWGVRRIFGYPGDGINGVFGALSRANGKIEFIQARHEEMAAFMASAHAKFTGELGVCMATSGPGASHLLTGLYDARMDHQPVLAIVGQQARAALGGHYQQELDLLSMFKDVAGAFVQQASTPEQVRHLLDRAVRTAVGERRVTAVILPNDLQDLPYNEPPRAHGTVHSGIGYSKPRVVPFDEDLQRAADVLNAGHKVAILVGAGALQATDQVIAIAEKLGAGVAKALLGKAVLPDDLPWVTGSIGLLGTEPSYQLMTECDTLLMIGSGFPYAEFLPKEGQARGVQIDLQPDMLSLRYPMEVNLVGDASETLRALLPLLEHKTDRRWRDKVETWRAQWDKTVAKRALVKADPINPQRVVHELSPRLPDHAIITSDSGSCANWFARDLQIRQGMQCSLSGGLACMGAAVPYAIAAKFAHPQRAVVALVGDGAMQMNNLAELITVAKYWQQWDNPQWICAVFNNEDLNQVTWEQRAMEGDPKFEASQSIPDVPYHLFAISIGLQGIYVDREEDVAAAWERALAADRPVLIEFKTDPNVPPLPPHIKLEQAKKFASTLLKGDPDQAGIIVQTAKQVLSSVLPGKK

SEQ ID NO: 138102 - DNA, 1776 bp, Pseudomonas putida GB-1
  CDS (1)..(1776): transl_table=11
atgagcaaaatgagagcaatcgatgcagccgttctggtcatgcgccgtgaaggtgtagataccgcgttcggcatcccaggggctgccatcaacccgttgtattcggccctgaagaaagtcggtggcatcgatcacgtcctcgctcgccacgtcgaaggtgcctcgcacatggccgagggctacacccgtgccaacccaggcaacatcggtgtgtgcatcggcacgtccggccctgccggcaccgacatggtcaccggcctgtacagcgcatcggccgactccatcccgattctctgcatcaccggccaagccccgcgtgcacgcctgcacaaggaagatttccaggccgtcgacatcaccagcatcgtcaagccagtgaccaagtgggcgaccaccgttctggagccaggccaagtgccttacgccttccagaaggccttctacgaaatgcgtaccggccgcccaggcccggtactgatcgacctgccgttcgacgtgcagatggccgaaatcgaatttgacatcgacgcctacgagccactggccatcaacaagccatcggcgacccgtgtccaggccgaaaaagccctggccctgctcaatgacgccgagcgcccgctgctggtagccggtggcggcatcatcaacgccgacgccagcgacaaactggtcgagttcgccgaactgaccggcgtcccggtaatcccgaccctgatgggctggggcaccatcccggacgaccacgcacaaatggtcggtatggtcggcctgcagacgtcgcaccgctacggcaacgccaccctgctgaaatccgacctggtgttcggtatcggtaaccgctgggccaaccgccacaccggttcggtcgatgtctacaccgaaggccgcaagttcgtgcacgtcgacatcgaacccacccagatcggccgcgtgttcaccccagacctgggtatcgtttccgatgctggcaaggcactggacgtgttcctggaagtggcccgcgagtggaaagccgctggcaagctgaagtgccgcaaggcctggctcgaagactgccaggagcgcaaggccaccctgcagcgcaagacccacttcgacaacgtgccggtcaagccacagcgcgtgtacgaagaaatgaaccaggtattcggcaaggacaccacctacgtcagcaccatcggcctgtcgcagattgccggtgcgcagttcctgcacgtgtacaagccacgccactggatcaactgcggccaggccggcccgctgggctggaccatccctgccgcgctgggtgttgtcaaagccgaccctaaacgcaaggttgtcgcgctgtcgggtgactacgacttccagttcatgatcgaagaactggcagtaggcgcacagttcaacctgccgtacgtccacgtgctggtgaacaacgcctacctgggcctgatccgtcaggcgcagcgtggcttcgacatggattactgtgtacaactggcgttcgagaacatcaactcgaccgacgccgccacctacggtgtagaccacgttgccgtagtcgaaggcctgggctgcaaggccatccgtgtattcgagccagcagaaatcgcccctgccctgctcaaggcacagaaaatggccgaagagttccgcgtaccggtggtggtcgaagtgattctcgagcgtgtgaccaacatttccatgggcaccgagatcaacgcggtcaacgagttcgaagacctggccctggtcggcaacgacgcgccaaccgccatctcgctgctggactga

SEQ ID NO: 138103 - protein, 591 aa, Pseudomonas putida GB-1
MSKMRAIDAAVLVMRREGVDTAFGIPGAAINPLYSALKKVGGIDHVLARHVEGASHMAEGYTRANPGNIGVCIGTSGPAGTDMVTGLYSASADSIPILCITGQAPRARLHKEDFQAVDITSIVKPVTKWATTVLEPGQVPYAFQKAFYEMRTGRPGPVLIDLPFDVQMAEIEFDIDAYEPLAINKPSATRVQAEKALALLNDAERPLLVAGGGIINADASDKLVEFAELTGVPVIPTLMGWGTIPDDHAQMVGMVGLQTSHRYGNATLLKSDLVFGIGNRWANRHTGSVDVYTEGRKFVHVDIEPTQIGRVFTPDLGIVSDAGKALDVFLEVAREWKAAGKLKCRKAWLEDCQERKATLQRKTHFDNVPVKPQRVYEEMNQVFGKDTTYVSTIGLSQIAGAQFLHVYKPRHWINCGQAGPLGWTIPAALGVVKADPKRKVVALSGDYDFQFMIEELAVGAQFNLPYVHVLVNNAYLGLIRQAQRGFDMDYCVQLAFENINSTDAATYGVDHVAVVEGLGCKAIRVFEPAEIAPALLKAQKMAEEFRVPVVVEVILERVTNISMGTEINAVNEFEDLALVGNDAPTAISLLD

SEQ ID NO: 138104 - DNA, 1725 bp, Pseudomonas putida GB-1
  CDS (1)..(1725): transl_table=11
gtggagcttttatctggcgctgagatggtcgtccgcttcttgcgtgacgaaggcgttaagcacatctacgggtaccctggtggtgctctcctgcatgtttacgacgcactgttcaaagaaccggaagtggaacacatcctggttcgtcacgagcaggcggcaacccatatggcggacggctacgcccgcgccaccggcaaggccggtgtggtgctggtaacctccggcccaggcgcgaccaatgccatcaccggcattgccaccgcctacatggactcgattccgatggtcatcctgtccggccaggtgcctagcaccatggtgggcaccgatgccttccaggaaaccgacatgatcggtatctcgcggccgatcgtgaagcacagcttcatgatcaagaacccgaccgagatcccggaagttctgaaaaaggctttctacctggcgcaatccggtcgcccaggtccagtcgtggtcgacattccaaaagatatgaccaacccggctgagaagtttgaatacgtctacccgaaaaaggtcaaactgcgctcctacagcccagcggtccgcggccactccggccagatccgcaaggctgccgagatgctcctggctgccaagcgcccgatcgtctactccggcggcggcgtgatcctcggtggtggctctgaagccctgaccgaaatcgccaagtcgctgaacctgccggtcaccaacaccctcatggggttgggtggcttcccgggtactgaccgccagttcctcggcatgctcggcatgcacggtagctacaccgccaacatggccatgcacaatgccgacgtgatcttcgcggtgggtgctcgtttcgacgaccgcgtggtaaacggcccggccaagttctgcccgaatgccaagatcatccatgtcgatatcgacccagcgtcgatttcgaagatgatcaaggccgacgtgccaatcgtcggcccggtcgacagcgtgctcagcgaaatgctcggcatcctcaaggaaatcggcgagcagcccgacaaggcggcgctggatgcctggtggaagcagatcgacgaatggcgtggcaatggtgagatgttcccctatgacaagggcgacggtaatgtcatcaagccgcagaaagtcatcgagaccctgtgcgaagtgacccatggcgacgccttcgtcacctccgacgtgggccagcaccagatgttcgcggcgcagtactaccgcttcaacaagccaaaccgttggatcaactccggcggcctgggcaccatgggcttcggcttcccggcggcgatgggcgtcaagctcaacttcccggaccaggacgtggcctgcgtgactggcgaaggcagcatccagatgaacatccaggagctgtccacctgcatgcagtacggcctgccggtgaagatcgtcaacctgaacaacggtgtgttgggcatggtccgccagtggcaggacatggcttacaacggtcgtcactcgcactcgtacgtcgagtcgttgcctgacttcatcaagctggccgaggcctatggccatgtgggcatccgcatcaccagcctgaaggacctcaagccgaagctggaagaagcgtttgcgatgaaggaccgcctggtgttcatcgacatcgcggttgaccgcagtgagcacgtctatccgatgcagatcaaggacggctcgatgcgtgacatgtggctgagcaagacggagcgtacctga

SEQ ID NO: 138105 - protein, 574 aa, Pseudomonas putida GB-1
MELLSGAEMVVRFLRDEGVKHIYGYPGGALLHVYDALFKEPEVEHILVRHEQAATHMADGYARATGKAGVVLVTSGPGATNAITGIATAYMDSIPMVILSGQVPSTMVGTDAFQETDMIGISRPIVKHSFMIKNPTEIPEVLKKAFYLAQSGRPGPVVVDIPKDMTNPAEKFEYVYPKKVKLRSYSPAVRGHSGQIRKAAEMLLAAKRPIVYSGGGVILGGGSEALTEIAKSLNLPVTNTLMGLGGFPGTDRQFLGMLGMHGSYTANMAMHNADVIFAVGARFDDRVVNGPAKFCPNAKIIHVDIDPASISKMIKADVPIVGPVDSVLSEMLGILKEIGEQPDKAALDAWWKQIDEWRGNGEMFPYDKGDGNVIKPQKVIETLCEVTHGDAFVTSDVGQHQMFAAQYYRFNKPNRWINSGGLGTMGFGFPAAMGVKLNFPDQDVACVTGEGSIQMNIQELSTCMQYGLPVKIVNLNNGVLGMVRQWQDMAYNGRHSHSYVESLPDFIKLAEAYGHVGIRITSLKDLKPKLEEAFAMKDRLVFIDIAVDRSEHVYPMQIKDGSMRDMWLSKTERT

SEQ ID NO: 138106 - DNA, 1719 bp, Marinobacter sp. ELB17
  CDS (1)..(1719): transl_table=11
gtggagttattgtctggcgccgatatgctcatccgttcgttacaggatgaaggcatagagaacatttatggctatccgggtggggcagccctgcatatatacgatgccctgttcaggcaggataccgtcaagcacatcctggtcaggcacgaacaggcggcggtgcacatggctgatggctatgcccgtgctaccggcaaagcgggtacagtgctggttacctcggggcccggtgcgacaaacaccatcaccggtattgcgactgcttttatggattccattccgatggtggttttgtgtgggcaggtagcatcaacgctgattggcgaagatgccttccaggaaaccgacatgatcggtgtttcccgcccggtggtgaagcacaacctcagcgtgcgtcacccgtccgaaattccggaaattattcgcaaggcctactacattgcgacaaccggccgacctggcccggtggttgtggacattccaaaggacatgaccgcacctaatgatcgctacgagtatgtgtttccgaaaaaaaccaaattgcggtcttataatcccgccattcgtggccacgccggtcagatcaaaaaagcagtggacatgctgctggcggccaagcgaccgattgtgtacgcgggcggtggtgtcattctgggtaaggcttctggccaactgactgaaatggtgcgcggcctgggttaccccatcacgaataccttgatgggtataggttgttatccggcgagcgacaagcagcacattggttggttgggcatgcacggcacctacgaagccaatatggttatgcatcacgcggaccttattctggctatcggtgcgcgctttgacgaccgcgttaccaacgcgaccgagaagttctgccctggtgcccgcattattcacattgacatcgatccggcgtcaatttccaaaaccatcagcgccgatgtgcccattgttgggccggtggattctgtgctgaaagaaatgcagtcgctgatcaaggaaagcaaggtcaggcccgacgccgatgcgctggcatcctggtggaagcagatcgacgaatggcgcgcttttcacggtatgcgctatgaaacaagtgatgacgttatcaagccgcaggaagtggtggaaatgctgcaccgcctgaccaacggcgatgcctatgtcaccaccgatgtggggcagcaccagatgtttgccgctcagtactacaagtttgacaagcccaaccgctggatcagctccggtggtctgggcaccatgggctttggcttgccggcagcgatgggcataaagctgaactttccggatgaagaagtgctctgcatcaccggcgaaggcagtatccagatgaatatccaggagctgtcgacctgcaagcaatacaacttgccggtgaagatcatcaacctgaataatcaggctctgggtatggttaaacagtggcaggatatgaattacggggcacgtcactcgcattcttacatggactccttgccggacttcgtcaaactcgcggaggcctatggccacgagggtattaagattacgcgtaaggaagacctggagcccatgctcaaaaaagcactggccatgaaagacaaactggtgttcgtggacatttacgtggacccttctgaacacgtctacccgatgcatgtggcccgtggctcaatgaaagatatgtggctcagcaaaacggagaaggtgtaa

SEQ ID NO: 138107 - protein, 572 aa, Marinobacter sp. ELB17
MELLSGADMLIRSLQDEGIENIYGYPGGAALHIYDALFRQDTVKHILVRHEQAAVHMADGYARATGKAGTVLVTSGPGATNTITGIATAFMDSIPMVVLCGQVASTLIGEDAFQETDMIGVSRPVVKHNLSVRHPSEIPEIIRKAYYIATTGRPGPVVVDIPKDMTAPNDRYEYVFPKKTKLRSYNPAIRGHAGQIKKAVDMLLAAKRPIVYAGGGVILGKASGQLTEMVRGLGYPITNTLMGIGCYPASDKQHIGWLGMHGTYEANMVMHHADLILAIGARFDDRVTNATEKFCPGARIIHIDIDPASISKTISADVPIVGPVDSVLKEMQSLIKESKVRPDADALASWWKQIDEWRAFHGMRYETSDDVIKPQEVVEMLHRLTNGDAYVTTDVGQHQMFAAQYYKFDKPNRWISSGGLGTMGFGLPAAMGIKLNFPDEEVLCITGEGSIQMNIQELSTCKQYNLPVKIINLNNQALGMVKQWQDMNYGARHSHSYMDSLPDFVKLAEAYGHEGIKITRKEDLEPMLKKALAMKDKLVFVDIYVDPSEHVYPMHVARGSMKDMWLSKTEKV

SEQ ID NO: 138108 - DNA, 2013 bp, Arabidopsis thaliana
  CDS (1)..(2013)
atggcggcggcaacaacaacaacaacaacatcttcttcgatctccttctccaccaaaccatctccttcctcctccaaatcaccattaccaatctccagattctccctcccattctccctaaaccccaacaaatcatcctcctcctcccgccgccgcggtatcaaatccagctctccctcctccatctccgccgtgctcaacacaaccaccaatgtcacaaccactccctctccaaccaaacctaccaaacccgaaacattcatctcccgattcgctccagatcaaccccgcaaaggcgctgatatcctcgccgaagctttagaacgtcaaggcgtagaaaccgtattcgcttaccctggaggtgcatcaatggagattcaccaagccttaacccgctcttcctcaatccgtaacgtccttcctcgtcacgaacaaggaggtgtattcgcagcagaaggatacgctcgatcctcaggtaaatcaggtatctgtatagccacttcaggtcccggagctacaaatctcgttagcggattagccgatgcgttgttagatagtgttcctcttgtagcaatcacaggacaagtccctcgtcgtatgattggtacagatgcgtttcaagggactccgattgttgaggtaacgcgttcgattacgaagcataactatcttgtgatggatgttgaagatatccctaggattattgaggaagctttctttttagctacttctggtagacctggacctgttttggttgatgttcctaaagatattcaacaacagcttgcgattcctaattgggaacaggctatgagattacctggttatatgtctaggatgcctaaacctccggaagattctcatttggagcagattgttaggttgatttctgagtctaagaagcctgtgttgtatgttggtggtggttgtttgaattctagcgatgaattgggtaggtttgttgagcttacggggatccctgttgcgagtacgttgatggggctgggatcttatccttgtgatgatgagttgtcgttacatatgcttggaatgcatgggactgtgtatgcaaattacgctgtggagcatagtgatttgttgttggcgtttggggtaaggtttgatgatcgtgtcacgggtaagcttgaggcttttgctagtagggctaagattgttcatattgatattgactcggctgagattgggaagaataagactcctcatgtgtctgtgtgtggtgatgttaagctggctttgcaagggatgaataaggttcttgagaaccgagcggaggagcttaagcttgattttggagtttggaggaatgagttgaacgtacagaaacagaagtttccgttgagctttaagacgtttggggaagctattcctccacagcatgcgattaaggtccttgatgagttgactgatggaaaagccataataagtactggtgtcgggcaacatcaaatgtgggcggcgcagttctacaattacaagaaaccaaggcagtggctatcatcaggaggccttggagctatgggatttggacttcctgctgcgattggagcgtctgttgctaaccctgatgcgatagttgtggatattgacggagatggaagctttataatgaatgtgcaagagctagccactattcgtgtagagaatcttccagtgaaggtacttttattaaacaaccagcatcttggcatggttatgcaatgggaagatcggttctacaaagctaaccgagctcacacatttctcggggatccggctcaggaggacgagatattcccgaacatgttgctgtttgcagcagcttgcgggattccagcggcgagggtgacaaagaaagcagatctccgagaagctattcagacaatgctggatacaccaggaccttacctgttggatgtgatttgtccgcaccaagaacatgtgttgccgatgatcccgagtggtggcactttcaacgatgtcataacggaaggagatggccggattaaatactga

SEQ ID NO: 138109 - protein, 670 aa, Arabidopsis thaliana
MAAATTTTTTSSSISFSTKPSPSSSKSPLPISRFSLPFSLNPNKSSSSSRRRGIKSSSPSSISAVLNTTTNVTTTPSPTKPTKPETFISRFAPDQPRKGADILAEALERQGVETVFAYPGGASMEIHQALTRSSSIRNVLPRHEQGGVFAAEGYARSSGKSGICIATSGPGATNLVSGLADALLDSVPLVAITGQVPRRMIGTDAFQGTPIVEVTRSITKHNYLVMDVEDIPRIIEEAFFLATSGRPGPVLVDVPKDIQQQLAIPNWEQAMRLPGYMSRMPKPPEDSHLEQIVRLISESKKPVLYVGGGCLNSSDELGRFVELTGIPVASTLMGLGSYPCDDELSLHMLGMHGTVYANYAVEHSDLLLAFGVRFDDRVTGKLEAFASRAKIVHIDIDSAEIGKNKTPHVSVCGDVKLALQGMNKVLENRAEELKLDFGVWRNELNVQKQKFPLSFKTFGEAIPPQHAIKVLDELTDGKAIISTGVGQHQMWAAQFYNYKKPRQWLSSGGLGAMGFGLPAAIGASVANPDAIVVDIDGDGSFIMNVQELATIRVENLPVKVLLLNNQHLGMVMQWEDRFYKANRAHTFLGDPAQEDEIFPNMLLFAAACGIPAARVTKKADLREAIQTMLDTPGPYLLDVICPHQEHVLPMIPSGGTFNDVITEGDGRIKY

SEQ ID NO: 138110 - DNA, 2016 bp, Amaranthus rudis
  CDS (1)..(2016)
atggcgtccacttcttcaaacccaccattttcttcttttactaaacctaacaaaatccctaatcttcaatcctccatttacgctctccctttttccaattctcttaaacccacttcttcttcttcttcttcaatcctccgtcgccctcttcaaatctcatcatcttcttctcaatcacctaaacctaaacctccttccgctactataactcaatcaccttcatctctcaccgatgataaacccttttcttttgtttccagatttagccctgatgaacccagaaaaggttgcgatgttctcgttgaagctcttgaacgtgaaggtgttaccgatgtttttgcttaccctggtggagcttccatggaaatccatcaagctcttactcgttctaatatcattagaaatgttcttcctcgacatgaacaaggtggggttttcgctgctgaaggctacgctcgtgctactggacgtgttggagtttgtattgccacttctggtccgggtgctactaatcttgtttccggttttgctgatgcacttcttgactcagtcccgcttgtcgccattactgggcaagttcctcgacgtatgattggtactgatgcttttcaagagactcctattgttgaggtaactcgatcaattactaagcataattatttggtgttagatgttgaggatatccctagaattgttaaggaagctttctttttagctaattctggtagacctggacctgttttgattgatattcctaaagatattcagcaacaattggttgttcctaactgggaacagcccattaaattgggtgggtatctttctaggttgcctaaacccactttttctgctaatgaagagggacttcttgatcaaattgtgaggttggtgggtgagtctaagagacctgtgctgtatactggaggtgggtgtttgaattctagtgaagaattaaggaaatttgtcgagttgacagggattccggttgctagtactttaatggggttgggggctttcccttgtactgatgatttatcacttcaaatgttgggaatgcacgggactgtgtacgcgaattacgcggtggataaggctgatttgttgcttgctttcggggttaggtttgatgatcgagtgactgggaagctcgaggcgtttgctagccgagctaagattgtgcacatcgatatcgattctgctgaaatcgggaagaataagcaacctcatgtgtcgatttgtggtgatattaaagtggcattacaggggttgaataagattttggaatctagaaaaggaaagctgaaattggatttctctaattggagggaggagttgaatgagcagaaaaagaagtttcctttgagttttaagactttcggggatgcaattcctccgcaatatgccattcaggttctggacgagttgacgaagggtgatgcgattgtaagtaccggtgttgggcagcaccaaatgtgggctgcccaattctataagtaccgaaatcctcgccaatggctgacctcgggtggtttgggggctatggggtttggtctaccagccgctattggagctgctgttgctcgaccagatgcggtggttgtagacattgatggggacgggagttttatcatgaatgttcaagagttggctacgattagggtggagaatctcccggttaaaatcatgctcttgaacaatcaacatttaggtatggttgttcaatgggaagatcgattttacaaagctaaccgggcacatacatacctcgggaatccttccaaatcttcagaaatcttcccggatatgctgaaatttgctgaagcatgtgatataccagcagcccgtgttaccaaggtgagcgatttaagggctgcaattcaaacaatgttggatactccaggaccatatctgttggatgtaatcgtaccacatcaggagcatgtgctgcctatgatccctaccggtgccgccttcaaggacaccatcacagagggtgatggaagaagggcttattag

SEQ ID NO: 138111 - protein, 671 aa, Amaranthus rudis
MASTSSNPPFSSFTKPNKIPNLQSSIYALPFSNSLKPTSSSSSSILRRPLQISSSSSQSPKPKPPSATITQSPSSLTDDKPFSFVSRFSPDEPRKGCDVLVEALEREGVTDVFAYPGGASMEIHQALTRSNIIRNVLPRHEQGGVFAAEGYARATGRVGVCIATSGPGATNLVSGFADALLDSVPLVAITGQVPRRMIGTDAFQETPIVEVTRSITKHNYLVLDVEDIPRIVKEAFFLANSGRPGPVLIDIPKDIQQQLVVPNWEQPIKLGGYLSRLPKPTFSANEEGLLDQIVRLVGESKRPVLYTGGGCLNSSEELRKFVELTGIPVASTLMGLGAFPCTDDLSLQMLGMHGTVYANYAVDKADLLLAFGVRFDDRVTGKLEAFASRAKIVHIDIDSAEIGKNKQPHVSICGDIKVALQGLNKILESRKGKLKLDFSNWREELNEQKKKFPLSFKTFGDAIPPQYAIQVLDELTKGDAIVSTGVGQHQMWAAQFYKYRNPRQWLTSGGLGAMGFGLPAAIGAAVARPDAVVVDIDGDGSFIMNVQELATIRVENLPVKIMLLNNQHLGMVVQWEDRFYKANRAHTYLGNPSKSSEIFPDMLKFAEACDIPAARVTKVSDLRAAIQTMLDTPGPYLLDVIVPHQEHVLPMIPTGAAFKDTITEGDGRRAY

SEQ ID NO: 138112 - DNA, 1968 bp, Medicago truncatula
  CDS (1)..(1968)
atggcagccactgctgcaaaagccgcgttcacaaccaccatctcttcctcttcaccacaatcacttccaaaccaaaaccacgttttcagaatcacttacccattttccacttacccaaacactcccttcaaactcaaccaccgctctctcaaaatctccgcttccgtctccaaccctactcaaaaaaccactcccatcccctcacccgaacaattcatttcccgatttgcccctaacgaacctcgaaaaggcgccgacatcctcgtcgaatcactcgaacgtcagggagttacaaatgtcttcgcttaccccggcggcgcttcaatggagattcatcaagcactcacgcgctccaccgccattcgtaacgtcctccctcgtcacgaacaaggtggaatcttcgctgccgagggttacgctcgttcctctggtctacctggtgtctgcatcgccacttccggccctggtgccactaatcttgtcagtggacttgctgatgctatgcttgacagtgttccgcttattgctatcaccggtcaggttccccggagaatgattggtactgatgcttttcaagaaactccgattgttgaggtaactagatcaatcaccaagcataactatcttgttcttgatgttgatgatatacctagaatagtgaaagaagcgtttttattagcttctagtggtagacctggacctgttttgattgatatacctaaggatattcagcaacaggtttcccttccgaattgggatcaacctattaggttaactgggtatatgaataggttacccaaggcgccggatgaggcacatttggaacagattgtgaggttgttattggagtctaagaaacctgttttgtatgttggtggtggtagtttgaattgtagtgaggaattgaggcgttttgttgagttaactggtgttcctgttgctagtactttgatggggttgggttcatatcctagtttggatgagaattcgttgcagatgcttgggatgcatgggacagtttatgctaattatgcggttgataagagtgatcttttgcttgcgtttggggttaggtttgatgatcgggttactgggaagcttgaggcttttgcgagccgggcgaagattgttcatattgatattgatgctgctgagattgggaagaataagcagcctcatgtgtcggtttgtggggatctgaagttggctttgaaggggattaatcagattttggagagtaatgggatagagcgtaagcttgattttggaggttggagagaagaactgaatgatcagaaagttaggtttccgatgagttataagacgtttgatgaagctattcctccacagtatgctatacaggttcttgacgagcttaccaatggggaggctatcataagtactggtgttggacaacatcagatgtgggctgctcagttttataggtacaagagaccaaggcagtggttgacatctgctggtcttggcgctatgggatttggattgccggctgccatgggagctgctgttgccaatcccgacgctattgtggttgacatcgatggtgatggaagttttatgatgaatgttcaggaattggctactatcaaggtggagaatctccctgttaagatattgttgttgaataatcaacacttgggtatggttgtccagtgggaggatcggttctataaagccaatagagctcacacctacctgggagacccggccaatgagaaagaaatattccccaatatgttgaaatttgcaggtgcttgtggtataccagcagctcgtgtgacaaagagggcagaccttagagcagcgattcagaaaatgttagatacccctggcccctacctgcttgatgttattgtaccgcatcaggagcatgtgttgccaatgattcctgctaatggatcctttgaggatgtcataaccgagggcgatggcaggataagttactga

SEQ ID NO: 138113 - protein, 655 aa, Medicago truncatula
MAATAAKAAFTTTISSSSPQSLPNQNHVFRITYPFSTYPNTPFKLNHRSLKISASVSNPTQKTTPIPSPEQFISRFAPNEPRKGADILVESLERQGVTNVFAYPGGASMEIHQALTRSTAIRNVLPRHEQGGIFAAEGYARSSGLPGVCIATSGPGATNLVSGLADAMLDSVPLIAITGQVPRRMIGTDAFQETPIVEVTRSITKHNYLVLDVDDIPRIVKEAFLLASSGRPGPVLIDIPKDIQQQVSLPNWDQPIRLTGYMNRLPKAPDEAHLEQIVRLLLESKKPVLYVGGGSLNCSEELRRFVELTGVPVASTLMGLGSYPSLDENSLQMLGMHGTVYANYAVDKSDLLLAFGVRFDDRVTGKLEAFASRAKIVHIDIDAAEIGKNKQPHVSVCGDLKLALKGINQILESNGIERKLDFGGWREELNDQKVRFPMSYKTFDEAIPPQYAIQVLDELTNGEAIISTGVGQHQMWAAQFYRYKRPRQWLTSAGLGAMGFGLPAAMGAAVANPDAIVVDIDGDGSFMMNVQELATIKVENLPVKILLLNNQHLGMVVQWEDRFYKANRAHTYLGDPANEKEIFPNMLKFAGACGIPAARVTKRADLRAAIQKMLDTPGPYLLDVIVPHQEHVLPMIPANGSFEDVITEGDGRISY

SEQ ID NO: 138114 - DNA, 2376 bp, Sagittaria trifolia
  CDS (21)..(2075)
aggcagaccctccactccccatggctgcgccttacgccactgcggcggcggccgccgctgccgccactgcgaccaagctcccctttacttctcccgctggctcagccgctgcttccactgtctctgcttcctccacctctctctaccgtcctctccgccgccaccgcgagttcgccggccggaagcacccgcttccggtggttcccatgccactgaagacttccgcactccgccatcacctccctgtcttcgccgccctctcagactcctcgaaaccgcaagctgccgccacgagcaccaccaccaccgtaaccgaacgcctgatccgcaatttcggacccgatgagccccgcaagggcgcggacatcctcgtggaggccctggagagggagggtgtcaaagacgtattcgcgtaccccggcggcgcgtccatggagatccaccaggcgctcacgcgctccccttccattgtcaaccatctgttccgccacgagcagggggagatcttcgcggccgaaggctatgcccgcgccactggacgccctggggtttgcattgcgacctctggtcctggtgcaaccaacctcgtctccggccttgccgacgccctccttgacagcaccccactcgtcgccatcaccggccaggtgccccgcaggatgatcggcacggacgccttccaggagactcccattgttgaggtcacgcgctccatcaccaagcacaactacctcgtcctctccgtggatgacatcccgcgcatcgtccacgaggccttctatctcgccaccagtggccggccaggacccgtgctcattgatatcccaaaggacatccagcagcagctcgccatccctgaatggaggacgaccatgaagctccacggttacatgtcgcgcctccccaagcctcctcaacagtcccaactcgaacagatcgtccgcctcctgttggaatcacggaaacccgtgctgtacactggtgggggcagcctgaacgcgagcgacgagctcaggcgcttcgttgagcttactggcgtgccggttgccagcaccctgatgggacttggttccttccccacttcgagtgacctttccttgaagatgcttgggatgcatggaaccgtctacgccaactacgccgtggagcattctgatttattgctcgcctttggtgtgagatttgatgatcgcgtgaccggcaagcttgaggcttttgccagcagggcaaagatcgtccacatcgatattgatccagctgagattgggaagaacaagcaaccgcatgtctctatctgtggcgacctgaaactggctttggaagggatcaacgagttactcgaagagacgaaaatacacgagcagcttgatttttcttcctggaggggagaactggacgaacagaagaggaaattcccattgagttataagaagttcggtgatgcgattcctcctcagtatgcaatccatgtccttgacgagctaacaaatggagaagcagttattagtaccggtgttggccagcatcagatgtgggccgcacagtggtacagctataagaagccccgtaactggctgtcatctgctggccttggagccatggggtttgggttgcccgccgctgccggagctgctgttgggaggcctgaatccattgtggttgacattgatggagatggaagtttccttatgaacatccaggagttggctgttttacgcattgagaacctccctgtcaagatcatggtcttgaataatcaacatctgggtatggttgtgcagtgggaagacagattttaccatgctaacagagcacatacatatcttggggatcctgcacgcgagtctgacatatacccggacttggtttctattgcaaaaggcttcaatatacctgctgcaaggataacaaagataggggaggtcagagctgctataacgaagatgctggagactcctggaccttatctgctggacatcattgtcccgcaccaggagcatgtgctaccgatgattccgagtggaggtgcatttaaggatttgatagttgaaggagatggcagatcatcatactgaccttttctgaaggactcctgttcgaagtttgatttccctgtttcctctgtatttttcatgaaatggatatctgcggcttatgttgcatgtgacttgtgctgctgtccggttggtttgcatttaccctagttagcaatgtatcccttttctttgtaatctaactcctggctgcatggatgtgacttgctctgcattaaggtgcatgggcttttgttcattctgctaagtcgaataagactgttgtttaattagatgcgctcttagtttccctaatatatatatactaaatatgtgtactaga

SEQ ID NO: 138115 - protein, 684 aa, Sagittaria trifolia
MAAPYATAAAAAAAATATKLPFTSPAGSAAASTVSASSTSLYRPLRRHREFAGRKHPLPVVPMPLKTSALRHHLPVFAALSDSSKPQAAATSTTTTVTERLIRNFGPDEPRKGADILVEALEREGVKDVFAYPGGASMEIHQALTRSPSIVNHLFRHEQGEIFAAEGYARATGRPGVCIATSGPGATNLVSGLADALLDSTPLVAITGQVPRRMIGTDAFQETPIVEVTRSITKHNYLVLSVDDIPRIVHEAFYLATSGRPGPVLIDIPKDIQQQLAIPEWRTTMKLHGYMSRLPKPPQQSQLEQIVRLLLESRKPVLYTGGGSLNASDELRRFVELTGVPVASTLMGLGSFPTSSDLSLKMLGMHGTVYANYAVEHSDLLLAFGVRFDDRVTGKLEAFASRAKIVHIDIDPAEIGKNKQPHVSICGDLKLALEGINELLEETKIHEQLDFSSWRGELDEQKRKFPLSYKKFGDAIPPQYAIHVLDELTNGEAVISTGVGQHQMWAAQWYSYKKPRNWLSSAGLGAMGFGLPAAAGAAVGRPESIVVDIDGDGSFLMNIQELAVLRIENLPVKIMVLNNQHLGMVVQWEDRFYHANRAHTYLGDPARESDIYPDLVSIAKGFNIPAARITKIGEVRAAITKMLETPGPYLLDIIVPHQEHVLPMIPSGGAFKDLIVEGDGRSSY

SEQ ID NO: 138116 - DNA, 2049 bp, Magnaporthe grisea
  CDS (1)..(2049)
atgcttcgtactgttggccgcaaagccctgaggggctcatccaagggatgttcacgaaccatctcgactctcaagcccgccacggcaactattgccaagcccggcagcaggaccctttcgacgccagcgacggcaacagcaacagcacctcgaactaagcccagcgccagcttcaatgctcgccgcgatccccagcctttggtcaaccctcgctcaggtgaggcagacgaatcattcattggcaagacgggaggagagattttccacgagatgatgctgaggcaaaacgtcaagcacattttcggttaccctggcggtgctatccttcccgtgttcgacgcgatctacaactcgaagcacatcgactttgttctgcccaagcatgagcaaggcgccggccacatggcagagggctatgctcgcgcttcaggcaaacccggcgttgttctcgtcacctccggccccggtgccacaaatgtcatcactcccatggccgacgctcttgccgacggtacacctctggttgtattctcaggacaggttgttacctctgatattggaagcgacgccttccaggaggccgacgtcataggcatctcccggtcttgcaccaagtggaacgtcatggttaagagcgctgacgagctcccgaggagaattaacgaggcctttgagattgccaccagtgggcgacctgggcctgtcttggtcgatcctgccaaggacgtcacggctagtgtgctgaggagggctatccccaccgagacctcgattccttctattagcgcagcagcacgggctgtccaagaggcaggccgaaagcagcttgagcactccatcaaacgcgtagccgatctcgtcaacattgccaagaagcccgtcatatatgccggccaaggtgtcattttgtcggaaggcggcgttgaacttctcaaggcgcttgccgacaaggcctcgattcctgtcaccaccactctgcatggtctgggagcctttgacgagctcgacgagaaggcactgcacatgcttggtatgcacggttcggcttatgccaacatgtccatgcaagaggccgatttgatcattgcccttggtggccgcttcgatgaccgtgtcactggcagcatccccaaatttgctcctgccgccaagctagctgctgctgaaggacgcggaggtattgtccacttcgagattatgcccaagaacatcaacaaggtcgtccaagcaacagaggccattgagggcgacgttgcttcgaacttgaagctgttgctccccaagattgaacaacgatccatgaccgatcgcaaggagtggttcgaccagatcaaggagtggaaggagaagtggcctctgtcacattatgagagggccgagcgtagtggtctcatcaagcctcagactctgatcgaggagctgagcaacctgactgctgaccgcaaggacatgacctacatcacaaccggtgttggccagcaccaaatgtggacagcacaacatttcaggtggaggcacccacggtccatgatcacctctggcggtttgggaaccatgggatatggtctgccggcagcgattggcgccaaggttgctaggccagatgctttggtcattgacatcgacggcgacgcatcgttcaacatgactctgacagagctttcgacggcggcacagttcaacattggcgtcaaggtcattgtcttgaacaacgaggagcagggaatggtgacccaatggcagaacttgttctacgaggaccgctactcacatacacaccagcgcaacccagacttcatgaagctcgccgatgcaatggacgttcaacatcgccgtgtttcgaagcctgacgatgtcggtgatgctctgacgtggctgatcaacaccgacggccccgctctgcttgaggtgatgactgataagaaggttcctgttctgcccatggtgcccggaggtaacggcctgcacgagttcatcacgtttgatgccagcaaggataagcaacggagagagctgatgcgcgcgaggacgaatggcctgcacggttaa

SEQ ID NO: 138117 - protein, 682 aa, Magnaporthe grisea
MLRTVGRKALRGSSKGCSRTISTLKPATATIAKPGSRTLSTPATATATAPRTKPSASFNARRDPQPLVNPRSGEADESFIGKTGGEIFHEMMLRQNVKHIFGYPGGAILPVFDAIYNSKHIDFVLPKHEQGAGHMAEGYARASGKPGVVLVTSGPGATNVITPMADALADGTPLVVFSGQVVTSDIGSDAFQEADVIGISRSCTKWNVMVKSADELPRRINEAFEIATSGRPGPVLVDPAKDVTASVLRRAIPTETSIPSISAAARAVQEAGRKQLEHSIKRVADLVNIAKKPVIYAGQGVILSEGGVELLKALADKASIPVTTTLHGLGAFDELDEKALHMLGMHGSAYANMSMQEADLIIALGGRFDDRVTGSIPKFAPAAKLAAAEGRGGIVHFEIMPKNINKVVQATEAIEGDVASNLKLLLPKIEQRSMTDRKEWFDQIKEWKEKWPLSHYERAERSGLIKPQTLIEELSNLTADRKDMTYITTGVGQHQMWTAQHFRWRHPRSMITSGGLGTMGYGLPAAIGAKVARPDALVIDIDGDASFNMTLTELSTAAQFNIGVKVIVLNNEEQGMVTQWQNLFYEDRYSHTHQRNPDFMKLADAMDVQHRRVSKPDDVGDALTWLINTDGPALLEVMTDKKVPVLPMVPGGNGLHEFITFDASKDKQRRELMRARTNGLHG

SEQ ID NO: 138118 - DNA, 2454 bp, Chlamydomonas reinhardtii
  CDS (16)..(2067)
aaaagacgtgacgcaatgaaggccctgcgaagtggaaccgctgtggcccggggccaagcgggctgtgtttctcccgctccgcgccctgtgcctatgtcgtctcaggcgatgattccgagcaccagctccccagcagctcgtgcacccgcccggtccggtcgccgcgccctcgctgtgtcggccaagcttgctgatgggtctcgtcgcatgcagtccgaggaggtgcgccgcgccaaggaggtggcccaggctgcgctggccaaggacagccctgccgactgggtggaccgctacggctcggagccgcgcaagggcgccgacatcctggtgcaggcgctggagcgcgagggcgtggacagcgtgttcgcctacccgggcggcgcctccatggagatccaccaggccctcacgcgctccgaccgcatcaccaacgtgctgtgccgccacgagcagggcgagatctttgccgccgagggctacgccaaggccgcgggccgcgtgggcgtgtgcatcgccacctcgggccccggcgccaccaacctggtcacggggctggcggacgccatgatggactccatccccctggtggccatcaccggccaggtgccgcgccgcatgatcggcaccgacgccttccaggagactcccattgtggaggtgactcgcgccatcaccaagcacaactacctggtgctggacatcaaggacctgccgcgtgtgatcaaggaggccttttacctggcccgcaccggccggcccggccctgtgctggtggacgtgcccaaggacatccagcagcagctggcggtgccggactgggaggcgcccatgagcatcacgggctacatcagccgcctgcctccccccgtggaggagtcgcaggtgctgccggtcctgcgcgcgctgcagggcgccgccaagcccgtcatctactacggcggcggctgcctggacgcgcaggcggagctgcgagagttcgcggcgcgcaccggcatcccgctggccagcaccttcatggggctgggcgtggtgccgtccaccgaccccaaccacctccaaatgctgggcatgcacggcaccgtgttcgccaactacgcggtggaccaggccgacctgctggtggcgctgggcgtgcgcttcgacgaccgcgtcaccggcaagctggacgccttcgcggcgcgcgcgcgcatcgtgcacatcgacattgacgctgccgagatcagcaagaacaagaccgcgcacgtgccggtgtgcggcgacgtgaagcaggcgctcagccacctgaaccgcctgctggccgcggagccgctgcccgcagacaagtgggcgggctggcgcgccgagctggcggccaagcgcgccgagttccccatgcgctacccgcagcgcgacgacgccattgtgccgcagcacgccatccaggtgctgggcgaggagacgcagggcgaggccatcattaccacgggcgtgggccagcaccagatgtgggcggcgcagtggtacccctacaaggagacgcggcgctggatcagcagcggcggcctgggctccatgggctttggcctgccggcggcgctgggcgcggcggtggcgttcgacggcaagaacgggcggcccaagaagaccgtggtggacattgacggcgacggctccttcctcatgaacgtgcaggagctggccaccatcttcattgagaagctggacgtcaaggtgatgctgctcaacaaccagcacctgggcatggtggtgcagtgggaggacaggttctacaaggccaaccgcgcgcacacgtacctgggcaagcgcgagagcgagtggcacgccacgcaggacgaggaggacatctaccccaactttgtcaacatggcccaggccttcggcgtgccctcccgccgcgtcatcgtcaaggagcagctgcgcggcgccatccgcaccatgctggacacgcccgggccctacctgctggaggtcatggtgccgcacatcgagcacgtgctgcccatgatccccggcggcgccagcttcaaggacatcattaccgagggagacgggaccgtcaagtactgaggtgccgggggcgtggcgggagtatggtgggaagcagtgtgcaggccgctcgggaaagctgggagcagcaggcgcggatacggtaccagcgttgcagcaaaggcgtatgaggtgctaggggtgctgcgtgggggctggcaatgctgctgtgtagtgttgcaggcacagcagcaggggatgcgtcaagttaggctggggagggcgagggcatggggcaggacggcttgaggaggcgtacgaggagaagagccgcagacgacgattaaggcagaggtgcgtgcttcaacgccacatgcgcgtgcaggcgatcctatcaggatggagcatgccgaaacgtgcgacaggccaatcatactgtaacattgcgtcaacggaaaaaaaaaaaaa

SEQ ID NO: 138119 - protein, 683 aa, Chlamydomonas reinhardtii
MKALRSGTAVARGQAGCVSPAPRPVPMSSQAMIPSTSSPAARAPARSGRRALAVSAKLADGSRRMQSEEVRRAKEVAQAALAKDSPADWVDRYGSEPRKGADILVQALEREGVDSVFAYPGGASMEIHQALTRSDRITNVLCRHEQGEIFAAEGYAKAAGRVGVCIATSGPGATNLVTGLADAMMDSIPLVAITGQVPRRMIGTDAFQETPIVEVTRAITKHNYLVLDIKDLPRVIKEAFYLARTGRPGPVLVDVPKDIQQQLAVPDWEAPMSITGYISRLPPPVEESQVLPVLRALQGAAKPVIYYGGGCLDAQAELREFAARTGIPLASTFMGLGVVPSTDPNHLQMLGMHGTVFANYAVDQADLLVALGVRFDDRVTGKLDAFAARARIVHIDIDAAEISKNKTAHVPVCGDVKQALSHLNRLLAAEPLPADKWAGWRAELAAKRAEFPMRYPQRDDAIVPQHAIQVLGEETQGEAIITTGVGQHQMWAAQWYPYKETRRWISSGGLGSMGFGLPAALGAAVAFDGKNGRPKKTVVDIDGDGSFLMNVQELATIFIEKLDVKVMLLNNQHLGMVVQWEDRFYKANRAHTYLGKRESEWHATQDEEDIYPNFVNMAQAFGVPSRRVIVKEQLRGAIRTMLDTPGPYLLEVMVPHIEHVLPMIPGGASFKDIITEGDGTVKY

SEQ ID NO: 138120 - DNA, 2432 bp, Volvox carteri
  CDS (11)..(2056)
agtaagaaatatggctttacgtttttgcccgacggctgcacctccgcgcggctgcggtactccgatacagcaccctgtcttgcttcttccgcataaggctttgcttccttattcaactgcggccagccgtcaggcagccaggcccgcccgtgtatgcgtgaccgcctacgctaagcttgcagatggatctgcccgacgcatgcaatctgaagaggtccggcgtgcgaaggaggtggcccaggctgcactggcgaaggagagtccagcggactgggttgatcgattcggctcggagccgcgcaaaggtgccgatatccttgtccagtgcctggaacgcgagggcgtggacaacgtgtttgcgtacccaggcggcgcctccatggagattcatcaggctctcactcgttcagaccgcattacaaatgtgctctgccgccatgagcagggtgaaatctttgctgcggagggttacgccaaggcttccggccgtgtgggcgtctgcattgcgacctcgggccctggcgccaccaacctggtaactggcctggccgatgccatgatggacagcattccacttgtggcgatcaccggccaggtgcctcggcggatgattggcacggacgctttccaggagaccccgattgtggaggttactcgcgccattactaagcataactatctggtgcttgacattaaggatctgcctcgcgttatcaaggaggccttttacctggcgcgcactggccggcccggtccagtgctggtcgacgtccctaaggatattcagcagcagctggctgtgccggactgggactcgcccatgtcaattaccggctacatcagccgccttccaccacctgtggaggagtcccaaatgataccggtgctccgtgccatccagtccgcctccaagcccgtaatctattatggtggtggttgcttagatgcacgggacgagctacgcgagttcgcagcccgcacaggcatcccgctggcgtccacatttatgggcctgggggttgtgccagcggaagaccccaaccatcttcaaatgttgggtatgcacggcaccgtggcggcaaactacgcggtggatcaggcggatctgctggtggccctcggtgtgcgcttcgatgaccgcgtcactggccgcctggacgccttcgcctcccgggcccgcattgtgcacgtcgatattgatgcggccgagatcagcaagaacaagaccgcacacgtgcccgtgtgcggcgacgtgaagcaggctttacgccacctcaaccggatgcttgaggcggaaccgctttcggaccgtttcgttgcctggcgcgcggaactggcggccaagcgagcagagtttccattgcgttacccgcagcgtgatgacgccattgtgccacagtacgctatacaggtcctgggtgaggagacaaagggcgaagtgatcatcaccactggcgtgggacagcaccagatgtgggcagcgcagtggtacccatacaaggagccgcgccggtggatttcctcgggtggcttgggctccatgggtttcggtctgccagcggccttgggtgcggcggtagccttcgacggcaagcaagggagagagaaacgcatcgtcgtagacatcgatggtgacggctctttcctcatgaatgtccaggagctggccactgtgttcatcgaaaagctcgacgtgaaggtcatgatcctcaacaaccagcatctgggcatggtcgtgcaatgggaggaccgcttctacaaggccaaccgagcgcacacctacttgggcaagcgcgaagccgagtggcatgcaactggtgacgaggaggatatctaccctaacttcgtgggcatggctcggtcattcggcgtgccgtcaatgcgtgtcatccgcaaggaagacctgcgcggggcaatccgtactatgctggatacgccagggccgtacttgctcgaggtgatggtgccccacattgagcacgtgctaccgatgatccctggcggggcgacctttaaagatattattacggagggcgacggttccgtgaaatactgaagcggcttggcggatggcaaaatttccggcatttgtgcgatgtggggcatttttattggccggttagatgcctttacggctttttgcgatgtatgacggcaaggacaattgcctaaggcttcaggttatgaaagaactagaagctaattgtggctagacgttcccggccgccactcatgttgatcccctggcccttcgcctcggcttgcagcatattccgcctgactgcacgacctagcgtgggctgcagcatcacctgagtgtccgtcccttgtcgcgtgatggtgtgcggtgtggtatgctatgctaggcgtcgatgacggaaaggcgtgatcttggacatttattttatacatttggttaaaaaaaaaaaaaa

SEQ ID NO: 138121 - protein, 681 aa, Volvox carteri
MALRFCPTAAPPRGCGTPIQHPVLLLPHKALLPYSTAASRQAARPARVCVTAYAKLADGSARRMQSEEVRRAKEVAQAALAKESPADWVDRFGSEPRKGADILVQCLEREGVDNVFAYPGGASMEIHQALTRSDRITNVLCRHEQGEIFAAEGYAKASGRVGVCIATSGPGATNLVTGLADAMMDSIPLVAITGQVPRRMIGTDAFQETPIVEVTRAITKHNYLVLDIKDLPRVIKEAFYLARTGRPGPVLVDVPKDIQQQLAVPDWDSPMSITGYISRLPPPVEESQMIPVLRAIQSASKPVIYYGGGCLDARDELREFAARTGIPLASTFMGLGVVPAEDPNHLQMLGMHGTVAANYAVDQADLLVALGVRFDDRVTGRLDAFASRARIVHVDIDAAEISKNKTAHVPVCGDVKQALRHLNRMLEAEPLSDRFVAWRAELAAKRAEFPLRYPQRDDAIVPQYAIQVLGEETKGEVIITTGVGQHQMWAAQWYPYKEPRRWISSGGLGSMGFGLPAALGAAVAFDGKQGREKRIVVDIDGDGSFLMNVQELATVFIEKLDVKVMILNNQHLGMVVQWEDRFYKANRAHTYLGKREAEWHATGDEEDIYPNFVGMARSFGVPSMRVIRKEDLRGAIRTMLDTPGPYLLEVMVPHIEHVLPMIPGGATFKDIITEGDGSVKY

SEQ ID NO: 138122 - DNA, 1686 bp, Citrobacter freundii
  CDS (1)..(1686): transl_table=11
atggcaagttcgggcacaacatcagaaaaaatgcgctttaccggcgcacagttagttattcatttactggaacgtccaggggattacgaccgttgcaggcatcccgggtcgtgctctatccttcccatctatgacgcattaagccaaagcacgcagattcgccacgttctggcgcgtcacgaacaaggcgcgggctttatcgctcaggggatggcgcgtactgagggcaaaccggcggtctgcatggcctgtagcggcccgggcgccaccaacctgatcaccgccatcgccgatgcgcgtctggactcgattccgttggtgtgcattaccggccaggttccggcatcgatgattgggaccgatgcgttccaggaagtcgacacctacggtatctctatccccatcaccaaacataactacctggtccgcgatattgctgaactgccgcaggtgatgagcgacgcctttcgcatcgcccagtccggccgcccgggtccggtgtggatagatattcctaaggatgtgcagacggcgaccatcgagctggaggtgttaccggagccgggtgcgcgcaccgcaccgccgacatttgacagcgccagcgtccacgacgcggcagccatgatcaatgcggctaagcgcccggtactttatctgggcggcggcgtgattaacgcgcctgagcaggtgcgttcgctggcggaaaaagcgaacttgcctaccacgatgaccctgatggcgctggggatgctgccgaaggcgcatgctgttgctgggatgctgggcatgcacggcgcgcgtagcactaactttattctgcaagaagcggatttactgattgttttaggtgcgcgttttgatgaccgggcgattggtaaaaccgagcagttctgcccgaacgcgaaaattattcacgtcgatatcgaccgttccgaactgggtaaaatcaagcagccgcacgtggcgattcaaggggatgtggctgacgttctggcgcatgacgccgcaggtcgccgccagtcgcgcgacgagtggcgccagctggtggcggacctgcagcgtgagtttccttccccgattccgcaggagagcgacccgctcacgcattatggcctgatcaacgccgttgccgcctgcgttaacgatgaagcgatcgtcaccactgacgttggtcaacatcagatgtgggttgcgcaggcttatccgctgaatcgcccgcgccaatggctgacttccggtgggctgggaaccatgggattcggtctgccggcagcggtcggtgcggcgctggcgaatccacagcgcaaagtcatctgcttctccggcgacggcagcctgatgatgaacattcaggagatggccaccgcggctgaaaaccagctggatgtgaaaatcatcctgatgaataacgaagcgctggggctggtctatcagcaacagagcctgttctatcagcagggggtatttgctgcgacctatcccggaatgattaattttatgcagattgccgctggctttggtctgcaaacctgcgatttaaatcacgaagccgacccgcaggcagcgctgcaggcgatcatcgatcgtcccggtccggcgctgattcatgtgcgtattgatgcggaagaaaaagtgtatccgatggttccgccgggagcggcaaatacagaaatggtgggggaataa

SEQ ID NO: 138123 - protein, 561 aa, Citrobacter freundii
MASSGTTSEKMRFTGAQLVIHLLERPGDYDRCRHPGSCSILPIYDALSQSTQIRHVLARHEQGAGFIAQGMARTEGKPAVCMACSGPGATNLITAIADARLDSIPLVCITGQVPASMIGTDAFQEVDTYGISIPITKHNYLVRDIAELPQVMSDAFRIAQSGRPGPVWIDIPKDVQTATIELEVLPEPGARTAPPTFDSASVHDAAAMINAAKRPVLYLGGGVINAPEQVRSLAEKANLPTTMTLMALGMLPKAHAVAGMLGMHGARSTNFILQEADLLIVLGARFDDRAIGKTEQFCPNAKIIHVDIDRSELGKIKQPHVAIQGDVADVLAHDAAGRRQSRDEWRQLVADLQREFPSPIPQESDPLTHYGLINAVAACVNDEAIVTTDVGQHQMWVAQAYPLNRPRQWLTSGGLGTMGFGLPAAVGAALANPQRKVICFSGDGSLMMNIQEMATAAENQLDVKIILMNNEALGLVYQQQSLFYQQGVFAATYPGMINFMQIAAGFGLQTCDLNHEADPQAALQAIIDRPGPALIHVRIDAEEKVYPMVPPGAANTEMVGE

SEQ ID NO: 138124 - DNA, 1992 bp, Oryza sativa
  CDS (1)..(1992)
atggccgccgccgccgccgccgcctcactctccgtctccgacgccgccgctaagctgcccaaaccgggagggcaagtgcaacggcgacgcgacagggatcgtccacgcgtggatgctgccgcctgcacccgcgacagccgccgtcccacgcgcgagaggtgctcgacgacggtgtccctcgccgcgaccgcgaccgcgacaacggccacgcccgtgcgcgcgccggtccggacgcgggcgcccatggggcagcggaagggcgcggacatcgtcgtcgaggcgctggagcggtgcggcgtccgcgacgtgttcgagtacccgggcggcgcgtcaatggagatccaccaggcgctgacgcggtcgccggtgatccgcaaccacctgctccgccacgagcagggggaggccttcgcggcgtccgggtacgcgcgctcgtcggggcggccgggcgtctgcgtcgccacctccggcccgggcgccaccaacctcgtgtccgcgctcgccgacgcccacctcgactccgtcccgctcgtcgccatcacggggcaggtcccgcgccgcatgatcggcaccgacgcgttccaggagacgcccatcgtcgagctcacccgctccatcaccaagcacaactacctaatcctcgacatcgacgacatcccccgcgtcatcaacgaggccttcttcctcgcgtccacgggtcgccccggcccggtgctcgtcgacatccccaaggacatccagcagcagatggccgtgccgtcctgggacgcgccgatgcgcctcccggggtacatctcccggctgccgaagccgccggccgccaacctgctcgacgaagtcatccgcctcgtcggcgacgccgagagacccgtcctctacgtcggcggcgggtgctccgcgtcgggcgacgagctgcggcgcttcgtggagctgacgggcatcccggtgacgaccaccctcatgggcatcgggaacttccccagcgacgatccgctctcgctgcggatgctcgggatgcatggcactgtgtacgccaactacgccgtcgacaacgccgacctcctcctcgcgctcggcgtgcgcttcgacgaccgcgtcaccggcaaagtcgaggcgttcgcgagcagggccaagatcgtgcacgtcgacatcgacccgtcggagctcgggaagaacaagcagccgcacgtctccatctgcgccgacgtcaagctcgccctgcagggcatgaacgcgatgctggaagaacagagcgccgccgccgcgcgcaagaacctcgatttcagcgcgtggcgctcggagctggagaagaagaaggtcgagttcccactgggctacagaacgttcggcgaggagatcccgccgcagtacgccatccaggtgctcgacgaggtcaccaacggggaggccatcgtcgccacgggcgtcgggcagcaccagatgtgggcgacgcagcactacacctacaggaggcccaggcagtggctctcgtccgccgggctgggcgccatgggcttcggcctgcctgccgccgccggcgccgcggtggccaacccgggcgccaccgtggtcgacatcgacggcgacggcagcctcctgatgaacatccaggagctcgccatggtccgcgtcgaggacctgccggtgaaggtgatggtgctgaacaaccagcacctgggcatggtggtgcagtgggaggacaggttctacgacgccaacagggcgcacacctacctcggcaacccggcggcgaacggcggcggcgaggtgtacccggacttcgtgacgatcgccggaggcttcggcatcccggcggcccgcgtgacgaggaagggcgaggtccgcgccgccgtcgaggagatgatggcggcgccggggccgtacctgctggacgtcgtcgtgcctcaccaggagcacgtgctgccgatgatccccagcaatggcgctttcaaggacattatcgtcgacggtgatggccggagttcgtattag

SEQ ID NO: 138125 - protein, 663 aa, Oryza sativa
MAAAAAAASLSVSDAAAKLPKPGGQVQRRRDRDRPRVDAAACTRDSRRPTRERCSTTVSLAATATATTATPVRAPVRTRAPMGQRKGADIVVEALERCGVRDVFEYPGGASMEIHQALTRSPVIRNHLLRHEQGEAFAASGYARSSGRPGVCVATSGPGATNLVSALADAHLDSVPLVAITGQVPRRMIGTDAFQETPIVELTRSITKHNYLILDIDDIPRVINEAFFLASTGRPGPVLVDIPKDIQQQMAVPSWDAPMRLPGYISRLPKPPAANLLDEVIRLVGDAERPVLYVGGGCSASGDELRRFVELTGIPVTTTLMGIGNFPSDDPLSLRMLGMHGTVYANYAVDNADLLLALGVRFDDRVTGKVEAFASRAKIVHVDIDPSELGKNKQPHVSICADVKLALQGMNAMLEEQSAAAARKNLDFSAWRSELEKKKVEFPLGYRTFGEEIPPQYAIQVLDEVTNGEAIVATGVGQHQMWATQHYTYRRPRQWLSSAGLGAMGFGLPAAAGAAVANPGATVVDIDGDGSLLMNIQELAMVRVEDLPVKVMVLNNQHLGMVVQWEDRFYDANRAHTYLGNPAANGGGEVYPDFVTIAGGFGIPAARVTRKGEVRAAVEEMMAAPGPYLLDVVVPHQEHVLPMIPSNGAFKDIIVDGDGRSSY

SEQ ID NO: 138126 - DNA, 1800 bp, Brassica napus
  CDS (1)..(1800)
atgtcgcacctccttcccctgaaaaaaccgacaagaacaagactttcgtctcccgctacgcttcccgacgagccccgcaagggtgctgatatcctcgtcgaagccctcgagcgtcaaggcgtcgaaaccgtctttgcttatcccggaggtgcttccatggagatccaccaagccttgactcgctcctccaccatccgtaacgtccttccccgtcacgaacaaggaggagtcttcgccgccgagggttacgctcgttcctccggcaaaccgggaatctgcatagccacttcgggtcccggagctaccaacctcgtcagcgggttagcagacgcgatgcttgacagtgttcctcttgtcgccattacaggacaggtccctcgccggatgatcggtactgacgccttccaagagacaccaatcgttgaggtaacgaggtctattacgaaacataactatttggtgatggatgttgatgacatacctaggatcgttcaagaagctttctttctagctacttccggtagacccggaccggttttggttgatgttcctaaggatattcagcagcagcttgcgattcctaactgggatcaacctatgcgcttacctggctacatgtctaggttgcctcagcctccggaagtttctcagttaggtcagatcgttaggttgatctcggagtctaagaggcctgttttgtacgttggtggtggaagcttgaactcgagtgaagaactggggagatttgtcgagcttactgggatccccgttgcgagtactttgatggggcttggctcttatccttgtaacgatgagttgtccctgcagatgcttggcatgcacgggactgtgtatgctaactacgctgtggagcatagtgatttgttgctggcgtttggtgttaggtttgatgaccgtgtcacgggaaagctcgaggctttcgctagcagggctaaaattgtgcacatagacattgattctgctgagattgggaagaataagacacctcacgtgtctgtgtgtggtgatgtaaagctggctttgcaagggatgaacaaggttcttgagaaccgggcggaggagctcaagcttgatttcggtgtttggaggagtgagttgagcgagcagaaacagaagttccctttgagcttcaaaacgtttggagaagccattcctccgcagtacgcgattcagatcctcgacgagctaaccgaagggaaggcaattatcagtactggtgttggacagcatcagatgtgggcggcgcagttttacaagtacaggaagccgagacagtggctgtcgtcatcaggcctcggagctatgggttttggacttcctgctgcgattggagcgtctgtggcgaaccctgatgcgattgttgtggatattgacggtgatggaagcttcataatgaacgttcaagagctggccacaatccgtgtagagaatcttcctgtgaagatactcttgttaaacaaccagcatcttgggatggtcatgcaatgggaagatcggttctacaaagctaacagagctcacacttatctcggggacccggcaagggagaacgagatcttccctaacatgctgcagtttgcaggagcttgcgggattccagctgcgagagtgacgaagaaagaagaactccgagaagctattcagacaatgctggatacaccaggaccatacctgttggatgtgatatgtccgcaccaagaacatgtgttaccgatgatcccaagtggtggcactttcaaagatgtaataacagaaggggatggtcgcactaagtactga

SEQ ID NO: 138127 - protein, 599 aa, Brassica napus
MSHLLPLKKPTRTRLSSPATLPDEPRKGADILVEALERQGVETVFAYPGGASMEIHQALTRSSTIRNVLPRHEQGGVFAAEGYARSSGKPGICIATSGPGATNLVSGLADAMLDSVPLVAITGQVPRRMIGTDAFQETPIVEVTRSITKHNYLVMDVDDIPRIVQEAFFLATSGRPGPVLVDVPKDIQQQLAIPNWDQPMRLPGYMSRLPQPPEVSQLGQIVRLISESKRPVLYVGGGSLNSSEELGRFVELTGIPVASTLMGLGSYPCNDELSLQMLGMHGTVYANYAVEHSDLLLAFGVRFDDRVTGKLEAFASRAKIVHIDIDSAEIGKNKTPHVSVCGDVKLALQGMNKVLENRAEELKLDFGVWRSELSEQKQKFPLSFKTFGEAIPPQYAIQILDELTEGKAIISTGVGQHQMWAAQFYKYRKPRQWLSSSGLGAMGFGLPAAIGASVANPDAIVVDIDGDGSFIMNVQELATIRVENLPVKILLLNNQHLGMVMQWEDRFYKANRAHTYLGDPARENEIFPNMLQFAGACGIPAARVTKKEELREAIQTMLDTPGPYLLDVICPHQEHVLPMIPSGGTFKDVITEGDGRTKY

SEQ ID NO: 138128 - DNA, 2038 bp, Alopecurus myosuroides
  CDS (10)..(1932)
ccgccgcccatggcgacggccacagccacatccacagccgtcgccttctcaggcgccgctgccgtggccttacccaaacctactctcccgcgctacctgcccgcctcacgccgcgccctcgccgcccgcatcaggtgctcagcggtgtccccttcgcctgcccctcccgccaccgcgcttcggccatggggcccatccgagccccgcaagggcgccgacatcctcgtcgaggccctggagcgctgcggcgtcagcgacgtcttcgcctaccccggcggcgcctcaatggagatccaccaggcgctcacacgctcgccggccatcaccaaccaccttttccggcacgagcagggagaggccttcgcggcgtccggatacgcccgcgcctccgggcgcgtcggggtctgcgtcgccacctctggcccgggtgctaccaacctcgtctccgcgctcgccgatgctcttctcgactccatcccgatggtcgctatcacgggacaggttccccgccgcatgataggcacggacgccttccaagagacgcccattgtagaggtcacccgctccatcaccaagcacaactacctggtcctcgacgtggaggacattccccgcgtcattcaggaagccttctttctcgcctcctccggccggccagggcccgtgctggtcgacatccccaaggacatccagcagcagatggctgtgcctgtctgggacgcgccaatgagtctgccaggatacattgcccgccttcctaagccgccggctaccgaattgcttgagcaggtcctgcgtctggttggggaatcacgacgcccgattctgtatgttggtggtggctgctctgcatccggcgaggagctgcgccgctttgttgagctcactgggatcccagtcacaactaccctcatgggtcttggcaacttccccagcgacgacccactgtctctgcgtatgcttgggatgcatggcacagtctacgcaaattacgcagttgatagggctgacctgttgcttgcatttggtgtccggtttgatgatcgcgtgactggaaaaatagaggcttttgcaagcaggtccaagattgtgcacattgatattgatccagctgagattggcaagaacaagcagccgcatgtctccatttgtgcagatgtcaagatagctctacagggcttgaatactcttctgctaaatgagagcaaaacacgtaagtgttcagattttagttcgtggcatgaggagctagatcagcagaagagggagttccctttgggatacaaaacttttggtgaggcaatcccaccacaatatgctatcaaggtactggatgagctgaccaatggggatgcaatcattgccactggtgttgggcagcaccagatgtgggcggctcagtattacacttacaagcggccacggcaatggctgtcttcgtctggtctgggggcaatggggtttgggttgccagctgcagctggagctgctgtggccaacccaggtgtcacggttgttgacattgatggggatggcagcttcctcatgaacattcaggagttggcactgattcgcattgagaacctcccggttaaggtgatgatactgaacaatcaacatctgggaatggtggtgcagtgggaggacaggttttacaaggccaatcgggcacacacgtaccttgggaacccagaaaatgagagtgagatatatcctgattttgtgacgattgctaaagggttcaatgttcctgccgttcgtgtgacaaagaagagtgaagtccgtgcagcaatcaagaagatgcttgagactccagggccatacttgttggatatcatcgtacctcaccaggagcacgtgctgcctatgatcccaagcggtggtgcttttaaggacattatcatggaaggtgatggcaggatttcttattaatcagaacttcggcaagagctcgacctagaagacctaaaggtgcaatgtgcctgatcagcatgatgctggtgtatgttatatcaactaataaagcatgtgttttgct

SEQ ID NO: 138129 - protein, 640 aa, Alopecurus myosuroides
MATATATSTAVAFSGAAAVALPKPTLPRYLPASRRALAARIRCSAVSPSPAPPATALRPWGPSEPRKGADILVEALERCGVSDVFAYPGGASMEIHQALTRSPAITNHLFRHEQGEAFAASGYARASGRVGVCVATSGPGATNLVSALADALLDSIPMVAITGQVPRRMIGTDAFQETPIVEVTRSITKHNYLVLDVEDIPRVIQEAFFLASSGRPGPVLVDIPKDIQQQMAVPVWDAPMSLPGYIARLPKPPATELLEQVLRLVGESRRPILYVGGGCSASGEELRRFVELTGIPVTTTLMGLGNFPSDDPLSLRMLGMHGTVYANYAVDRADLLLAFGVRFDDRVTGKIEAFASRSKIVHIDIDPAEIGKNKQPHVSICADVKIALQGLNTLLLNESKTRKCSDFSSWHEELDQQKREFPLGYKTFGEAIPPQYAIKVLDELTNGDAIIATGVGQHQMWAAQYYTYKRPRQWLSSSGLGAMGFGLPAAAGAAVANPGVTVVDIDGDGSFLMNIQELALIRIENLPVKVMILNNQHLGMVVQWEDRFYKANRAHTYLGNPENESEIYPDFVTIAKGFNVPAVRVTKKSEVRAAIKKMLETPGPYLLDIIVPHQEHVLPMIPSGGAFKDIIMEGDGRISY

SEQ ID NO: 138130 - DNA, 1827 bp, Aspergillus oryzae
  CDS (1)..(1827)
atgggtctcatacgtagattcgttggcatgacgggcggccagatcttccatgagatgatgcaaagacacggtgtcaaacatatatttggataccctggtggaacgatccttccggtcttcgacgccatttacaactccaagcacttcgattttatcctccccaagcacgaacaaggcgccgggcatatggctgagggctacgcaagggcttcgggaaagccagggatcgttctcgtcacctccgggcccggtgcgactaatgtcgttactccgatgcaggatgctctgtccgatggaacgcccatgatcgtcttcagcggccaggtggcaaccgcggcgatcggcagcgatgctttccaggaagctgacattctgggtatatcccgaggctgcacaaagtggaacgtgatggtacgtaacgttgctgagctacctcagagaattaacgaagcgttcgagattgccacgagtgggaggcctggccctgttctggtggatctaccgaaggacgtgactgcaggtatcctgagaaagactactcctaccggcccagctatacctcgcatttccacctacgcaaacaccgatgcgaaccaaaaactactcaccaagtcgatctcccatgtcgcaaagttgattaacaccgcgaagaagcctgtcatatatgcgggacagggagtcatccagtccccaaatggacctcagttgctcaaagaacttgcagacaaggcgtccatcccggtaacaacaactttgcagggactcggtgccttcgatgaactggacgagaagtccctccatatgctgggtatgcatggatcagcgtatgcgaacatgtctatacaggaagccgatctcatcatcgcattgggcgcacggtttgatgatcgagttacattgaacatcgccaagtttgcgcctgctgcgagggcggcagcggcaaagggccttgggggtattgtgcagtttgaaatcctacccaagaatatcaacaaggtgattcagtcgaccgaggcagttgtcggggacatcgcagagaatctgacacacctactgccccatgtgaaccggaccagcatgactgaaaggcaagcatggtttaaacaaatcaacgaatggaaaacaaagtggccgtggaatgcttatacccgggatgaacgaccacacttgatcaaaccccaatacttgatcgaggagctgagtaacctcacagcaggccgcaagcaagagaccatcattactacgggtgttggccagcatcagatgtggactgctcagcactttcgttggcgccatccccgtagtttgatcacctctggtggtcttgggactatgggttttggtcttccagctgccattggtgctaaggtagcgcgtccagatacgcttgtaattgatatcgatggtgatgcatcgtttagcatgaccttgacggaactgactacggccagtcaatttaatatcggggtaaaggtcatcgtcctaaacaatgaggagcaaggaatggtgacgcagtggcaaaatttattctatgaggatcgatactcgcacacacaccagcgtaatccggattttatgggcctggcaggggcaatgcatatccagcatcgacgtgtcagcaaacccgaggaggtcgttgactctctgaaatggcttatccacacagagggtccggctctgctggaggttatgaccgacaagaaggtaccggtgttaccgatggtgccagcgggctcgggacttcacgagttcattacgtgggacgcacataaagacatggaaagacgaagtctgatgcgggacagaacatgtgggcttcatggttga

SEQ ID NO: 138131 - protein, 608 aa, Aspergillus oryzae
MGLIRRFVGMTGGQIFHEMMQRHGVKHIFGYPGGTILPVFDAIYNSKHFDFILPKHEQGAGHMAEGYARASGKPGIVLVTSGPGATNVVTPMQDALSDGTPMIVFSGQVATAAIGSDAFQEADILGISRGCTKWNVMVRNVAELPQRINEAFEIATSGRPGPVLVDLPKDVTAGILRKTTPTGPAIPRISTYANTDANQKLLTKSISHVAKLINTAKKPVIYAGQGVIQSPNGPQLLKELADKASIPVTTTLQGLGAFDELDEKSLHMLGMHGSAYANMSIQEADLIIALGARFDDRVTLNIAKFAPAARAAAAKGLGGIVQFEILPKNINKVIQSTEAVVGDIAENLTHLLPHVNRTSMTERQAWFKQINEWKTKWPWNAYTRDERPHLIKPQYLIEELSNLTAGRKQETIITTGVGQHQMWTAQHFRWRHPRSLITSGGLGTMGFGLPAAIGAKVARPDTLVIDIDGDASFSMTLTELTTASQFNIGVKVIVLNNEEQGMVTQWQNLFYEDRYSHTHQRNPDFMGLAGAMHIQHRRVSKPEEVVDSLKWLIHTEGPALLEVMTDKKVPVLPMVPAGSGLHEFITWDAHKDMERRSLMRDRTCGLHG

SEQ ID NO: 138132 - DNA, 1830 bp, Aspergillus oryzae
  CDS (1)..(1830)
atgcgcgccatgcactaccagagcttcgttggactcagtggtggagaaatttttcatgagatgatgctccgtctcggcgtcgaacacgtctttggctaccccggtggcgccattcttcccgtgttcgatgctatctacaactccaagcacttcgactttattctccctcgccatgagcagggtgctggacacatggctgaaggttatgcccgggcttcaggaaagcctggtgttgtcctggtcacttctggccccggtgctactaatgtcatcacccctatgcaggatgccctctcggacggcacgccgatggttgttttctgcggtcaggtcccgaccagcgcgattggtaccgactctttccaggaagccgacgtgatcggtatctcgagagcttgcacgaagtggaacgttatggtgaagtccgtcgctgagcttcctcgccgcatccacgaggccttcgaaatcgcaaccagtggtcgccctggtcccgtcctggtcgaccttccgaaagatatcactgccggtatcctccgcaagcctatccctatgaacagcaccattccctctctgccgagcgcggcgagcattgcggcccgtgagttgagcatgaagcagctcgaaagcaccatcggccgcgttgctcgtttggtcaatgtcgccaagaagcccgttctttacgtcggccagggtcttctcgctaaccccgaaggccccaagcttttgaaggaattggccgacaaggcctgcattccggtcaccacaactctgcagggtctgggcggctttgacgagctggactccaaggcgcttcatatgctgggaatgcacggatcggcctacgccaacatggctatgcaggaggctgatttgatcattgctgttggtgcccgttttgatgaccgtgtcacgggtaacatcaccaagttcgcccctcaggctaagctggctgcgtccgagaaccgtggtggtattgtccactttgagatcatgcctaagaacatcaacaaggttgtccaggccaacgaggctgtcgagggtgactgtgccgagaacatcggccaccttctgccccatgtcaacaaggtgtcggagcgccccgagtggttcgctcagatcaatgactggaaggctcgcttccccttctctctgtacgagaagcaggccccggaaggccccatcaagccccagactctgattgagaagctcagcgaccttaccgcccacatgaaggaccgtaccctgatcgccactggtgttggtcaacatcagatgtgggctgctcagcacttccgttggcgccatccccgtagtatgatcacctctggtggtctgggtactatgggctatggtctccccgcggcgattggcgccaaggttgcttgcccagatgcccttgtcgttgatattgatggagatgcctccttcaacatgaccctcaccgagctctctactgctgctcagttcaacatcggcgtcaaggtcctcctgctgaacaacgaggagcaaggtatggtgacccaatggcagaacctcttctacgaggaccgttattcgcacactcaccagaagaaccccgactttgttcctctggccaagtccatgggcgttgctgctgataagctggtcaaccctgctgagatggaggagaagctgaagtggctgatcgagagcgacggccccgctctgctggaggtcattactgaccgtaaggtgcctgtgcttcccatggtgcccgctggcagcgccctgcacgagttccttgtttatgacgaagccaaggaacaggagcggaaggccctgatgaggaagcggaaggtcatcgtctaa

SEQ ID NO: 138133 - protein, 609 aa, Aspergillus oryzae
MRAMHYQSFVGLSGGEIFHEMMLRLGVEHVFGYPGGAILPVFDAIYNSKHFDFILPRHEQGAGHMAEGYARASGKPGVVLVTSGPGATNVITPMQDALSDGTPMVVFCGQVPTSAIGTDSFQEADVIGISRACTKWNVMVKSVAELPRRIHEAFEIATSGRPGPVLVDLPKDITAGILRKPIPMNSTIPSLPSAASIAARELSMKQLESTIGRVARLVNVAKKPVLYVGQGLLANPEGPKLLKELADKACIPVTTTLQGLGGFDELDSKALHMLGMHGSAYANMAMQEADLIIAVGARFDDRVTGNITKFAPQAKLAASENRGGIVHFEIMPKNINKVVQANEAVEGDCAENIGHLLPHVNKVSERPEWFAQINDWKARFPFSLYEKQAPEGPIKPQTLIEKLSDLTAHMKDRTLIATGVGQHQMWAAQHFRWRHPRSMITSGGLGTMGYGLPAAIGAKVACPDALVVDIDGDASFNMTLTELSTAAQFNIGVKVLLLNNEEQGMVTQWQNLFYEDRYSHTHQKNPDFVPLAKSMGVAADKLVNPAEMEEKLKWLIESDGPALLEVITDRKVPVLPMVPAGSALHEFLVYDEAKEQERKALMRKRKVIV

SEQ ID NO: 138134 - DNA, 2103 bp, Monochoria vaginalis
  CDS (1)..(1929)
atggctgcttcgaagccctctccattcccttcatccgcttcctcttcccgtctcctccttcaccctttctccaaaccccttcacccttcccccaagctccaacgccagcagcggatcttcgtcccactcgtcacctcctccactaccgtcgccgcccctgacgctgtctttccgccgcgtcgcaatttcgccccggacgagcctcgcaagggcgcggacatcctcgtggaggctctcgagcgggaaggcgtcacggatctattcgcctaccctggtggcgcctccatggagatccatcaggctctcacacgctcaccctccatcaccaatcacctcctccgccacgagcagggagaggcctttgccgcgtccggatacgcgcgctccactggaaggcccggcgtctgcatcgccacctcgggccccggagctaccaacctcgtctctgccctggctgacgccctcctcgattctatacccatggtcgccatcaccggccaggtctctcgccgcatgatcggcactgacgccttccaggagacgcccatcgtcgaggtcacgcgctccatcaccaagcacaactaccttgtcctcgacgtcgatgacattcccaggataataaaggaggcatttttcatcgccaccagcggccgtcccggtccagtgctcgtggacatcccgaaggacatccaacagcagctcgcggtgcccgtctggaatccaccagttcgtttgcctggttatgtctcccgcctccccaagccgcctgccctccatctgcttcagcaaattgtccggatagtgtctgagtcaagccgccctgtcctctatgttggtggcggctctctgcatgccagtgaagagcttcgccgttttgctgacctcaccggaattcctatagcgagtacattgatgggtattggtgtttaccctctggatggtcctctctctttgaaaatgttgggcatgcatggtacagtttatgccaattatgctatcgataaagctgaccttttgctagcttttggggttagatttgatgatcgggtgacaggaaagcttgaggcttttgcaagccgcgcaaagattgtgcacatcgatattgacccagcagaaattggaaagaacaagcagcctcatgtgtcaatctgtggcgacataaagctcgccctacaagagatgaacgaaatgattgaagagagcggcattcataacaagttggatttctcagcctggagggaagagcttgaccaacagaagaagaattatcctttggaatataagacttttggtgatctgatccctccgcagcatgctattgagttgctcgaggagctgacaaatggggaggcaattattacaacgggagttgggcagcaccagatgtgggctgcacaatactacagctataagcggccacgccaatggttgacatctgccggactaggtgctatgggctttggactgccagcagcagttggtgctgccgtcggtaatcctggtgttatggttgtggatattgatggggatggaagctttcaaatgaatgcccaagagttggcaatcattaggatagaaaaccttgatgtcaagatgcttatcttgaacaaccaacatttgggtatggttgtgcaatgggaagacagattctacaaaagcaacagagctcacacttacttggggaatcctgcgaatgagagtaaggtatttccagattttgtgaagctcgcagagagttatgatatacctgctgcccgtgtgtcgaagaaaagcgaagttagggatgctatcaggaaaatgatccagacaccagggccttacttattggatgttatcgtgccacatgaagagcacgtattgccaatgattccaagtggtggtgcatttaaagatatgatcctggatggagatgggagaacagtgcactagttctccttagcttggttaatttcctcgtatgtttagtgcgcatcgtgctaattcaggatcatgtattgctagttttgctttcctcttgaagagcgttttcatgtcctgtaatctttattggttatttggattcagtttagtatttagactttgtagtttaagctgatgccagag

SEQ ID NO: 138135 - protein, 642 aa, Monochoria vaginalis
MAASKPSPFPSSASSSRLLLHPFSKPLHPSPKLQRQQRIFVPLVTSSTTVAAPDAVFPPRRNFAPDEPRKGADILVEALEREGVTDLFAYPGGASMEIHQALTRSPSITNHLLRHEQGEAFAASGYARSTGRPGVCIATSGPGATNLVSALADALLDSIPMVAITGQVSRRMIGTDAFQETPIVEVTRSITKHNYLVLDVDDIPRIIKEAFFIATSGRPGPVLVDIPKDIQQQLAVPVWNPPVRLPGYVSRLPKPPALHLLQQIVRIVSESSRPVLYVGGGSLHASEELRRFADLTGIPIASTLMGIGVYPLDGPLSLKMLGMHGTVYANYAIDKADLLLAFGVRFDDRVTGKLEAFASRAKIVHIDIDPAEIGKNKQPHVSICGDIKLALQEMNEMIEESGIHNKLDFSAWREELDQQKKNYPLEYKTFGDLIPPQHAIELLEELTNGEAIITTGVGQHQMWAAQYYSYKRPRQWLTSAGLGAMGFGLPAAVGAAVGNPGVMVVDIDGDGSFQMNAQELAIIRIENLDVKMLILNNQHLGMVVQWEDRFYKSNRAHTYLGNPANESKVFPDFVKLAESYDIPAARVSKKSEVRDAIRKMIQTPGPYLLDVIVPHEEHVLPMIPSGGAFKDMILDGDGRTVH

SEQ ID NO: 138136 - DNA, 2197 bp, Buchnera aphidicola
  CDS (1)..(1716): transl_table=11
atggaaatattatcaggagccgaaatggtcgttcgatcattaattgatcagggaatacagcatatatttggttatcctggtggtgctgtactagatatttatgatgctctaaaaaccgttggtggaatcgaacatattctagtgagacacgaacaggctgcaactcacatggctgacggttattctcgttctactggaaaaactggagtagtattagttacttctggacccggtgcaactaatgctattactggcattgcaacagcatacatggattctattccaatggttgttatttcaggacaagtcgcttcttcattaatcggttatgatgcttttcaagaatgtgatatgatcggaatttctcgtccaatagtaaaacacagtttcttagttaaaaaaactgaagatataccaattgtttttaaaaaagctttttggttagcatctagtggccgtccaggacctatagtaattgatttaccgaaagatattttaaaaaaagacaataaatatctctataaatggccagataatattaatatacgttcatataatccaacaactaaaggtcatatagagcaaattaaaaaagctctgcatacattattaaaagctcaaagaccagtgatttatgcagggggcggaattattagttctaacagtagtgaagaattaagaatttttgcagaaaagatcaactgtcctgttacgacttctttaatgggattaggtagttttccaggcactcatgatcaaaatatttccatgttaggaatgcatggtacgtatgaagctaacatgaccatgcatcatgccgatgttatttttgcaatcggtgtaagattcgatgatcgcacaacaaataatttaaataaatactgtccaaatgcgattgttttacatgttgatattgatccgacttctatttctaaaactgtatctgccaatatacctattgtaggagatgctaaacatgtcttgcaaaaaatgatagaattactaaaaaaagaaaagaaaatttcactgttagaagattggtggaatactattaaaaaatggaaaaaaataaatagtctacaatacaatcaactaagtaataagataaaacctcaaacagttattaaaactctttttaaactcacaaaaggaacgtcttatatcacatcagatgttggacagcatcaaatgtttactgcattatattatccatttaacaaacctagacgttggattaattcaggtggattaggtaccatgggatttggattacccgcagcattaggagttaaattagccctgcccaaagaaactgttatctgtattacaggagatggcagtattcaaatgaatattcaagaattatctacagcacgacaatataatttagcagtattaatattaaatctcaacaattcttctttaggaatggtcaaacaatggcaagatatgatttattcaggacgacattcccattcctatatggactcacttcctgattttgtaaaattatcagaatcctatggccactttggtatccaaattactgaacctatagaattagaagagaaattaatgcttgcattaagtaaattgtctgatggtcatttggtgttcgtagacgttcaaatagataattctgagcatgtttatcctatgcagattcaagggggtggcatgaatgaaatgcggctaaggaaaaaagaggttgcctaaaaatatgcgaagaattttatctattttattggaaaatgaatcaggtgcattatcaagagtaataggactcttttcacaaagaggatataatatagaaactattacgctagcacctactgaagatcctactttatctaaaatgactatacaaacagtaggaaatgaaaaagctattgaacaaattgaaaaacaactgcataaattaatagatgtattaagagttgtacaaattggacaatcttctcatatagaacgggaaatcgtattattaaaagttcagataaacaatcatagaagagatgatataaaacatattactgaagtatttcgagggcaaattgtagacataacatctgcaacatatatattgcaattgtctggtactacgaaaaaaattgatgcttttttaaaaataatacgtaatttttcagaaattatcgaggtaactcgttctggaattgttggtatttctcggggataa

SEQ ID NO: 138137 - protein, 571 aa, Buchnera aphidicola
MEILSGAEMVVRSLIDQGIQHIFGYPGGAVLDIYDALKTVGGIEHILVRHEQAATHMADGYSRSTGKTGVVLVTSGPGATNAITGIATAYMDSIPMVVISGQVASSLIGYDAFQECDMIGISRPIVKHSFLVKKTEDIPIVFKKAFWLASSGRPGPIVIDLPKDILKKDNKYLYKWPDNINIRSYNPTTKGHIEQIKKALHTLLKAQRPVIYAGGGIISSNSSEELRIFAEKINCPVTTSLMGLGSFPGTHDQNISMLGMHGTYEANMTMHHADVIFAIGVRFDDRTTNNLNKYCPNAIVLHVDIDPTSISKTVSANIPIVGDAKHVLQKMIELLKKEKKISLLEDWWNTIKKWKKINSLQYNQLSNKIKPQTVIKTLFKLTKGTSYITSDVGQHQMFTALYYPFNKPRRWINSGGLGTMGFGLPAALGVKLALPKETVICITGDGSIQMNIQELSTARQYNLAVLILNLNNSSLGMVKQWQDMIYSGRHSHSYMDSLPDFVKLSESYGHFGIQITEPIELEEKLMLALSKLSDGHLVFVDVQIDNSEHVYPMQIQGGGMNEMRLRKKEVA

SEQ ID NO: 138138 - DNA, 3231 bp, Gossypium hirsutum
  CDS (789)..(2768)
aatgtgcacaggtcataaacaaacaagtcttgacgaatgtcacttgtaatcttcctctcaacttggatgaggaaaattgtttaaataaatcatgttgcatgaagaagctacctcaccgcatgaagaagcttgcccaatacaattagaaagcaattcaacaccttattacaccacttcacctaaagagatgtccttgcaaaatactataaggttatttacaaaaagatcatacatgtatcgaatgtagatcgacggcaagtcacatcaacctgcatagacccttaacaacatacatagctctagtcacatcctagtgcacttgttgagagtcctctgatacttaataatttctttgttaagacagttttacatactcaaactttatcaaatatatttgaaaccttaaaacatctctcttaggccttaacctatctgacctagctttcaacatctgtgcgactaccgttatctatccattacctaaacttgcatcaatggattagatttcacataaaaagcaaatgattgttgatgatttgattgagattttcaaaaccatgaagtacattgccaaaattactcaaattaaagtagaaagactaatgatgtaacttgagtaaagaacagggaccgttcttaatatatgaccaaaatgaataaaacaagaagggcaaaagggtaatgtaggtaaatcgaaactttaaaagggaatcacaatcacacttttcttcccactctcgctcaccacagacaccaagaaaagcctcaccacaagcctctcatcgacaatggcggctgccacttcgaactccgctttgcctaagctttctacgttaacttcgtccttcaaatcttccatacccatttccaaatccagccttcccttctccacaacccctcaaaagcccaccccttaccgctccttcgacgtttcctgctctctttctcatgcaagctccaaccccagatccgctgccgcatccgttacccaaaaaactgctcctccccattatttcatttccaggtatgcggatgatgagccccggaaaggcgctgatatcctggtggaagccctggaacgtgaaggggtcaaggatgtgtttgcctacccaggtggagcttcaatggagatccaccaggctttaacccgctcaaaaatcatccgaaatgtccttccgcgacacgagcaaggtggggtctttgccgccgagggttacgcgcgctcctctggcatttccggcgtttgcattgcgacgtctggccctggggcaaccaacttggtgagtggtctcgctgatgcaatgctcgatagtatccctctcgtggcgatcactggtcaagtccctcgtcggatgatcggtaccgatgctttccaggaaactccaattgttgaggtaacaaggtctattacgaagcataattatcttgttcttgatgtggatgatattcctaggattgttagtgaggctttctttttagcttcatcgggcaggccgggacctgttctgattgatgttcctaaggatatacaacagcaacttgctgttcctaaatggaaccattctcttagattgccagggtatttgtctaggttgcctaaggctcccgctgaggctcatctcgaacagatcgtgagattggtttctgagtctaagaagcctgttttatatgttggtggtgggtgtttgaactctagtgaggagttgaagaggtttgttgagcttacagggatacccgttgcaagtactttgatgggtcttggagcctttccgatttcggatgagttgtcgttacaaatgcttgggatgcacggaactgtgtatgccaattatgctgttgataagagtgatttgttgcttgcttttggagtgagatttgatgatagggtgacaggaaaacttgaggcttttgccagccgggcaaagattgtgcatatcgatatcgactctgctgagattgggaagaacaagcagcctcatatgtcagtgtgttccgatgtgaaattggcattgcaggggataaataagatattggagaccacgggagctaagctgaatcttgattattcggaatggaggcaggagttaaacgagcagaagctgaaattccctttgagttacaagacctttggtgaagctattccacctcaatatgcaattcaggttcttgatgaattaactggcgggaatgcaattataagtaccggtgttggccagcatcaaatgtgggctgctcaattttacaagtataagaagcctcgtcaatggttaacgtctgggggattgggtgctatgggatttggattgcctgctgctattggagctgctgttgcaaacccggaggcagttgttgtagacatcgacggtgatggaagttttatcatgaatgtgcaagagttggcgactatgcgtgtggaaaatcttccggttaagatattattgttgaataatcagcatttgggtatggttgttcaatgggaggaccggttttacaaggcaaacagggctcatacatacttgggagacccatccaacgagtcggaaatattcccaaatatgttgaaatttgctgaagcatgcgggataccagctgcccgggtgacgaagaaagaagatctcaaagcagcaattcagaaaatgttggacactcctggaccttacttgttggatgtgattgtcccacatcaagaacatgtcctgcctatgatccccagtggaggcgctttcaaagatgtgatcacagagggtgatggaagaacacaatattgacctcaatgagcatcaaatggttttttttttggggtaatgtatgtaatgaatgagggtgggttatgggggcttagtttctgagttctggaacatagtttttctatgcttttaaaagcaaccaattaggttttcagtttggtcttatgcaagtcttgtatgtctttagtaatgttatgtaatgggcgaatctaaacttgtttttgttcaaatgatgaatgctgtttttgttcaaatgatgaatgctttcgttataatataaatataaatataaatataaataaattcaaatattttccaactctcaacatttctaatttaaattaacatcagatttagtggttatacaatgtaaaagtggtacaaacaacgtacatgaagatatcagtgggtttgtgattattgagagaaagacaggagctatgaggtgcatattatcagcaattcattcaacttctgtgatagg

SEQ ID NO: 138139 - protein, 659 aa, Gossypium hirsutum
MAAATSNSALPKLSTLTSSFKSSIPISKSSLPFSTTPQKPTPYRSFDVSCSLSHASSNPRSAAASVTQKTAPPHYFISRYADDEPRKGADILVEALEREGVKDVFAYPGGASMEIHQALTRSKIIRNVLPRHEQGGVFAAEGYARSSGISGVCIATSGPGATNLVSGLADAMLDSIPLVAITGQVPRRMIGTDAFQETPIVEVTRSITKHNYLVLDVDDIPRIVSEAFFLASSGRPGPVLIDVPKDIQQQLAVPKWNHSLRLPGYLSRLPKAPAEAHLEQIVRLVSESKKPVLYVGGGCLNSSEELKRFVELTGIPVASTLMGLGAFPISDELSLQMLGMHGTVYANYAVDKSDLLLAFGVRFDDRVTGKLEAFASRAKIVHIDIDSAEIGKNKQPHMSVCSDVKLALQGINKILETTGAKLNLDYSEWRQELNEQKLKFPLSYKTFGEAIPPQYAIQVLDELTGGNAIISTGVGQHQMWAAQFYKYKKPRQWLTSGGLGAMGFGLPAAIGAAVANPEAVVVDIDGDGSFIMNVQELATMRVENLPVKILLLNNQHLGMVVQWEDRFYKANRAHTYLGDPSNESEIFPNMLKFAEACGIPAARVTKKEDLKAAIQKMLDTPGPYLLDVIVPHQEHVLPMIPSGGAFKDVITEGDGRTQY

SEQ ID NO: 138140 - DNA, 1980 bp, Gossypium hirsutum
  CDS (1)..(1980)
atggcggctgccactgcgaactccgctttgcctaagctttctacgttaacttcctccttcaaatcttccatacccatttccaaatccagccttcccttctccacaacccctcaaaagcccaccccttaccgctccttcgacgtttcctgctctctttctcatgcaagctctaaccccagatccgccgccacatccgttaccccaaaaaatgctcctccccatgatttcatttccaggtatgcggatgatgagccccggaaaggcgctgatatcctggtggaagccctggttcgtgaaggggtcaaggatgtgtttgcctacccaggtggagcttcaatggagatccaccaggctttaacccgctcaaaaatcatccgaaatgtccttccgcgacacgagcaaggtggggtctttgccgccgagggctacgcgcgctcctctggcattcccggcgtttgcattgcgacgtctggccctggggcaaccaacttggtgagtggtctcgctgatgcaatgctcgatagtatccctctcgtggcgatcactggtcaagtccctcgtcggatgatcggtaccgatgctttccaggaaactccaattgttgaggtaacaaggtctattacgaagcataattatcttgttcttgatgtggatgatattcctaggattgttagtgaggctttctttttagcttcctcgggcaggccgggacctgttctgattgatgttcctaaggatatacaacagcaacttgctgttcctaaatggaaccattctcttagattgccagggtatttgtctaggttgcctaaggctcccggtgaggctcatctcgaacagattgttagattggtttctgagtctaagaagcctgttttatatgttggtggtgggtgtttgaactctagtgaggagttgaagaggtttgttgagcttacagggatacctgttgcaagtactttgatgggtcttggagcctttccgatttcggatgacttgtcgttacaaatgcttgggatgcacggaactgtgtatgccaattatgctgttgataagagtgatttgttgcttgcttttggagtgagatttgatgatagggtgacgggaaaacttgaggcttttgccagccgggcaaagattgtgcatatcgatatcgattctgccgagattgggaagaacaagcagcctcatgtgtcagtgtgttccgatgtgaaattggcattgcaggggataaataagatattggagaccaaggtagcaaagctgaatcttgattattcggaatggaggcaggagttaaacgagcagaagctgaaattccctttgagttacaagacctttggtgaagctattccacctcaatatgcaattcaggttcttgatgaattaactggcgggaatgcaattataagtactggtgttggtcagcatcaaatgtgggctgctcaattttacaagtataagaagcctcgtcaatggttaacatctgggggattgggtgctatgggatttggattgcctgctgctattggagctgccgttgcaaacccagaggcagtcgttgtagacatcgatggtgatggaagttttatcatgaacgtgcaagagttggcgactatccgtgtggaaaatcttccggttaagatattattgttgaataatcagcatttgggtatggttgttcaatgggaggaccggttttacaaggcaaacagggctcatacatacttgggagacccatccaacgagtcggaaatattcccaaatatgttgaaatttgctgaagcatgcgggataccagctgcccgggtgacaaagaaagaagatctaaaagcagcaatgcagaaaatgttggacactcctggaccttacttgttggatgtgattgtcccacatcaagaacatgtcctgcctatgatccccagtggaggggctttcaaagatgtgatcacagagggtgatggaagaacacaatattga

SEQ ID NO: 138141 - protein, 659 aa, Gossypium hirsutum
MAAATANSALPKLSTLTSSFKSSIPISKSSLPFSTTPQKPTPYRSFDVSCSLSHASSNPRSAATSVTPKNAPPHDFISRYADDEPRKGADILVEALVREGVKDVFAYPGGASMEIHQALTRSKIIRNVLPRHEQGGVFAAEGYARSSGIPGVCIATSGPGATNLVSGLADAMLDSIPLVAITGQVPRRMIGTDAFQETPIVEVTRSITKHNYLVLDVDDIPRIVSEAFFLASSGRPGPVLIDVPKDIQQQLAVPKWNHSLRLPGYLSRLPKAPGEAHLEQIVRLVSESKKPVLYVGGGCLNSSEELKRFVELTGIPVASTLMGLGAFPISDDLSLQMLGMHGTVYANYAVDKSDLLLAFGVRFDDRVTGKLEAFASRAKIVHIDIDSAEIGKNKQPHVSVCSDVKLALQGINKILETKVAKLNLDYSEWRQELNEQKLKFPLSYKTFGEAIPPQYAIQVLDELTGGNAIISTGVGQHQMWAAQFYKYKKPRQWLTSGGLGAMGFGLPAAIGAAVANPEAVVVDIDGDGSFIMNVQELATIRVENLPVKILLLNNQHLGMVVQWEDRFYKANRAHTYLGDPSNESEIFPNMLKFAEACGIPAARVTKKEDLKAAMQKMLDTPGPYLLDVIVPHQEHVLPMIPSGGAFKDVITEGDGRTQY

SEQ ID NO: 138142 - DNA, 2586 bp, Brevibacterium flavum
  CDS (187)..(1971): transl_table=11
tccgcgtcggaacaattttaaatgagggctttgtctttaggctgagttgaaatcggcttggcttggacgggtcctgtgaaaatccttatttagtaaaggagccagaaagtcgtgaatgtggcagcttctcaacagcccactcccgccacggttgcaagccgtggtcgatccgccgcccctgagcggatgacaggtgcacaggcaattgttcgatcgctcgaggagcttaacgccgacatcgtgttcggtattcctggtggtgcggtgctaccggtgtatgacccgctctattcctccacaaaggtgcgccacgtcttggtgcgccacgagcagggcgcaggccacgcagcaaccggctacgcgcaggttactggacgcgttggcgtctgcattgcaacctctggcccaggagcaaccaacttggttaccccaatcgctgatgcaaacttggactccgttcccatggttgccatcaccggccaggtcggaagtggcctgctgggtaccgacgctttccaggaagccgatatccgcggcatcaccatgccagtgaccaagcacaacttcatggtcaccgaccccaacgacattccacaggcattggctgaggcattccacctcgcgattactggtcgccctggccctgttctggtggatattcctaaggatgtccagaacgctgaattggatttcgtctggccaccaaagatcgacctgccaggctaccgcccagtttcaacaccacatgctcgccagatcgagcaggcagtcaagctgatcggtgaggccaagaagcccgtcctttacgttggaggcggcgttatcaaggctgacgcacacgaagagcttcgtgcgttcgctgagtacaccggcatcccagttgtcaccaccttgatggctttgggtactttcccagagtctcacgagctgcacatgggtatgccaggcatgcatggcactgtgtccgctgttggtgcactgcagcgcagcgacctgctgattgctatcggctcccgctttgatgaccgcgtcaccggtgacgttgacaccttcgcgcctgacgccaagatcattcacgccgatattgatcctgccgaaatcggaaagatcaagcaggttgaggttccaatcgtgggcgatgcccgcgaagttcttgctcgtctgctggaaaccaccaaggcaagcaaggcagagaccgaggacatctccgagtgggttgactacctcaagggcctcaaggcacgtttcccacgtggctacgacgagcagccaggcgatctgctggcaccacagtttgtcattgaaaccctgtccaaggaagttggccccgacgcaatttactgcgccggcgtcggacagcaccaaatgtgggcagctcagttcgttgactttgaaaagccacgcacctggctcaactccggtggactgggcaccatgggctacgcagttcctgcggcccttggagcaaaggctggcgcacctgacaaggaagtctgggctatcgacggcgacggctgtttccagatgaccaaccaggaactcaccaccgccgcagttgaaggtttccccattaagatcgcactaatcaacaacggaaacctgggcatggttcgccaatggcagaccctattctatgaaggacggtactcaaatactaaacttcgtaaccagggcgagtacatgcccgactttgttgccctttctgagggacttggctgtgttgccatccgcgtcaccaaagcggaggaagtactgccagccatccaaaaggctcgagaaatcaacgaccgcccagtagtcatcgacttcatcgtcggtgaagacgcacaggtatggccaatggtgtctgctggatcatccaactccgatatccagtacgcactcggattgcgcccattctttgacggcgacgaatcagctgcagaagaccctgcagacattcatgcttccgttgattcgaccgaggcataaggagagacccaagatggctaattctgacgtcacccgccacatcctgtccgtactcgttcaggacgtagacggaatcatttcccgcgtatcaggtatgttcacccgacgcgcattcaacctcgtgtccctcgtgtctgcaaagaccgaaacacacggcatcaaccgcatcacggttgttgtcgacgccgacgagctcaacattgagcagatcaccaagcagctcaacaagctgatcccggtgctcaaagtcgtgcgacttgatgaagagaccactatcgcccgcgcaatcatgctggttaaggtctctgcggacagcaccaaccgtccgcagatcgtcgacgccgcgaacatcttccgcgcccgagtcgtcgacgtggctccagactctgtggttattgaatccacaggcaccccaggcaagctccgcgctctgcttgatgtgatggaaccattcggaatccgcgaactgatccaatccggacagattgcactcaaccgcggtccgaagaccatggctccggccaagatctaaacagcaattaatctgattgcacctgctgcataaatgtgactagtcaaacaccgtctaattacatgtgtgtggtagaacaataa

SEQ ID NO: 138143 - protein, 594 aa, Brevibacterium flavum
MTGAQAIVRSLEELNADIVFGIPGGAVLPVYDPLYSSTKVRHVLVRHEQGAGHAATGYAQVTGRVGVCIATSGPGATNLVTPIADANLDSVPMVAITGQVGSGLLGTDAFQEADIRGITMPVTKHNFMVTDPNDIPQALAEAFHLAITGRPGPVLVDIPKDVQNAELDFVWPPKIDLPGYRPVSTPHARQIEQAVKLIGEAKKPVLYVGGGVIKADAHEELRAFAEYTGIPVVTTLMALGTFPESHELHMGMPGMHGTVSAVGALQRSDLLIAIGSRFDDRVTGDVDTFAPDAKIIHADIDPAEIGKIKQVEVPIVGDAREVLARLLETTKASKAETEDISEWVDYLKGLKARFPRGYDEQPGDLLAPQFVIETLSKEVGPDAIYCAGVGQHQMWAAQFVDFEKPRTWLNSGGLGTMGYAVPAALGAKAGAPDKEVWAIDGDGCFQMTNQELTTAAVEGFPIKIALINNGNLGMVRQWQTLFYEGRYSNTKLRNQGEYMPDFVALSEGLGCVAIRVTKAEEVLPAIQKAREINDRPVVIDFIVGEDAQVWPMVSAGSSNSDIQYALGLRPFFDGDESAAEDPADIHASVDSTEA

SEQ ID NO: 138144 - DNA, 2970 bp, Caulobacter crescentus
  CDS (334)..(2139): transl_table=11
  misc_feature (1)..(1): n is a, g, c or t
  misc_feature (2)..(2): n is a, g, c or t
nnggtaccgtcgcgccgccacatttcgcgacgaccgcactggcgggtgaaacctgcccttcggacgggctgatcctggcaaggtcacaccgccggaaaaggcacaaccttgcggcaaagagcgccttgacgccccatcttacgcatgccatgaccctttccgtagctttggagcaagactcgtgcgcaaaaccatgatcgtacttatggagcggccgttcgcggggtgacctcgaagtcacgtcgtagctcggtcgcgcgcgcaaaggtccttcgggaccttttttcttttccagccccctcttccgcctaatccctccacccggatcgtcccatgaccgcccaccagaccatcgagagccaagctcccgccgacaccgccgatcgcgccatgaccggcgccgagatcgtggtccgcggcctcgtggaccaaggagtcgaggtgctgttcggctatccgggcggcgcggtcctgccgatctatgacgcgctgttccacgagccgcgcctgcagcacattctggtccgccacgagcagggcgcggcgcacgcggcagaaggctatgcgcgctcgtcgggcaagccgggcgtggtcctggtcacctcgggccccggcgcgaccaacgccatcaccggcatcatggacgccctgatggactcgatcccgatggtcgtcatcaccggccaggttccgacgcacctgatcggcaccgacgctttccaggaagccgatacagtcggcatgacccgctcgtgcaccaagcacaactatctggtcaaagacgtccgcgacctgccgcagatcatccacgaggcgttcaagatcgccaccaccggccgccctggccccgtactgatcgacatccccaaggacgtccagttcgccaagggcgagtacttcggtcccggcgaggtcgcctcgacccacgcctatgcgccgcgcaccaagggcgacgccggccgcatcgccgaggcggccaggatgatcgcccaagcgcgccgaccgatcttctacaccggcggcggcgtcatcaacgccggccccaaggccagcgcggcgctgcgcgagttcgccgccctgacgggcgcgccggtcacctcgacgctgatgggcctgggcgccttcccggcggcggatccggcgtggctgggcatgctgggcatgcacggcacgttcgaggccaacaacgccatgcacgactgcgacgtgatgatctgcgtcggcgcgcggttcgatgaccgggtcacgggccgcctcgacgccttctcgccgggcagcaagaagatccacatcgacatcgacccgtcctcgatcaacaaaaacgtccgcgtggacctgcccatcgtcggcgacgccggttcggtactggaagacctgatcgccgcctggaaggccgcgaacctacagccgaacaaggccgccctgaccgactggtgggcccagatcgaccagtggcgcgcccgtcagtgcctgtcctatcgccgctcggactcggtcatcaagccgcagtacgccatcgagcgcctgtacgagctgaccaaggacaaggacgtctacatcaccaccgaagtcggccagcaccagatgtgggccgcgcagttcttccgcttcgaggagccgaaccgctggatgacatccgggggcctcggcaccatgggctacgggctgcccgccgccctcggtgtgcaactggcgcacccgaacagcctggtcgtcgacatcgccggcgaagcctcgatccagatgtgcatccaggagctgtcgacggcgatccagttcgatctgccggtcaagatcttcatcctgaacaacgagtggatgggcatggtccgccagtggcaacagctgctgcacggcgagcgctatagccactcctattccgacagcctgcccgacttcgtgaagctggccgaggcctatggcgcggtcggcatccgttgcgacaaccccgccgagctggacgccaagatcctggagatggtcaacagcgacaagccggtgatcttcgactgccgcgtcgagaagcacgagaactgcctgccgatgatcccgtcaggcaaggcgcacaacgagatgatcatgggcgaggtcgaggacatcggcaacgtcatcggcgaggacggcgcggggctggtctaagccccctcgcccttccacaaccctttggcttagaagcgatccatgaccgccaacgtgcaacccgctcccgcctcggcctacgaccttagccccaaggaccaggccgaacagtccgccaccttcgccctcctcgtcgacaacgagcccggcgtcctgcatcgcgtggtcggcctgttcgccgcgcggggctacaatatcgagagcctcaccgtcgccgagacggaccgcaaggcgcacaccagccgtatcaccgtggtgacccgcggcacccgccatgtgctggaccagatcgaggcccagctaaacaaggtggtcaatgtccgccgcgtccacgacgtgacccgcgatccgaacggcgtcgagcgcgagctggccctggtgaaggtgcgcggctctggcgtcgatcgcctggaagcgctgcggatcgccgagatcttccgcgccaagccggtcgacaccacccttgagagcttcgtcttcgagatctccggtgcgccgtccaagatcgacaagttcctcgacctgatgcgccccctgggcctggtggagctgtcccgtacgggcgttctctccatcgagcgcggcttcgaaggcatgtagccgagggtggttggggacaacgcgccccctcacccttccattggctgggcgaagtccctatattggatctgtccggcttcggccgaactatggggataaacgcgcacgtaataagcggactggacccgggtgcgaattcccggcggctccaccaaatctctcccgcgttatcacgggactgcatggggccgatcagcatcgacagacgtgtaaaggtgtctgctttctctc

SEQ ID NO: 138145 - protein, 601 aa, Caulobacter crescentus
MTAHQTIESQAPADTADRAMTGAEIVVRGLVDQGVEVLFGYPGGAVLPIYDALFHEPRLQHILVRHEQGAAHAAEGYARSSGKPGVVLVTSGPGATNAITGIMDALMDSIPMVVITGQVPTHLIGTDAFQEADTVGMTRSCTKHNYLVKDVRDLPQIIHEAFKIATTGRPGPVLIDIPKDVQFAKGEYFGPGEVASTHAYAPRTKGDAGRIAEAARMIAQARRPIFYTGGGVINAGPKASAALREFAALTGAPVTSTLMGLGAFPAADPAWLGMLGMHGTFEANNAMHDCDVMICVGARFDDRVTGRLDAFSPGSKKIHIDIDPSSINKNVRVDLPIVGDAGSVLEDLIAAWKAANLQPNKAALTDWWAQIDQWRARQCLSYRRSDSVIKPQYAIERLYELTKDKDVYITTEVGQHQMWAAQFFRFEEPNRWMTSGGLGTMGYGLPAALGVQLAHPNSLVVDIAGEASIQMCIQELSTAIQFDLPVKIFILNNEWMGMVRQWQQLLHGERYSHSYSDSLPDFVKLAEAYGAVGIRCDNPAELDAKILEMVNSDKPVIFDCRVEKHENCLPMIPSGKAHNEMIMGEVEDIGNVIGEDGAGLV

SEQ ID NO: 138146 - DNA, 1854 bp, Streptomyces avermitilis
  CDS (1)..(1854): transl_table=11
atgaccgagcaggccaccggggcgcaccatccgcagccgcggccccgttccggaggacagcagtccgcccccgagcacgtcacggggcgggcgcagtccctcatccgctcgctcgaggaggtcggggcggagacggtattcggtatccccggcggcgcgatcctcccggcctacgacccgctgatggactcgaagcgcgtgcggcacgtgctcgtccggcacgagcagggcgcgggtcacgcggccaccggctacgcgcaggccaccggcaaggtcggcgtgtgcatggccaccagcggcccgggtgccaccaacctggtgaccccgatcgccgacgcccacatggactcggtgccgctcgtggcgatcaccgggcaggtcgcgtccaaggcgatcggtacggacgccttccaggaggcggacatcgtcggtatcaccatgccgatcaccaagcacaacttcctggtgaccaaggccgaggacatcccgcggacgatcgcggaggccttccacatcgcctccaccggccgtccgggcccggtcctcgtcgacatcgccaaggacgccctccaggccagaccaccttccagtggaccgcccaccccggacctgcccggctaccgcccggtgaccaagccgcacgccaagcagatccgcgaggccgccaagctgatcacccaggccaagcggcccgtcccctacgtcggcggcggcgtcctcaaggccaaggccaccgccgagctgaaggtcctcgcagaactcaccggagcgcccgtcaccaccaccctgatggcgctcggcgcattccccgacagccacaagctgcacgtgggaatgccgggcatgcacggtgcggtcaccgccgtcaccgcgctgcagaaggccgacctgatcgtcgccctcggagcccgcttcgacgaccgcgtcaccggcaagctggacacgttcgccccgtacgccaagatcgtgcacgccgacatcgacccggccgagatcggcaagaaccgcgccgcggacgtgccgatcgtcggagatgcccgcgaggtcatcgccgacctggtccaggccgtgcagaaggagcacagcgagggccacgccggcgactacaccgcctggtggaaggacctgaagccgtggcgcgacacgtacccgctgggctacgagcagccggacaacggctccgtgtcgccgcagcaggtcatcgagcgcatcgggcagctcgccccggagggcacgatcttcgcggcgggcgtcggccagcaccagatgtgggccgcgcactacgtcaagtacgagcagcccgcgacctggctgaactccggcggcgcccgaacgatgggctacgcggtcccggccgcgatgggcgccaaggccggtcagccggaccgtacggtctgggcgatcgacggcgacggctgcttccagatgaccaatcaggagctcaccacctgcgccctgaacaacatcccgatcaaggtcgccatcatcaacaacggcgccctcgggatggtccgccagtggcagaccctcttctacaaccagcgctactccaacaccgtgctgcacagcggcccgggccgcggacggaaagcagccgagcgccggcacccgcgtccccgacttcgtgaagctgtcggaggccatgggctgctacgcgatccgtgcgagtccccggacgacctcgacaaggtcatcgcggaggcgaactccgtcaacgaccgccccgtcgtgatcgacttcatcgtccacgaggacgcgatggtctggccgatggtcgccgcaggcacctccaacgacgaggtcatgttcgcccgggacgtccgccccgacttcggcgacaacgaagacgactga

SEQ ID NO: 138147 - protein, 617 aa, Streptomyces avermitilis
MTEQATGAHHPQPRPRSGGQQSAPEHVTGRAQSLIRSLEEVGAETVFGIPGGAILPAYDPLMDSKRVRHVLVRHEQGAGHAATGYAQATGKVGVCMATSGPGATNLVTPIADAHMDSVPLVAITGQVASKAIGTDAFQEADIVGITMPITKHNFLVTKAEDIPRTIAEAFHIASTGRPGPVLVDIAKDALQARPPSSGPPTPDLPGYRPVTKPHAKQIREAAKLITQAKRPVPYVGGGVLKAKATAELKVLAELTGAPVTTTLMALGAFPDSHKLHVGMPGMHGAVTAVTALQKADLIVALGARFDDRVTGKLDTFAPYAKIVHADIDPAEIGKNRAADVPIVGDAREVIADLVQAVQKEHSEGHAGDYTAWWKDLKPWRDTYPLGYEQPDNGSVSPQQVIERIGQLAPEGTIFAAGVGQHQMWAAHYVKYEQPATWLNSGGARTMGYAVPAAMGAKAGQPDRTVWAIDGDGCFQMTNQELTTCALNNIPIKVAIINNGALGMVRQWQTLFYNQRYSNTVLHSGPGRGRKAAERRHPRPRLREAVGGHGLLRDPCESPDDLDKVIAEANSVNDRPVVIDFIVHEDAMVWPMVAAGTSNDEVMFARDVRPDFGDNEDD

SEQ ID NO: 138148 - DNA, 1848 bp, Streptomyces cinnamonensis
  CDS (1)..(1848): transl_table=11
atgaccgagcaggccaccggggcccaccatccgcagccgcggccccgatcctcaggacagcagtccgcccccgtcgagcacgtcacgggtgcgcagtccctcattcgttctcttgaggaagtcggggccgacacggtgttcggcatccccggcggagccatcctcccggcctacgacccgatgatggactccacccgggtgcggcacgtcctggtgcggcacgagcagggcgcgggccacgcggccaccggatacgcgcaggccaccggcaaggtcggcgtctgcatggcgacgagcggccccggcgccaccaacctggtcaccccgatcgccgacgcccacatggactccgtcccgctggtcgcgatcaccggccaggtggcctccaaggcgatcggcacggacgccttccaggaggcggacatcgtcggcatcaccatgccgatcaccaagcacaacttcctggtcaccaaggccgaggacatcccgcgcaccatcgccgaggccttccacatcgcctcgaccgggcgcccgggccccgtcctcgtggacatcgcgaaggacgcgctgcaggcgcagacgacgttctcctggccgccgcagcaggacctgcccggctaccgcccggtgaccaagccgcacgccaagcagatccgcgaggccgccaagctcatcaccgcggccaagcgcccggtcctctacgtcggcggcggcgtcatcaaggcgcaggccaccgccgagctgaaggtcctggcagagctcaccggagcgcccgtcaccaccacactgatggcgctcggcgcattccccgacagccacccgctgcacgtgggaatgccgggcatgcacggtgcggtcaccgccgtcaccgcgctgcagaaggccgacctgatcgtcgccctcggagcccgcttcgacgaccgcgtcaccggcaagctggacagcttcgccccgttcgcgaagatcgtccacgccgacatcgacccggccgagatcggcaagaaccgcgccgccgacgtgccgatcgtcggcgacgcccgcgaggtcatcgccgacctcgtccaggccgtccagaccgagcacaccgagggccacacgggtgactacaccgcctggtggagcgacctcaaccgctggcgcgacacctaccccctcggctacacccagcccgaggacggctcgctctccccgcagcacgtcatcgagcgcgtcggccggctcgcacccgacgacacgatcttcgcggcgggcgtcggccagcaccagatgtgggccgcgcacttcatccagtacgagaagcccgccacctggctcaactccggcggcgcggggacgatgggctacgcggtcccggccgcgatgggcgccaaggccggacagcccgaccgcacggtctgggcgatcgacggcgacggctgcttccagatgaccaatcaggagctcaccacctgcgccctgaacaacatcccgatcaaggtcgccatcatcaacaacggcgccctcgggatggtccgccagtggcagaccctgttctacaaccagcgttactccaacaccgtcctgcacagcggtcccgaggacatcggccccaacaagggcacccgcgtccccgacttcgtgaagctgtcggaggccatgggctgcgtggcgctgcgctgcgagcgccccgaagacctcgacaaggtcatcgccgaggccaacgccatcaacgaccgccccgtcgtcgtcgacttcatcgtccacgaggacgcccaggtctggccgatggtcgccgccggcacctcgaacgacgaggtcatggccgcccgcggggtccgccccgacttcggcgacaacgaagacgactga

SEQ ID NO: 138149 - protein, 615 aa, Streptomyces cinnamonensis
MTEQATGAHHPQPRPRSSGQQSAPVEHVTGAQSLIRSLEEVGADTVFGIPGGAILPAYDPMMDSTRVRHVLVRHEQGAGHAATGYAQATGKVGVCMATSGPGATNLVTPIADAHMDSVPLVAITGQVASKAIGTDAFQEADIVGITMPITKHNFLVTKAEDIPRTIAEAFHIASTGRPGPVLVDIAKDALQAQTTFSWPPQQDLPGYRPVTKPHAKQIREAAKLITAAKRPVLYVGGGVIKAQATAELKVLAELTGAPVTTTLMALGAFPDSHPLHVGMPGMHGAVTAVTALQKADLIVALGARFDDRVTGKLDSFAPFAKIVHADIDPAEIGKNRAADVPIVGDAREVIADLVQAVQTEHTEGHTGDYTAWWSDLNRWRDTYPLGYTQPEDGSLSPQHVIERVGRLAPDDTIFAAGVGQHQMWAAHFIQYEKPATWLNSGGAGTMGYAVPAAMGAKAGQPDRTVWAIDGDGCFQMTNQELTTCALNNIPIKVAIINNGALGMVRQWQTLFYNQRYSNTVLHSGPEDIGPNKGTRVPDFVKLSEAMGCVALRCERPEDLDKVIAEANAINDRPVVVDFIVHEDAQVWPMVAAGTSNDEVMAARGVRPDFGDNEDD

SEQ ID NO: 138150 - DNA, 1941 bp, Helianthus annuus
  CDS (1)..(1941)
atggcagtccccctcactttcatctccggcaaaccaccattctccgccacaccatcacagttaactaccaatctttcactcccactcactcttctacccatcatcccttcaaagactcatgtttctaaacacctcataataaccaatgctattgctaaacattcacattcacataaagcttttgtggtctcgaggttcggtcctgacgaaccaaggaaaggatctgatgtcctagtggaagcactagagcgcgaaggggtaacgaacgtctttgcgtatccaggtggcgccaccttggagatccaccaagcgctaacacgatcaaccatcatacgcaacatcctccctcgccatgagcaaggcggtgtgtttgctgcagagggttacgcacgcgcctctggtttaaccggcgtatgcatatctacttccggtccaggcgctacaaacttggtcagtggccttgccgacgcccttcttgatagcgtcccaatcgtcgccattactggacaagtccctcgtaacatgattggtactgatgctttccaagaaacacccattgttgaggtttcacgctccattactaaacataactacctagttttgaatgtacaagatatcccacgtatagttcatgaagctttctttcttgcctcgtctggtcggcccggcccggttttaatcgacatcccaaaagacatacaacaacagttggttgttcccaattgggatgaacaacaacaacctatgaggttagatggttacatctccaggttaccaaagcctccaaacgagacgcatttacgacaaattgtacgcttcataaaggaatcgaagaggccggttttgtatgtgggtgggggttgtatgaactcgagtgatgaactgggtcgttttgtagagcttaccgggattccagtggcgaatactttgatgggacttggaacataccccgggtcgcatgatttgtcgcttcatatgctagggatgcatggcacggtttatgcgaattatgcgattgataaaagcgacttgttgttggcgtttggcgtccggtttgatgaccgtgtgacgggaaagattgaagcgtttgcgagtcgagcaaagattgttcatatcgatattgatcctgccgagatagggaagaataagcagcctcatttttcgatttgtggggatatcaaggcggctttacaaggactaaacaagattttggaaagaggtgaagatcttgatttcgatttctcaccttggaaggaggaagtaatgaatcagaaagcgagtaacccgttgagttataaaacgtttggggacgcgattccacctcagtatgcgatccaagtgctgaatgaagtgacgggtgggaacgcgatcataacgactggggtggggcagcatcaaatgtggtcagcccagttttacaagtacaataggcctaggcaatggctaacttcggctgggctaggtgctatggggttcgggctgcctgcagctatcggggcggctgttgcacgaccagatgcagtcgtggttgacatcgacggtgatggaagttttatgatgaatgttcaagaattggcgaccattcgtgtagagaatcttcctgttaaaatgatggtgcttaataaccaacacttgggtatggtggttcagtgggaagaccgtttttataaggcgaaccgcgcgcacacctacttaggaaacccgacaaacgaatcgggtatattcccaaatatgttgaagtttgctgaagcgtgtgacatccccgctgcgcgagtaaccaaaaagggagatgttagaaccgcgattcagaaaatgttggatacacccgggccttacttattggatgttatcgttccacatcaagaacatgttttacccatgatcccagccggagggggttttaacgatatcataactgacggcgatggcagaacacaatag

SEQ ID NO: 138151 - protein, 646 aa, Helianthus annuus
MAVPLTFISGKPPFSATPSQLTTNLSLPLTLLPIIPSKTHVSKHLIITNAIAKHSHSHKAFVVSRFGPDEPRKGSDVLVEALEREGVTNVFAYPGGATLEIHQALTRSTIIRNILPRHEQGGVFAAEGYARASGLTGVCISTSGPGATNLVSGLADALLDSVPIVAITGQVPRNMIGTDAFQETPIVEVSRSITKHNYLVLNVQDIPRIVHEAFFLASSGRPGPVLIDIPKDIQQQLVVPNWDEQQQPMRLDGYISRLPKPPNETHLRQIVRFIKESKRPVLYVGGGCMNSSDELGRFVELTGIPVANTLMGLGTYPGSHDLSLHMLGMHGTVYANYAIDKSDLLLAFGVRFDDRVTGKIEAFASRAKIVHIDIDPAEIGKNKQPHFSICGDIKAALQGLNKILERGEDLDFDFSPWKEEVMNQKASNPLSYKTFGDAIPPQYAIQVLNEVTGGNAIITTGVGQHQMWSAQFYKYNRPRQWLTSAGLGAMGFGLPAAIGAAVARPDAVVVDIDGDGSFMMNVQELATIRVENLPVKMMVLNNQHLGMVVQWEDRFYKANRAHTYLGNPTNESGIFPNMLKFAEACDIPAARVTKKGDVRTAIQKMLDTPGPYLLDVIVPHQEHVLPMIPAGGGFNDIITDGDGRTQ

SEQ ID NO: 138152 - DNA, 1947 bp, Helianthus annuus
  CDS (1)..(1947)
atggccgccatacatcctccccacccttccatcaccgccaaaccaccgccatcttccgccgccgccgtcgcactaccaccccacttcgcattctccatcacctccacttcccacaaacgccaccgcctccacatctccaacgtcctctccgactccaccaccaccaccggtgccaccaccgccaccattcacccaccgccattcgtctcccggtacgcgccagatcaaccgagaaaaggcgcagacgtgctcgtggaagctctagaacgggaaggtgtcaccgacgtcttcgcctaccccggcggcgcgtcaatggagatccaccaagctctcacgcgctcaaacaccatccgcaatgtcctcccccgtcacgaacagggcggcgtgttcgccgccgaaggctacgcacgtgcctccggtgttcccggcgtctgtatcgccacttccggtcccggagctacaaacctagttagtggtcttgctgacgcgctgttagacagtgtccccatggtggcaatcaccggtcaagttccccggagaatgatcggaaccgatgcgtttcaagaaaccccaattgttgaggtaacacgttcgattactaaacataattatcttgtgttggatgttgaggatattcccagaattgttagggaggctttttatcttgcgagttcgggtcgacccggcccagttttgatagatgtacctaaggatatacagcaacagttagtggtgccgaaatgggatgaaccgatgaggttaccgggttatttgtctagaatgccgaagcctcaatatgatgggcatttggaacagattgttaggttggtgggggaagcaaagaggcccgttttgtatgtgggtggtgggtgtttgaattcggatgacgagttgaggcggtttgtggagcttacggggattccggttgcgagtactttgatggggcttggagcgtacccggcttcgagtgatttgtcgcttcatatgcttgggatgcatggcacggtttatgcgaattatgcggttgataagagtgatttgttgcttgcgtttggtgtgcggtttgatgatcgtgtgacggggaagcttgaggcgtttgctagtagggcgaagattgttcatattgatattgatccggctgaaattgggaagaataaacagcctcatgtgtcgatttgtggggatatcaaggtcgcgttacagggtttgaacaagattttggaggagaaaaattctcttgatttttcaaattggaggaaggaattagatgaacaaaaagtgaaattcccgttgagctttaaaacgtttggcgaagcgattcctccacagtatgctattcatgtgctcgatgagttaacgggtgggaatgcaattattagcaccggtgtcgggcagcatcagatgtgggctgcccagttttacaaatacaacaaaccgagacaatggctgacgtcgggcgggctaggggcaatgggtttcgggctgcccgctgctatcggggcggccgttgcaagacccgatgcggtagtagttgatatcgacggtgatggaagctttatgatgaacgttcaagagttagccacaatccgtgttgaaaatctgccggttaagattttattacttaacaaccagcatttgggtatggtggttcagtgggaggatcggttttacaaggcgaatcgggctcatacctacttaggaaacccgtcaaaagagtcggaaatattcccgaacatgttgaagtttgctgaagcttgtgatattccagctgcgagagtaacccgaaagggggatctacgagcggctattcagaagatgttggatacaccggggccttacttgttggatgtcattgttccacatcaagaacacgtgttgcccatgatcccggctgggggaggtttctcggatgtgatcaccgagggtgatggcagaatgaaatattga

SEQ ID NO: 138153 - protein, 648 aa, Helianthus annuus
MAAIHPPHPSITAKPPPSSAAAVALPPHFAFSITSTSHKRHRLHISNVLSDSTTTTGATTATIHPPPFVSRYAPDQPRKGADVLVEALEREGVTDVFAYPGGASMEIHQALTRSNTIRNVLPRHEQGGVFAAEGYARASGVPGVCIATSGPGATNLVSGLADALLDSVPMVAITGQVPRRMIGTDAFQETPIVEVTRSITKHNYLVLDVEDIPRIVREAFYLASSGRPGPVLIDVPKDIQQQLVVPKWDEPMRLPGYLSRMPKPQYDGHLEQIVRLVGEAKRPVLYVGGGCLNSDDELRRFVELTGIPVASTLMGLGAYPASSDLSLHMLGMHGTVYANYAVDKSDLLLAFGVRFDDRVTGKLEAFASRAKIVHIDIDPAEIGKNKQPHVSICGDIKVALQGLNKILEEKNSLDFSNWRKELDEQKVKFPLSFKTFGEAIPPQYAIHVLDELTGGNAIISTGVGQHQMWAAQFYKYNKPRQWLTSGGLGAMGFGLPAAIGAAVARPDAVVVDIDGDGSFMMNVQELATIRVENLPVKILLLNNQHLGMVVQWEDRFYKANRAHTYLGNPSKESEIFPNMLKFAEACDIPAARVTRKGDLRAAIQKMLDTPGPYLLDVIVPHQEHVLPMIPAGGGFSDVITEGDGRMKY

SEQ ID NO: 138154 - DNA, 1941 bp, Helianthus annuus
  CDS (1)..(1941)
atggccgccatacatcctccccacccttccatcaccgccaaaccaccgccatcttccgccgccgccgtcgcactaccaccccacttcgcattctccatcacctccacttcccacaaacgccaccgcctccacatctccaacgtcctctccgactccaccaccaccaccggtgccaccaccattcacccaccgccattcgtctcccggtacgcgccagatcaaccgagaaaaggcgcagacgtgctcgtggaagctctagaacgggaaggtgtcaccgacgtcttcgcctaccccggcggcgcgtcaatggagatccaccaagctctcacgcgctcaaacaccatccgcaatgtcctcccccgtcacgaacagggcggcgtgttcgccgccgaaggctacgcacgtgcctccggtgttcccggcgtctgtatcgccacttccggtcccggagctacaaacctagttagtggtcttgctgacgcgctgttagacagtgtccccatggtggcaatcaccggtcaagttccccggagaatgatcggaaccgatgcgtttcaagaaaccccaattgttgaggtaacacgttcgattactaaacataattatcttgtgttggatgttgaggatattcccagaattgttagggaggctttttatcttgcgagttcgggtcgacccggcccagttttgatagatgtacctaaggatatacagcaacagttagtggtgccgaaatgggatgaaccgatgaggttaccgggttatttgtctagaatgccgaagcctcaatatgatgggcatttggaacagattgttaggttggtgggggaagcaaagaggcccgttttgtatgtgggtggtgggtgtttgaattcggatgacgagttgaggcggtttgtggagcttacggggattccggttgcgagtactttgatggggcttggagcgtacccggcttcgagtgatttgtcgcttcatatgcttgggatgcatggcacggtttatgcgaattatgcggttgataagagtgatttgttgcttgcgtttggtgtgcggtttgatgatcgtgtgacggggaagcttgaggcgtttgctagtagggcgaagattgttcatattgatattgatccggctgaaattgggaagaataaacagcctcatgtgtcgatttgtggggatatcaaggtcgcgttacagggtttgaacaagattttggaggagaaaaattctcttgatttttcaaattggaggaaggaattagatgaacaaaaagtgaaattcccgttgagctttaaaacgtttggcgaagcgattcctccacagtatgctattcatgtgctcgatgagttaacgggtgggaatgcaattattagcaccggtgtcgggcagcatcagatgtgggctgcccagttttacaaatacaacaaaccgagacaatggctgacgtcgggcgggctaggggcaatgggtttcgggctgcccgctgctatcggggcggccgttgcaagacccgatgcggtagtagttgatatcgacggtgatggaagctttatgatgaacgttcaagagttagccacaatccgtgttgaaaatctgccggttaagattttattacttaacaaccagcatttgggtatggtggttcagtgggaggatcggttttacaaggcgaatcgggctcatacctacttaggaaacccgtcaaaagagtcggaaatattcccgaacatgttgaagtttgctgaagcttgtgatattccagctgcgagagtaacccgaaagggggatctacgagcggctattcagaagatgttggatacaccggggccttacttgttggatgtcattgttccacatcaagaacacgtgttgcccatgatcccggctgggggaggtttctcggatgtgatcaccgagggtgatggcagaatgaaatattga

SEQ ID NO: 138155 - protein, 646 aa, Helianthus annuus
MAAIHPPHPSITAKPPPSSAAAVALPPHFAFSITSTSHKRHRLHISNVLSDSTTTTGATTIHPPPFVSRYAPDQPRKGADVLVEALEREGVTDVFAYPGGASMEIHQALTRSNTIRNVLPRHEQGGVFAAEGYARASGVPGVCIATSGPGATNLVSGLADALLDSVPMVAITGQVPRRMIGTDAFQETPIVEVTRSITKHNYLVLDVEDIPRIVREAFYLASSGRPGPVLIDVPKDIQQQLVVPKWDEPMRLPGYLSRMPKPQYDGHLEQIVRLVGEAKRPVLYVGGGCLNSDDELRRFVELTGIPVASTLMGLGAYPASSDLSLHMLGMHGTVYANYAVDKSDLLLAFGVRFDDRVTGKLEAFASRAKIVHIDIDPAEIGKNKQPHVSICGDIKVALQGLNKILEEKNSLDFSNWRKELDEQKVKFPLSFKTFGEAIPPQYAIHVLDELTGGNAIISTGVGQHQMWAAQFYKYNKPRQWLTSGGLGAMGFGLPAAIGAAVARPDAVVVDIDGDGSFMMNVQELATIRVENLPVKILLLNNQHLGMVVQWEDRFYKANRAHTYLGNPSKESEIFPNMLKFAEACDIPAARVTRKGDLRAAIQKMLDTPGPYLLDVIVPHQEHVLPMIPAGGGFSDVITEGDGRMKY

SEQ ID NO: 138156 - DNA, 1959 bp, Helianthus annuus
  CDS (1)..(1959)
atggcggctcctcccaacccttccatctccttcaaaccaccgtcacccgccgccgcactgccaccacgctccgccttcctgccccgtttcgcattacccatcacttccactacccaaaaacgacaccgtcttcacatctccaatgttctctccgactccaaatccaccaccaccaccactcaaccaccgttacaggcgcagccttttgtctcccgttacgcgccagatcaaccgagaaaaggcgcagacgtgttggtggaagctctagaacgggaaggtgtcaccgacgtcttcgcctaccccggcggcgcgtcaatggagatccaccaagctctcacgcgctcaaacaccatccgcaatgtcctcccccgtcacgaacagggcggcgtgttcgccgcagaaggctacgcacgcgcctccggtcttcccggcgtgtgtatcgccacttccggtcccggagctacgaacctagttagtggtcttgctgacgcgttgttagacagtgtccccatggtggcaatcaccggtcaagttccccggagaatgatcggaaccgatgtgtttcaagaaaccccaattgttgaggtaacacgttcgattactaaacataattatcttgtgttggatgttgaggatattcccagaattgttcgtgaggctttttatcttgcgagttcgggtcgacccggcccggttttgatagatgtaccgaaagatatacagcaacagttagtggtgccaaaatgggatgaaccgatgaggttaccgggttatttgtctagaatgccaaagcctcaatatgatggccatttggaacagattgttaggttggtgggggaagcgaaaaggccggttttgtatgtgggtggtgggtgtttgaattcggatgatgagttgaggcggtttgtggagcttacggggattccggttgcaagtactttgatggggctcggagcgtaccctgcttcgagtgatttgtcgcttcatatgcttgggatgcatgggactgtctatgcgaattatgcggttgataagagtgatttgttgcttgcgtttggggtgcggtttgatgaccgtgtgacggggaagcttgaggcgtttgctagtagggcgaagattgttcatattgatattgatccggctgaaattgggaagaataaacagccgcatgtgtcgatttgtggggatattaaggtcgcgttacagggtttgaacaagattttggaggaaaagaattcggtgactaatcttgatttttcgaactggagaaaggaattggatgaacaaaaagtgaagtttccgttgagctttaaaacgtttggcgaagcgattcctccacagcatgctattcaagttcttgatgagttaacgggcgggaatgcaattattagcaccggggtcgggcaacatcagatgtgggctgctcagttttacaaatacaacaaacctagacaatggctgacgtcgggcgggctaggggcaatgggttttgggctgcccgctgctatcggggcggccgttgcaagacctgatgcggtagtagttgacatcgacggtgacggaagctttatgatgaatgttcaagagttagccacaatccgtgttgaaaatctgccggttaagattttattacttaataatcagcatttgggtatggtggttcagtgggaggatcggttttacaaggcgaatagggctcatacctacttaggaaacccgtcaaaagagtcggaaatattccctaacatggtgaagtttgctgaagcctgtgatatcccggctgctcgagtgacccaaaaggcggatctacgagcagctattcagaagatgttggatacacccgggccttacttgttggatgtgattgtgccgcatcaagaacacgtgttgcccatgatcccggctggcggaggtttctcggatgtgatcaccgagggtgatggcagaacgaaatattga

SEQ ID NO: 138157 - protein, 652 aa, Helianthus annuus
MAAPPNPSISFKPPSPAAALPPRSAFLPRFALPITSTTQKRHRLHISNVLSDSKSTTTTTQPPLQAQPFVSRYAPDQPRKGADVLVEALEREGVTDVFAYPGGASMEIHQALTRSNTIRNVLPRHEQGGVFAAEGYARASGLPGVCIATSGPGATNLVSGLADALLDSVPMVAITGQVPRRMIGTDVFQETPIVEVTRSITKHNYLVLDVEDIPRIVREAFYLASSGRPGPVLIDVPKDIQQQLVVPKWDEPMRLPGYLSRMPKPQYDGHLEQIVRLVGEAKRPVLYVGGGCLNSDDELRRFVELTGIPVASTLMGLGAYPASSDLSLHMLGMHGTVYANYAVDKSDLLLAFGVRFDDRVTGKLEAFASRAKIVHIDIDPAEIGKNKQPHVSICGDIKVALQGLNKILEEKNSVTNLDFSNWRKELDEQKVKFPLSFKTFGEAIPPQHAIQVLDELTGGNAIISTGVGQHQMWAAQFYKYNKPRQWLTSGGLGAMGFGLPAAIGAAVARPDAVVVDIDGDGSFMMNVQELATIRVENLPVKILLLNNQHLGMVVQWEDRFYKANRAHTYLGNPSKESEIFPNMVKFAEACDIPAARVTQKADLRAAIQKMLDTPGPYLLDVIVPHQEHVLPMIPAGGGFSDVITEGDGRTKY

SEQ ID NO: 138158 - DNA, 1959 bp, Helianthus annuus
  CDS (1)..(1959)
atggcggctcctcccaacccttccatctccttcaaaccaccgtcacccgccgccgcactgccaccacgctccgccttcctgccccgtttcgcattacccatcacttccactacccaaaaacgacaccgtcttcacatctccaatgttctctccgactccaaatccaccaccaccaccactcaaccaccgttacaggcgcagccttttgtctcccgttacgcgccagatcaaccgagaaaaggcgcagacgtgttggtggaagctctggaacgggaaggtgtcaccgacgtcttcgcctaccccggcggcgcgtcaatggagatccaccaagctctcacgcgctcaaacactatccgcaatgtcctcccacgtcacgaacagggcggcgtgttcgccgccgaaggctacgcgcgcgcctccggtcttcccggcgtgtgtatcgccacttccggtcccggagctacgaacctagttagtggtcttgctgacgcgctgttagacagtgtccccatggtggcaatcaccggtcaagttccccggagaatgatcggaaccgatgcgtttcaagaaaccccaattgttgaggtaacacgttcgattactaaacataattatcttgtgttggatgttgaagatattcccagaattgttcgtgaggctttttatcttgcgagttcgggtcgacccggcccggttttgatagatgtaccgaaagatatacagcaacagttagtggtgccgaaatgggatgaaccgatgaggttaccgggttatttgtctagaatgccaaagcctcaatatgatgggcatttggaacagattgttaggttggtgggggaagcgaagaggccggttttgtatgtgggtggtgggtgtttgaattcggatgatgagttgaggcggtttgtggagcttacggggattccggttgcgagtactttgatggggctcggagcgtacccggcttcgagtgatttgtcgcttcatatgcttgggatgcatgggactgtctatgcgaattatgcggttgataagagtgatttgttgcttgcgtttggggtgcggtttgatgaccgtgtgacggggaagcttgaggcgtttgctagtagggcgaagattgttcatattgatattgatccggctgaaattgggaagaataaacagcctcatgtgtcgatttgtggtgatattaaggtcgcgttacagggtttgaacaagattttggaggaaaagaattcggtgactaatcttgatttttcgaactggagaaaggaattggatgaacaaaaagtgaagttcccgttgagctttaaaacgtttggcgaagcgattcctccacagtatgctattcaagttcttgatgagttaacgggcgggaatgcaattattagcaccggggtcgggcaacatcagatgtgggctgctcagttttacaaatacaacaaacctagacaatggctgacgtcgggcgggctaggggcaatgggttttgggctgcccgctgctatcggggcggccgttgcaagacctgatgcggtagtagttgacatcgacggtgacggaagctttatgatgaatgttcaagagttagccacaatccgtgttgaaaatctgccggttaagattttattacttaacaaccagcatttgggtatggtggttcagtgggaggatcggttttacaaggcgaatcgggctcatacctacttaggaaacccgtcaaaagagtcggaaatattccctaacatggtgaagtttgctgaagcctgtgatatcccggctgctcgagtgacccaaaaggcggatctacgagcagctattcagaagatgttggatacacccgggccttacttgttggatgtgattgtgccgcatcaagaacacgtgttgcccatgatcccggctggcggaggtttctcggatgtgatcaccgagggtgatggcagaacgaaatattga

SEQ ID NO: 138159 - protein, 652 aa, Helianthus annuus
MAAPPNPSISFKPPSPAAALPPRSAFLPRFALPITSTTQKRHRLHISNVLSDSKSTTTTTQPPLQAQPFVSRYAPDQPRKGADVLVEALEREGVTDVFAYPGGASMEIHQALTRSNTIRNVLPRHEQGGVFAAEGYARASGLPGVCIATSGPGATNLVSGLADALLDSVPMVAITGQVPRRMIGTDAFQETPIVEVTRSITKHNYLVLDVEDIPRIVREAFYLASSGRPGPVLIDVPKDIQQQLVVPKWDEPMRLPGYLSRMPKPQYDGHLEQIVRLVGEAKRPVLYVGGGCLNSDDELRRFVELTGIPVASTLMGLGAYPASSDLSLHMLGMHGTVYANYAVDKSDLLLAFGVRFDDRVTGKLEAFASRAKIVHIDIDPAEIGKNKQPHVSICGDIKVALQGLNKILEEKNSVTNLDFSNWRKELDEQKVKFPLSFKTFGEAIPPQYAIQVLDELTGGNAIISTGVGQHQMWAAQFYKYNKPRQWLTSGGLGAMGFGLPAAIGAAVARPDAVVVDIDGDGSFMMNVQELATIRVENLPVKILLLNNQHLGMVVQWEDRFYKANRAHTYLGNPSKESEIFPNMVKFAEACDIPAARVTQKADLRAAIQKMLDTPGPYLLDVIVPHQEHVLPMIPAGGGFSDVITEGDGRTKY

SEQ ID NO: 138160 - DNA, 1977 bp, Helianthus annuus
  CDS (1)..(1977)
atggcggctcctcccaacccttccatctccttcaaaccaccgtcacccgccgccgcactgccaccacgctccgccttcctcccccgtttcgcattacccatcacttccactacccaaaaacgacaccgtcttcacatctccaatgttctctccgactccaaatccaccaccaccaccaccaccaccaccaccaccactcaaccaccgttacaggcgcagccttttgtctcccgttacgcgcctgatcaaccgagaaaaggcgcagacgtgttggtggaagctctggaacgggaaggtgtcaccgacgtcttcgcctaccccggcggcgcgtcaatggagatccaccaagctctcacgcgctcaagcactatccgcaatgtgctcccacgtcacgaacagggcggcgtgttcgccgccgaaggctacgcacgcgcctccggtcttcccggcgtgtgtatcgccacttccggtcctggagctacgaacctagttagtggtcttgctgacgcgctgttagacagtgtccccatggtggcaatcaccggtcaagttctccggagaatgatcggaaccgatgcgtttcaagaaaccccaattgttgaggtaacacgttcgattactaaacataattatcttgtgttggatgttgaggatattcccagaattgttcgtgaggctttttatcttgcgagttcgggtcgacccggcccggttttgatagatgtaccgaaagatatacagcaacagttagtggtgccgaaatgggatgaaccgatgaggttaccgggttatttgtctagaatgccgaagcctcaatatgatgggcatttggaacagattgttaggttggtgggggaagcgaagaggccggttttgtatgtgggtggtgggtgtttgaattcggatgatgagttgaggcggtttgtggagcttacggggattccggttgcgagtactttgatggggcttggagcgtacccggcttcgagtgatttgtcgcttcatatgcttgggatgcatggtacggtttatgcgaattatgcggttgataagagtgatttgttgcttgcgtttggggtgcggtttgatgaccgtgtgacggggaagcttgaggcgtttgctagtagggcgaagattgttcatattgatattgatcctgctgaaattgggaaaaataaacagcctcatgtgtcgatttgtggggatattaaggtcgcgttacagggtttgaacaagattttggaggaaaagaattcggtgactaatcttgatttttcgaactggagaaaggaattggatgaacaaaaagtgaagttcccgttgagctttaaaacgtttggcgaagcgattcctccacagtatgctattcaagttcttgatgagttaacgggcgggaatgcaattattagcaccggggtcgggcaacatcagatgtgggctgctcagttttacaaatacaacaaacctagacaatggctgacgtcgggcgggctaggggcaatgggtttcggcctgcccgctgctatcggggcggccgttgcaagacctgatgcggtagtagttgacatcgacggtgacggaagctttatgatgaatgttcaagagttagccacaatccgtgttgaaaatctgccggttaagattttattacttaacaatcagcatttgggtatggtggttcagtgggaggatcggttttacaaggcgaatcgggctcatacctacttaggaaacccgtcaaaagagtcggaaatattccctaacatggtgaagtttgctgaagcctgtgatatcccggctgctcgagtgacccaaaaggcggatctacgagcagctattcagaagatgttggatacacccgggccttacttgttggatgtgattgtgccgcatcaagaacacgtgttgcccatgatcccggctggcggaggtttctcggatgtgatcaccgagggtgatggcagaacgaaatattga

SEQ ID NO: 138161 - protein, 658 aa, Helianthus annuus
MAAPPNPSISFKPPSPAAALPPRSAFLPRFALPITSTTQKRHRLHISNVLSDSKSTTTTTTTTTTTQPPLQAQPFVSRYAPDQPRKGADVLVEALEREGVTDVFAYPGGASMEIHQALTRSSTIRNVLPRHEQGGVFAAEGYARASGLPGVCIATSGPGATNLVSGLADALLDSVPMVAITGQVLRRMIGTDAFQETPIVEVTRSITKHNYLVLDVEDIPRIVREAFYLASSGRPGPVLIDVPKDIQQQLVVPKWDEPMRLPGYLSRMPKPQYDGHLEQIVRLVGEAKRPVLYVGGGCLNSDDELRRFVELTGIPVASTLMGLGAYPASSDLSLHMLGMHGTVYANYAVDKSDLLLAFGVRFDDRVTGKLEAFASRAKIVHIDIDPAEIGKNKQPHVSICGDIKVALQGLNKILEEKNSVTNLDFSNWRKELDEQKVKFPLSFKTFGEAIPPQYAIQVLDELTGGNAIISTGVGQHQMWAAQFYKYNKPRQWLTSGGLGAMGFGLPAAIGAAVARPDAVVVDIDGDGSFMMNVQELATIRVENLPVKILLLNNQHLGMVVQWEDRFYKANRAHTYLGNPSKESEIFPNMVKFAEACDIPAARVTQKADLRAAIQKMLDTPGPYLLDVIVPHQEHVLPMIPAGGGFSDVITEGDGRTKY

SEQ ID NO: 138162 - DNA, 1965 bp, Helianthus annuus
  CDS (1)..(1965)
atggcggctcctcccaacccttccatctccttcaaaccaccgtcacccgccgccgcactgccaccacgctccgccttcctcccccgtttcgcattacccatcacttccactacccaaaaacgacaccgtcttcacatctccaatgttctctccgactccaaatccaccaccaccaccaccaccactcaaccaccgttacaggcgcagccttttgtctcccggtacgcgccagatcaaccgagaaaaggcgcagacgtgttggtggaagctctggaacgggaaggtgtcaccgacgtcttcgcctaccccggcggcgcgtcaatggagatccaccaagctctcacgcgctcaaacactatccgcaatgtcctcccacgtcacgaacagggcggcgtgttcgccgccgaaggctacgcgcgcgcctccggtcttcccggcgtgtgtatcgccacttccggtcccggagctacgaacctagttagtggtcttgctgacgcgctgttagacagtgtccccatggtggcaatcaccggtcaagttccccggagaatgatcggaaccgatgcgtttcaagaaaccccaattgttgaggtaacacgttcgatcactaaacataattatcttgtgttggatgttgaggatattcccagaattgttcgtgaggctttttatcttgcgagttcgggtcgacccggcccggttttgatagatgtaccgaaagatatacagcaacagttagtggtgccgaaatgggatgaaccgatgaggttaccgggttatttgtctagaatgccgaagcctcaatatgatgggcatttggaacagattgttaggttggtgggggaagcgaagaggccggttttgtatgtgggtggtgggtgtttgaattcggatgatgagttgaggcggtttgtggagcttacggggattccggttgcgagtactttgatggggctcggagcgtacccggcttcgagtgatttgtcgcttcatatgcttgggatgcatggtacggtttatgcgaattatgcggttgataagagtgatttgttgcttgcgtttggggtgcggtttgatgaccgtgtgacggggaagcttgaggcgtttgctagtagggcgaagattgttcatattgatattgatccggctgaaattgggaagaataaacagcctcatgtgtcgatttgtggcgatattaaggtcgcgttacagggtttgaacaagattttggaggaaaagaattcggtgactaatcttgatttttcgaactggagaaaggaattggatgaacaaaaagtgaagttcccgttgagctttaaaacgtttggcgaagcgattcctccacagtatgctattcaagttcttgatgagttaacgggcgggaatgcaattattagcaccggtgtcgggcaacatcagatgtgggctgctcagttttacaaatacaacaaacctagacaatggctgacgtcgggcgggctaggggcaatgggttttgggctgcccgctgctatcggggcggccgttgcaagacctgatgcggtagtagttgacatcgacggtgacggaagctttatgatgaatgttcaagagttagccacaatccgtgttgaaaatctgccggttaagattttattactcaacaatcagcatttgggtatggtggttcagtgggaggatcggttttacaaggcgaatcgggctcatacctacttaggaaacccgtcaaaagagtcggaaatattccctaacatgttgaagtttgccgaagcctgtgatatcccggctgctcgagtgacccaaaaggcggatctacgagcagctattcagaagatgttggatacacccgggccttacttgttggatgtgattgtgccgcatcaagaacacgtgttgcccatgatcccggctggcggaggtttctcggatgtgatcaccgagggtgatggcagaacgaaatattga

SEQ ID NO: 138163 - protein, 654 aa, Helianthus annuus
MAAPPNPSISFKPPSPAAALPPRSAFLPRFALPITSTTQKRHRLHISNVLSDSKSTTTTTTTQPPLQAQPFVSRYAPDQPRKGADVLVEALEREGVTDVFAYPGGASMEIHQALTRSNTIRNVLPRHEQGGVFAAEGYARASGLPGVCIATSGPGATNLVSGLADALLDSVPMVAITGQVPRRMIGTDAFQETPIVEVTRSITKHNYLVLDVEDIPRIVREAFYLASSGRPGPVLIDVPKDIQQQLVVPKWDEPMRLPGYLSRMPKPQYDGHLEQIVRLVGEAKRPVLYVGGGCLNSDDELRRFVELTGIPVASTLMGLGAYPASSDLSLHMLGMHGTVYANYAVDKSDLLLAFGVRFDDRVTGKLEAFASRAKIVHIDIDPAEIGKNKQPHVSICGDIKVALQGLNKILEEKNSVTNLDFSNWRKELDEQKVKFPLSFKTFGEAIPPQYAIQVLDELTGGNAIISTGVGQHQMWAAQFYKYNKPRQWLTSGGLGAMGFGLPAAIGAAVARPDAVVVDIDGDGSFMMNVQELATIRVENLPVKILLLNNQHLGMVVQWEDRFYKANRAHTYLGNPSKESEIFPNMLKFAEACDIPAARVTQKADLRAAIQKMLDTPGPYLLDVIVPHQEHVLPMIPAGGGFSDVITEGDGRTKY

SEQ ID NO: 138164 - DNA, 1968 bp, Helianthus annuus
  CDS (1)..(1968)
atggcggctcctcccaacccttccatctccttcaaaccaccgtcacccgccgccgcactgccaccacgctccgccttcctcccccgtttcgcattacccatcacttccactacccaaaaacgacaccgtcttcacatctccaatgttctctccgactccaaatccaccaccaccaccaccaccaccactcaacgaccgttaccggtgcagccttttgtctcccgttacgcgccagatcaaccgagaaaaggcgcagacgtgttggtggaagctctggaacgggaaggtgtcaccgacgtcttcgcctaccccggcggcgcgtcaatggagatccaccaagctctcacgcgctcaagcactatccgcaatgtgctcccccgtcacgaacagggcggcgtgttcgccgccgaaggctacgcgcgcgcctccggtcttcccggcgtgtgtatcgccacttccggtcccggagctacgaacctagttagtggtcttgctgacgcgctgttagacagtgtccccatggtggcaatcaccggtcaagttccccggagaatgatcggaaccgatgcgtttcaagaaaccccaattgttgaggtaacacgttcgatcactaaacataattatcttgtgttggatgttgaggatattcccagaattgttcgtgaggctttttatcttgcgagttcgggtcgacccggcccggttttgatagatgtaccgaaagatatacagcaacagttagtggtgccgaaatgggatgaaccgatgaggttaccgggttatttgtctagaatgccgaagcctcaatatgatgggcatttggaacagattgttaggttggtgggggaagcgaagaggccggttttgtatgtgggtggtgggtgtttgaattcggatgatgagttgaggcggtttgtggagcttacggggattccggttgcgagtactttgatggggctcggagcgtaccctgcttcgagtgatttgtcgcttcatatgcttgggatgcatggtacggtttatgcgaattatgcggttgataagagtgatttgttgcttgcgtttggggtgcggtttgatgatcgtgtgacggggaagcttgaggcgtttgctagtagggcgaagattgttcatattgatattgatcctgctgaaattgggaagaataagcagcctcatgtgtcgatttgtggtgatattaaggtcgcgttacagggtttgaacaagattttggaggaaaagaattcggtgactaatcttgatttttcgacctggagaaaggaattggatgaacaaaaaatgaagttcccgttgagctttaaaacgtttggcgaagcgattcctccacagtatgctattcaagttcttgatgagttaacgggcgggaatgcaattattagcaccggtgtcgggcaacatcagatgtgggctgctcagttttacaaatacaacaaacctagacaatggctgacgtcgggcgggctaggggcaatgggtttcggcctgcccgctgctatcggggcggccgttgcaagacctgatgcggtagtagttgacatcgacggtgacggaagctttatgatgaatgttcaagagttagccacaatccgtgttgaaaatctgccggttaagattttattacttaacaaccagcatttgggtatggtggttcagtgggaggatcggttttacaaggcgaatcgggctcatacctacttaggaaacccgtcaaaagagtcggaaatattccctaacatggtgaagtttgctgaagcctgtgatatcccggctgctcgagtgacccaaaaggcggatctacgagcagctattcagaagatgttggatacacccgggccttacttgttggatgtgattgtgccgcatcaagaacacgtgttgcccatgatcccggctggcggaggtttctcggatgtgatcaccgagggtgatggcagaacgaaatattga

SEQ ID NO: 138165 - protein, 655 aa, Helianthus annuus
MAAPPNPSISFKPPSPAAALPPRSAFLPRFALPITSTTQKRHRLHISNVLSDSKSTTTTTTTTQRPLPVQPFVSRYAPDQPRKGADVLVEALEREGVTDVFAYPGGASMEIHQALTRSSTIRNVLPRHEQGGVFAAEGYARASGLPGVCIATSGPGATNLVSGLADALLDSVPMVAITGQVPRRMIGTDAFQETPIVEVTRSITKHNYLVLDVEDIPRIVREAFYLASSGRPGPVLIDVPKDIQQQLVVPKWDEPMRLPGYLSRMPKPQYDGHLEQIVRLVGEAKRPVLYVGGGCLNSDDELRRFVELTGIPVASTLMGLGAYPASSDLSLHMLGMHGTVYANYAVDKSDLLLAFGVRFDDRVTGKLEAFASRAKIVHIDIDPAEIGKNKQPHVSICGDIKVALQGLNKILEEKNSVTNLDFSTWRKELDEQKMKFPLSFKTFGEAIPPQYAIQVLDELTGGNAIISTGVGQHQMWAAQFYKYNKPRQWLTSGGLGAMGFGLPAAIGAAVARPDAVVVDIDGDGSFMMNVQELATIRVENLPVKILLLNNQHLGMVVQWEDRFYKANRAHTYLGNPSKESEIFPNMVKFAEACDIPAARVTQKADLRAAIQKMLDTPGPYLLDVIVPHQEHVLPMIPAGGGFSDVITEGDGRTKY

SEQ ID NO: 138166 - DNA, 2224 bp, Camelina microcarpa
  CDS (25)..(2022)
ctggcttcgtctttctcctgaaccatggcggcggcaacaacaacatcatcatcttcgatccccttctcaacaaaaccttcctcctccaaatcaccattaccaatctccagattcaccctcccattctccctaaacccaaacaaatcctcctcccgccgccgcggtatcaaatcaacctccctctcaatctccgccgtcctcaacacaacaaccaatgtctcaaccacaactcctccatcaaaaccaaccaaacccgaaaagaaaaaattcgtctcccgattcgctccagaccaaccccgcaaaggcgctgacatcctcgtcgaagctttagaacgtcaaggcgtagaaacagtcttcgcttacccaggaggtgcatcaatggagattcaccaagccttaactcgttcctcctcgatccgtaacgtccttccacgtcacgaacaaggaggcgtattcgcagctgaaggctacgctagatccacaggtaaaccaggtatctgtatagctacctcaggtcctggagctacaaatctcgttagcggattagccgatgccttgttagatagtgttcctcttgtagccatcacgggtcaagtccctcgtaggatgattggtactgatgcgtttcaagaaactcctatcgttgaggtgacgcgttcgattactaaacataactatcttgtgatggatgttgaagatattcctaggattgttgaggaagctttctttttagctacctctggtagacctggacctgttttggttgatgttcctaaagatattcaacagcagctcgcgattcctaattgggaacagtctatgaggttacctggttatatgtctaggatgcctaaacctccggaagattctcatttggagcagattgttaggttgatttctgagtctaagaagcctgtgttgtatgttggtggtggttgtttgaattcgagtgaggagttgggtaggtttgttgaacttacggggatccctgttgcgagtacgttgatgggtcttggtgcttatccttgtgatgatgagttgtcgttgcatatgcttggcatgcacgggactgtgtatgctaattactctgtggagcatagtgatttgttgttggcttttggggttaggtttgatgatcgtgtcactggtaagcttgaggcgtttgctagtagggcgaagattgttcacattgatattgactcggctgagattgggaagaacaagactcctcatgtgtctgtgtgtggagatgttaagctggctttgcaagggatgaacaaggttcttgagaaccgaggggaggagcttaagcttgattttggagtttggaggagtgagttgaacgaacagaaacaaaagttccctctgagcttcaagacgtttggtgaagctattcctcctcagtatgcgattcaggttcttgatgagctgactgatgggaaggctattataagcactggtgtcgggcaacatcaaatgtgggcggcgcagttttacaagtacaaaaaaccgaggcagtggctatcatcagcaggccttggagctatgggttttggacttcccgctgctattggagcgtccgttgcgaaccctgatgcggttgttgtggatattgacggagatggaagcttcataatgaatgtgcaagagctggccactatcagggtagagaatctcccagtgaagatacttatactaaacaaccagcatcttggcatggttatgcaatgggaggatcggttctacaaagctaaccgagctcacacatatcttggtaacccggcaacggaggacgagatattcccgaacatgctgcagtttgcatcagcctgcgggattccatcggcgagagtgacaaagaaagcagagctccgagaagctatccagaaaatgctggataccccaggaccatacttgttggatgtgatttgtccgcaccaagaacatgtgttgccgatgatcccaagtggcggcactttcaatgatgtcataacggaaggagatggccggacgaaatactgagagatgaaactctgaactgtttacggtctttgtatccatatggtaaaaacttagtttgcaatttccagtttgtgttttggtaatttgagttttttagttgttgaactgctcttttttgggtacctcagactactactgctactgttgtgtttgttttccttcatatataaataaataatcctgttcggttgaaaaaaaaaaa

SEQ ID NO: 138167 - protein, 665 aa, Camelina microcarpa
MAAATTTSSSSIPFSTKPSSSKSPLPISRFTLPFSLNPNKSSSRRRGIKSTSLSISAVLNTTTNVSTTTPPSKPTKPEKKKFVSRFAPDQPRKGADILVEALERQGVETVFAYPGGASMEIHQALTRSSSIRNVLPRHEQGGVFAAEGYARSTGKPGICIATSGPGATNLVSGLADALLDSVPLVAITGQVPRRMIGTDAFQETPIVEVTRSITKHNYLVMDVEDIPRIVEEAFFLATSGRPGPVLVDVPKDIQQQLAIPNWEQSMRLPGYMSRMPKPPEDSHLEQIVRLISESKKPVLYVGGGCLNSSEELGRFVELTGIPVASTLMGLGAYPCDDELSLHMLGMHGTVYANYSVEHSDLLLAFGVRFDDRVTGKLEAFASRAKIVHIDIDSAEIGKNKTPHVSVCGDVKLALQGMNKVLENRGEELKLDFGVWRSELNEQKQKFPLSFKTFGEAIPPQYAIQVLDELTDGKAIISTGVGQHQMWAAQFYKYKKPRQWLSSAGLGAMGFGLPAAIGASVANPDAVVVDIDGDGSFIMNVQELATIRVENLPVKILILNNQHLGMVMQWEDRFYKANRAHTYLGNPATEDEIFPNMLQFASACGIPSARVTKKAELREAIQKMLDTPGPYLLDVICPHQEHVLPMIPSGGTFNDVITEGDGRTKY

SEQ ID NO: 138168 - DNA, 1767 bp, Escherichia coli O157
  CDS (1)..(1767): transl_table=11
atgtgttttacacattttttccgtcaaacagtgaggcaggccatggagatgttgtctggagccgagatggtcgtccgatcgcttatcgatcagggcgttaaacaagtattcggttatcccggaggcgcagtccttgatatttacgatgcattgcataccgtgggtggtatcggtcatgttttagttcgtcatgagcaggcggcagtgcatatggccgatggtctggcgcgcgcgaccggggaagtcggcgtcgtgctggtaacgtcgggtccaggggcgaccaatgcgattaccggcatcgccaccgcttatatggattccattccattagttgtcctttccgggcaggtagcgacctcgttgataggttacgatgcctttcaggagtgcgacatggtggggatttcgcgaccggtggttaaacacagttttctggttaagcaaacggaagacattccgcaggtgctgaaaaaggctttctggctggcggcaagtggtcgcccaggaccagtggtcgttgatttaccgaaagatattcttaatccggcgaacaaattaccctatgtctggccggagtcggtcagtatgcgttcttacaatcccactactaccggacataaagggcaaattaagcgcgctctgcaaacgctggtggcggcaaaaaaaccggttgtctacgtaggcggtggggcaatcacggcgggctgccatcaacagctgaaagaaacggtggaggcgttaaatctgcccgttgtttcctcattgatggggctgggagcgtttccggcaacgcatcgtcaggcactgggcatgctgggaatgcacggtacctacgaagccaatatgacgatgcataacgcggatgtgatttttgctgtcggtgtccgctttgacgatcgcaccactaacaatctggcaaagtactgcccaaatgccactgttctgcatatcgatattgatcctacttccatttctaaaaccgtgactgcggatattccgattgtgggggatgctcgccaggtcctcgaacaaatgcttgaactcttgtcgcaagaatccgcccatcaaccgctggatgagatccgcgactggtggcagcagattgaacagtggcgcgctcgtcagtgcctgaaatatgacactcacagtgaaaagattaaaccgcaggcggtgatcgagactctttggcggttgacgaaggggggcgcttacgttacgtccgatgtcgggcagcaccagatgtttgctgcgctttattatccattcgacaaaccccgtcgttggatcaactccggtggcctcggcactatgggctttggtttacctgcggcactgggcgtcaaaatggcgctgccagaagaaaccgtggtttgcgtcactggcgacggcagtattcagatgaacattcaggaactgtctacagcgttgcaatatgaactgccggtgctggtggttaatcttaataaccgctatttggggatggtgaagcagtggcaggacatgatctattccggtcgtcattcacaatcttatatgcagtctttaccagacttcgtccgtctggcggaagcctatggtcacgtcgggatccagatctctcatccgcaagagctggaaagcaaacttagcgaggcgcttgaacaggtgcgtaataatcgcctggtatttgttgatgtcaccgtcgatggcagtgagcacgtctacccgatgcagattcgcgggggcggaatggatgaaatgtggttaagcaaaacggagagaacctga

SEQ ID NO: 138169 - protein, 588 aa, Escherichia coli O157
MCFTHFFRQTVRQAMEMLSGAEMVVRSLIDQGVKQVFGYPGGAVLDIYDALHTVGGIGHVLVRHEQAAVHMADGLARATGEVGVVLVTSGPGATNAITGIATAYMDSIPLVVLSGQVATSLIGYDAFQECDMVGISRPVVKHSFLVKQTEDIPQVLKKAFWLAASGRPGPVVVDLPKDILNPANKLPYVWPESVSMRSYNPTTTGHKGQIKRALQTLVAAKKPVVYVGGGAITAGCHQQLKETVEALNLPVVSSLMGLGAFPATHRQALGMLGMHGTYEANMTMHNADVIFAVGVRFDDRTTNNLAKYCPNATVLHIDIDPTSISKTVTADIPIVGDARQVLEQMLELLSQESAHQPLDEIRDWWQQIEQWRARQCLKYDTHSEKIKPQAVIETLWRLTKGGAYVTSDVGQHQMFAALYYPFDKPRRWINSGGLGTMGFGLPAALGVKMALPEETVVCVTGDGSIQMNIQELSTALQYELPVLVVNLNNRYLGMVKQWQDMIYSGRHSQSYMQSLPDFVRLAEAYGHVGIQISHPQELESKLSEALEQVRNNRLVFVDVTVDGSEHVYPMQIRGGGMDEMWLSKTERT

SEQ ID NO: 138170 - DNA, 2357 bp, Papaver rhoeas
  CDS (88)..(2076)
aagcagtggtatcaacgcagagtacgcggggcttctccttttctgcgtcttcttctcctctcaactttctctggagatctaacagcaatggcgtccatcactacaaatctcaaaaacccgttacctttatcatcttccttcaattcttcgaaaccccttttttctaaatccaatcttctctcaatcccaacaaaattcatttcttctcgtcctctacatatcacaaactcatcatatcgaaaccaatccaataaacccaaagctataaccactgaaacacccatttccaccacccacaccacctccgtatctcctcccccatttgtgtctagatacaaagatgatgaaccaagaaaaggggctgatgttctcgttgaagcattggaacgtgaaggagtaacaaatgtttttgcatacccaggtggtgcatcaatggagatacatcaagctttaactagatcttcaagtattagaaatgttctacctagacatgaacaaggtgggattttttctgctgaaggttatgctcgtgcttctggtttacctggcgtctgcattgctacttctggccctggtgctactaatcttgttagcggtcttgccgatgcattgctcgacagcatcccaattgttgctgtaactggtcaagtacctaggaggatgattggtactgatgcatttcaggaaactccaattgttgaggtaacaagatcgattactaaacataattaccttgtccttgatgttgaggatattcctcgtgttgtcaaagaagcattttttctagctacatcaggccgaccaggtccagtacttattgatgtccctaaagatgtgcaacaacagcttgtagtgcctaaatgggatacccctatgaaattacctgggtatatgtctcgagcacccaaatcacctgaacataacctattagaacaggttgttaggttaatttctgaatccaagaaacctgttttatatgttggtggtggctgtataaactatagtgaagaattgagacggtttgttgacttgactggaattcctgttgctagtactttgatgggtttgggtgctcattcgtgtactgatgtgctttctttacaaatgcttggaatgcatgggaccgtatacgcaaactatgcggttgataaagcggatttgttgcttgcctttggtgttagatttgatgatcgtgtgacaggaaagattgaagcattcgctagtaggtcaaaaattgtgcacattgatattgatccagctgaaattggaaagaacaaacaacctcatgtttctatctgtgcggatatgggagtggccttgaaggggttgaataagttgttagaagaaaagatgtccaaacttaaacttgattttgtgtcttggagagaggagcttatggaacaaaagaagaattacccattgagttacaagacttttggagaggcaattcctcctcagtatgcgatcaaggttttggacgaattaacagaagggaaggcgattattagcacgggtgttgggcagcatcagatgtgggctgcacaatggtacaagtatagaggacctcgtcaatggttaacttcagctggattaggcgctatgggttttgggttacctgctgcaattggagctgccgttgctaaacctgaagctattgttgtagacattgacggtgatggaagtttcatgatgaatgttcaggaattggctgcagtaagggtggagaatttaccagtcaaaattcttctgttgaataatcagcatttgggtatggttgttcagtgggaggatcggttttataaggcaaacagggctcacacatatcttgggaatccagctaaagacactgaaatcttcccagatatgttgaaatttgctgaagcatgtgatattccggctgctcgtgttacaaaagtgagtgaactgagggcggccattcagaagatgttggatacccctggaccatatttattggatgtcatagtgccacatcaagagcacgtgttgcctatgattcctgctggtggttcgtttaatgaggtgatcatcgaaggtgatggtagaacgaagtactgatcttcctgggacgattgtactgatacctctgtgcatatgttgaaattcaggcctgaagctaaaggtgtgggcttgtttttggtttatcgagttagtctgtcagcttgctaggtcttagttctttttcaatagcagcattagattagttgtttgttgttctatattaagcatgtctccctaaattatgtgtcctcaagcttgttcactatatgcaactcctacttgccctgctgctcaactttaatgtcgaactttttttcataaaatagcagttctttgtc

SEQ ID NO: 138171 - protein, 662 aa, Papaver rhoeas
MASITTNLKNPLPLSSSFNSSKPLFSKSNLLSIPTKFISSRPLHITNSSYRNQSNKPKAITTETPISTTHTTSVSPPPFVSRYKDDEPRKGADVLVEALEREGVTNVFAYPGGASMEIHQALTRSSSIRNVLPRHEQGGIFSAEGYARASGLPGVCIATSGPGATNLVSGLADALLDSIPIVAVTGQVPRRMIGTDAFQETPIVEVTRSITKHNYLVLDVEDIPRVVKEAFFLATSGRPGPVLIDVPKDVQQQLVVPKWDTPMKLPGYMSRAPKSPEHNLLEQVVRLISESKKPVLYVGGGCINYSEELRRFVDLTGIPVASTLMGLGAHSCTDVLSLQMLGMHGTVYANYAVDKADLLLAFGVRFDDRVTGKIEAFASRSKIVHIDIDPAEIGKNKQPHVSICADMGVALKGLNKLLEEKMSKLKLDFVSWREELMEQKKNYPLSYKTFGEAIPPQYAIKVLDELTEGKAIISTGVGQHQMWAAQWYKYRGPRQWLTSAGLGAMGFGLPAAIGAAVAKPEAIVVDIDGDGSFMMNVQELAAVRVENLPVKILLLNNQHLGMVVQWEDRFYKANRAHTYLGNPAKDTEIFPDMLKFAEACDIPAARVTKVSELRAAIQKMLDTPGPYLLDVIVPHQEHVLPMIPAGGSFNEVIIEGDGRTKY

SEQ ID NO: 138172 - DNA, 1863 bp, Streptomyces viridifaciens
  CDS (1)..(1863): transl_table=11
atgaccgagcaggccaccggggcccaccatccgcagccgcggccccgttccggaggacagcagtccgcccccgtcgagtacgtgacgggtgcgcagtccctgatccgctctcttgaggaggtcggcgcggacacggtattcggcattcccggtggtgcgatcctcccggcgtacgacccgctgatggactccacccgggtgcggcacgtcctggtccggcacgagcagggtgccggccatgcggccaccggttacgcgcaggccaccggcaaggtcggtgtctgcatggcgacgtcgggtccgggcgcgacgaatctggtcacgccgatcgcggacgcgcacatggactcggtgccgctggtcgcgatcaccgggcaggtggcctccaagtcgatcggcacggacgccttccaggaggcggacatcgtcggtatcaccatgccgatcaccaagcacaactggctggtcaccaaggccgaggacatcccgcgggtgatcgcgcaggcgttccatgtcgcctccaccggccgtcccggtccggtcctggtcgacatcgccaaggacgccctccaggccaggaccaccttctcctggccgcccgtgatggacctgcccggctaccgtccggtgaccaagccgcacgccaagcagatccgcgaggccgccaagctgatcacgaccgcccgccggccggtgctctacgtcggcggcggcgtcctcaaggcgcaggccacggccgagctgaaggtcctggccgagctgaccggcgcgcccgtcaccaccacactgatggcgctcggcgcgttccccgacagccacccgctgcacgtcggcatgccgggtatgcacggcagcgtcgccgcggtcaccgcgctgcagaaggccgacctgatcgtggccctcggtgcccgcttcgacgaccgcgtcaccggcagactggacagcttcgccccctacgccaagatcgtccacgcggacatcgacccggcggagatcggcaagaaccgtgccgcggacgtgccgatcgtcggtgacgcccgggaggtcatcgccgacctggtgcaggccgtgcagaaggagcacagcgagggccacaagggcgactacaccgcctggtggagcgacctgaaccggtggcgcgagacctacccgctcggctacgacctgcccgaggacggttcgctctccccgcagcaggtcatcgagcgcatcggccggctggcgcctcagggcacgatcttcgccgcgggcgtcggccagcaccagatgtggtccgcgcacttcatccagtacgaccggcccgcgacctggctcaactccggcggtgccgggacgatgggttacgcggtccccgccgccatgggcgccaaggccggccgcccggagcagacggtgtgggcgatcgacggtgacggctgcttccagatgaccaatcaggagctgaccacctgtgccctgaacaacatcccgatcaaggtcgccgtcatcaacaacggcgccctcgggatggtccgccagtggcagaccctcttctacaaccagcgctactccaacacccaactccgcggcgagcccagcgctcgggcgcacggcacccgggtgccggacttcgtgaagctgtccgaggcgatgggctgcgtcgcgatgcgctgtgaagacgcggctgaccttgacaccgtgatagcgaaggctaactcgatcaatgaccagcccgtagtggtcgacttcatcgtccacgaggacgcgatggtctggccgatggtcgccgccggcgcctccaacgacgagatcatggccgctcgcgacgttcgccctctcttcgatgacgccgctgaggacttcactgcagagactccgatgtga

SEQ ID NO: 138173 - protein, 620 aa, Streptomyces viridifaciens
MTEQATGAHHPQPRPRSGGQQSAPVEYVTGAQSLIRSLEEVGADTVFGIPGGAILPAYDPLMDSTRVRHVLVRHEQGAGHAATGYAQATGKVGVCMATSGPGATNLVTPIADAHMDSVPLVAITGQVASKSIGTDAFQEADIVGITMPITKHNWLVTKAEDIPRVIAQAFHVASTGRPGPVLVDIAKDALQARTTFSWPPVMDLPGYRPVTKPHAKQIREAAKLITTARRPVLYVGGGVLKAQATAELKVLAELTGAPVTTTLMALGAFPDSHPLHVGMPGMHGSVAAVTALQKADLIVALGARFDDRVTGRLDSFAPYAKIVHADIDPAEIGKNRAADVPIVGDAREVIADLVQAVQKEHSEGHKGDYTAWWSDLNRWRETYPLGYDLPEDGSLSPQQVIERIGRLAPQGTIFAAGVGQHQMWSAHFIQYDRPATWLNSGGAGTMGYAVPAAMGAKAGRPEQTVWAIDGDGCFQMTNQELTTCALNNIPIKVAVINNGALGMVRQWQTLFYNQRYSNTQLRGEPSARAHGTRVPDFVKLSEAMGCVAMRCEDAADLDTVIAKANSINDQPVVVDFIVHEDAMVWPMVAAGASNDEIMAARDVRPLFDDAAEDFTAETPM

SEQ ID NO: 138174 - DNA, 2013 bp, Arabidopsis thaliana
  CDS (1)..(2013)
atggcggcggcaacaacaacaacaacaacatcttcttcgatctccttctccaccaaaccatctccttcctcctccaaatcaccattaccaatctccagattctccctcccattctccctaaaccccaacaaatcatcctcctcctcccgccgccgcggtatcaaatccagctctccctcctccatctccgccgtgctcaacacaaccaccaatgtcacaaccactccctctccaaccaaacctaccaaacccgaaacattcatctcccgattcgctccagatcaaccccgcaaaggcgctgatatcctcgtcgaagctttagaacgtcaaggcgtagaaaccgtattcgcttaccctggaggtgcatcaatggagattcaccaagccttaacccgctcttcctcaatccgtaacgtccttcctcgtcacgaacaaggaggtgtattcgcagcagaaggatacgctcgatcctcaggtaaaccaggtatctgtatagccacttcaggtcccggagctacaaatctcgttagcggattagccgatgcgttgttagatagtgttcctcttgtagcaatcacaggacaagtccctcgtcgtatgattggtacagatgcgtttcaagagactccgattgttgaggtaacgcgttcgattacgaagcataactatcttgtgatggatgttgaagatatccctaggattattgaggaagctttctttttagctacttctggtagacctggacctgttttggttgatgttcctaaagatattcaacaacagcttgcgattcctaattgggaacaggctatgagattacctggttatatgtctaggatgcctaaacctccggaagattctcatttggagcagattgttaggttgatttctgagtctaagaagcctgtgttgtatgttggtggtggttgtttgaattctagcgatgaattgggtaggtttgttgagcttacggggatccctgttgcgagtacgttgatggggctgggatcttatccttgtgatgatgagttgtcgttacatatgcttggaatgcatgggacggtgtatgcgaattacgctgtggagcatagtgatttgttgttggcgtttggggtgaggtttgatgatcgcgtcacgggtaagcttgaggcttttgctagtagggctaagattgttcatattgatattgactctgctgagattgggaagaataagactcctcatgtgtctgtgtgtggtgatgtcaagctggctttgcaagggatgaataaggttcttgagaaccgagctgaggagcttaagcttgattttggagtttggaggaatgagttgaacgtacagaaacagaagtttccgttgagctttaagacgtttggggaagctattcctccacagtatgcgattaaggtccttgatgagttgactgatggaaaagccataataagtactggtgtcgggcaacatcaaatgtgggcggcgcagttctacaattacaagaagccaaggcagtggctatcatcaggaggccttggagctatgggttttggacttcctgctgccattggagcgtctgttgctaaccctgatgcaatagttgtggatattgacggagatggaagctttataatgaatgtgcaagagctggccacaatccgtgtagagcaacttccagtgaagatactcttattaaacaaccagcatcttggcatggttatgcaatgggaagatcggttctacaaggctaaccgagctcacacatttctcggggatccggctcaggaggacgagatattcccgaacatgttgctgtttgcagcagcttgcgggattccagcggcgagggtgacaaagaaagcagatctccgagaagctattcagacaatgctggatacaccaggaccttacctgttggatgtgatttgtccgcaccaagaacatgtgttgccgatgatcccgagtggtggcactttcaacgatgtcataacggaaggagatggccggattaaatactga

SEQ ID NO: 138175 - protein, 670 aa, Arabidopsis thaliana
MAAATTTTTTSSSISFSTKPSPSSSKSPLPISRFSLPFSLNPNKSSSSSRRRGIKSSSPSSISAVLNTTTNVTTTPSPTKPTKPETFISRFAPDQPRKGADILVEALERQGVETVFAYPGGASMEIHQALTRSSSIRNVLPRHEQGGVFAAEGYARSSGKPGICIATSGPGATNLVSGLADALLDSVPLVAITGQVPRRMIGTDAFQETPIVEVTRSITKHNYLVMDVEDIPRIIEEAFFLATSGRPGPVLVDVPKDIQQQLAIPNWEQAMRLPGYMSRMPKPPEDSHLEQIVRLISESKKPVLYVGGGCLNSSDELGRFVELTGIPVASTLMGLGSYPCDDELSLHMLGMHGTVYANYAVEHSDLLLAFGVRFDDRVTGKLEAFASRAKIVHIDIDSAEIGKNKTPHVSVCGDVKLALQGMNKVLENRAEELKLDFGVWRNELNVQKQKFPLSFKTFGEAIPPQYAIKVLDELTDGKAIISTGVGQHQMWAAQFYNYKKPRQWLSSGGLGAMGFGLPAAIGASVANPDAIVVDIDGDGSFIMNVQELATIRVEQLPVKILLLNNQHLGMVMQWEDRFYKANRAHTFLGDPAQEDEIFPNMLLFAAACGIPAARVTKKADLREAIQTMLDTPGPYLLDVICPHQEHVLPMIPSGGTFNDVITEGDGRIKY

SEQ ID NO: 138176 - DNA, 2642 bp, Saccharomycopsis fibuligera
  CDS (349)..(2523)
caagtttttctcttttctctttttggccattgctgaatattactcattcttcttcttctgtcttggacttggacttggacttggactactaccctggtactttactcacacttaatccctttgccaatctctgcaatttactcatcctcagtaatagtcctgaaataacagccaccagacattaacatttttttcaattttttggtcatcactcagcaccagacacattcactttgtcaagacacaagacacaagacacaagacacaagacaccaaatcagctcgaaaaaagaaacaaacaaacaaacaaataaataaataaatcttacacatacaaccaatataataatgctcaagtcgtccttataccgaggagctgctctcagggccgccataaaatccagttctggatcaagagcatccctttacaaagctgccgccatcactcttcacaacactaatgcatcttcttttgccatacgctccaatagctctcaagcagctctcagagaagaaccgtctccagcattcaaccagaccactcctgaagaaagcagaaaagcactaaacagtttcctcagccagcagcagagcaagtctgcttctgcttctgcttctgcttcttctgctgccagtgctgctgctgccggtgctgaatctgctgccgaaaaaaatgcttctgctgctgccgccgccatggacgactcatttgtcgggttgaccggtggtgagatctttcatgaaatgatgttgcgccataaagtcgacactgtgtttggctacccaggcggggccatcttgcctgtttacgatgccatttacgaatcgaaaaatttcaactttgttcttccgcgccacgagcagggcgctggccatatggccgaagggtacgctcgtgctactgggaagccaggggttgtcttggtcactagtggtcctggcgccaccaatgtcatcacgccaatggccgacgctttgatggacggcgtgcctcttgttgtgttcactggccaggtgccaactagtgccattggtaccgatgcgttccaagaagcggatgtcattggcatctccagatcttgcaccaagtggaacgttatggtcaagtccgttagcgagttgcctagaagaatcaacgaagcttttgaaatcgccaccagcggcagaccgggcccagtgcttgttgacttgcctaaagacgtcactgctgccatcttgagagatccaatcccaaccaactctaccttgccttccaagacccttgccagcatcacaaaacacgcggtgacccaattcgccgaggaaagcatcaaagaggcctccgacttgcttaacgttgccaaaaagcctgttctttatgtcggcgcagggattttgaatcatcctgatggcccaaagttgctcaaggagctcagcgaaaaggcccagattcccgtcaccaccaccatccaagccttgggcgcctttgaccagcgcggcgagaagtctctcgacatgttggggatgcacggttccgcattcgccaacttggccatgcaaaatgctgacttgattatcgccctcggggcaagattcgacgacagagtcattggcgcagtgagcaagtttgcaccaaatgccaaactcgccgctgctaatcaccgcggcgggatcatccactttgaaatctctccaaaaaacatcaacaaggtcgtggaagcagacgtcgccgttgaaggcgacgttacgcgcaacttgcgcaagttcctcccattgatcaaccaggtggaagccactgatcctgctagagccgcatggttcaagcaaatcgctagctggaaagctcaatatccatacgcgtacctcaaagaaaccccggaaagcaagataaaaccacaaaccttgattcaggagttgtccgacaagtgtctcgagttggacaaggacgtcgtggtcactaccggtgtcggccagcaccaaatgtgggccgctcagcactttacctggacccagcctcgcacctttatcacttctggcgggttgggcaccatgggctacgggttgccagccgccattggtgcccaagtcggtagaccagatgccgttgtgattgatattgacggtgatgctagtttcaacatgaccttgactgagctaagcactgccgcgcaattcaacatcccagtgaagatcattgtcttgaataacgaagagcaaggaatggtaacgcaatggcagtcgttgttctacgagcaccgttactcccacactcaccaatctaatccagatttcgtcaagttggccgaggcaatgggcgtgaaggcaatgaagttgacaaagcagggcgagttgcactcgactcttgacgagtttttacagtacagcgcaggcccagtcttgctcgaggttgaagtggaaaagaaggtgccggtcttgccaatggtgccgggcggcaagggcttggacgagttcatctactttgatccagaagttgaaagacagcaaaacgagcttagacgcaagcgcactaacggtaagcactgaggtcttgcagtgatgataatagtgaaagaaaataaaaaatcaaaaatcaaaaaaataaaaaattaaaaaaaaaaaaaaaaaaaaacctccggggcaatttggcttctatataattcttt

SEQ ID NO: 138177 - protein, 724 aa, Saccharomycopsis fibuligera
MLKSSLYRGAALRAAIKSSSGSRASLYKAAAITLHNTNASSFAIRSNSSQAALREEPSPAFNQTTPEESRKALNSFLSQQQSKSASASASASSAASAAAAGAESAAEKNASAAAAAMDDSFVGLTGGEIFHEMMLRHKVDTVFGYPGGAILPVYDAIYESKNFNFVLPRHEQGAGHMAEGYARATGKPGVVLVTSGPGATNVITPMADALMDGVPLVVFTGQVPTSAIGTDAFQEADVIGISRSCTKWNVMVKSVSELPRRINEAFEIATSGRPGPVLVDLPKDVTAAILRDPIPTNSTLPSKTLASITKHAVTQFAEESIKEASDLLNVAKKPVLYVGAGILNHPDGPKLLKELSEKAQIPVTTTIQALGAFDQRGEKSLDMLGMHGSAFANLAMQNADLIIALGARFDDRVIGAVSKFAPNAKLAAANHRGGIIHFEISPKNINKVVEADVAVEGDVTRNLRKFLPLINQVEATDPARAAWFKQIASWKAQYPYAYLKETPESKIKPQTLIQELSDKCLELDKDVVVTTGVGQHQMWAAQHFTWTQPRTFITSGGLGTMGYGLPAAIGAQVGRPDAVVIDIDGDASFNMTLTELSTAAQFNIPVKIIVLNNEEQGMVTQWQSLFYEHRYSHTHQSNPDFVKLAEAMGVKAMKLTKQGELHSTLDEFLQYSAGPVLLEVEVEKKVPVLPMVPGGKGLDEFIYFDPEVERQQNELRRKRTNGKH

SEQ ID NO: 138178 - DNA, 1719 bp, Bacillus stearothermophilus
  CDS (1)..(1719): transl_table=11
atggcaaagatgaacgtggaggagcagacgaagacgaagatgagcgggtcgatgatgttgatcgaagcgctgaaggcggagcaagtcgaagtcattttcggctatccgggcggcgcggtgcttccgctttacgatgagctgtataaagccggtgtgtttcacgtcttgacgcggcacgagcagggagccattcatgcggcggaagggtacgcccgcatttcgggaaaaccggggttcgtcatcgcgacatcggggccgggagcgaccaacatcgtcaccggactgaccgacgccatgatggattcgttgccgctcgtcgtgttcactgggcaagtagcgacgagcgtcatcggctcggacgcctttcaggaagccgatgtcgtcgggattacgatgccgattacgaaacacaactaccaagtgcgcgacatcagtgagctgccgaaaatcatcaaagaggcgttccacatcgcaacgactggacgaccgggaccggtgttgatcgatattccgaaagacatcacaacggccgaaggggaattcgattacgatgaagaagtttgcttgcctgggtatcagccgacgacacagccgaaccattggcaaatccgccgtcttgtcgaggcggtcagccagtcgaagcggccggtcattttagccggcgccggcgtcttgcacgccgacgcggcaaacgaattgcggcagtacgccgagcagcaaaacattccggtcgttcatacgcttcttggccttggcggcttcccagcagaccatccgcttttcttggggatggcgggcatgcacgggacgtacacggcgaacatggcgctctatgagtgcgatttgcttatcaacatcggcgcccgttttgccgaccgggtcactggcaacttgaaatacttcgcgccaaaggcgactgtcgctcatatcgacatcgacccggcggaaatcggcaaaaacgtgccgaccaaaattccgattgtcagcgacgccaaagcggcgctgcaggaactgatcgcccagcaaggcaaaccggctgacaacgcggcgtggctcgaacagctcaatgagtggaagcggcgcttcccgctccattacgagccggaagccgggacgatcaagccgcaaaagcttatcgaaatgatttacgaattgacaaatggcgaagcgatcgtcacaacggacgtcggccagcaccaaatgtgggcggcgcaatattacaagttcaatcgaccgaaccggtgggtgacgtccggggggctcggcacaatgggctttgggcttccggcagcgatcggcgcccagctggcggatcggagcgcgaccgtcgtttccatcgtcggcgacggcggtttccaaatgacgcttcaagagctgtcggtcattcgggagctggggttgccaattaaaatcgtcatcgtcaacaaccaggcgctcggcatggtgcggcaatggcaggaactgttttacgaaaaacggtactcccattcgctcatcccgaatcatccggattttgtaaaactcgctgaaccatacggcataccggggctgcgggcgaagacggaggcggaatcagctgaagtgttaaaacaagcgtttgcgatggacggcccggtgctgttggatttccacgtccgcgccgacgagaacgtgtatccgatggtgtcgcctggcaaagggcttcatgaaatggtgggggtgaaagcgtgcgaagaatga

SEQ ID NO: 138179 - protein, 572 aa, Bacillus stearothermophilus
MAKMNVEEQTKTKMSGSMMLIEALKAEQVEVIFGYPGGAVLPLYDELYKAGVFHVLTRHEQGAIHAAEGYARISGKPGFVIATSGPGATNIVTGLTDAMMDSLPLVVFTGQVATSVIGSDAFQEADVVGITMPITKHNYQVRDISELPKIIKEAFHIATTGRPGPVLIDIPKDITTAEGEFDYDEEVCLPGYQPTTQPNHWQIRRLVEAVSQSKRPVILAGAGVLHADAANELRQYAEQQNIPVVHTLLGLGGFPADHPLFLGMAGMHGTYTANMALYECDLLINIGARFADRVTGNLKYFAPKATVAHIDIDPAEIGKNVPTKIPIVSDAKAALQELIAQQGKPADNAAWLEQLNEWKRRFPLHYEPEAGTIKPQKLIEMIYELTNGEAIVTTDVGQHQMWAAQYYKFNRPNRWVTSGGLGTMGFGLPAAIGAQLADRSATVVSIVGDGGFQMTLQELSVIRELGLPIKIVIVNNQALGMVRQWQELFYEKRYSHSLIPNHPDFVKLAEPYGIPGLRAKTEAESAEVLKQAFAMDGPVLLDFHVRADENVYPMVSPGKGLHEMVGVKACEE

SEQ ID NO: 138180 - DNA, 2065 bp, Amaranthus powellii
  CDS (16)..(2025)
cttcaagcttcaacaatggcgtccacttcttcaaacccaccattttcctcttttactaaacctaacaaaatccctaatctgcaatcatccatttacgctatccctttttccaattctcttaaacccacttcttcttcttcaatcctccgccgccctcttcaaatctcatcatcttcttctcaatcacctaaacctaaacctccttccgctactataactcaatcaccttcgtctctcaccgatgataaaccctcttcttttgtttcccgatttagccctgaagaacccagaaaaggttgcgatgttctcgttgaagctcttgaacgtgaaggtgttaccgatgtttttgcttaccctggtggagcatccatggaaattcatcaagctcttactcgttctaatatcattagaaatgttcttcctcgacatgaacaaggtggggttttcgctgctgaaggctacgctcgtgctactggacgcgttggagtttgtattgccacttctggtccaggtgctactaatcttgtttctggtcttgctgatgcacttcttgactcagtccctcttgtcgccattactgggcaagttccccggcgtatgattggtactgatgcttttcaagagactccaattgttgaggtaactcgatccattaccaagcataattatttggtgttagatgttgaggatattcctagaattgttaaggaagctttctttttagctaattctggtagacctggacctgttttgattgatattcctaaagatattcagcaacaattagttgttcctaattgggaacagcccattaaattgggtgggtatctttctaggttgcctaaacccacttattctgctaatgaagagggacttcttgatcaaattgtaaggttagtgggtgagtctaagagacctgtgctgtatactggaggtgggtgtttgaattctagtgaagaattgaggaaatttgtcgaattgacaggtattccggtggctagtactttaatggggttgggggctttcccttgtactgatgatttatctcttcatatgttgggaatgcacgggactgtgtacgcgaattacgcggttgataaggccgatttgttgcttgcttttggggttaggtttgatgatcgagtgactggtaagctcgaggcgtttgctagccgggctaagattgtgcacatcgatatcgattctgctgaaatcgggaagaataagcaacctcatgtgtcgatttgtggtgatgttaaagtggcattacaggggttgaataagattttggaatctagaaaaggaaaggtgaaactggatttctctaattggagggaggagttgaatgagcagaaaaagaagtttcctttgagttttaagactttcggggatgcaattcctccgcaatacgccattcaggttcttgacgagttgacgaagggcgatgcggttgtaagtactggtgttgggcagcaccaaatgtgggctgcccaattctataagtaccgaaatcctcgccaatggctgacctcgggtggtttgggggctatggggtttggtctaccagctgctattggagctgctgttgctcgaccagatgcggtggttgtagacattgatggggatgggagtttcatcatgaatgttcaagagttggctacgattagggtagagaatctcccggttaaaatcatgctcttgaacaatcaacatttaggtatggttgttcaatgggaagatcgattttacaaagctaaccgggcacatacatacctcgggaatccttccaattcttccgaaatcttcccggatatgctcaaatttgctgaagcatgtgatataccagcagcccgtgttaccaaggtgagcgatttaaggactgcaattcaaacaatgttggatactccaggaccgtatctgctggatgtaatcgtaccacatcaggagcatgtgctgcctatgatccctagcggtgccgccttcaaggacaccataacagagggtgatggaagaagggcttattagttggttggagatccttatagaggagaagctttttgtagga

SEQ ID NO: 138181 - protein, 669 aa, Amaranthus powellii
MASTSSNPPFSSFTKPNKIPNLQSSIYAIPFSNSLKPTSSSSILRRPLQISSSSSQSPKPKPPSATITQSPSSLTDDKPSSFVSRFSPEEPRKGCDVLVEALEREGVTDVFAYPGGASMEIHQALTRSNIIRNVLPRHEQGGVFAAEGYARATGRVGVCIATSGPGATNLVSGLADALLDSVPLVAITGQVPRRMIGTDAFQETPIVEVTRSITKHNYLVLDVEDIPRIVKEAFFLANSGRPGPVLIDIPKDIQQQLVVPNWEQPIKLGGYLSRLPKPTYSANEEGLLDQIVRLVGESKRPVLYTGGGCLNSSEELRKFVELTGIPVASTLMGLGAFPCTDDLSLHMLGMHGTVYANYAVDKADLLLAFGVRFDDRVTGKLEAFASRAKIVHIDIDSAEIGKNKQPHVSICGDVKVALQGLNKILESRKGKVKLDFSNWREELNEQKKKFPLSFKTFGDAIPPQYAIQVLDELTKGDAVVSTGVGQHQMWAAQFYKYRNPRQWLTSGGLGAMGFGLPAAIGAAVARPDAVVVDIDGDGSFIMNVQELATIRVENLPVKIMLLNNQHLGMVVQWEDRFYKANRAHTYLGNPSNSSEIFPDMLKFAEACDIPAARVTKVSDLRTAIQTMLDTPGPYLLDVIVPHQEHVLPMIPSGAAFKDTITEGDGRRAY

SEQ ID NO: 138182 - DNA, 2065 bp, Amaranthus retroflexus
  CDS (16)..(2025)
cttcaagcttcaacaatggcgtccacttcttcaaacccaccattttcctcttttactaaacctaacaaaatccctaatctgcaatcatccatttacgctatccctttttccaattctcttaaacccacttcttcttcttcaatcctccgccgccctcttcaaatctcatcatcttcttctcaatcacctaaacctaaacctccttccgctactataactcaatcaccttcgtctctcaccgatgataaaccctcttcttttgtttcccgatttagtcctgaagaacccagaaaaggttgcgatgttctcgttgaagctcttgaacgtgaaggtgttaccgatgtttttgcttaccctggtggagcatccatggaaattcatcaagctcttactcgttctaatatcattagaaatgttcttcctcgacatgaacaaggtggggttttcgctgctgaaggctacgctcgtgctactggacgcgttggagtttgtattgccacttctggtccaggtgctactaatcttgtttctggtcttgctgatgcacttcttgactcagtccctcttgtcgccattactgggcaagttccccggcgtatgattggtactgatgcttttcaagagactccaattgttgaggtaactcgatccattaccaagcataattatttggtgttagatgttgaggatattcctagaattgttaaggaagctttctttttagctaattctggtagacctggacctgttttgattgatattcctaaagatattcagcaacaattagttgttcctaattgggaacagcccattaaattgggtgggtatctttctaggttgcctaaacccacttattctgctaatgaagagggacttcttgatcaaattgtaaggttagtgggtgagtctaagagacctgtgctgtatactggaggtgggtgtttgaattctagtgaagaattgaggaaatttgtcgaattgacaggtattccggtggctagtactttaatggggttgggggctttcccttgtactgatgatttatctcttcatatgttgggaatgcacgggactgtgtacgcgaattacgcggttgataaggccgatttgttgcttgcttttggggttaggtttgatgatcgagtgactggtaagctcgaggcgtttgctagccgggctaagattgtgcacatcgatatcgattctgctgaaatcgggaagaataagcaacctcatgtgtcgatttgtggtgatgttaaagtggcattacaggggttgaataagattttggaatctagaaaaggaaaggtgaaattggatttctctaattggagggaggagttgaatgagcagaaaaagaagtttcctttgagttttaagactttcggggatgcaattcctccgcaatacgccattcaggttcttgacgagttgacgaagggcgatgcggttgtaagtactggtgttgggcagcaccaaatgtgggctgcccaattctataagtaccggaatcctcgccaatggctgacctcgggtggtttgggggctatggggtttggtctaccagctgctattggagctgctgttgctcgaccagatgcggtggttgtagacattgatggggatgggagttttatcatgaatgttcaagagttggctacgattagggtagagaatctcccggttaaaatcatgctcttgaacaatcaacatttaggtatggttgttcaatgggaagatcgattttacaaagctaaccgggcacatacatacctcgggaatccttccaattcttccgaaatcttcccggatatgctcaaatttgctgaagcatgtgatataccagcagcccgtgttaccaaggtgagcgatttaagggctgcaattcaaacaatgttggatactccaggaccgtatctgctggatgtaatcgtaccacatcaggagcatgtgctgcctatgatccctagcggtgccgccttcaaggacaccataacagagggtgatggaagaagggcttattagttggttggagatccttatagaggagaagctttttgtagga

SEQ ID NO: 138183 - protein, 669 aa, Amaranthus retroflexus
MASTSSNPPFSSFTKPNKIPNLQSSIYAIPFSNSLKPTSSSSILRRPLQISSSSSQSPKPKPPSATITQSPSSLTDDKPSSFVSRFSPEEPRKGCDVLVEALEREGVTDVFAYPGGASMEIHQALTRSNIIRNVLPRHEQGGVFAAEGYARATGRVGVCIATSGPGATNLVSGLADALLDSVPLVAITGQVPRRMIGTDAFQETPIVEVTRSITKHNYLVLDVEDIPRIVKEAFFLANSGRPGPVLIDIPKDIQQQLVVPNWEQPIKLGGYLSRLPKPTYSANEEGLLDQIVRLVGESKRPVLYTGGGCLNSSEELRKFVELTGIPVASTLMGLGAFPCTDDLSLHMLGMHGTVYANYAVDKADLLLAFGVRFDDRVTGKLEAFASRAKIVHIDIDSAEIGKNKQPHVSICGDVKVALQGLNKILESRKGKVKLDFSNWREELNEQKKKFPLSFKTFGDAIPPQYAIQVLDELTKGDAVVSTGVGQHQMWAAQFYKYRNPRQWLTSGGLGAMGFGLPAAIGAAVARPDAVVVDIDGDGSFIMNVQELATIRVENLPVKIMLLNNQHLGMVVQWEDRFYKANRAHTYLGNPSNSSEIFPDMLKFAEACDIPAARVTKVSDLRAAIQTMLDTPGPYLLDVIVPHQEHVLPMIPSGAAFKDTITEGDGRRAY

SEQ ID NO: 138184 - DNA, 2263 bp, Arabidopsis thaliana
  CDS (40)..(2052)
ctctgtttctctatctcttgctcatctttctcctgaaccatggcggcggcaacaacaacaacaacaacatcttcttcgatctccttctccaccaaaccatctccttcctcctccaaatcaccattaccaatctccagattctccctcccattctccctaaaccccaacaaatcatcctcctcctcccgccgccgcggtatcaaatccagctctccctcctccatctccgccgtgctcaacacaaccaccaatgtgacaaccactccctctccaaccaaacctaccaaacccgaaacattcatctcccgattcgctccagatcaaccccgcaaaggcgctgatatcctcgtcgaagctttagaacgtcaaggcgtagaaaccgtattcgcttaccctggaggtgcatcaatggagattcaccaagccttaacccgctcttcctcaatccgtaacgtccttcctcgtcacgaacaaggaggtgtattcgcagcagaaggatacgctcgatcctcaggtaaaccaggtatctgtatagccacttcaggtcccggagctacaaatctcgttagcggattagccgatgcgttgttagatagtgttcctcttgtagcaatcacaggacaagtccctcgtcgtatgattggtacagatgcgtttcaagagactccgattgttgaggtaacgcgttcgattacgaagcataactatcttgtgatggatgttgaagatatccctaggattattgaggaagctttctttttagctacttctggtagacctggacctgttttggttgatgttcctaaagatattcaacaacagcttgcgattcctaattgggaacaggctatgagattacctggttatatgtctaggatgcctaaacctccggaagattctcatttggagcagattgttaggttgatttctgagtctaagaagcctgtgttgtatgttggtggtggttgtttgaattctagcgatgaattgggtaggtttgttgagcttacggggatccctgttgcgagtacgttgatggggctgggatcttatccttgtgatgatgagttgtcgttacatatgcttggaatgcatgggactgtgtatgcaaattacgctgtggagcatagtgatttgttgttggcgtttggggtaaggtttgatgatcgtgtcacgggtaagcttgaggcttttgctagtagggctaagattgttcatattgatattgactcggctgagattgggaagaataagactcctcatgtgtctgtgtgtggtgatgttaagctggctttgcaagggatgaataaggttcttgagaaccgagcggaggagcttaagcttgattttggagtttggaggaatgagttgaacgtacagaaacagaagtttccgttgagctttaagacgtttggggaagctattcctccacagtatgcgattaaggtccttgatgagttgactgatggaaaagccataataagtactggtgtcgggcaacatcaaatgtgggcggcgcagttctacaattacaagaaaccaaggcagtggctatcatcaggaggccttggagctatgggatttggacttcctgctgcgattggagcgtctgttgctaaccctgatgcgatagttgtggatattgacggagatggaagctttataatgaatgtgcaagagctagccactattcgtgtagagaatcttccagtgaaggtacttttattaaacaaccagcatcttggcatggttatgcaatggcaagatcggttctacaaagctaaccgagctcacacatttctcggggatccggctcaggaggacgagatattcccgaacatgttgctgtttgcagcagcttgcgggattccagcggcgagggtgacaaagaaagcagatctccgagaagctattcagacaatgctggatacaccaggaccttacctgttggatgtgatttgtccgcaccaagaacatgtgttgccgatgatcccgagtggtggcactttcaacgatgtcataacggaaggagatggccggattaaatactgagagatgaaaccggtgattatcagaaccttttatggtctttgtatgcatatggtaaaaaaacttagtttgcaatttcctgtttgttttggtaatttgagtttcttttagttgttgatctgcctgctttttggtttacgtcagactactactgctgtttgtttggtttcctttctttcattttataaataaataatccggttcggtttactcc

SEQ ID NO: 138185 - protein, 670 aa, Arabidopsis thaliana
MAAATTTTTTSSSISFSTKPSPSSSKSPLPISRFSLPFSLNPNKSSSSSRRRGIKSSSPSSISAVLNTTTNVTTTPSPTKPTKPETFISRFAPDQPRKGADILVEALERQGVETVFAYPGGASMEIHQALTRSSSIRNVLPRHEQGGVFAAEGYARSSGKPGICIATSGPGATNLVSGLADALLDSVPLVAITGQVPRRMIGTDAFQETPIVEVTRSITKHNYLVMDVEDIPRIIEEAFFLATSGRPGPVLVDVPKDIQQQLAIPNWEQAMRLPGYMSRMPKPPEDSHLEQIVRLISESKKPVLYVGGGCLNSSDELGRFVELTGIPVASTLMGLGSYPCDDELSLHMLGMHGTVYANYAVEHSDLLLAFGVRFDDRVTGKLEAFASRAKIVHIDIDSAEIGKNKTPHVSVCGDVKLALQGMNKVLENRAEELKLDFGVWRNELNVQKQKFPLSFKTFGEAIPPQYAIKVLDELTDGKAIISTGVGQHQMWAAQFYNYKKPRQWLSSGGLGAMGFGLPAAIGASVANPDAIVVDIDGDGSFIMNVQELATIRVENLPVKVLLLNNQHLGMVMQWQDRFYKANRAHTFLGDPAQEDEIFPNMLLFAAACGIPAARVTKKADLREAIQTMLDTPGPYLLDVICPHQEHVLPMIPSGGTFNDVITEGDGRIKY

SEQ ID NO: 138186 - DNA, 1995 bp, Lolium multiflorum
  CDS (71)..(1993)
atccaaagaattcggcacgagcgccgccgcctccgcgacacgcgccgccgcgacagccgccgccgccgccatggcaactgccacttcgacagccgtcgccttctcgggagccaccgccaccttgcccaaaccacgcactctcccgcgtcacctactgccctcctcacgccgcgccctcgccgcccccatcaggtgctccgcggtgtccccatcgccctcgcccgcccctcccgccaccgcgctccgcccatggggcccatccgagccccgcaagggcgccgacatcctcgtcgaggccctcgagcgctgcggcatcagcgacgtcttcgcctacccgggcggagcctcaatggagatccaccaggcgctcacgagctcgccgctcatcaccaaccacctcttccgccacgagcagggcgaggccttcgcggcgtccgggtacgcgcgggcgtccggccgcgtcggggtctgcgtcgccacctccggcccgggggccaccaacctcgtctccgcgctcgccgacgccctcctcgactccatccccatggtggccatcacggggcaggtccagcgccgcatgatcggcacggacgccttccaggagacgcccatcgtcgaggtcacccgctccatcaccaagcacaactacctcgtcctcgacgtcgaggacatcccccgcgttatccaggaggccttcttcctcgcctcctctggccggccggggcccgtgctcgtcgacatccccaaggacatccagcagcagatggctgtgcccgtctgggacgcgcccatgagtctgccaggctacattgcccgcctgcctaagccgccggctactgaattgctcgagcaggtcctgcgtctggttggcgaggaaagacgcccgattctctatgttggcggtggctgctctgcgtctggggaggacgtgcgccgctttgttgagctcaccgggatccctgttacaactaccctcatgggtcttggcaacttccccagcgacgacccgctgtctctgcgtatgcttgggatgcatggcactgtgtacgcaaactacgccgtcgataaggctgacctgttgcttgcatttggcgtcaggtttgatgatcgcgtcactgggaaaatcgaggcttttgcaagcaggtccaagatcgtgcacattgacattgatccagctgagattggcaagaacaagcagccgcatgtctccatttgcgcagatgtcaagctcgctttgcagggcctgaatgctgtgctaactgggagcaaatgtgacaagagtttcgattttgcttcgtggcatgacgagttggagcagcagaaaagggagtttcctctgggatacaaaactttcggggaggccatcccaccgcagtatgctatccaggtactggatgagctcaccaaaggtgaggccatcattgccactggtgttgggcagcaccagatgtgggcggctcagtattacacttacaagcgcccacggcaggtgctgtcttcggctggtctgggggcaatggggtttgggttgccggctgcagctggcaccgctgtggctaacccaggtgtcacagttgttgacattgatggggatggtagcttcctcatgaacattcaggagttagcgctgattcgcattgagaacctcccagttaaggtgatgatattgaacaaccagcatcttggaatggtggtgcagtgggaggacaggttttacaaggccaatcgggcgcatacataccttgggaacccagaaaatgagagtgagatatatccagattttgtgaccattgctaaagggttcaatgttcctgcagttcgtgtgacaaagaggagtgaagtccgtgcagcgatcaagaagatgcttgagactcctgggccatacttgttggatatcatcgtccctcaccaggagcatgtgctgcctatgatccctagcggtggtgctttcaaggacattatcatggaaggtgatggcaggatttcgtattaaac

SEQ ID NO: 138187 - protein, 640 aa, Lolium multiflorum
MATATSTAVAFSGATATLPKPRTLPRHLLPSSRRALAAPIRCSAVSPSPSPAPPATALRPWGPSEPRKGADILVEALERCGISDVFAYPGGASMEIHQALTSSPLITNHLFRHEQGEAFAASGYARASGRVGVCVATSGPGATNLVSALADALLDSIPMVAITGQVQRRMIGTDAFQETPIVEVTRSITKHNYLVLDVEDIPRVIQEAFFLASSGRPGPVLVDIPKDIQQQMAVPVWDAPMSLPGYIARLPKPPATELLEQVLRLVGEERRPILYVGGGCSASGEDVRRFVELTGIPVTTTLMGLGNFPSDDPLSLRMLGMHGTVYANYAVDKADLLLAFGVRFDDRVTGKIEAFASRSKIVHIDIDPAEIGKNKQPHVSICADVKLALQGLNAVLTGSKCDKSFDFASWHDELEQQKREFPLGYKTFGEAIPPQYAIQVLDELTKGEAIIATGVGQHQMWAAQYYTYKRPRQVLSSAGLGAMGFGLPAAAGTAVANPGVTVVDIDGDGSFLMNIQELALIRIENLPVKVMILNNQHLGMVVQWEDRFYKANRAHTYLGNPENESEIYPDFVTIAKGFNVPAVRVTKRSEVRAAIKKMLETPGPYLLDIIVPHQEHVLPMIPSGGAFKDIIMEGDGRISY

SEQ ID NO: 138188 - DNA, 2204 bp, Buchnera aphidicola
  CDS (445)..(2166): transl_table=11
ttttaaccgagctaaaaaattagctattaaagaaaaattagctgtgtgtttgataaaaagacacaaatctgtcttatttacttggatatcacctcaatttcgactttttttaaaaaatatattttaaaaacatattttatataaataaaactaataatacgtaatacttcactaaagtaatagtgtcaaattttaataattataaataatcaataaatattttaaaaaaagtcaaaactaaaatatatcgatttacatttaaaaacaaacattttatcataaacttaacaagttaattgaaaataataatttatatatctactatagaacaatttatataaataaactgcaataatcattttacatataatattaagtacacgcatttaatattatatgtaaaactatattaaaataaatattaaaattataatcggagaaaaaatggaaatgttatcaggatctgaaatgggtattcaatcactgatcgatcaaggtattaaatacatttttggttatcctggaggagcagtactagacatatatgactctctgaaatcaactaataaaattaaacacatattagtacgtcacgaacaaggtgctactcatatggctgatggatatgcacgagctacggggaaggtaggagtagttttagtcacttctggacctggtgcaactaatgctatcacaggtattgctacagcatatatggattcaattcctatagtagtaatatcaggacaagtagcgtcgtacttaataggatatgatgcatttcaagaatgcgatatgataggaatttcccgaccaatagttaaacacagtttcttagtaaaaaaaacagaagatattcctattacttttaaaaaagcattttggcttgcgtcaagtggtcgacctggtccaattgtaattgatttacctaaagacattcttaactcatgtaagaaaaaaccatatgtatggccaactaaaatcaatatacgttcttataatccaataattaaaggccattttggacaaataaaaaaagctattgatgctttaaaactagcaaagcaacctataatttacgtaggaggaggagttattagttcgaacagttacaacgaactaaaagaatttgcagaaagacttaatattccagtgactacttctttaatggcacttggagcatttccaggcaaccatccacaaaatttaaatatgttaggtatgcacggtacttatgaagctaacatggctatgcataactctgacttaatcttagcaataggagttcgatttgacgacagaactaccaataacgttgataaatattgtccaaatgctacgattatacatattgatatcgatcctacatctatatcaaaaactattactgcacatatcccaattataggaaatgcaaaaaacattttacaacaaatgctacaacttataaacgatagcatgtttgtaaaagaactttattgcttaaaaaaatggtggatcaaaattaatcattggaaaagtatgaatagtttacatattaacatagataacgtaaagattaaaccacaaagcgttatcaaaactatctggaaacttactaaaggagaagcttatattgcatccgatgttggacaacatcaaatgtttgcagcattatattattcctttcaaaaacctagaagatggattaattcaggtggattaggtactatgggatttggtttgccagcagctttaggcgccaaactagcattaccaaaaaagacaattatttgtatcactggagatggaagtattcagatgaatattcaagaactatctacagcgatgcaatatgagttaccaatattaatattaaatttaaacaatagatcattaggtatggtacgacaatggcaagacataatctattcgggtcgacattctcactcttacatgaaatccttaccaaatttcgttcaattagctgaatcatatggacatataggaatatacattgaacatcctaaagacttagaaaaaaaattaagaatagctttagaacaattaaaaaaaggacacttagttctcgttgacgtaataattgatgcttcggaacatgtatatcccatgcaaatccgaggtggaggaatgaatagtatgatattaagaaaaaacggaaaataaatactatgaaaagaattatatctattttattagaaaac

SEQ ID NO: 138189 - protein, 573 aa, Buchnera aphidicola
MEMLSGSEMGIQSLIDQGIKYIFGYPGGAVLDIYDSLKSTNKIKHILVRHEQGATHMADGYARATGKVGVVLVTSGPGATNAITGIATAYMDSIPIVVISGQVASYLIGYDAFQECDMIGISRPIVKHSFLVKKTEDIPITFKKAFWLASSGRPGPIVIDLPKDILNSCKKKPYVWPTKINIRSYNPIIKGHFGQIKKAIDALKLAKQPIIYVGGGVISSNSYNELKEFAERLNIPVTTSLMALGAFPGNHPQNLNMLGMHGTYEANMAMHNSDLILAIGVRFDDRTTNNVDKYCPNATIIHIDIDPTSISKTITAHIPIIGNAKNILQQMLQLINDSMFVKELYCLKKWWIKINHWKSMNSLHINIDNVKIKPQSVIKTIWKLTKGEAYIASDVGQHQMFAALYYSFQKPRRWINSGGLGTMGFGLPAALGAKLALPKKTIICITGDGSIQMNIQELSTAMQYELPILILNLNNRSLGMVRQWQDIIYSGRHSHSYMKSLPNFVQLAESYGHIGIYIEHPKDLEKKLRIALEQLKKGHLVLVDVIIDASEHVYPMQIRGGGMNSMILRKNGK

SEQ ID NO: 138190 - DNA, 2943 bp, Buchnera aphidicola
  CDS (486)..(2201): transl_table=11
taatttagtttctgttagtgttatttcttcaactgctttagaagcagacggatgggattcaggattacttatcatgggatttaaaaaagcaaaaaaattaatactaaaagaaaaattagcactttgtcttatcactcaaaaaaaaaatactttttcaacatggacatctcctcaatttagaaaatttttacttaagtaaaatacttttaaatcatgacaataattaatcaatataaattgcatttaattagattctactaattgataatatctgatatatttgtaataataaaaaattacatcattaacaaaaataatagtttttatttttaacataagaactatttgaaaaatatcgaaaaactattttaaaaattttttatattaaatagcgctaattttatctagataaactacaggataatctgatagatagcgaactaggaaataaaacctaatactaaattagtatcctggaggaaaaaatggaaatattgtcaggagccgaaatggtcgttagatcattaattaatcaaggaatacaacatatatttggttatcctggtggagctgtactagatatttatgacgctctaaaaactattggtggaattgaacatattctagttagacacgaacaagcagcaactcatatggctgatggatatgcccgttctactggtaaaacaggagtggtattagtcacttcaggaccaggtgcaactaatgctattactggcatcgctactgcatatatggactcaattcctatggtggtaatatcaggtcaagttgcttcattattaattggttatgatgcttttcaagaatgcgatatgatcggtgtttctcgtccaatagtcaaacatagttttttagttaaaaaaactgaagatataccaattacttttaaaaaagctttttggttagcagaaagtggacgtccgggaccaatcgttattgatttaccaaaagatattttaaagaaaaaaagtaaatatttttttaaatggccagatagtgttaatatcagatcatataatcccacaactaaggggcataaaaaacaaattcaaaaagctttatatagattactcaaagctaaacaaccagttatttatgctggcgggggggtaattagttccaaatgtcataaagaattacttgaatttgcagaaaaaacaaattgtcctgtgactacttctttaatgggattaggtgtcttcccaggaaatcatcctcaaagtattgctatgttgggtatgcatggtacttatgaagcaaatatggcaatgcatcatgctgatgtaatttttgctattggtgttagattcgatgatcgaacaacaaataatttaaaaaaatattgtcctaacgctattgttgtacatattgatattgatcctacttcgatttctaaaactgtttcagcgcatatacctattgtaggagacgcgaaatacgttttacaacaaatgctcaaaatattaaaatcagaacaacatattttttgtttaaaaaattggtggaactgtattgaaaaatggaaaaaagttaatagtttaaaatactatgaaaataacaaaaaaattaaacctcaaaaagttatcgaaactctttttcaactcaccaaaggtgatgcttatataacttcagatgtcggtcaacatcaaatgtttactgcattatattatccttttaataaacctagacgctggattaattcaggtggattaggtaccatgggatttggatttcctgctgctttaggtgtcaaattaggtttccctaaagacacagttatttgtataactggagatggcagcattcaaatgaatatccaagaattatctacagcacgacaatataatttagctatattaattattaacctgaataatgcttctttaggtatggttaaacaatggcaagatatgatttattgtggacgacattctcattcttatatggattcactaccaaattttatacaattagtagaatcttatggacatattggaattcaaattagccaacctctagaattaaaagaaaaactaatactggcattacaaaaactatctactggaaatttagttttcgttgatattaaaatcgatagttctgagcatgtttatcctatgcaaatccaaggtggtggaatgaatgacatgtggctaaggaaaaaagaggaattttaaagatgcgcagaattttgtctattttattagaaaatgaatcaggtgcactgtcaagagtaatagggcttttttcccaaagaggatataacatagaaacgataacacttgcaccaactgaagatccaactctatcaaaaatgactatacaaacaatcggagatgaaaaaaatattgagcaaatcgaaaaacaactgcataaattaatagatgtattaagagttgttcagattgaccaattttctcatatagaacgcgaaattatgttagttaaggtccagattaatacttcttctaagagagatgatattaaacatactactgaagtgtttagaggtcaaattgtagatatgacatctacaacatatatactacaattatctggaacaacaaaaaaattaaattcttttttaaaagttataagaaagatatcagatatcatagaaataagtcgttctggcatagtaggtatttcacggggataagttgctgttttataaaaaataatatgtgattttattattttttatatgtatatgcaaaaaatatttatttttttaaattttttaagtttaattttataaattaaatcaattttgttaaacatggtcatttaaatttagtgaccgtgtataaataataaactactataaaaattaaaatgaatgacatacttaaacattttccagtaatgaaaaaagaattaatacaatctttgaaaataaaaaaaaatggcatctatatt

SEQ ID NO: 138191 - protein, 571 aa, Buchnera aphidicola
MEILSGAEMVVRSLINQGIQHIFGYPGGAVLDIYDALKTIGGIEHILVRHEQAATHMADGYARSTGKTGVVLVTSGPGATNAITGIATAYMDSIPMVVISGQVASLLIGYDAFQECDMIGVSRPIVKHSFLVKKTEDIPITFKKAFWLAESGRPGPIVIDLPKDILKKKSKYFFKWPDSVNIRSYNPTTKGHKKQIQKALYRLLKAKQPVIYAGGGVISSKCHKELLEFAEKTNCPVTTSLMGLGVFPGNHPQSIAMLGMHGTYEANMAMHHADVIFAIGVRFDDRTTNNLKKYCPNAIVVHIDIDPTSISKTVSAHIPIVGDAKYVLQQMLKILKSEQHIFCLKNWWNCIEKWKKVNSLKYYENNKKIKPQKVIETLFQLTKGDAYITSDVGQHQMFTALYYPFNKPRRWINSGGLGTMGFGFPAALGVKLGFPKDTVICITGDGSIQMNIQELSTARQYNLAILIINLNNASLGMVKQWQDMIYCGRHSHSYMDSLPNFIQLVESYGHIGIQISQPLELKEKLILALQKLSTGNLVFVDIKIDSSEHVYPMQIQGGGMNDMWLRKKEEF

SEQ ID NO: 138192 - DNA, 1836 bp, Zymomonas mobilis
  CDS (1)..(1836): transl_table=11
atgacaatcatcgcgattggatcatggggtttcgaaaaggaaataaagcatgtgtcgccaactcagcgcgccgccattgttcttgaaacactcaaggatatgggtgtcgatctgatcttcggctatcccggcggagcagttctccccatttacgatgccctttatcaggatgaaggcatccggcatattctggctcgccaagaaggcggggctgtccatgcagcagaaggctatgcgcggtcgaccggaaaacccggtgttgttatagtgacttcaggtccgggggcgacaaatgccgttaccggcatcgctgatgccatgcttgattccattccgttggttgttttttctggtcaggtcgccacgaatttaatcggaaccgatgctttccaagaggcggataccatcggcattacccgccattgcaccaagcataactatctggttcgcgacccgaaggaatttagctcagacgattgtcgaggccttccatctgggacctccggtcgtccgggaccggtggttattgaccttccgaaaaatgttcagacggcggttatcgactatatcaaaccggatcctaacaagcggatgcatcgcggttatcgtccgcgtgttaaagcggatccagtcgaaattaccaacgctcttgatatgattgccaaggcaaagcgtccggttttctatactggtggcggcgttatcaattctggtcccgatgccagcaaagccttgcgtgaattggccgacttgacgggtgttccggtaacctcaaccctgatgggcttgggcgcatttccagcctcttcccagcaatggttgggtatgcttggtatgcacggcacttacgaagccaattttgccatgcatgacgctgatttagtagttgcccttggcagccgctttgatgatcgtgtgacatgtcgggttgatagcttttcacctcattccaagaaaatccatgtcgatattgatcgttcttcgatcaaccgtatcatccatgtggacttaccgattgtgggtgatgtcggatcagtcatgcaggacatggtcgcgctttggaaagaaaagcattaccagatgcaggatatttcggcatggtgggtgcagattgatgaatggcgcgccaaacaatgcctgaattttaccaagcagggtaacgagatcatgccgcagcaggctatccgtagcctgtgggaagccacaaagggtaagaatccgatcgtctcgacagaagtcggacagcatcagatgtggaccgcccaatatttcggttttgactctcccaatcatttcctgacttcaggtggtttgggaacgatgggctatggtttcccgtctattattggcgcgcaggtcggtaatccagacagcctctgcatgacgattgctggtgaagcctctttccagatgaatattcaggaaatggctacggttgctcaatatcgtttgccggtgaaaattttcatcttgaataaccgtttcatgggcatggtgcgtcagtggcaagatttgctttatgatcatcgccggtcacaaagctattcagaagcactgcctgattttgtcgctttggccaaggcttatggctggaatgcgcttaaaattgagaagccttcccagcttgaagatggcatcaaaacgatgttggaaacgccggggcctgtcttggttgattgtcaggttgctcaattagcgaattgtttgcccatggtgccgccgggagccggccagactgaaatgattttggaatcggatatcaccgataaccatgtcaagaagccggaatataccccttccgctgcgccttcgtctgcgaccaccattcgcggttaa

SEQ ID NO: 138193 - protein, 611 aa, Zymomonas mobilis
MTIIAIGSWGFEKEIKHVSPTQRAAIVLETLKDMGVDLIFGYPGGAVLPIYDALYQDEGIRHILARQEGGAVHAAEGYARSTGKPGVVIVTSGPGATNAVTGIADAMLDSIPLVVFSGQVATNLIGTDAFQEADTIGITRHCTKHNYLVRDPKEFSSDDCRGLPSGTSGRPGPVVIDLPKNVQTAVIDYIKPDPNKRMHRGYRPRVKADPVEITNALDMIAKAKRPVFYTGGGVINSGPDASKALRELADLTGVPVTSTLMGLGAFPASSQQWLGMLGMHGTYEANFAMHDADLVVALGSRFDDRVTCRVDSFSPHSKKIHVDIDRSSINRIIHVDLPIVGDVGSVMQDMVALWKEKHYQMQDISAWWVQIDEWRAKQCLNFTKQGNEIMPQQAIRSLWEATKGKNPIVSTEVGQHQMWTAQYFGFDSPNHFLTSGGLGTMGYGFPSIIGAQVGNPDSLCMTIAGEASFQMNIQEMATVAQYRLPVKIFILNNRFMGMVRQWQDLLYDHRRSQSYSEALPDFVALAKAYGWNALKIEKPSQLEDGIKTMLETPGPVLVDCQVAQLANCLPMVPPGAGQTEMILESDITDNHVKKPEYTPSAAPSSATTIRG

SEQ ID NO: 138194 - DNA, 2227 bp, Kochia scoparia
  CDS (1)..(2001)
atggcgtctacttgtgcaaatcccacttttacccctttcaccagtaaaccccttaaaccccgttctccctttcactctttcccatttccctcaaaccccaaaaccccttcctcttcatttcgcaacctcaaaatcacatcttctctctcttcttcacaacccccgaaaccaccttccgccgtcaaaacccactcaccaccttcccctctcacaaccgacgaacccccgcaaggttttgtttcccgatttgcccctgaccaacccagaaaaggctgcgatgtcctcgttgaggccctcgagcgggagggcgtcaccgacgtgttcgcttatcctggtggcgcatcaatggagattcatcaagctctgactcgctctgattccatacgcaacgtcctgcctcgccacgagcaaggcgggatctttgccgcggaggggtatgctcgtgccacgggccgtgttggtgtctgcattgcgacatctggccctggcgctacgaacctcgtgtccgggtttgctgatgctttgctcgattccgttccactggtggcgatcacggggcaggtgccgcggcgaatgattgggacggatgcttttcaggagactcctattgttgaggtaacacggtctattaccaagcataattatctggtattagatgttgaggatattcctagaattgttaaggaggctttctttttggctaattctggtagacctggacctgttttgattgatattcctaaggatattcagcagcaattggttgtgcctgattgggatcagggggttaggttaggtgggtatgtgtctaggttgccgaaatcggtgttttcggccaatgatgaggggcttcttgagcagattgtgaggttgatgagtgaggctaagaagcctgtgttgtatgtgggaggcgggtgtttgaattctggggaggagttgaggaaattcgtcgagttgactgggattccggtggctagtactttaatgggtttgggcgcttatccctgtaatgatgacttgtctcttcatatgttgggtatgcacgggaccgtgtatgctaattatgctgttgataaggcagatttgttgcttgcctttggggttaggtttgatgatcgtgtgacagggaagcttgaggcgtttgctagccgggctaagatcgtgcatattgatattgattctgctgagattgggaagaataagcaaccccatgtgtcaatatgtgctgatgtcaagtatgcgttgaagggtatgaataagattttggagtctaggaaagggaagttgaaattaaattactctagctggagggaggaattgggtgagcaaaagaagaaattcccattgtcttttaagaccttcggggaagcgattcctcctcagtatgccattcagatgcttgatgagctgaccaatggtaacgctattattagtactggtgttgggcaacatcaaatgtgggctgctcagcattacaagtacagaaaccctcgccaatggctgacctcaggtgggttgggtgccatgggttttggtctaccagccgccattggagctgctgtggctcgacctgatgcagtggtggttgatattgatggcgatgggagtttcattatgaatgttcaagagttggctactattagggtggaaaatctccctgttaagataatgcttttgaataaccaacatttaggtatggtggttcaattggaagataggttttataaagccaatagggcacatacttaccttggaaacccttcaaaagagtctgaaatcttcccggatatgcttaaatttgctgaggcgtgtgatattcctgctgctcgtgtcaccaaggttggagatttgagggcggccatgcagacaatgttggatactccgggaccttacctgcttgatgtgattgtacctcatcaggagcatgtgctgcctatgattcctagtggtgcagccttcaaggatatcattaacgaaggtgatggaagaacaagttattgatgttcgtatcgatggttgaaagcatctatagagggggaagcaaaataagaataataatctgtatgtataatagtatgttccttttaaatttttagcgtctgtttacttgtttttttagttttctagttagtttgtcgttgttatgttgcttgttactttgagaatgcttttttgtagttttcaagagacgagtatggatgatcttcctatattgttgaaagatttc

SEQ ID NO: 138195 - protein, 666 aa, Kochia scoparia
MASTCANPTFTPFTSKPLKPRSPFHSFPFPSNPKTPSSSFRNLKITSSLSSSQPPKPPSAVKTHSPPSPLTTDEPPQGFVSRFAPDQPRKGCDVLVEALEREGVTDVFAYPGGASMEIHQALTRSDSIRNVLPRHEQGGIFAAEGYARATGRVGVCIATSGPGATNLVSGFADALLDSVPLVAITGQVPRRMIGTDAFQETPIVEVTRSITKHNYLVLDVEDIPRIVKEAFFLANSGRPGPVLIDIPKDIQQQLVVPDWDQGVRLGGYVSRLPKSVFSANDEGLLEQIVRLMSEAKKPVLYVGGGCLNSGEELRKFVELTGIPVASTLMGLGAYPCNDDLSLHMLGMHGTVYANYAVDKADLLLAFGVRFDDRVTGKLEAFASRAKIVHIDIDSAEIGKNKQPHVSICADVKYALKGMNKILESRKGKLKLNYSSWREELGEQKKKFPLSFKTFGEAIPPQYAIQMLDELTNGNAIISTGVGQHQMWAAQHYKYRNPRQWLTSGGLGAMGFGLPAAIGAAVARPDAVVVDIDGDGSFIMNVQELATIRVENLPVKIMLLNNQHLGMVVQLEDRFYKANRAHTYLGNPSKESEIFPDMLKFAEACDIPAARVTKVGDLRAAMQTMLDTPGPYLLDVIVPHQEHVLPMIPSGAAFKDIINEGDGRTSY

SEQ ID NO: 138196 - DNA, 1968 bp, Brassica napus
  CDS (1)..(1968)
atggcggcggcaacatcgtcttctccgatctccttaaccgctaaaccttcttccaaatcccctctacccatttccagattctcccttcccttctccttaaccccacagaaagactcctcccgtctccaccgtcctctcgccatctccgccgttctcaactcacccgtcaatgtcgcacctccttcccctgaaaaaaccgacaagaacaagactttcgtctcccgctacgctcccgacgagccccgcaagggtgctgatatcctcgtcgaagccctcgagcgtcaaggcgtcgaaaccgtctttgcttatcccggaggtgcttccatggagatccaccaagccttgactcgctcctccaccatccgtaacgtccttccccgtcacgaacaaggaggagtcttcgccgccgagggttacgctcgttcctccggcaaaccgggaatctgcatagccacttcgggtcccggagctaccaacctcgtcagcgggttagcagacgcgatgcttgacagtgttcctcttgtcgccattacaggacaggtccctcgccggatgatcggtactgacgccttccaagagacaccaatcgttgaggtaacgaggtctattacgaaacataactatttggtgatggatgttgatgacatacctaggatcgttcaagaagctttctttctagctacttccggtagacccggaccggttttggttgatgttcctaaggatattcagcagcagcttgcgattcctaactgggatcaacctatgcgcttacctggctacatgtctaggttgcctcagcctccggaagtttctcagttaggtcagatcgttaggttgatctcggagtctaagaggcctgttttgtacgttggtggtggaagcttgaactcgagtgaagaactggggagatttgtcgagcttactgggatccccgttgcgagtactttgatggggcttggctcttatccttgtaacgatgagttgtccctgcagatgcttggcatgcacgggactgtgtatgctaactacgctgtggagcatagtgatttgttgctggcgtttggtgttaggtttgatgaccgtgtcacgggaaagctcgaggctttcgctagcagggctaaaattgtgcacatagacattgattctgctgagattgggaagaataagacacctcacgtgtctgtgtgtggtgatgtaaagctggctttgcaagggatgaacaaggttcttgagaaccgggcggaggagctcaagcttgatttcggtgtttggaggagtgagttgagcgagcagaaacagaagttccctttgagcttcaaaacgtttggagaagccattcctccgcagtacgcgattcagatcctcgacgagctaaccgaagggaaggcaattatcagtactggtgttggacagcatcagatgtgggcggcgcagttttacaagtacaggaagccgagacagtggctgtcgtcatcaggcctcggagctatgggttttggacttcctgctgcgattggagcgtctgtggcgaaccctgatgcgattgttgtggatattgacggtgatggaagcttcataatgaacgttcaagagctggccacaatccgtgtagagaatcttcctgtgaagatactcttgttaaacaaccagcatcttgggatggtcatgcaatgggaagatcggttctacaaagctaacagagctcacacttatctcggggacccggcaagggagaacgagatcttccctaacatgctgcagtttgcaggagcttgcgggattccagctgcgagagtgacgaagaaagaagaactccgagaagctattcagacaatgctggatacaccaggaccatacctgttggatgtgatatgtccgcaccaagaacatgtgttaccgatgatcccaagtggtggcactttcaaagatgtaataacagaaggggatggtcgcactaagtactga

SEQ ID NO: 138197 - protein, 655 aa, Brassica napus
MAAATSSSPISLTAKPSSKSPLPISRFSLPFSLTPQKDSSRLHRPLAISAVLNSPVNVAPPSPEKTDKNKTFVSRYAPDEPRKGADILVEALERQGVETVFAYPGGASMEIHQALTRSSTIRNVLPRHEQGGVFAAEGYARSSGKPGICIATSGPGATNLVSGLADAMLDSVPLVAITGQVPRRMIGTDAFQETPIVEVTRSITKHNYLVMDVDDIPRIVQEAFFLATSGRPGPVLVDVPKDIQQQLAIPNWDQPMRLPGYMSRLPQPPEVSQLGQIVRLISESKRPVLYVGGGSLNSSEELGRFVELTGIPVASTLMGLGSYPCNDELSLQMLGMHGTVYANYAVEHSDLLLAFGVRFDDRVTGKLEAFASRAKIVHIDIDSAEIGKNKTPHVSVCGDVKLALQGMNKVLENRAEELKLDFGVWRSELSEQKQKFPLSFKTFGEAIPPQYAIQILDELTEGKAIISTGVGQHQMWAAQFYKYRKPRQWLSSSGLGAMGFGLPAAIGASVANPDAIVVDIDGDGSFIMNVQELATIRVENLPVKILLLNNQHLGMVMQWEDRFYKANRAHTYLGDPARENEIFPNMLQFAGACGIPAARVTKKEELREAIQTMLDTPGPYLLDVICPHQEHVLPMIPSGGTFKDVITEGDGRTKY

SEQ ID NO: 138198 - DNA, 2664 bp, Zea mays
  CDS (666)..(2582)
gatccccgatgggatttatctccgtggggaacggggatggagaagaaatgtctctcgcaagagttcgtgggaatccccgcgggaaatttttttgtcgcggggacagatacggatacggcgagccaaagggtgccatccctaacaccgacaccgggcctgacgctgtcgccgcagctgctcatcttgtggttgtgggctgtgcccggtttccctgttgcggattgcgggtggcagcctggcaggtgggtgcgacccgtttggattcccttgtctgggccccttgtgtcagtaccgtctgtactccgatgacatgcaccgtcgtccacagtcaagtccaaaatctcccctcttttttaacggaacagttcaaaacctccttgacgcacgctgtcgtgtaccagcactcggtggacaccacgtttgtaatgcaggccgacacgtcggtcccacgtcgacaggccccaccgtccggtctgtagcgtgtacgtattcgggcgacggacgtgtcgtcgtcgtcttgcgagtcccattcccatcaccatctgagccacacatcctctgaacaaaagcagggaggcctctacgcacatcccccttgctcccactccgtgtccgtggcacccaccccaaaccctcgcgccgcctccgagacagccgccgcaaccatggccaccgccgccgccgcgtctaccgcgctcactggcgccactaccgctgcgcccaaggcgaggcgccgggcgcacctcctggccacccgccgcgccctcgccgcgcccatcaggtgctcagcggcgtcacccgccatgccgatggctcccccggccaccccgctccggccgtggggccccaccgatccccgcaagggcgccgacatcctcgtcgagtccctcgagcgctgcggcgtccgcgacgtcttcgcctaccccggcggcgcgtccatggagatccaccaggcactcacccgctcccccgtcatcgccaaccacctcttccgccacgagcaaggggaggcctttgcggcctccggctacgcgcgctcctcgggccgcgtcggcgtctgcatcgccacctccggccccggcgccaccaaccttgtctccgcgctcgccgacgcgctgctcgattccgtccccatggtcgccatcacgggacaggtgccgcgacgcatgattggcaccgacgccttccaggagacgcccatcgtcgaggtcacccgctccatcaccaagcacaactacctggtcctcgacgtcgacgacatcccccgcgtcgtgcaggaggctttcttcctcgcctcctctggtcgaccggggccggtgcttgtcgacatccccaaggacatccagcagcagatggcggtgcctgtctgggacaagcccatgagtctgcctgggtacattgcgcgccttcccaagccccctgcgactgagttgcttgagcaggtgctgcgtcttgttggtgaatcccggcgccctgttctttatgttggcggtggctgcgcagcatctggtgaggagttgcgacgctttgtggagctgactggaatcccggtcacaactactcttatgggcctcggcaacttccccagcgacgacccactgtctctgcgcatgctaggtatgcatggcacggtgtatgcaaattatgcagtggataaggccgatctgttgcttgcacttggtgtgcggtttgatgatcgtgtgacagggaagattgaggcttttgcaagcagggctaagattgtgcacgttgatattgatccggctgagattggcaagaacaagcagccacatgtgtccatctgtgcagatgttaagcttgctttgcagggcatgaatgctcttcttgaaggaagcacatcaaagaagagctttgactttggctcatggaacgatgagttggatcagcagaagagggaattcccccttgggtataaaacatctaatgaggagatccagccacaatatgctattcaggttcttgatgagctgacgaaaggcgaggccatcatcggcacaggtgttgggcagcaccagatgtgggcggcacagtactacacttacaagcggccaaggcagtggttgtcttcagctggtcttggggctatgggatttggtttgccggctgctgctggtgcttctgtggccaacccaggtgttactgttgttgacatcgatggagatggtagctttctcatgaacgttcaggagctagctatgatccgaattgagaacctcccggtgaaggtctttgtgctaaacaaccagcacctggggatggtggtgcagtgggaggacaggttctataaggccaacagagcgcacacatacttgggaaacccagagaatgaaagtgagatatatccagatttcgtgacgatcgccaaagggttcaacattccagcggtccgtgtgacaaagaagaacgaagtccgcgcagcgataaagaagatgctcgagactccagggccgtacctcttggatataatcgtcccacaccaggagcatgtgttgcctatgatccctagtggtggggctttcaaggatatgatcctggatggtgatggcaggactgtgtactgatctaaaatccagcaagcaactgatctaaaatccagcaagcaccgcctccctgctagtacaaggtgatatgtttatctgtgtg

SEQ ID NO: 138199 - protein, 638 aa, Zea mays
MATAAAASTALTGATTAAPKARRRAHLLATRRALAAPIRCSAASPAMPMAPPATPLRPWGPTDPRKGADILVESLERCGVRDVFAYPGGASMEIHQALTRSPVIANHLFRHEQGEAFAASGYARSSGRVGVCIATSGPGATNLVSALADALLDSVPMVAITGQVPRRMIGTDAFQETPIVEVTRSITKHNYLVLDVDDIPRVVQEAFFLASSGRPGPVLVDIPKDIQQQMAVPVWDKPMSLPGYIARLPKPPATELLEQVLRLVGESRRPVLYVGGGCAASGEELRRFVELTGIPVTTTLMGLGNFPSDDPLSLRMLGMHGTVYANYAVDKADLLLALGVRFDDRVTGKIEAFASRAKIVHVDIDPAEIGKNKQPHVSICADVKLALQGMNALLEGSTSKKSFDFGSWNDELDQQKREFPLGYKTSNEEIQPQYAIQVLDELTKGEAIIGTGVGQHQMWAAQYYTYKRPRQWLSSAGLGAMGFGLPAAAGASVANPGVTVVDIDGDGSFLMNVQELAMIRIENLPVKVFVLNNQHLGMVVQWEDRFYKANRAHTYLGNPENESEIYPDFVTIAKGFNIPAVRVTKKNEVRAAIKKMLETPGPYLLDIIVPHQEHVLPMIPSGGAFKDMILDGDGRTVY

SEQ ID NO: 138200 - DNA, 2004 bp, Nicotiana tabacum
  CDS (1)..(2004)
atggcggcggcggctccatctccctcttcttccgctttctccaaaaccctatcgccttcctcctccacatcctccaccctcctccctagatcaaccttccctttcccccaccacccccacaagaccaccccaccacccctccacctcacccacactcacattcacattcacagccaacgccgtcgtttcaccatatccaatgtcatttccactaaccaaaaagtttcccagaccgaaaaaaccgaaactttcgtttcccgttttgctcctgacgaacccagaaagggttccgacgttctcgtggaggctctcgaaagagaaggggttacggacgtctttgcgtacccaggtggcgcttccatggagattcaccaagctttgacccgttcaagcatcatccgcaacgtgctgccacgtcacgagcagggcggtgtcttcgccgctgagggttacgcacgcgccaccggatttcccggcgtttgcattgccacctctggccccggcgccaccaatctcgtcagcggcctcgctgacgcgctactggatagcgtccccattgttgctataacaggtcaagtgccacgtaggatgataggtactgatgcttttcaggaaactcctattgttgaggtaactagatcgattaccaagcataattatctcgttatggacgtagaggatattcctagggttgtacgtgaagcttttttcctcgcgagatcgggccggcctggccctattttgattgatgtacctaaggatattcagcaacaattggtgatacctgactgggatcagccaatgaggttacctggttacatgtctaggttacctaaattgcccaatgagatgcttttagaacaaattgttaggcttatttctgagtcaaagaagcctgttttgtatgtggggggtgggtgttcgcaatcgagtgaggacttgagacgattcgtggagctcacgggtatccccgtggcaagtactttgatgggtcttggagcttttccaactggggatgagctttccctttcaatgttgggtatgcatggtactgtttatgctaattatgctgtggacagtagtgatttgttgctcgcatttggggtgaggtttgatgatagagttactggaaagttagaagcttttgctagccgagcaaaaattgttcacattgatattgattcagctgagattggaaagaacaagcagcctcatgtttccatttgtgcagatatcaagttggcgttacagggtttgaattcgatactggagagtaaggaaggtaaactgaagttggatttttctgcttggaggcaggagttgacggagcagaaagtgaagcacccattgaactttaaaacttttggtgatgcaattcctccgcaatatgctatccaggttctagatgagttaactaatgggaatgctattataagtactggtgtggggcaacaccagatgtgggctgctcaatactataagtacagaaagccacgccaatggttgacatctggtggattaggagcaatgggatttggtttgcccgctgctattggtgcggctgttggaagaccggatgaagttgtggttgacattgatggtgatggcagtttcatcatgaatgtgcaggagcttgcaacaattaaggtggagaatctcccagttaagattatgttactgaataatcaacacttgggaatggtggttcaatgggaggatcggttctataaggctaacagagcacacacatacctggggaatccttctaatgaggcggagatctttcctaatatgctgaaatttgcagaggcttgtggcgtacctgctgcaagagtgacacatagggatgatcttagagctgccattcagaagatgttagacactcctgggccatacttgttggatgtgattgtacctcatcaggaacatgttttacctatgattcccagtggcggagctttcaaagatgtgatcacagagggtgacgggagaagttcctattga

SEQ ID NO: 138201 - protein, 667 aa, Nicotiana tabacum
MAAAAPSPSSSAFSKTLSPSSSTSSTLLPRSTFPFPHHPHKTTPPPLHLTHTHIHIHSQRRRFTISNVISTNQKVSQTEKTETFVSRFAPDEPRKGSDVLVEALEREGVTDVFAYPGGASMEIHQALTRSSIIRNVLPRHEQGGVFAAEGYARATGFPGVCIATSGPGATNLVSGLADALLDSVPIVAITGQVPRRMIGTDAFQETPIVEVTRSITKHNYLVMDVEDIPRVVREAFFLARSGRPGPILIDVPKDIQQQLVIPDWDQPMRLPGYMSRLPKLPNEMLLEQIVRLISESKKPVLYVGGGCSQSSEDLRRFVELTGIPVASTLMGLGAFPTGDELSLSMLGMHGTVYANYAVDSSDLLLAFGVRFDDRVTGKLEAFASRAKIVHIDIDSAEIGKNKQPHVSICADIKLALQGLNSILESKEGKLKLDFSAWRQELTEQKVKHPLNFKTFGDAIPPQYAIQVLDELTNGNAIISTGVGQHQMWAAQYYKYRKPRQWLTSGGLGAMGFGLPAAIGAAVGRPDEVVVDIDGDGSFIMNVQELATIKVENLPVKIMLLNNQHLGMVVQWEDRFYKANRAHTYLGNPSNEAEIFPNMLKFAEACGVPAARVTHRDDLRAAIQKMLDTPGPYLLDVIVPHQEHVLPMIPSGGAFKDVITEGDGRSSY

SEQ ID NO: 138202 - DNA, 1914 bp, Brassica napus
  CDS (1)..(1914)
atggcttcgttttcgttcttcggcaccattccgtcgtctcccacaaaagcttccgtcttctccctgccggtgtcggtaactacgctcccgtccttcccgcgccgccgtgctactcgtgtctccgtttccgccaactcgaagaaagaccaagaccgcacagcttcacgtcgagagaatccgagcacattcagctccaaatacgctcccaacgtgccccgcagtggcgcagacatcctggtcgaagccctggagcgtcaaggagtggacgtagtcttcgcttacccaggaggcgcatcaatggagatccatcaagccctaactcgctccaacacaatccgaaacgtccttccccgtcacgaacaaggaggtatcttcgccgccgagggttacgctcgttcctccggtaaacccggaatctgcatcgccacttccggtccaggagctatgaatctcgtcagcggattagccgacgccctgtttgacagcgtacccctcatcgcaatcacaggacaggtccctcgccggatgattggtaccatggcgttccaggagacacccgttgttgaggtaacgaggactataacgaaacataactatcttgttatggaagttgatgatatacctaggatcgttcgagaagctttctttctagctacttcggttagaccgggaccggttcttatagacgtccccaaagatgttcagcaacagtttgcgattcctaactgggaacagcctatgcgcttacctctttacatgtctacgatgcctaaaccccccaaagtttctcacttagagcagattcttaggttggtttcggagtctaagaggcctgtcttgtacgttggaggtggttgtctgaactcgagtgaggaactgcgcagatttgtggaacttactggcatccctgttgctagtacgttcatgggacttggatcgtatccttgtgacgatgaagagttctctctgcaaatgctaggaatgcatggaacagtgtacgctaattacgctgtcgagtatagcgatcttctgcttgcttttggggttaggtttgacgaccgtgtgaccggaaagcttgaggcctttgctagccgggccaagatcgtccatattgatattgattctaccgaaatcgggaagaacaagacacctcatgtgtcggtgtgttgtgatgttcagctagccttgcaagggatgaacgaggttcttgagaaccgacgagatgtgcttgacttcggggaatggagatgtgaattgaacgaacagagactaaagttccctctccgctacaagacgtttggggaagagattcctccacagtacgccattcaactacttgacgagctaaccgacgggaaggcaattatcactactggtgtcgggcaacaccagatgtgggccgcccaattctacagattcaagaaaccccgccaatggctgtcttcaggaggcctaggagccatggggttcggtcttcctgcagccatgggagccgctatagccaacccgggagcagtggttgtcgacattgatggggatggtagcttcatcatgaacattcaagaactggcaaccatcagggttgagaatcttccagtcaaggttttgctgattaataatcagcacctcggaatggtccttcagtgggaagaccacttctacgcagctaacagagccgattcttttctgggagacccggcgaaccctgaggcggtattcccggatatgctgttgttcgccgcatcgtgcggtataccagccgccagggtcaccagaagggaggacctccgagaggcaatccagacaatgctggacacacctggaccattcttgttggatgtggtctgtcctcaccaggaccatgtgttaccactcatccctagtggcggcaccttcaaggacattattgtgtag

SEQ ID NO: 138203 - protein, 637 aa, Brassica napus
MASFSFFGTIPSSPTKASVFSLPVSVTTLPSFPRRRATRVSVSANSKKDQDRTASRRENPSTFSSKYAPNVPRSGADILVEALERQGVDVVFAYPGGASMEIHQALTRSNTIRNVLPRHEQGGIFAAEGYARSSGKPGICIATSGPGAMNLVSGLADALFDSVPLIAITGQVPRRMIGTMAFQETPVVEVTRTITKHNYLVMEVDDIPRIVREAFFLATSVRPGPVLIDVPKDVQQQFAIPNWEQPMRLPLYMSTMPKPPKVSHLEQILRLVSESKRPVLYVGGGCLNSSEELRRFVELTGIPVASTFMGLGSYPCDDEEFSLQMLGMHGTVYANYAVEYSDLLLAFGVRFDDRVTGKLEAFASRAKIVHIDIDSTEIGKNKTPHVSVCCDVQLALQGMNEVLENRRDVLDFGEWRCELNEQRLKFPLRYKTFGEEIPPQYAIQLLDELTDGKAIITTGVGQHQMWAAQFYRFKKPRQWLSSGGLGAMGFGLPAAMGAAIANPGAVVVDIDGDGSFIMNIQELATIRVENLPVKVLLINNQHLGMVLQWEDHFYAANRADSFLGDPANPEAVFPDMLLFAASCGIPAARVTRREDLREAIQTMLDTPGPFLLDVVCPHQDHVLPLIPSGGTFKDIIV

SEQ ID NO: 138204 - DNA, 1917 bp, Zea mays
  CDS (1)..(1917)
atggccaccgccgccaccgccgccgccgcgctcaccggcgccactaccgctacgcccaagtcgaggcgccgagcccaccacttggccacccggcgcgccctcgccgcgcccatcaggtgctcagcgttgtcacgcgccacgccgacggctcccccggccactccgctacgtccgtggggccccaacgagccccgcaagggctccgacatcctcgtcgaggctctcgagcgctgtggcgtccgtgacgtcttcgcctaccccggcggcgcatccatggagatccaccaggcactcacccgctcccccgtcatcgccaaccacctcttccgccacgaacaaggggaggccttcgccgcctccgcgtacgcgcgctcctcgggccgcgttggcgtctgcatcgccacctccggccccggcgccaccaacctagtctctgcgctcgcagacgcgttgctcgactccgtccccatggtcgccatcacgggacaggtgccgcgacgcatgattggcaccgacgcctttcaggagacgcccatcgtcgaggtcacccgctccatcaccaagcacaactacctggtcctcgacgtcgacgacatcccccgcgtcgtgcaggaggccttcttcctcgcatcctctggtcgcccggggccggtgcttgttgacatccccaaggacatccagcagcagatggcggtgccggcctgggacacgcccatgagtctgcctgggtacatcgcgcgccttcccaagcctcccgcgactgaatttcttgagcaggtgctgcgtcttgttggtgaatcacggcgccctgttctttatgttggcggtggctgtgcagcatcaggtgaggagttgtgccgctttgtggagttgactggaatcccagtcacaactactcttatgggccttggcaacttccccagcgacgacccactgtcactgcgcatgcttggtatgcatggcacagtgtatgcaaattatgcagtggataaggccgatctgttgcttgcatttggtgtgcggtttgatgatcgtgtgacagggaaaattgaggcttttgcaggcagagctaagattgtgcacattgatattgatcctgctgagattggcaagaacaagcagccacatgtgtccatctgtgcagatgttaagcttgctttgcagggcatgaatactcttctggaaggaagcacatcaaagaagagctttgacttcggctcatggcatgatgaattggatcagcaaaagagggagtttccccttggatataaaatcttcaatgaggaaatccagccacaatatgctattcaggttcttgatgagttgacgaagggggaggccatcattgccacaggtgttgggcagcaccagatgtgggcggcacagtattacacttacaagcggccaaggcagtggctgtcttcagctggtcttggggctatgggatttggtttgccggctgctgctggtgctgctgtggccaacccaggtgtcactgttgttgacatcgacggagatggtagcttcctcatgaacattcaggagctagctatgatccgtattgagaacctcccagtcaaggtctttgtgctaaacaaccagcacctcgggatggtggtgcagtgggaggacaggttctataaggccaatagagcacacacattcttgggaaacccagagaacgaaagtgagatatatccagattttgtggcaattgctaaagggttcaacattccagcagtccgtgtgacaaagaagagcgaagtccatgcagcaatcaagaagatgcttgaggctccagggccgtacctcttggatataatcgtcccgcaccaggagcatgtgttgcctatgatccctagtggtggggctttcaaggatatgatcctggatggtgatggcaggactgtgtattga

SEQ ID NO: 138205 - protein, 638 aa, Zea mays
MATAATAAAALTGATTATPKSRRRAHHLATRRALAAPIRCSALSRATPTAPPATPLRPWGPNEPRKGSDILVEALERCGVRDVFAYPGGASMEIHQALTRSPVIANHLFRHEQGEAFAASAYARSSGRVGVCIATSGPGATNLVSALADALLDSVPMVAITGQVPRRMIGTDAFQETPIVEVTRSITKHNYLVLDVDDIPRVVQEAFFLASSGRPGPVLVDIPKDIQQQMAVPAWDTPMSLPGYIARLPKPPATEFLEQVLRLVGESRRPVLYVGGGCAASGEELCRFVELTGIPVTTTLMGLGNFPSDDPLSLRMLGMHGTVYANYAVDKADLLLAFGVRFDDRVTGKIEAFAGRAKIVHIDIDPAEIGKNKQPHVSICADVKLALQGMNTLLEGSTSKKSFDFGSWHDELDQQKREFPLGYKIFNEEIQPQYAIQVLDELTKGEAIIATGVGQHQMWAAQYYTYKRPRQWLSSAGLGAMGFGLPAAAGAAVANPGVTVVDIDGDGSFLMNIQELAMIRIENLPVKVFVLNNQHLGMVVQWEDRFYKANRAHTFLGNPENESEIYPDFVAIAKGFNIPAVRVTKKSEVHAAIKKMLEAPGPYLLDIIVPHQEHVLPMIPSGGAFKDMILDGDGRTVY

SEQ ID NO: 138206 - DNA, 1992 bp, Oryza sativa subsp
  CDS (1)..(1992)
atggctgccgccgccgccgccgcctcactctccgtctccgacgccgccgctaagctgcccaaaccgggagggcaagtgcaacggcgacgcgacagggatcgtccacgcgtggatgctgccgcctgcacccgcgacagccgccgtcccacgcgcgagaggtgctcgacgacggtgtccctcgccgcgaccgcgaccgcgacaacggccacgcccgtgcgcgcgccggtccggacgcgggcgcccatggggcagcggaagggcgcggacatcgtcgtcgaggcgctggagcggtgcggcgtccgcgacgtgttcgagtacccgggcggcgcgtcaatggagatccaccaggcgctgacgcggtcgccggtgatccgcaaccacctgctccgccacgagcagggggaggccttcgcggcgtccgggtacgcgcgctcgtcggggcggccgggcgtctgcgtcgccacctccggcccgggcgccaccaacctcgtgtccgcgctcgccgacgcccacctcgactccgtcccgctcgtcgccatcacggggcaggccccgcgccgcatgatcggcaccgacgcgttccaggagacgcccatcgtcgagttcacccgctccatcaccaagcacaactacctaatcctcgacgtcgacgacatcccccgcgtcatcaacgaggccttcttcctcgcgtccacgggtcgccccggcccggtgctcgtcgacatccccaaggacatccagcagcagatggccgtgccgtcctgggacgcgccgatgcgcctcccggggtacatctcccggctgccgaagccgccggccgccaacctgctcgacgaagtcatccgcctcgtcggcgacgccgagaggcccgtcctctacgtcggcggcgggtgctccgcgtcgggctacgagctgcggcgcttcgtggagctgacgggcatcccggtgacgaccaccctcatgggcatcgggaacttccccagcgacgacccgctctcgctgcggatgctcgggatgcatggcactgtgtacgccaactacgccgtcgacaacgccgacctcctcctcgcgctcggcgtgcgcttcgacgaccgcgtcaccggcaaagtcgaggcgttcgcgagcagggccaagatcgtgcacgtcgacatcgacccgtcggagctcgggaagaacaagcagccgcacgtctccatctgcgccgacgtcaagctcgccctgcagggcatgaacgcgatgctggaagaacagagcgccgccgccgcgcgcaagaacctcgatttcagcgcgtggcgctcggagctggagaagaagaaggtcgagttcccactgggctacagaacgttcggcgaggagatcccgccgcagtacgccatccaggtgctcgacgaggtcaccaacggggaggccatcgtcgccacgggcgtcgggcagcaccagatgtgggcgacgcagcactacacctacaggaggcccaggcagtggctctcgtccgccgggctgggcgccatgggcttcggcctgcctgccgccgccggcgccgcggtggccaacccgggcgccaccgtggtcgacatcgacggcgacggcagcctcctgatgaacatccaggagctcgccatggtccgcgtcgaggacctgccggtgaaggtgatggtgctgaacaaccagcacctgggcatggtggtgcagtgggaggacaggttctacgacgccaacagggcgcacacctacctcggcaacccggcggcgaacggcggcggcgaggtgtacccggacttcgtgacgatcgccggaggcttcggcatcccggcggcccgcgtgacgaggaagggcgaggtccgcgccgccgtcgaggagatgatggcggcgccggggccgtacctgctggacgtcgtcgtgcctcaccaggagcacgtgctgccgatgatccccagcaatggcgctttcaaggacattatcgtcgacggtgatggccggagttcgtattag

SEQ ID NO: 138207 - protein, 663 aa, Oryza sativa subsp
MAAAAAAASLSVSDAAAKLPKPGGQVQRRRDRDRPRVDAAACTRDSRRPTRERCSTTVSLAATATATTATPVRAPVRTRAPMGQRKGADIVVEALERCGVRDVFEYPGGASMEIHQALTRSPVIRNHLLRHEQGEAFAASGYARSSGRPGVCVATSGPGATNLVSALADAHLDSVPLVAITGQAPRRMIGTDAFQETPIVEFTRSITKHNYLILDVDDIPRVINEAFFLASTGRPGPVLVDIPKDIQQQMAVPSWDAPMRLPGYISRLPKPPAANLLDEVIRLVGDAERPVLYVGGGCSASGYELRRFVELTGIPVTTTLMGIGNFPSDDPLSLRMLGMHGTVYANYAVDNADLLLALGVRFDDRVTGKVEAFASRAKIVHVDIDPSELGKNKQPHVSICADVKLALQGMNAMLEEQSAAAARKNLDFSAWRSELEKKKVEFPLGYRTFGEEIPPQYAIQVLDEVTNGEAIVATGVGQHQMWATQHYTYRRPRQWLSSAGLGAMGFGLPAAAGAAVANPGATVVDIDGDGSLLMNIQELAMVRVEDLPVKVMVLNNQHLGMVVQWEDRFYDANRAHTYLGNPAANGGGEVYPDFVTIAGGFGIPAARVTRKGEVRAAVEEMMAAPGPYLLDVVVPHQEHVLPMIPSNGAFKDIIVDGDGRSSY

SEQ ID NO: 138208 - DNA, 2461 bp, Nicotiana tabacum
  CDS (415)..(2409)
tatttcttagcttgttttttttttgttctatattgttactttgagctatatttcataacagcattcacattctttttccatagtcttttttcccttttatattttaatttactgaagtaacaaatacttccacttctttcttcttcccaccctcctaaatatatccaacatctcatttttcttttccccaattctcagacattttaatctttcttttctatttattttcttcatattttgatctctcttccatttgttctcatccattttcgctattcacgtgaattcaatcaagtaggaccctttcagtttcgtggcgctctcgtcttctcagcttaatataaaaccaaccacacaccatctacattgccctttcctttcagtttcgtctctcactgctctcattcaacaataatggcggcggctgcggcggctccatctccctctttctccaaaaccctatcgtcctcctcctccaaatcctccaccctcctccctagatccaccttccctttcccccaccacccccacaaaaccaccccaccacccctccacctcacccccacccacattcacagccaacgccgtcgtttcaccatctccaatgtcatttccactacccaaaaagtttccgagacccaaaaagccgaaactttcgtttcccgttttgcccctgacgaacccagaaagggttccgacgttctcgtggaggccctcgaaagagaaggggttacggacgtttttgcgtacccaggcggcgcttccatggagattcaccaagctttgacgcgctcaagcatcatccgcaacgtgctaccacgtcacgagcagggtggtgtcttcgccgctgagggttacgcacgcgccaccggcttccccggcgtttgcattgccacctccggccctggcgccaccaatctcgtcagtggcctcgcggacgccctactggatagcgtccccattgttgctataaccggtcaagtgccacgtaggatgatcggtactgatgcttttcaggaaactccgattgttgaggtaactagatcgattaccaagcataattatctcgttatggacgtagaggatattcctagggttgtacgtgaggcttttttccttgcgagatcgggccggcctggccctgttttgattgatgtacctaaggatattcagcaacaattggtgatacctgactgggatcagccaatgaggttgcctggttacatgtctaggttacctaaattgcccaatgagatgcttttagaacaaattgttaggcttatttctgagtcaaagaagcctgttttgtatgtggggggtgggtgttcgcaatcgagtgaggagttgagacgattcgtggagctcaccggtatccccgtggcaagtactttgatgggtcttggagcttttccaactggggatgagctttccctttcaatgttgggtatgcatggtactgtttatgctaattatgctgtggacagtagtgatttattgctcgcatttggggtgaggtttgatgatagagttactggaaagttagaagcttttgctagccgagcgaaaattgttcacattgatattgattcagctgagattggaaagaacaagcagcctcatgtttccatttgtgcggatatcaagttggcgttacagggtttgaattcgatattggagagtaaggaaggtaaactgaagttggatttttctgcttggaggcaggagttgacggtgcagaaagtgaagtacccgttgaattttaaaacttttggtgatgctattcctccgcaatatgctatccaggttctagatgagttaactaatgggagtgctattataagtaccggtgttgggcagcaccagatgtgggctgctcaatattataagtacagaaagccacgccaatggttgacatctggtggattaggagcgatgggatttggtttgcccgctgctattggtgcggctgttggaagacctgatgaagttgtggttgacattgatggtgatggcagtttcatcatgaatgtgcaggagctagcaactattaaggtggagaatctcccagttaagattatgttactgaataatcaacacttgggaatggtggttcaatgggaggatcggttctataaggctaacagagcacacacatacctggggaatccttctaatgaggcggagatctttcctaatatgttgaaatttgcagaggcttgtggcgtacctgctgcgagagtgacacacagggatgatcttagagcggctattcaaaagatgttagacactcctgggccatacttgttggatgtgattgtacctcatcaggaacatgttctacctatgattcccagtggcggggctttcaaagatgtgatcacagagggtgacgggagaagttcctattgactttgaggtgctacagagctagattctaggccttgtattatctaaaataaac

SEQ ID NO: 138209 - protein, 664 aa, Nicotiana tabacum
MAAAAAAPSPSFSKTLSSSSSKSSTLLPRSTFPFPHHPHKTTPPPLHLTPTHIHSQRRRFTISNVISTTQKVSETQKAETFVSRFAPDEPRKGSDVLVEALEREGVTDVFAYPGGASMEIHQALTRSSIIRNVLPRHEQGGVFAAEGYARATGFPGVCIATSGPGATNLVSGLADALLDSVPIVAITGQVPRRMIGTDAFQETPIVEVTRSITKHNYLVMDVEDIPRVVREAFFLARSGRPGPVLIDVPKDIQQQLVIPDWDQPMRLPGYMSRLPKLPNEMLLEQIVRLISESKKPVLYVGGGCSQSSEELRRFVELTGIPVASTLMGLGAFPTGDELSLSMLGMHGTVYANYAVDSSDLLLAFGVRFDDRVTGKLEAFASRAKIVHIDIDSAEIGKNKQPHVSICADIKLALQGLNSILESKEGKLKLDFSAWRQELTVQKVKYPLNFKTFGDAIPPQYAIQVLDELTNGSAIISTGVGQHQMWAAQYYKYRKPRQWLTSGGLGAMGFGLPAAIGAAVGRPDEVVVDIDGDGSFIMNVQELATIKVENLPVKIMLLNNQHLGMVVQWEDRFYKANRAHTYLGNPSNEAEIFPNMLKFAEACGVPAARVTHRDDLRAAIQKMLDTPGPYLLDVIVPHQEHVLPMIPSGGAFKDVITEGDGRSSY

SEQ ID NO: 138210 - DNA, 2359 bp, Brassica napus
  CDS (150)..(2108)
aaagaaaagaccaaacaaacaaaaatcatattccaagggtattttcgtaaacaaacaaaaccctcacaagcctcgttttataaaaacgattcacgttcacaaactcattcatcatctctctctcatttctctctctctctcatctaaccatggcggcggcaacatcgtcttctccgatctccttaaccgctaaaccttcttccaaatcccctctacccatttccagattctcccttcccttctccttaaccccacagaaaccctcctcccgtctccaccgtccactcgccatctccgccgttctcaactcacccgtcaatgtcgcacctgaaaaaaccgacaagatcaagactttcatctcccgctacgctcccgacgagccccgcaagggtgctgatatcctcgtggaagccctcgagcgtcaaggcgtcgaaaccgtcttcgcttatcccggaggtgcctccatggagatccaccaagccttgactcgctcctccaccatccgtaacgtcctcccccgtcacgaacaaggaggagtcttcgccgccgagggttacgctcgttcctccggcaaaccgggaatctgcatagccacttcgggtcccggagctaccaacctcgtcagcgggttagccgacgcgatgcttgacagtgttcctctcgtcgccatcacaggacaggtccctcgccggatgatcggtactgacgcgttccaagagacgccaatcgttgaggtaacgaggtctattacgaaacataactatctggtgatggatgttgatgacatacctaggatcgttcaagaagcattctttctagctacttccggtagacccggaccggttttggttgatgttcctaaggatattcagcagcagcttgcgattcctaactgggatcaacctatgcgcttgcctggctacatgtctaggctgcctcagccaccggaagtttctcagttaggccagatcgttaggttgatctcggagtctaagaggcctgttttgtacgttggtggtggaagcttgaactcgagtgaagaactggggagatttgtcgagcttactgggatccctgttgcgagtacgttgatggggcttggctcttatccttgtaacgatgagttgtccctgcagatgcttggcatgcacgggactgtgtatgctaactacgctgtggagcatagtgatttgttgctggcgtttggtgttaggtttgatgaccgtgtcacgggaaagctcgaggcgtttgcgagcagggctaagattgtgcacatagacattgattctgctgagattgggaagaataagacacctcacgtgtctgtgtgtggtgatgtaaagctggctttgcaagggatgaacaaggttcttgagaaccgggcggaggagctcaagcttgatttcggtgtttggaggagtgagttgagcgagcagaaacagaagttcccgttgagcttcaaaacgtttggagaagccattcctccgcagtacgcgattcaggtcctagacgagctaacccaagggaaggcaattatcagtactggtgttggacagcatcagatgtgggcggcgcagttttacaagtacaggaagccgaggcagtggctgtcgtcctcaggactcggagctatgggtttcggacttcctgctgcgattggagcgtctgtggcgaaccctgatgcgattgttgtggacattgacggtgatggaagcttcataatgaacgttcaagagctggccacaatccgtgtagagaatcttcctgtgaagatactcttgttaaacaaccagcatcttgggatggtcatgcaatgggaagatcggttctacaaagctaacagagctcacacttatctcggggacccggcaagggagaacgagatcttccctaacatgctgcagtttgcaggagcttgcgggattccagctgcgagagtgacgaagaaagaagaactccgagaagctattcagacaatgctggatacacctggaccgtacctgttggatgtcatctgtccgcaccaagaacatgtgttaccgatgatcccaagtggtggcactttcaaagatgtaataaccgaaggggatggtcgcactaagtactgagagatgaagctggtgatccatcatatggtaaaagacttagtttcagttttcagtttcttttgtgtggtaatttgggtttgtcagttgttgtactgcttttggtttgttcccagacttactcgctgttgttgttttgtttcctttttcttttatatataaataaactgcttgggtttttttacataatgtttgggactcaatgcaaggaaatgctactagactgcgattatctactaatcttgcaaggaaat

SEQ ID NO: 138211 - protein, 652 aa, Brassica napus
MAAATSSSPISLTAKPSSKSPLPISRFSLPFSLTPQKPSSRLHRPLAISAVLNSPVNVAPEKTDKIKTFISRYAPDEPRKGADILVEALERQGVETVFAYPGGASMEIHQALTRSSTIRNVLPRHEQGGVFAAEGYARSSGKPGICIATSGPGATNLVSGLADAMLDSVPLVAITGQVPRRMIGTDAFQETPIVEVTRSITKHNYLVMDVDDIPRIVQEAFFLATSGRPGPVLVDVPKDIQQQLAIPNWDQPMRLPGYMSRLPQPPEVSQLGQIVRLISESKRPVLYVGGGSLNSSEELGRFVELTGIPVASTLMGLGSYPCNDELSLQMLGMHGTVYANYAVEHSDLLLAFGVRFDDRVTGKLEAFASRAKIVHIDIDSAEIGKNKTPHVSVCGDVKLALQGMNKVLENRAEELKLDFGVWRSELSEQKQKFPLSFKTFGEAIPPQYAIQVLDELTQGKAIISTGVGQHQMWAAQFYKYRKPRQWLSSSGLGAMGFGLPAAIGASVANPDAIVVDIDGDGSFIMNVQELATIRVENLPVKILLLNNQHLGMVMQWEDRFYKANRAHTYLGDPARENEIFPNMLQFAGACGIPAARVTKKEELREAIQTMLDTPGPYLLDVICPHQEHVLPMIPSGGTFKDVITEGDGRTKY

SEQ ID NO: 138212 - DNA, 2013 bp, Arabidopsis thaliana
  CDS (1)..(2013)
atggcggcggcaacaacaacaacaacaacatcttcttcgatctccttctccaccaaaccatctccttcctcctccaaatcaccattaccaatctccagattctccctcccattctccctaaaccccaacaaatcatcctcctcctcccgccgccgcggtatcaaatccagctctccctcctccatctccgccgtgctcaacacaaccaccaatgtcacaaccactccctctccaaccaaacctaccaaacccgaaacattcatctcccgattcgctccagatcaaccccgcaaaggcgctgatatcctcgtcgaagctttagaacgtcaaggcgtagaaaccgtattcgcttaccctggaggtgcatcaatggagattcaccaagccttaacccgctcttcctcaatccgtaacgtccttcctcgtcacgaacaaggaggtgtattcgcagcagaaggatacgctcgatcctcaggtaaaccaggtatctgtatagccacttcaggtcccggagctacaaatctcgttagcggattagccgatgcgttgttagatagtgttcctcttgtagcaatcacaggacaagtccctcgtcgtatgattggtacagatgcgtttcaagagactccgattgttgaggtaacgcgttcgattacgaagcataactatcttgtgatggatgttgaagatatccctaggattattgaggaagctttctttttagctacttctggtagacctggacctgttttggttgatgttcctaaagatattcaacaacagcttgcgattcctaattgggaacaggctatgagattacctggttatatgtctaggatgcctaaacctccggaagattctcatttggagcagattgttaggttgatttctgagtctaagaagcctgtgttgtatgttggtggtggttgtttgaattctagcgatgaattgggtaggtttgttgagcttacggggatccctgttgcgagtacgttgatggggctgggatcttatccttgtgatgatgagttgtcgttacatatgcttggaatgcatgggactgtgtatgcaaattacgctgtggagcatagtgatttgttgttggcgtttggggtaaggtttgatgatcgtgtcacgggtaagcttgaggcttttgctagtagggctaagattgttcatattgatattgactcggctgagattgggaagaataagactcctcatgtgtctgtgtgtggtgatgttaagctggctttgcaagggatgaataaggttcttgagaaccgagcggaggagcttaagcttgattttggagtttggaggaatgagttgaacgtacagaaacagaagtttccgttgagctttaagacgtttggggaagctattcctccacagtatgcgattaaggtccttgatgagttgactgatggaaaagccataataagtactggtgtcgggcaacatcaaatgtgggcggcgcagttctacaattacaagaaaccaaggcagtggctatcatcaggaggccttggagctatgggatttggacttcctgctgcgattggagcgtctgttgctaaccctgatgcgatagttgtggatattgacggagatggaagctttataatgaatgtgcaagagctagccactattcgtgtagagaatcttccagtgaaggtacttttattaaacaaccagcatcttggcatggttatgcaatgggaagatcggttctacaaagctaaccgagctcacacatttctcggggatccggctcaggaggacgagatattcccgaacatgttgctgtttgcagcagcttgcgggattccagcggcgagggtgacaaagaaagcagatctccgagaagctattcagacaatgctggatacaccaggaccttacctgttggatgtgatttgtccgcaccaagaacatgtgttgccgatgatcccgagtggtggcactttcaacgatgtcataacggaaggagatggccggattaaatactga

SEQ ID NO: 138213 - protein, 670 aa, Arabidopsis thaliana
MAAATTTTTTSSSISFSTKPSPSSSKSPLPISRFSLPFSLNPNKSSSSSRRRGIKSSSPSSISAVLNTTTNVTTTPSPTKPTKPETFISRFAPDQPRKGADILVEALERQGVETVFAYPGGASMEIHQALTRSSSIRNVLPRHEQGGVFAAEGYARSSGKPGICIATSGPGATNLVSGLADALLDSVPLVAITGQVPRRMIGTDAFQETPIVEVTRSITKHNYLVMDVEDIPRIIEEAFFLATSGRPGPVLVDVPKDIQQQLAIPNWEQAMRLPGYMSRMPKPPEDSHLEQIVRLISESKKPVLYVGGGCLNSSDELGRFVELTGIPVASTLMGLGSYPCDDELSLHMLGMHGTVYANYAVEHSDLLLAFGVRFDDRVTGKLEAFASRAKIVHIDIDSAEIGKNKTPHVSVCGDVKLALQGMNKVLENRAEELKLDFGVWRNELNVQKQKFPLSFKTFGEAIPPQYAIKVLDELTDGKAIISTGVGQHQMWAAQFYNYKKPRQWLSSGGLGAMGFGLPAAIGASVANPDAIVVDIDGDGSFIMNVQELATIRVENLPVKVLLLNNQHLGMVMQWEDRFYKANRAHTFLGDPAQEDEIFPNMLLFAAACGIPAARVTKKADLREAIQTMLDTPGPYLLDVICPHQEHVLPMIPSGGTFNDVITEGDGRIKY

SEQ ID NO: 138214 - DNA, 1725 bp, Bacillus subtilis
  CDS (1)..(1725): transl_table=11
atggggactaatgtacaggtggattcagcatctgccgaatgtacacagacgatgagcggagcattaatgctgattgaatcattaaaaaaagagaaagtagaaatgatcttcggttatccgggcggggctgtgcttccgatttacgataagctatacaattcagggttggtacatatccttccccgtcacgaacaaggagcaattcatgcagcggagggatacgcaagggtctccggaaaaccgggtgtcgtcattgccacgtcagggccgggagcgacaaaccttgttacaggccttgctgatgccatgattgattcattgccgttagtcgtctttacagggcaggtagcaacctctgtaatcgggagcgatgcatttcaggaagcagacattttagggattacgatgccagtaacaaaacacagctaccaggttcgccagccggaagatctgccgcgcatcattaaagaagcgttccatattgcaacaactggaagacccggacctgtattgattgatattccgaaagatgtagcaacaattgaaggagaattcagctacgatcatgagatgaatctcccgggataccagccgacaacagagccgaattatttgcagatccgcaagcttgtggaagccgtgagcagtgcgaaaaaaccggtgatcctggcgggtgcgggcgtactgcacggaaaagcgtcagaagaattaaaaaattatgctgaacagcagcaaatccctgtggcacacacccttttggggctcggaggcttcccggctgaccatccgcttttcctagggatggcgggaatgcacggtacttatacagccaatatggcccttcatgaatgtgatctattaatcagtatcggcgcccgttttgatgaccgtgtcacaggaaacctgaaacactttgccagaaacgcaaagatagcccacatcgatattgatccagctgaaatcggaaaaatcatgaaaacacagattcctgtagtcggagacagcaaaattgtcctgcaggagctgatcaaacaagacggcaaacaaagcgattcaagcgaatggaaaaaacagctcgcagaatggaaagaagagtatccgctctggtatgtagataatgaagaagaaggttttaaacctcagaaattgattgaatatattcatcaatttacaaaaggagaggccattgtcgcaacggatgtaggccagcatcaaatgtggtcagcgcaattttatccgttccaaaaagcagataaatgggtcacgtcaggcggacttggaacgatgggattcggtcttccggcggcgatcggcgcacagctggccgaaaaagatgctactgttgtcgcggttgtcggagacggcggattccaaatgacgcttcaagaactcgatgttattcgcgaattaaatcttccggtcaaggtagtgattttaaataacgcttgtctcggaatggtcagacagtggcaggaaattttctatgaagaacgttattcagaatctaaattcgcttctcagcctgacttcgtcaaattgtccgaagcatacggcattaaaggcatcagaatttcatcagaagcggaagcaaaggaaaagctggaagaggcattaacatcaagagaacctgttgtcattgacgtgcgggttgccagcgaagaaaaagtattcccgatggtggctccggggaaagggctgcatgaaatggtgggggtgaaaccttga

SEQ ID NO: 138215 - protein, 574 aa, Bacillus subtilis
MGTNVQVDSASAECTQTMSGALMLIESLKKEKVEMIFGYPGGAVLPIYDKLYNSGLVHILPRHEQGAIHAAEGYARVSGKPGVVIATSGPGATNLVTGLADAMIDSLPLVVFTGQVATSVIGSDAFQEADILGITMPVTKHSYQVRQPEDLPRIIKEAFHIATTGRPGPVLIDIPKDVATIEGEFSYDHEMNLPGYQPTTEPNYLQIRKLVEAVSSAKKPVILAGAGVLHGKASEELKNYAEQQQIPVAHTLLGLGGFPADHPLFLGMAGMHGTYTANMALHECDLLISIGARFDDRVTGNLKHFARNAKIAHIDIDPAEIGKIMKTQIPVVGDSKIVLQELIKQDGKQSDSSEWKKQLAEWKEEYPLWYVDNEEEGFKPQKLIEYIHQFTKGEAIVATDVGQHQMWSAQFYPFQKADKWVTSGGLGTMGFGLPAAIGAQLAEKDATVVAVVGDGGFQMTLQELDVIRELNLPVKVVILNNACLGMVRQWQEIFYEERYSESKFASQPDFVKLSEAYGIKGIRISSEAEAKEKLEEALTSREPVVIDVRVASEEKVFPMVAPGKGLHEMVGVKP

SEQ ID NO: 138216 - DNA, 1881 bp, Corynebacterium glutamicum
  CDS (1)..(1881): transl_table=11
gtgaatgtggcagcttctcaacagcccactcccgccacggttgcaagccgtggtcgatccgccgcccctgagcggatgacaggtgcaaaggcaattgttcgatcgctcgaggagcttaacgccgacatcgtgttcggtattcctggtggtgcggtgctaccggtgtatgacccgctctattcctccacaaaggtgcgccacgtcttggtgcgccacgagcagggcgcaggccacgcagcaaccggctacgcgcaggttactggacgcgttggcgtctgcattgcaacctctggcccaggagcaaccaacttggttaccccaatcgctgatgcaaacttggactccgttcccatggttgccatcaccggccaggtcggaagtggcctgctgggtaccgacgctttccaggaagccgatatccgcggcatcaccatgccagtgaccaagcacaacttcatggtcaccaaccctaacgacattccacaggcattggctgaggcattccacctcgcgattactggtcgccctggccctgttctggtggatattcctaaggatgtccagaacgctgaattggatttcgtctggccaccaaagatcgacctgccaggctaccgcccagtttcaacaccacatgctcgccagatcgagcaggcagtcaagctgatcggtgaggccaagaagcccgtcctttacgttggtggtggcgtaatcaaggctgacgcacacgaagagcttcgtgcgttcgctgagtacaccggcatcccagttgtcaccaccttgatggctttgggtactttcccagagtctcacgagctgcacatgggtatgccaggcatgcatggcactgtgtccgctgttggtgcactgcagcgcagcgacctgctgattgctatcggctcccgctttgatgaccgcgtcaccggtgacgttgacaccttcgcgcctgacgccaagatcattcacgccgacattgatcctgccgaaatcggcaagatcaagcaggttgaggttccaatcgtgggcgatgcccgcgaagttcttgctcgtctgctggaaaccaccaaggcaagcaaggcagagaccgaggacatctccgagtgggttgactacctcaagggcctcaaggcacgtttcccgcgtggctacgacgagcagccaggcgatctgctggcaccacagtttgtcattgaaaccctgtccaaggaagttggccccgacgcaatttactgcgccggcgttggccagcaccaaatgtgggcagctcagttcgttgactttgaaaagccacgcacctggctcaactccggtggactgggcaccatgggctacgcagttcctgcggcccttggagcaaaggctggcgcacctgacaaggaagtctgggctatcgacggcgacggctgtttccagatgaccaaccaggaactcaccaccgccgcagttgaaggtttccccattaagatcgcactaatcaacaacggaaacctgggcatggttcgccaatggcagaccctattctatgaaggacggtactcaaatactaaacttcgtaaccagggcgagtacatgcccgactttgttaccctttctgagggacttggctgtgttgccatccgcgtcaccaaagcggaggaagtactgccagccatccaaaaggctcgagagatcaacgaccgcccagtagtcatcgacttcatcgtcggtgaagacgcacaggtatggccaatggtgtctgctggatcatccaactccgatatccagtacgcactcggattgcgcccattctttgatggtgatgaatctgcagcagaagatcctgccgacattcacgaagccgtcagcgacattgatgccgccgttgaatcgaccgaggcataa

SEQ ID NO: 138217 - protein, 626 aa, Corynebacterium glutamicum
MNVAASQQPTPATVASRGRSAAPERMTGAKAIVRSLEELNADIVFGIPGGAVLPVYDPLYSSTKVRHVLVRHEQGAGHAATGYAQVTGRVGVCIATSGPGATNLVTPIADANLDSVPMVAITGQVGSGLLGTDAFQEADIRGITMPVTKHNFMVTNPNDIPQALAEAFHLAITGRPGPVLVDIPKDVQNAELDFVWPPKIDLPGYRPVSTPHARQIEQAVKLIGEAKKPVLYVGGGVIKADAHEELRAFAEYTGIPVVTTLMALGTFPESHELHMGMPGMHGTVSAVGALQRSDLLIAIGSRFDDRVTGDVDTFAPDAKIIHADIDPAEIGKIKQVEVPIVGDAREVLARLLETTKASKAETEDISEWVDYLKGLKARFPRGYDEQPGDLLAPQFVIETLSKEVGPDAIYCAGVGQHQMWAAQFVDFEKPRTWLNSGGLGTMGYAVPAALGAKAGAPDKEVWAIDGDGCFQMTNQELTTAAVEGFPIKIALINNGNLGMVRQWQTLFYEGRYSNTKLRNQGEYMPDFVTLSEGLGCVAIRVTKAEEVLPAIQKAREINDRPVVIDFIVGEDAQVWPMVSAGSSNSDIQYALGLRPFFDGDESAAEDPADIHEAVSDIDAAVESTEA

SEQ ID NO: 138218 - DNA, 2374 bp, Cryptococcus neoformans
  CDS (48)..(2204)
cgcatatccccatctccatttcttaactctcatcgacagtcatcaaaatgcttacacgccaatctcgtcttctcagacgcatccctcccccgaacgcagtccttcagtcgggcctccaaagaagacacaggtccactgaccgttattccaacaacatccacacgtcttccactcaaaacgccccagctcccgtgtacgatgctcccatccgcgagaaaggtatgactatcgaggccaaggagcgtgtccgggcccatgccaggaaaattcaaagcagcgcttctactgctgctgcaagtcctgctgtcagacctcaacctgcccaacactttcaggcagcgcctcagcccatgcctgctaatacgcctcgttttgaaagcgacggccaggtaaagaacgggttggactactcatttatcggtctctccggtggccaaatcttccaagagatgatgcttcgtcacgacgtaaagcaggtctttggttatcccggcggcgccattcttcctgtctttgacgccatctataactcccctcacttcgatttcgttcttccaagacacgagcagggtgctggccacatggcggaaggctacgctcgcgtttctggcaaaccaggtgttgtccttgtcacttctggtcctggcgctaccaatgtcattaccccgatgcaagatgccttgagtgacggtgtgcctatggttgtcttctgtggtcaggtcgccacgaacctgattggttccgatgctttccaagaagccgatgtcgtcggtatttctagaagttgcacaaagtggaacgttatggtcaaagacatcgctgagctcccgagaagaatcaacgaagctttcaagattgctaccaccggccgtcctggccccgttttggttgatcttcccaaggatgtgaccgctgctatcctccggacaccaatccccgctaaatctgctcaacctggtcactctccttaccttccttccaatcctctcaacccgtcatctcaaccgtccgacccccttccaggcgatgccgatttgattacagaggctgcgcagatgatcaacaaggctaagagacccattatcttcgccggtaacggtgtcctttcgtcccctgaaggccctaaacttctcaaggagctctctgacaaggggaggattcctgtgaccaccactcttcagggtctgggagccttcgacgagagagacgagaagagtttacacatgatcggtatgcatgggtctgcatacgccaactttgcgatgcaagaggcggacgtgctgattgccttgggagtgagatttgatgatcgtgtgacagggaaggttgataccttcgctcccgctgccaaagctgctgctgctgagggccgaggtggtatcattcacttcgaaatccaacccaaaaacatcaataagattgttgaggcccagattcctgtgctcggcgatgtcgttgcctctcttgcagagcttgtccctcaaattgaagccgtcgaccgatctgcctggattggccgatgcaaggctactaaggaaaggtaccccttcacatacactcctagccaggagggccagaagttgaagccccaagaggttgttcaggagcttgaccgacaggctgaagctctcggcaaggagaagtttatcatctcgactggtgttggtcaacatcaaatgtgggcctgtcagtactaccgatggactgagcctcgttcgtgggtctcttctggtggtcttggtactatgggctttggtcttccctcagctatcggcgccaaggttgccgctcctgaaaagtatgtgatagacatcgacggtgatgcaagcttttccatgactgccatggagctagccactgcaagccagtacgacatcggtgtcaaggtattgttgttcaacaatgaattccaagggatggttgagcaatggcaagaccttttctacgaaaaccgatactcccatacccgaatgaccaaccccgacttcgttaagctctcagagtctatgggaaccaaaggactcaggtgcacgaagctcgaagatctgcctcgaatgatgaaggagttcctggagtacgatggcaagaggcctatcgtacttgaatgtctcgtttctagcgaacacgtatatcctatgattcctgcaggcaaagccttacatgagcagcttctccaccctcttcttcgaaacggctctgagtaaacgcttggagagccagctgaaagcaaacatcaaaattgtgtcatatgtcacgccgcagtctctaattattacatttctaaaaaatcagttcgtcaaggatccatatgacggatcactgttggtctgtcattctgttttgtatttggtgtatatgcatggtatttatcacg

SEQ ID NO: 138219 - protein, 718 aa, Cryptococcus neoformans
MLTRQSRLLRRIPPPNAVLQSGLQRRHRSTDRYSNNIHTSSTQNAPAPVYDAPIREKGMTIEAKERVRAHARKIQSSASTAAASPAVRPQPAQHFQAAPQPMPANTPRFESDGQVKNGLDYSFIGLSGGQIFQEMMLRHDVKQVFGYPGGAILPVFDAIYNSPHFDFVLPRHEQGAGHMAEGYARVSGKPGVVLVTSGPGATNVITPMQDALSDGVPMVVFCGQVATNLIGSDAFQEADVVGISRSCTKWNVMVKDIAELPRRINEAFKIATTGRPGPVLVDLPKDVTAAILRTPIPAKSAQPGHSPYLPSNPLNPSSQPSDPLPGDADLITEAAQMINKAKRPIIFAGNGVLSSPEGPKLLKELSDKGRIPVTTTLQGLGAFDERDEKSLHMIGMHGSAYANFAMQEADVLIALGVRFDDRVTGKVDTFAPAAKAAAAEGRGGIIHFEIQPKNINKIVEAQIPVLGDVVASLAELVPQIEAVDRSAWIGRCKATKERYPFTYTPSQEGQKLKPQEVVQELDRQAEALGKEKFIISTGVGQHQMWACQYYRWTEPRSWVSSGGLGTMGFGLPSAIGAKVAAPEKYVIDIDGDASFSMTAMELATASQYDIGVKVLLFNNEFQGMVEQWQDLFYENRYSHTRMTNPDFVKLSESMGTKGLRCTKLEDLPRMMKEFLEYDGKRPIVLECLVSSEHVYPMIPAGKALHEQLLHPLLRNGSE

SEQ ID NO: 138220 - DNA, 1689 bp, Escherichia coli
  CDS (1)..(1689): transl_table=11
atggcaagttcgggcacaacatcgacgcgtaagcgctttaccggcgcagaatttatcgttcatttcctggaacagcagggcattaagattgtgacaggcattccgggcggttctatcctgcctgtttacgatgccttaagccaaagcacgcaaatccgccatattctggcccgtcatgaacagggcgcgggctttatcgctcagggaatggcgcgcaccgacggtaaaccggcggtctgtatggcctgtagcggaccgggtgcgactaacctggtgaccgccattgccgatgcgcggctggactccatcccgctgatttgcatcactggtcaggttcccgcctcgatgatcggcaccgacgccttccaggaagtggacacctacggcatctctatccccatcaccaaacacaactatctggtcagacatatcgaagaactcccgcaggtcatgagcgatgccttccgcattgcgcaatcaggccgcccaggcccggtgtggatagacattcctaaggatgtgcaaacggcagtttttgagattgaaacacagcccgctatggcagaaaaagccgccgcccccgcctttagcgaagaaagcattcgtgacgcagcggcgatgattaacgctgccaaacgcccggtgctttatctgggcggcggtgtgatcaatgcgcccgcacgggtgcgtgaactggcggagaaagcgcaactgcctaccaccatgactttaatggcgctgggcatgttgccaaaagcgcatccgttgtcgctgggtatgctggggatgcacggcgtgcgcagcaccaactatattttgcaggaggcggatttgttgatagtgctcggtgcgcgttttgatgaccgggcgattggcaaaaccgagcagttctgtccgaatgccaaaatcattcatgtcgatatcgaccgtgcagagctgggtaaaatcaagcagccgcacgtggcgattcaggcggatgttgatgacgtgctggcgcagttgatcccgctggtggaagcgcaaccgcgtgcagagtggcaccagttggtagcggatttgcagcgtgagtttccgtgtccaatcccgaaagcgtgcgatccgttaagccattacggcctgatcaacgccgttgccgcctgtgtcgatgacaatgcaattatcaccaccgacgttggtcagcatcagatgtggaccgcgcaagcttatccgctcaatcgcccacgccagtggttgacctccggtgggctgggcacgatgggttttggcctgcctgcggcgattggcgctgcgctggcgaacccggatcgcaaagtgttgtgtttctccggcgacggcagcctgatgatgaatattcaggagatggcgaccgccagtgaaaatcagctggatgtcaaaatcattctgatgaacaacgaagcgctggggctggtgcatcagcaacagagtctgttctacgagcaaggcgtttttgccgccacctatccgggcaaaatcaactttatgcagattgccgccggattcggcctcgaaacctgtgatttgaataacgaagccgatccgcaggcttcattgcaggaaatcatcaatcgccctggcccggcgctgatccatgtgcgcattgatgccgaagaaaaagtttacccgatggtgccgccaggtgcggcgaatactgaaatggtgggggaataa

SEQ ID NO: 138221 - protein, 562 aa, Escherichia coli
MASSGTTSTRKRFTGAEFIVHFLEQQGIKIVTGIPGGSILPVYDALSQSTQIRHILARHEQGAGFIAQGMARTDGKPAVCMACSGPGATNLVTAIADARLDSIPLICITGQVPASMIGTDAFQEVDTYGISIPITKHNYLVRHIEELPQVMSDAFRIAQSGRPGPVWIDIPKDVQTAVFEIETQPAMAEKAAAPAFSEESIRDAAAMINAAKRPVLYLGGGVINAPARVRELAEKAQLPTTMTLMALGMLPKAHPLSLGMLGMHGVRSTNYILQEADLLIVLGARFDDRAIGKTEQFCPNAKIIHVDIDRAELGKIKQPHVAIQADVDDVLAQLIPLVEAQPRAEWHQLVADLQREFPCPIPKACDPLSHYGLINAVAACVDDNAIITTDVGQHQMWTAQAYPLNRPRQWLTSGGLGTMGFGLPAAIGAALANPDRKVLCFSGDGSLMMNIQEMATASENQLDVKIILMNNEALGLVHQQQSLFYEQGVFAATYPGKINFMQIAAGFGLETCDLNNEADPQASLQEIINRPGPALIHVRIDAEEKVYPMVPPGAANTEMVGE

SEQ ID NO: 138222 - DNA, 1776 bp, Methanococcus jannaschii
  CDS (1)..(1776): transl_table=11
atgaaaggtgctgaagcaatcataaaagcattggaagcggagggagttaagattatatttggttatccaggaggagctatgcttcctttttatgatgcgttgtatgatagcgatttagttcatatattaacaaggcatgaacaggcagcagcacatgcagcagatggatttgcgagagcaagtggagaggctggggtttgcgtctctacctctggccctggagctacaaacttagttactgggatagcaaccgcttatgcagattcttctccagttattgctttaacagggcaagtcccaacaaaacttattggaaacgatgcatttcaggagattgacgctcttggattattcatgccaataacaaaacacaatttccaaataaaaaaaccagaagagattccagagacgtttagagccgcttttgaaattgccacaactggaagaccaggaccggttcatatagacctcccaaaggatgtgcaagatggagaaatagatattgaaaaatacccaattcctgcaaaggttgatttgccaggttataaaccaaaaactgtagggcatcctctacagataaagaaagctgctaaattgatagctgaatctgagagacctgtaatcttagctggtggaggagttataattagtggagcttcagaagagttattgagattagctgagtttgttaaaattccagtatgcacaaccttaatgggtaagggttgtttcccagaagaccatcctttagctttaggaatggttggaatgcatggaactaaagctgcaaattacgcagttacggagtgtgatgttctcatagctattggatgtagattttcagatagggttactggggatatcagatactttgctccagaggcaaagattattcatatagatatagacccagctgagataggaaaaaatgttagagctgatattccaatagttggagatgcaaaaaatgttttgagagatttgttagctgcattaatagcattagaaattaaagacaaagaaacatggcttgaaagaatttatgaattaaaaaaattatctatcccaatgatggactttgatgataagccaataaagccacaaaggtttgttaaggatttaatggaagttttgaatgagattgactcaaaattaaaaaacacaattataacaacagatgttggacaaaatcagatgtggatggcacacttctttaaaacaaagatgccaagaagctttttagcttctggtggtttaggaactatgggttttggtttccctgctgcaattggggcaaaggtagctaaaccttatgctaatgttatctctattactggagatggaggatttttgatgaactctcaggagttggcaacaattagcgaatatgatattcctgttgttatctgtatttttgacaacagaactttgggaatggtctatcaatggcaaaacctatactatgggcagaggcagagtgaagttcatttgggagagagtcctgactttgttaaattagctgaaagttatggagttaaagctgatagaataataagcccagatgaaattaaagagaagttgaaagaagcaatattaagtaatgagccatacctcttagatattgttatagaccctgctgaagctctgccaatggttcctccaggtgggagattaaccaatattgtccagccaattagggtagaaccaaaaataaaaaaaccacagttcgatgaaattaagaaaataagagatatggcagcagttaaagagttttag

SEQ ID NO: 138223 - protein, 591 aa, Methanococcus jannaschii
MKGAEAIIKALEAEGVKIIFGYPGGAMLPFYDALYDSDLVHILTRHEQAAAHAADGFARASGEAGVCVSTSGPGATNLVTGIATAYADSSPVIALTGQVPTKLIGNDAFQEIDALGLFMPITKHNFQIKKPEEIPETFRAAFEIATTGRPGPVHIDLPKDVQDGEIDIEKYPIPAKVDLPGYKPKTVGHPLQIKKAAKLIAESERPVILAGGGVIISGASEELLRLAEFVKIPVCTTLMGKGCFPEDHPLALGMVGMHGTKAANYAVTECDVLIAIGCRFSDRVTGDIRYFAPEAKIIHIDIDPAEIGKNVRADIPIVGDAKNVLRDLLAALIALEIKDKETWLERIYELKKLSIPMMDFDDKPIKPQRFVKDLMEVLNEIDSKLKNTIITTDVGQNQMWMAHFFKTKMPRSFLASGGLGTMGFGFPAAIGAKVAKPYANVISITGDGGFLMNSQELATISEYDIPVVICIFDNRTLGMVYQWQNLYYGQRQSEVHLGESPDFVKLAESYGVKADRIISPDEIKEKLKEAILSNEPYLLDIVIDPAEALPMVPPGGRLTNIVQPIRVEPKIKKPQFDEIKKIRDMAAVKEF

SEQ ID NO: 138224 - DNA, 2010 bp, Schizosaccharomyces pombe
  CDS (1)..(2010)
atgactgtgctggctccccttagaagattgcatacgagggcggctttctcgtcttatggacgagaaattgcccttcaaaagagatttttaaatttaaatagttgctcagctgtgcggaggtatggcaccggctttagtaataatttgagaattaaaaaattaaaaaatgcattcggtgtcgttcgggcaaattcgaccaaaagcacctctacagtgactacggctagtcctataaaatatgacagctcgtttgttggaaagactgggggtgaaattttccatgatatgatgctcaagcataatgttaagcatgtatttggttatccaggtggtgctatcttgcctgtcttcgatgcaatttatagatctcctcattttgaatttatcttgccaagacacgagcaagctgctggacatgcagcccaagcttattcccgcgttactaaaaaacccggcgttgtattggttacttctggacccggtgctacgaatgtgattaccccgattgctgatgcattggccgacggtactcccctagttgtattctctggtcaagtagcaaccagcgcaattggtagtgatgcatttcaagaagctgacatggttggtatttctcgttcatgtactaaatggaatgtaatggtcaaagatgttgctgatcttccccgtcgtatagacgaagcttttgagatagctacttctggacgccctggccctgtattggttgaccttcccaaagatgtcactgctagcgttttgaaggagcccattcctatactgtcttctgtaccatcaatgaatcgcagaatgaaggaagtcttagaagagggctccaagaacgttactgccaagatcgatcgtgttgccaatttactaaaattagccaagaagcctgtgattttctgtgggcatggtgttttagctaatcccgaatgccccactttgttacgcaagtttagcgaaaggctgcaaattcctgttactacttctttgcttggacttggtgctgtagatgaacgttctgaccttagtttgcatatgctcggtatgcatggtagtggatacgctaatatggccatgcaggaagccgatcttatccttgctcttggtgttcgctttgacgaccgtgtcaccggtaacgtaagtttgtttgctcctcaagcacgtcttgctgctgccgaagagcgtggcggtattattcactttgatatttcacccaaaaatatcggtaaggtcgtacaacctactgaagcaatagagggcgatgtatacgaatctctaaagcttttagattctgctactaaaaatattaaaattccttcccgatttgactggttatctcaaattcaaacatggaaggaacgcttccctttcactttcactcgtagcgctcctggtgaattggtaaagcctcaagaagtcattcaagaacttgacaaacaaacttctgacataaaggacaaagtcactattaccaccggtgtcggtgcacatcaaatgtgggccgctacattctatcgttggacaaaacctagttctttggtaacctccggtggtctcggtactatgggatttggtctcccagctgccataggtgctagcgttgctgcacctaaagatattgttatagatattgatggtgatgcttcattttcaatgactggtatggaacttgctaccgtccgtcaatttgatatcccagttaaaattcttatcctaaataatgaagagcaaggcatggtcactcaatggcaaaacttgttttatgagaaacgctattctcatactcatcaaaagaatcccaacttcgttaagttggctgacgctatgggcatcaaagcactacgtgtagaaaagagagaagatttggctaaaaaaatgaaggagtttttgtcaactaaaggtcctgtgcttatggaagttttggttgcccaaaaggaacatgtgtatccatttgtccctggtggtaaggctcttcaccaatttattttgcatgaaagcctttcataa

SEQ ID NO: 138225 - protein, 669 aa, Schizosaccharomyces pombe
MTVLAPLRRLHTRAAFSSYGREIALQKRFLNLNSCSAVRRYGTGFSNNLRIKKLKNAFGVVRANSTKSTSTVTTASPIKYDSSFVGKTGGEIFHDMMLKHNVKHVFGYPGGAILPVFDAIYRSPHFEFILPRHEQAAGHAAQAYSRVTKKPGVVLVTSGPGATNVITPIADALADGTPLVVFSGQVATSAIGSDAFQEADMVGISRSCTKWNVMVKDVADLPRRIDEAFEIATSGRPGPVLVDLPKDVTASVLKEPIPILSSVPSMNRRMKEVLEEGSKNVTAKIDRVANLLKLAKKPVIFCGHGVLANPECPTLLRKFSERLQIPVTTSLLGLGAVDERSDLSLHMLGMHGSGYANMAMQEADLILALGVRFDDRVTGNVSLFAPQARLAAAEERGGIIHFDISPKNIGKVVQPTEAIEGDVYESLKLLDSATKNIKIPSRFDWLSQIQTWKERFPFTFTRSAPGELVKPQEVIQELDKQTSDIKDKVTITTGVGAHQMWAATFYRWTKPSSLVTSGGLGTMGFGLPAAIGASVAAPKDIVIDIDGDASFSMTGMELATVRQFDIPVKILILNNEEQGMVTQWQNLFYEKRYSHTHQKNPNFVKLADAMGIKALRVEKREDLAKKMKEFLSTKGPVLMEVLVAQKEHVYPFVPGGKALHQFILHESLS

SEQ ID NO: 138226 - DNA, 2064 bp, Saccharomyces cerevisiae
  CDS (1)..(2064)
atgatcagacaatctacgctaaaaaacttcgctattaagcgttgctttcaacatatagcataccgcaacacacctgccatgagatcagtagctctcgcgcagcgcttttatagttcgtcttcccgttattacagtgcgtctccattaccagcctctaaaaggccagagcctgctccaagtttcaatgttgatccattagaacagcccgctgaaccttcaaaattggctaagaaactacgcgctgagcctgacatggatacctctttcgtcggtttaactggtggtcaaatatttaacgaaatgatgtccagacaaaacgttgatactgtatttggttatccaggtggtgctatcctacctgtttacgatgccattcataacagtgataaattcaacttcgttcttccaaaacacgaacaaggtgccggtcacatggcagaaggctacgccagagcttctggtaaaccaggtgttgtcttggttacttctgggccaggtgccaccaatgtcgttactccaatggcagatgcctttgcagacgggattccaatggttgtctttacagggcaagtcccaactagtgctatcggtactgatgctttccaagaggctgacgtcgttggtatttctagatcttgtacgaaatggaatgtcatggtcaagtccgtggaagaattgccattgcgtattaacgaggcttttgaaattgccacgagcggtagaccgggaccagtcttggtcgatttaccaaaggatgttacagcagctatcttaagaaatccaattccaacaaaaacaactcttccatcaaacgcactaaaccaattaaccagtcgcgcacaagatgaatttgtcatgcaaagtatcaataaagcagcagatttgatcaacttggcaaagaaacctgtcttatacgtcggtgctggtattttaaaccatgcagatggtccaagattactaaaagaattaagtgaccgtgctcaaatacctgtcaccactactttacaaggtttaggttcattcgaccaagaagatccaaaatcattggatatgcttggtatgcacggttgtgctactgccaacctggcagtgcaaaatgccgacttgataattgcagttggtgctagattcgacgaccgtgtcactggtaatatttctaaattcgctccagaagctcgtcgtgcagctgccgagggtagaggtggtattattcatttcgaggttagtccaaaaaacataaacaaggttgttcaaactcaaatagcagtggaaggtgatgctacgaccaatctgggcaaaatgatgtcaaagattttcccagttaaggagaggtctgaatggtttgctcaaataaataaatggaagaaggaatacccatacgcttatatggaggagactccaggatctaaaattaaaccacagacggttataaagaaactatccaaggttgccaacgacacaggaagacatgtcattgttacaacgggtgtggggcaacatcaaatgtgggctgctcaacactggacatggagaaatccacatactttcatcacatcaggtggtttaggtacgatgggttacggtctccctgccgccatcggtgctcaagttgcaaagccagaatctttggttattgacattgatggtgacgcatcctttaacatgactctaacggaattgagttctgccgttcaagctggtactccagtgaagattttgattttgaacaatgaagagcaaggtatggttactcaatggcaatccctgttctacgaacatcgttattcccacacacatcaattgaaccctgatttcataaaactagcggaggctatgggtttaaaaggtttaagagtcaagaagcaagaggaattggacgctaagttgaaagaattcgtttctaccaagggcccagttttgcttgaagtggaagttgataaaaaagttcctgttttgccaatggtggcaggtggtagcggtctagacgagttcataaattttgacccagaagttgaaagacaacagactgaattacgtcataagcgtacaggcggtaagcactga

SEQ ID NO: 138227 - protein, 687 aa, Saccharomyces cerevisiae [sequence omitted]

SEQ ID NO: 138228 - DNA, 1647 bp, Escherichia coli
  CDS (1)..(1647): transl_table=11
atgaatggcgcacagtgggtggtacatgcgttgcgggcacagggtgtgaacaccgttttcggttatccgggtggcgcaattatgccggtttacgatgcattgtatgacggcggcgtggagcacttgctatgccgacatgagcagggtgcggcaatggcggctatcggttatgctcgtgctaccggcaaaactggcgtatgtatcgccacgtctggtccgggcgcaaccaacctgataaccgggcttgcggacgcactgttagattccatccctgttgttgccatcaccggtcaagtgtccgcaccgtttatcggcactgacgcatttcaggaagtggatgtcctgggattgtcgttagcctgtaccaagcacagctttctggtgcagtcgctggaagagttgccgcgcatcatggctgaagcattcgacgttgcctgctcaggtcgtcctggtccggttctggtcgatatcccaaaagatatccagttagccagcggtgacctggaaccgtggttcaccaccgttgaaaacgaagtgactttcccacatgccgaagttgagcaagcgcgccagatgctggcaaaagcgcaaaaaccgatgctgtacgttggcggtggcgtgggtatggcgcaggcagttccggctttgcgtgaatttctcgctgccacaaaaatgcctgccacctgtacgctgaaagggctgggcgcagtagaagcagattatccgtactatctgggcatgctggggatgcacggcaccaaagcggcaaacttcgcggtgcaggagtgtgacctgctgatcgccgtgggcgcacgttttgatgaccgggtgaccggcaaactgaacaccttcgcgccacacgccagtgttatccatatggatatcgacccggcagaaatgaacaagctgcgtcaggcacatgtggcattacaaggtgatttaaatgctctgttaccagcattacagcagccgttaaatcaatatgactggcagcaacactgcgcgcagctgcgtgatgaacattcctggcgttacgaccatcccggtgacgctatctacgcgccgttgttgttaaaacaactgtcggatcgtaaacctgcggattgcgtcgtgaccacagatgtggggcagcaccagatgtgggctgcgcagcacatcgcccacactcgcccggaaaatttcatcacctccagcggtttaggtaccatgggttttggtttaccggcggcggttggcgcacaagtcgcgcgaccgaacgataccgttgtctgtatctccggtgacggctctttcatgatgaatgtgcaagagctgggcaccgtaaaacgcaagcagttaccgttgaaaatcgtcttactcgataaccaacggttagggatggttcgacaatggcagcaactgttttttcaggaacgatacagcgaaaccacccttactgataaccccgatttcctcatgttagccagcgccttcggcatccatggccaacacatcacccggaaagaccaggttgaagcggcactcgacaccatgctgaacagtgatgggccatacctgcttcatgtctcaatcgacgaacttgagaacgtctggccgctggtgccgcctggcgccagtaattcagaaatgttggagaaattatcatga

SEQ ID NO: 138229 - protein, 548 aa, Escherichia coli
MNGAQWVVHALRAQGVNTVFGYPGGAIMPVYDALYDGGVEHLLCRHEQGAAMAAIGYARATGKTGVCIATSGPGATNLITGLADALLDSIPVVAITGQVSAPFIGTDAFQEVDVLGLSLACTKHSFLVQSLEELPRIMAEAFDVACSGRPGPVLVDIPKDIQLASGDLEPWFTTVENEVTFPHAEVEQARQMLAKAQKPMLYVGGGVGMAQAVPALREFLAATKMPATCTLKGLGAVEADYPYYLGMLGMHGTKAANFAVQECDLLIAVGARFDDRVTGKLNTFAPHASVIHMDIDPAEMNKLRQAHVALQGDLNALLPALQQPLNQYDWQQHCAQLRDEHSWRYDHPGDAIYAPLLLKQLSDRKPADCVVTTDVGQHQMWAAQHIAHTRPENFITSSGLGTMGFGLPAAVGAQVARPNDTVVCISGDGSFMMNVQELGTVKRKQLPLKIVLLDNQRLGMVRQWQQLFFQERYSETTLTDNPDFLMLASAFGIHGQHITRKDQVEAALDTMLNSDGPYLLHVSIDELENVWPLVPPGASNSEMLEKLS

SEQ ID NO: 138230 - DNA, 1725 bp, Escherichia coli
  CDS (1)..(1725): transl_table=11
atggagatgttgtctggagccgagatggtcgtccgatcgcttatcgatcagggcgttaaacaagtattcggttatcccggaggcgcagtccttgatatttatgatgcattgcataccgtgggtggtattgatcatgtattagttcgtcatgagcaggcggcggtgcatatggccgatggcctggcgcgcgcgaccggggaagtcggcgtcgtgctggtaacgtcgggtccaggggcgaccaatgcgattactggcatcgccaccgcttatatggattccattccattagttgtcctttccgggcaggtagcgacctcgttgataggttacgatgcctttcaggagtgcgacatggtggggatttcgcgaccggtggttaaacacagttttctggttaagcaaacggaagacattccgcaggtgctgaaaaaggctttctggctggcggcaagtggtcgcccaggaccagtagtcgttgatttaccgaaagatattcttaatccggcgaacaaattaccctatgtctggccggagtcggtcagtatgcgttcttacaatcccactactaccggacataaagggcaaattaagcgtgctctgcaaacgctggtagcggcaaaaaaaccggttgtctacgtaggcggtggggcaatcacggcgggctgccatcagcagttgaaagaaacggtggaggcgttgaatctgcccgttgtttgctcattgatggggctgggggcgtttccggcaacgcatcgtcaggcactgggcatgctgggaatgcacggtacctacgaagccaatatgacgatgcataacgcggatgtgattttcgccgtcggggtacgatttgatgaccgaacgacgaacaatctggcaaagtactgcccaaatgccactgttctgcatatcgatattgatcctacttccatttctaaaaccgtgactgcggatatcccgattgtgggggatgctcgccaggtcctcgaacaaatgcttgaactcttgtcgcaagaatccgcccatcaaccactggatgagatccgcgactggtggcagcaaattgaacagtggcgcgctcgtcagtgcctgaaatatgacactcacagtgaaaagattaaaccgcaggcggtgatcgagactctttggcggttgacgaagggagacgcttacgtgacgtccgatgtcgggcagcaccagatgtttgctgcactttattatccattcgacaaaccgcgtcgctggatcaattccggtggcctcggcacgatgggttttggtttacctgcggcactgggcgtcaaaatggcgttgccagaagaaaccgtggtttgcgtcactggcgacggcagtattcagatgaacatccaggaactgtctaccgcgttgcaatacgagttgcccgtactggtggtgaatctcaataaccgctatctggggatggtgaagcagtggcaggacatgatctattccggccgtcattcacaatcttatatgcaatcgctacccgatttcgtccgtctggcggaagcctatgggcatgtcgggatccagatttctcatccgcatgagctggaaagcaaacttagcgaggcgctggaacaggtgcgcaataatcgcctggtgtttgttgatgttaccgtcgatggcagcgagcacgtctacccgatgcagattcgcgggggcggaatggatgaaatgtggttaagcaaaacggagagaacctga

SEQ ID NO: 138231 - protein, 574 aa, Escherichia coli
MEMLSGAEMVVRSLIDQGVKQVFGYPGGAVLDIYDALHTVGGIDHVLVRHEQAAVHMADGLARATGEVGVVLVTSGPGATNAITGIATAYMDSIPLVVLSGQVATSLIGYDAFQECDMVGISRPVVKHSFLVKQTEDIPQVLKKAFWLAASGRPGPVVVDLPKDILNPANKLPYVWPESVSMRSYNPTTTGHKGQIKRALQTLVAAKKPVVYVGGGAITAGCHQQLKETVEALNLPVVCSLMGLGAFPATHRQALGMLGMHGTYEANMTMHNADVIFAVGVRFDDRTTNNLAKYCPNATVLHIDIDPTSISKTVTADIPIVGDARQVLEQMLELLSQESAHQPLDEIRDWWQQIEQWRARQCLKYDTHSEKIKPQAVIETLWRLTKGDAYVTSDVGQHQMFAALYYPFDKPRRWINSGGLGTMGFGLPAALGVKMALPEETVVCVTGDGSIQMNIQELSTALQYELPVLVVNLNNRYLGMVKQWQDMIYSGRHSQSYMQSLPDFVRLAEAYGHVGIQISHPHELESKLSEALEQVRNNRLVFVDVTVDGSEHVYPMQIRGGGMDEMWLSKTERT

SEQ ID NO: 138232 - DNA, 1713 bp, Brassica napus
  CDS (1)..(1713)
atggcggatgattcagcagccactccaccgtcaatcgacggcaacaccctcgtcgcgaaatccctatcccatctcggcgtcacccacatgttcggcgtcgttggaatccccgtcacctccctagccacccgcgccatggctctcggcatccgcttcatcgccttccacaacgagcagtccgccgggtacgccgcctccgcgtacggctacctcactggcaaaccgggaatcctcctcaccgtctcgggcccggggtgcgtccacggcctcgcgggtctctccaacgcctgggccaacacctggccgatggtgatgatctccggctcgtgcgatcagagagacgccgggcgcggggatttccaggagctcgatcagatcgaggctgttaaagccttctcgaagctatcggagaaggcgagggacgttcgcgagatccccaattgcgtttctagggttttgaatcgagccgggtcgggtcgacccggcgggtgttatctggatcttccgtctgacgtgttgcgtcagaggatcgttgagtccgaggcggatgatctggtggcgaaagtgggtacctttaatgagcacgtgacttcggcacgtgcttcggagattgaatctgcggttacgcttctgaggaaggcagagaggccgttgattgtgttcggtaaaggagctgcgtattcgcgagcggaggatgagttgaagaagctcgtggagcttactgggatacctttcctccctactccgatggggaaaggcttgttgccggatacccacgagctgtctgctactgcggcgaggtcgcttgcgattgggaaatgcgacgtcgctttggtggttggagctaggcttaactggcttctccacttcggggaggctccgaaatggtctaaagatgtgaactttgtgctggtcgatgtctccgaggaggagattgagctgaggaagcctcgcttggggatcgtcggagatgctaaaacggtggtgggtttgctgaacagagagataaaggacgatcctttttgtctggggaaaacgaatccgtgggtggaggcgatctccaagaaggcgagagagaacggtgagaagatggagatgcagcttgcgaaagatgtggttcctttcaacttcttgactcctatgaggatcatcagagacgcgattttggcggtggaaggaccgagtcctgttgtggtgtcggaaggggctaacacgatggatgtggggagatcggttttggttcagagagagccgaggacgaggcttgatgcagggacttgggggacaatgggtgttggtttgggttattgtattgctgctgctgttgcttgtcctgatcggcttgttgttgctgttgaaggtgactctggttttggattcagcgccatggaagttgagacattggttagatacaatcttcctgtggtggtgattgtcttcaacaacggtggtgtatatggcggtgacaggaggagtcctgaagagatctcgggtcctcataaagaagatccagcaccaacgtcgtttgttccaaatgcagggtatcacaagcttattgaagcttttggaggcaaagggtatatagtggaaacgcccgatgagcttaaggccgccctctctgagtcgtttgctgcaagaaaacctgcggtggttaatgttattatcgatccctttgctggtgctgagagtgggaggttgcagcacaagaactag

SEQ ID NO: 138233 - protein, 570 aa, Brassica napus
MADDSAATPPSIDGNTLVAKSLSHLGVTHMFGVVGIPVTSLATRAMALGIRFIAFHNEQSAGYAASAYGYLTGKPGILLTVSGPGCVHGLAGLSNAWANTWPMVMISGSCDQRDAGRGDFQELDQIEAVKAFSKLSEKARDVREIPNCVSRVLNRAGSGRPGGCYLDLPSDVLRQRIVESEADDLVAKVGTFNEHVTSARASEIESAVTLLRKAERPLIVFGKGAAYSRAEDELKKLVELTGIPFLPTPMGKGLLPDTHELSATAARSLAIGKCDVALVVGARLNWLLHFGEAPKWSKDVNFVLVDVSEEEIELRKPRLGIVGDAKTVVGLLNREIKDDPFCLGKTNPWVEAISKKARENGEKMEMQLAKDVVPFNFLTPMRIIRDAILAVEGPSPVVVSEGANTMDVGRSVLVQREPRTRLDAGTWGTMGVGLGYCIAAAVACPDRLVVAVEGDSGFGFSAMEVETLVRYNLPVVVIVFNNGGVYGGDRRSPEEISGPHKEDPAPTSFVPNAGYHKLIEAFGGKGYIVETPDELKAALSESFAARKPAVVNVIIDPFAGAESGRLQHKN

SEQ ID NO: 138234 - DNA, 1701 bp, Glycine max
  CDS (1)..(1701)
atggagatagatggcaacgttctcgcggccaagtcgctggtgcgcttcggtgtgcagcacatgttcggcgtggtggggattccggtgacgtcgctggccaaccgcgccgtctcgctcggtgtcagattcattgcttttcacaacgagcagtccgcgggctacgccgcctccgcctacggctacctcaccggccgccccggcgtgttcctcaccgtctccggccccggctgcgtccacggcctcgccggcctctccaacgcctccgtcaacacctggcccaccgtcatgatctccggctcctgcgaccaaaacgacgtcggccgcggcgattttcaagaactcaaccagatcgaagccaccaaacccttcaccaaactctccgtcaaagcctcgcatatctccgaaatcccggcccgcgtggcccaggttctcgattgggcccaatcggcccggcccggtggctgctacttagatctccccaccgacgtcttacatcaaaaaatctccgagtccgaagcagagaaactcttatccgaagcagaaaataaccgttcgatttccaatcctaaacccgaacctcctcttttcaattcaaagattgaacaagcggtttctcttctcagacacgcggagaggccgttgatagtgttcggaaaaggagcggcgtatgcacgtgcggagcacgtgcttacgaagctggtgaattcgactgggattccgtttctcccaactccgatgggtaaaggaattttaccagataatcacgagcttgcggctactgcagcaaggtcactcgcgattgggaagtgtgacgtggcgcttgttgttggagcgagactcaactggcttctacacttcggtgagccaccaaaatggtcgaaggacgtgaaattcatcttggtggatgtgagtgaagaggaaattgagctgaggaagcctcatttagggttaattggtgatgctaagcacgtgattgaggttttgaacaaggagattaaggacgatccgttttgcttggggagcacgcatccctgggtggaggcgatttcgaacaaggcgaaggacaatgtggcgaagatggaggttcagctgaagaaggacattgtgccgtttaatttcttgacgcccatgaggattataagggatgccattgcgggtttggggagccctgctcccattgtggtttcggaaggggcgaataccatggatgtgggaaggtctgtgttggttcagactgagccccggacgaggttggatgctggcacgtgggggaccatgggggttggtcttggttactgcattgctgctgcggttgctgagcccgggcggctcgtggttgcagttgaaggagattctggatttgggtttagtgctatggaagttgagacgttggtacggtaccagctgcctgtggtcgtgattgttttcaacaatggtggcgtatatggtggtgaccgtagacacccagaggagatagatggacctcacaaagatgatcctgcccccacagattttgtcccaaatgcaggataccatgctttgatagaagcttttggtggaaagggctatcttgttgggacgcctgatgaactaaagtctgctctttcagaatccttctctgctcggaaaccagccgtagtaaatgttgtgattgatccctatgctggttcagagagtgggaggatgcaacataagaattga

SEQ ID NO: 138235 - protein, 566 aa, Glycine max
MEIDGNVLAAKSLVRFGVQHMFGVVGIPVTSLANRAVSLGVRFIAFHNEQSAGYAASAYGYLTGRPGVFLTVSGPGCVHGLAGLSNASVNTWPTVMISGSCDQNDVGRGDFQELNQIEATKPFTKLSVKASHISEIPARVAQVLDWAQSARPGGCYLDLPTDVLHQKISESEAEKLLSEAENNRSISNPKPEPPLFNSKIEQAVSLLRHAERPLIVFGKGAAYARAEHVLTKLVNSTGIPFLPTPMGKGILPDNHELAATAARSLAIGKCDVALVVGARLNWLLHFGEPPKWSKDVKFILVDVSEEEIELRKPHLGLIGDAKHVIEVLNKEIKDDPFCLGSTHPWVEAISNKAKDNVAKMEVQLKKDIVPFNFLTPMRIIRDAIAGLGSPAPIVVSEGANTMDVGRSVLVQTEPRTRLDAGTWGTMGVGLGYCIAAAVAEPGRLVVAVEGDSGFGFSAMEVETLVRYQLPVVVIVFNNGGVYGGDRRHPEEIDGPHKDDPAPTDFVPNAGYHALIEAFGGKGYLVGTPDELKSALSESFSARKPAVVNVVIDPYAGSESGRMQHKN

SEQ ID NO: 138236 - DNA, 1701 bp, Glycine max
  CDS (1)..(1701)
atggaaattgacggcaacgttctcgcggcgaagtcgctggttcacttcggcgtgcagcacatgttcggcgtcgtggggattccggtgacctcgctggccaaccgcgccgtctcgctcggtgtgagattcatcgccttccacaacgagcagtccgcgggctatgccgcctccgcctacggctacctcacggggcgccccggcgtcttcctcaccgtctccggccctggctgcgtccacggcctcgccggcctctccaacgcctccgtcaacacctggcccaccgtcatgatctccggctcctgcgaccaaaacgacgtcggccgcggcgattttcaagaactcaaccagatcgaagccaccaaacctttcaccaaactctccgtcaaagcgtctcacataactgaaatcccggcccgcgtggcccaggttctcgattgggcccaatcggcccggcccggcggctgctacttagatctccccaccgacgtcttacatcaaaaaatctccgagtccgaagcagagaaactcttaactgaagcagataaaaaccgttccatatccgaacctaaaatcgaacgtcctctttccaattcaaagattgaggaagcggtttcgcttctcagacacgcggagaggccgttgatcgtgttcggaaaaggagctgcgtatgcacgtgcagagcacgtgctcacaaagctggtgaattccactgggattccttttctcccaactccgatggggaaaggaattttacctgacacccacgcacttgcggctactgcagcaaggtcactagcgattgggaagtgtgatgtggcgcttgtggtgggagcgagactcaactggcttctacacttcggtgaaccaccgaaatggtctaaggacgtgaaattcatcttggtggatgtgagcgaagaggagattgagctgaggaagcctcacttagggttaattggtgatgccaaacacgtgattgaggttttgaacaaggagattaaggacgatccgttttgcttggggagcacgcatccttgggtggaggcgatttcgaacaaggcaaaggagaatgtggcgaggatggaggttcagctgaagaaggacgttgtgccgtttaatttcttgacgcctatgaggattataagggatgccattgcgggtttggggagccctgctcctgttgtggtttcggaaggggcgaacaccatggatgtggggaggtctgtgttggttcagaccgagccccgaacgaggttggatgccggcacctgggggaccatgggggttggtcttggttattgtattgctgccgcggttgcttcgcccgagcggcttgtggttgcggttgaaggggattctggatttgggtttagtgctatggaagttgagacgttggttcggtaccagctgcctgtggtcgtgattgttttcaacaatggtggtgtatatggtggtgaccgtagacgcccagaggagatagatggacctcacaaagatgatcctgcccccacagattttgtcccaaatgcagggtaccatgctttgatagaagcttttggtggaaagggctatcttgttgggacgcctgatgaactcaagtctgccctttcagaatccttctctgctaggaaaccagctgtagtaaatgttgtgatcgatccctatgctggttcagagagtgggaggatgcaacataagaattga

SEQ ID NO: 138237 - protein, 566 aa, Glycine max
MEIDGNVLAAKSLVHFGVQHMFGVVGIPVTSLANRAVSLGVRFIAFHNEQSAGYAASAYGYLTGRPGVFLTVSGPGCVHGLAGLSNASVNTWPTVMISGSCDQNDVGRGDFQELNQIEATKPFTKLSVKASHITEIPARVAQVLDWAQSARPGGCYLDLPTDVLHQKISESEAEKLLTEADKNRSISEPKIERPLSNSKIEEAVSLLRHAERPLIVFGKGAAYARAEHVLTKLVNSTGIPFLPTPMGKGILPDTHALAATAARSLAIGKCDVALVVGARLNWLLHFGEPPKWSKDVKFILVDVSEEEIELRKPHLGLIGDAKHVIEVLNKEIKDDPFCLGSTHPWVEAISNKAKENVARMEVQLKKDVVPFNFLTPMRIIRDAIAGLGSPAPVVVSEGANTMDVGRSVLVQTEPRTRLDAGTWGTMGVGLGYCIAAAVASPERLVVAVEGDSGFGFSAMEVETLVRYQLPVVVIVFNNGGVYGGDRRRPEEIDGPHKDDPAPTDFVPNAGYHALIEAFGGKGYLVGTPDELKSALSESFSARKPAVVNVVIDPYAGSESGRMQHKN

SEQ ID NO: 138238 - DNA, 1980 bp, Zea mays
  CDS (1)..(1980)
atgcgtctcctcctgcggcgtcggcggcggttcccgacgcctgccgaaacagccgccgcaaccatggccaccaccgccgccgcgtctaccgcgctcactggcgccactaccgctgcgcccaaggcgaggcgccgggcgcacctcctggccacccgccgcgccctcgccgcgcccatcaggtgctcagcggcgtcacccgccatgccgatggctcccccggccaccccgctacggccgtggggccccaccgagccccgcaagggcgccgacatcctcgtcgagtccctcgagcgctgcggcgtccgcgacgtcttcgcctaccccggcggcgcgtccatggagatccaccaggcactcacccgctcccccgtcatcgccaaccacctcttccgccacgagcaaggggaggcctttgccgcctccggctacgcgcgctcctcgggccgcgtcggcgtctgcatcgccacctccggccccggcgccaccaacctagtctccgcgctcgccgacgcgctgctcgattccgtccccatggtcgccatcacgggacaggtgccgcgacgcatgattggcaccgacgccttccaggagacgcccatcgtcgaggtcacccgctccatcaccaagcacaactacctggtcctcgacgtcgacgacatcccccgcgtcgtgcaggaggctttcttcctcgcctcctctggtcgaccagggccggtgcttgtcgacatccccaaggacatccagcagcagatggcggtgcctgtctgggacaagcccatgagtctgcctgggtacattgcgcgccttcccaagccccctgcgactgagttgcttgagcaggtgctgcgtcttgttggtgaatcccggcgccctgttctttatgtgggcggtggctgcgcagcatctggtgaggagttgcgacgctttgtggagctgactggaatcccggtcacaactactcttatgggcctcggcaacttccccagcgacgacccactgtctctgcgcatgctaggtatgcatggcacggtgtatgcaaattatgcagtggataaggccgatctgttgcttgcacttggtgtgcggtttgatgatcgcgtgacagggaagattgaggcttttgcaagcagggctaagattgtgcacgttgatattgatccggctgagattggcaagaacaagcagccacatgtgtccatctgtgcagatgttaagcttgctttgcagggcatgaatgctcttcttgaaggaagcacatcaaagaagagctttgactttggctcatggaacgatgagttggatcagcagaagagggaattcccccttgggtataaaacatctaatgaggagatccagccacaatatgctattcaggttcttgatgagctgacgaaaggcgaggccatcatcggcacaggtgttgggcagcaccagatgtgggcggcacagtactacacttacaagcggccaaggcagtggttgtcttcagctggtcttggggctatgggatttggtttgccggctgctgctggtgcttctgtggcaaacccaggtgtcactgttgttgacatcgatggagatggtagctttctcatgaacgttcaggagctagctatgatccgaattgagaacctcccagtgaaggtctttgtgctaaacaaccagcacctggggatggtggtgcagtgggaggacaggttctataaggccaacagagcgcacacatacttgggaaacccagagaatgaaagtgagatatatccagatttcgtgacgatcgccaaagggttcaacattccagcggtccgtgtgacaaagaagaacgaagtccgcgcagcgataaagaagatgctcgagactccagggccgtacctcttggatataatcgtcccacaccaggagcatgtgttgcctatgatccctagtggtggggctttcaaggatatgatcctggatggtgatggcaggactgtgtactga

SEQ ID NO: 138239 - protein, 659 aa, Zea mays
MRLLLRRRRRFPTPAETAAATMATTAAASTALTGATTAAPKARRRAHLLATRRALAAPIRCSAASPAMPMAPPATPLRPWGPTEPRKGADILVESLERCGVRDVFAYPGGASMEIHQALTRSPVIANHLFRHEQGEAFAASGYARSSGRVGVCIATSGPGATNLVSALADALLDSVPMVAITGQVPRRMIGTDAFQETPIVEVTRSITKHNYLVLDVDDIPRVVQEAFFLASSGRPGPVLVDIPKDIQQQMAVPVWDKPMSLPGYIARLPKPPATELLEQVLRLVGESRRPVLYVGGGCAASGEELRRFVELTGIPVTTTLMGLGNFPSDDPLSLRMLGMHGTVYANYAVDKADLLLALGVRFDDRVTGKIEAFASRAKIVHVDIDPAEIGKNKQPHVSICADVKLALQGMNALLEGSTSKKSFDFGSWNDELDQQKREFPLGYKTSNEEIQPQYAIQVLDELTKGEAIIGTGVGQHQMWAAQYYTYKRPRQWLSSAGLGAMGFGLPAAAGASVANPGVTVVDIDGDGSFLMNVQELAMIRIENLPVKVFVLNNQHLGMVVQWEDRFYKANRAHTYLGNPENESEIYPDFVTIAKGFNIPAVRVTKKNEVRAAIKKMLETPGPYLLDIIVPHQEHVLPMIPSGGAFKDMILDGDGRTVY

SEQ ID NO: 138240 - DNA, 1728 bp, Zea mays
  CDS (1)..(1728)
atggcatctgactccacggccgccgtgacggtggacggcagcgcgcttgcggggcgcgcgctggccgcggcgggcacgcggcacatgttcggggtggtgggcatccccgtcacctccctcgcgtcccgtgccgccgcggccggggtccgcttcctcgccttccgcaacgagcagtccgcggggtacgccgccgccgcctacggcttcctcacgggctccccgggcgccctactcaccgtctccggcccaggatgcgtccacgggctcgcgggcctctcccacgccaccgccaacgcctggccgctcctcatgatctccggatcctgcgaccaggctgacgccggcaggggcgacttccaggagctcgaccagatcgccgccactaagcccttcgtcaagctcgccgtcaaggcaacaaccatcgccgacatcccgcgcctcgtcttccaggccctcgccgccgccgtgtccggccgtcccggagggtgctacctcgatatcccgtccgatgtcctccaccaaaccctccctgaatccgaggccgcggctctcatagcagcagcagccgccaattcggccgcatccgatccttccccgtcaaagcacaagactcttgacgagggaatcgcgaaagctgcggacctgctccggtgtgcggagcggcctcttgttgtgattgggaagggtgcggcgtatgcgcgcgcggaggaggcgattcggaagctggtggacaccacgggcatccccttcctcccgacgccgatggggaaaggggtcgtgcctgactcgcatccactctccgccacggcggcacgctcactcgccatcgggcagtgtgatgtggctctggtcatcggtgctaggcttaattggttgcttcactttggcgagccacccaagtggtccaaggatgttaagttcattcttgttgacgtctccgaggaggagattgagctccggaagccacatgtggggattgttggggacgcgaagagagtaactgagctgatcaaccgggagatcaaggacaatccattctgcctggcaaggtcgcacccatgggtcgaagcgatcactaagaaggccaatgacaatgttcttaagatggaggcgcagctagtgaaggatgttgtgccattcaatttcatgacaccattgcggatcatccgggatgcgatccttgccgaggggagtcctgctccaatagtggtctcagaaggggcaaataccatggatgttggcagggctgtgcttgtgcagaatgaaccaaggacaagactggatgcagggacatgggggacgatgggggttggattggggtactgtattgcggctgcagcagctgaacctgaacgactcgtggttgctgtggagggcgattctggatttggcttcagtgcaatggaggttgagacgttggtgaggtaccagctgcctgttgttgtaatcgttttcaacaacaacggtgtctacggcggggaccggagaagccctgacgagataaccggaccctacaaaggtgacccagccccaacctcatttgttccggcagcagggtaccataagatgatggaggcttttggagggaaagggtatcttgtggagacaccagacgagctcaaatctgccctttcagaatcgttccgcgccaggaaaccggcggtgattaatgttatcattgatccttacgccggcgcagagagcggtcgaatgcagcacaagaactga

SEQ ID NO: 138241 - protein, 575 aa, Zea mays
MASDSTAAVTVDGSALAGRALAAAGTRHMFGVVGIPVTSLASRAAAAGVRFLAFRNEQSAGYAAAAYGFLTGSPGALLTVSGPGCVHGLAGLSHATANAWPLLMISGSCDQADAGRGDFQELDQIAATKPFVKLAVKATTIADIPRLVFQALAAAVSGRPGGCYLDIPSDVLHQTLPESEAAALIAAAAANSAASDPSPSKHKTLDEGIAKAADLLRCAERPLVVIGKGAAYARAEEAIRKLVDTTGIPFLPTPMGKGVVPDSHPLSATAARSLAIGQCDVALVIGARLNWLLHFGEPPKWSKDVKFILVDVSEEEIELRKPHVGIVGDAKRVTELINREIKDNPFCLARSHPWVEAITKKANDNVLKMEAQLVKDVVPFNFMTPLRIIRDAILAEGSPAPIVVSEGANTMDVGRAVLVQNEPRTRLDAGTWGTMGVGLGYCIAAAAAEPERLVVAVEGDSGFGFSAMEVETLVRYQLPVVVIVFNNNGVYGGDRRSPDEITGPYKGDPAPTSFVPAAGYHKMMEAFGGKGYLVETPDELKSALSESFRARKPAVINVIIDPYAGAESGRMQHKN

SEQ ID NO: 138242 - DNA, 25 bp, Artificial sequence
  primer
atgtttatgtctctggctgccaatt

SEQ ID NO: 138243 - DNA, 26 bp, Artificial sequence
  primer
ttaggttctctccgttttgcttaacc

SEQ ID NO: 138244 - protein, 676 aa, Artificial sequence
  consensus sequence
  Variant (2)..(8): Xaa in position 2 to 8 is any amino acid
  Variant (9)..(9): Xaa in position 9 is any or no amino acid
  Variant (11)..(13): Xaa in position 11 to 13 is any amino acid
  Variant (16)..(18): Xaa in position 16 to 18 is any amino acid
  Variant (20)..(20): Xaa in position 20 is any amino acid
  Variant (24)..(24): Xaa in position 24 is any amino acid
  Variant (27)..(39): Xaa in position 27 to 39 is any amino acid
  Variant (40)..(54): Xaa in position 40 to 54 is any or no amino acid
  Variant (56)..(56): Xaa in position 56 is any amino acid
  Variant (61)..(65): Xaa in position 61 to 65 is any amino acid
  Variant (67)..(67): Xaa in position 67 is any amino acid
  Variant (72)..(73): Xaa in position 72 to 73 is any amino acid
  Variant (74)..(74): Xaa in position 74 is any or no amino acid
  Variant (76)..(77): Xaa in position 76 to 77 is any amino acid
  Variant (80)..(82): Xaa in position 80 to 82 is any amino acid
  Variant (91)..(97): Xaa in position 91 to 97 is any amino acid
  Variant (99)..(100): Xaa in position 99 to 100 is any amino acid
  Variant (103)..(103): Xaa in position 103 is any amino acid
  Variant (105)..(105): Xaa in position 105 is any amino acid
  Variant (107)..(109): Xaa in position 107 to 109 is any amino acid
  Variant (113)..(116): Xaa in position 113 to 116 is any amino acid
  Variant (119)..(119): Xaa in position 119 is any amino acid
  Variant (125)..(135): Xaa in position 125 to 135 is any amino acid
  Variant (136)..(136): Xaa in position 136 is any or no amino acid
  Variant (139)..(141): Xaa in position 139 to 141 is any amino acid
  Variant (143)..(154): Xaa in position 143 to 154 is any amino acid
  Variant (157)..(158): Xaa in position 157 to 158 is any amino acid
  Variant (160)..(161): Xaa in position 160 to 161 is any amino acid
  Variant (168)..(169): Xaa in position 168 to 169 is any amino acid
  Variant (171)..(171): Xaa in position 171 is any amino acid
  Variant (175)..(184): Xaa in position 175 to 184 is any amino acid
  Variant (185)..(217): Xaa in position 185 to 217 is any or no amino acid
  Variant (219)..(237): Xaa in position 219 to 237 is any amino acid
  Variant (238)..(247): Xaa in position 238 to 247 is any or no amino acid
  Variant (249)..(250): Xaa in position 249 to 250 is any amino acid
  Variant (252)..(252): Xaa in position 252 is any amino acid
  Variant (256)..(262): Xaa in position 256 to 262 is any amino acid
  Variant (263)..(266): Xaa in position 263 to 266 is any or no amino acid
  Variant (268)..(276): Xaa in position 268 to 276 is any amino acid
  Variant (278)..(280): Xaa in position 278 to 280 is any amino acid
  Variant (285)..(285): Xaa in position 285 is any amino acid
  Variant (287)..(293): Xaa in position 287 to 293 is any amino acid
  Variant (294)..(301): Xaa in position 294 to 301 is any or no amino acid
  Variant (303)..(303): Xaa in position 303 is any amino acid
  Variant (308)..(310): Xaa in position 308 to 310 is any amino acid
  Variant (311)..(311): Xaa in position 311 is any or no amino acid
  Variant (314)..(314): Xaa in position 314 is any amino acid
  Variant (316)..(319): Xaa in position 316 to 319 is any amino acid
  Variant (321)..(325): Xaa in position 321 to 325 is any amino acid
  Variant (327)..(327): Xaa in position 327 is any amino acid
  Variant (333)..(333): Xaa in position 333 is any amino acid
  Variant (335)..(346): Xaa in position 335 to 346 is any amino acid
  Variant (347)..(356): Xaa in position 347 to 356 is any or no amino acid
  Variant (358)..(358): Xaa in position 358 is any amino acid
  Variant (363)..(364): Xaa in position 363 to 364 is any amino acid
  Variant (366)..(366): Xaa in position 366 is any amino acid
  Variant (368)..(375): Xaa in position 368 to 375 is any amino acid
  Variant (376)..(376): Xaa in position 376 is any or no amino acid
  Variant (378)..(381): Xaa in position 378 to 381 is any amino acid
  Variant (382)..(382): Xaa in position 382 is any or no amino acid
  Variant (384)..(394): Xaa in position 384 to 394 is any amino acid
  Variant (395)..(410): Xaa in position 395 to 410 is any or no amino acid
  Variant (412)..(431): Xaa in position 412 to 431 is any amino acid
  Variant (432)..(441): Xaa in position 432 to 441 is any or no amino acid
  Variant (444)..(461): Xaa in position 444 to 461 is any amino acid
  Variant (462)..(469): Xaa in position 462 to 469 is any or no amino acid
  Variant (476)..(476): Xaa in position 476 is any amino acid
  Variant (479)..(484): Xaa in position 479 to 484 is any amino acid
  Variant (485)..(485): Xaa in position 485 is any or no amino acid
  Variant (487)..(491): Xaa in position 487 to 491 is any amino acid
  Variant (493)..(493): Xaa in position 493 is any amino acid
  Variant (498)..(498): Xaa in position 498 is any amino acid
  Variant (501)..(501): Xaa in position 501 is any amino acid
  Variant (503)..(503): Xaa in position 503 is any amino acid
  Variant (507)..(507): Xaa in position 507 is any amino acid
  Variant (509)..(517): Xaa in position 509 to 517 is any amino acid
  Variant (518)..(523): Xaa in position 518 to 523 is any or no amino acid
  Variant (525)..(528): Xaa in position 525 to 528 is any amino acid
  Variant (531)..(531): Xaa in position 531 is any amino acid
  Variant (533)..(534): Xaa in position 533 to 534 is any amino acid
  Variant (536)..(537): Xaa in position 536 to 537 is any amino acid
  Variant (538)..(538): Xaa in position 538 is any or no amino acid
  Variant (542)..(542): Xaa in position 542 is any amino acid
  Variant (544)..(549): Xaa in position 544 to 549 is any amino acid
  Variant (551)..(551): Xaa in position 551 is any amino acid
  Variant (553)..(556): Xaa in position 553 to 556 is any amino acid
  Variant (557)..(561): Xaa in position 557 to 561 is any or no amino acid
  Variant (564)..(566): Xaa in position 564 to 566 is any amino acid
  Variant (570)..(570): Xaa in position 570 is any amino acid
  Variant (571)..(572): Xaa in position 571 to 572 is any or no amino acid
  Variant (575)..(589): Xaa in position 575 to 589 is any amino acid
  Variant (590)..(615): Xaa in position 590 to 615 is any or no amino acid
  Variant (617)..(620): Xaa in position 617 to 620 is any amino acid
  Variant (621)..(621): Xaa in position 621 is any or no amino acid
  Variant (623)..(625): Xaa in position 623 to 625 is any amino acid
  Variant (627)..(664): Xaa in position 627 to 664 is any amino acid
  Variant (665)..(669): Xaa in position 665 to 669 is any or no amino acid
  Variant (672)..(674): Xaa in position 672 to 674 is any amino acid
  Variant (675)..(675): Xaa in position 675 is any or no amino acid
GXXXXXXXXLXXXGVXXXFXYPGXGAXXXXXXXXXXXXXXXXXXXXXXXXXXXXLXRHEQXXXXXAXGYARXXXGXXGVXXXTSGPGATNXXXXXXXAXXDSXPXVXXXGQVXXXXIGXDAFQEXXXXXXXXXXXXKHXXXVXXXXXXXXXXXXAFXXAXXGRPGPVXXDXPKDXXXXXXXXXXXXXXXXXXXXXXXXXXXXXXXXXXXXXXXXXXXYXXXXXXXXXXXXXXXXXXXXXXXXXXXXXPXXYXGGGXXXXXXXXXXXLXXXXXXXXXPXXXTLMGXGXXXXXXXXXXXXXXXMXGMHGXXXXANXAXXXXDXXXXXGXRFDDRXTXXXXXXXXXXXXXXXXXXXXXXHXDIDPXXIXKXXXXXXXXXGXXXXXLXXXXXXXXXXXXXXXXXXXXXXXXXXXWXXXXXXXXXXXXXXXXXXXXXXXXXXXXXXPQXXXXXXXXXXXXXXXXXXXXXXXXXXVGQHQMXAAXXXXXXXPXXXXXSXGGLGXMGXGXPAAXGXXXXXXXXXXXXXXXVXXXXGDXSXXMXXXQELXTXXXXXXPXKXXXXXXXXXNNXXXGMVXXXQWXXXXXXXXXXXXXXXXXXXXXXXXXXXXXXXXXXXXXXXXXPXXXXXAXXXGXXXXXXXXXXXXXXXXXXXXXXXXXXXXXXXXXXXXXXXXXXXPMXXXXG

SEQ ID NO: 138245 - protein, 30 aa, Artificial sequence
  protein pattern
  Variant (9)..(10): Xaa in position 9 to 10 is any amino acid
  Variant (11)..(11): Xaa in position 11 is Ser or Thr
  Variant (12)..(12): Xaa in position 12 is Ala, Gly or Pro
  Variant (13)..(13): Xaa in position 13 is Phe, Ile, Leu or Met
  Variant (14)..(14): Xaa in position 14 is any amino acid
  Variant (15)..(15): Xaa in position 15 is Asp, Asn, Ser or Thr
  Variant (17)..(18): Xaa in position 17 to 18 is any amino acid
  Variant (20)..(20): Xaa in position 20 is Gly or Ser
  Variant (21)..(21): Xaa in position 21 is any amino acid
  Variant (23)..(23): Xaa in position 23 is Ile, Leu, Met or Val
  Variant (25)..(25): Xaa in position 25 is any amino acid
  Variant (26)..(26): Xaa in position 26 is Phe, Ile, Leu or Val
  Variant (27)..(27): Xaa in position 27 is Ala, Cys, Ser or Thr
  Variant (30)..(30): Xaa in position 30 is Ala or Val
TSGPGATNXXXXXXXAXXDXXPXVXXXGQX

SEQ ID NO: 138246 - protein, 20 aa, Artificial sequence
  protein pattern
  Variant (3)..(3): Xaa in position 3 is any amino acid
  Variant (4)..(4): Xaa in position 4 is Ile, Leu or Val
  Variant (6)..(7): Xaa in position 6 to 7 is any amino acid
  Variant (14)..(14): Xaa in position 14 is any amino acid
  Variant (15)..(15): Xaa in position 15 is Ile or Val
  Variant (17)..(17): Xaa in position 17 is Ile, Leu, Met or Val
  Variant (20)..(20): Xaa in position 20 is Asp or Asn
AFXXAXXGRPGPVXXDXPKX

SEQ ID NO: 138247 - protein, 20 aa, Artificial sequence
  protein pattern
  Variant (2)..(2): Xaa in position 2 is Asp, Glu, Asn, Arg or Ser
  Variant (3)..(4): Xaa in position 3 to 4 is any amino acid
  Variant (5)..(5): Xaa in position 5 is Ile, Leu, Met or Val
  Variant (6)..(6): Xaa in position 6 is Ala, Asn, Ser or Thr
  Variant (8)..(8): Xaa in position 8 is Ala, Cys, Gly or Ser
  Variant (10)..(10): Xaa in position 10 is Ala or Leu
  Variant (12)..(12): Xaa in position 12 is Ala, Ser, Thr or Val
  Variant (15)..(15): Xaa in position 15 is any amino acid
  Variant (17)..(17): Xaa in position 17 is Phe, Ile, Leu, Met or Val
  Variant (19)..(19): Xaa in position 19 is any or no amino acid
PXXXXXSXGXGXMGXGXPXA

SEQ ID NO: 138248 - protein, 12 aa, Artificial sequence
  protein pattern
  Variant (7)..(7): Xaa in position 7 is any amino acid
  Variant (8)..(8): Xaa in position 8 is any or no amino acid
  Variant (10)..(10): Xaa in position 10 is Ala or Gln
  Variant (11)..(11): Xaa in position 11 is any amino acid
  Variant (12)..(12): Xaa in position 12 is Phe, His or Tyr
VGQHQMXXAXXX

SEQ ID NO: 138249 - protein, 13 aa, Artificial sequence
  protein pattern
  Variant (4)..(4): Xaa in position 4 is Ala or Gly
  Variant (5)..(8): Xaa in position 5 to 8 is any amino acid
  Variant (10)..(10): Xaa in position 10 is any amino acid
  Variant (12)..(12): Xaa in position 12 is any amino acid
HEQXXXXXAXGXA

SEQ ID NO: 138250 - protein, 12 aa, Artificial sequence
  protein pattern
  Variant (2)..(2): Xaa in position 2 is Leu or Val
  Variant (3)..(3): Xaa in position 3 is Ile, Leu or Met
  Variant (4)..(4): Xaa in position 4 is Phe, Ile, Leu or Val
  Variant (5)..(5): Xaa in position 5 is Ala, Cys, Gly or Asn
  Variant (6)..(6): Xaa in position 6 is Phe, Ile, Leu or Val
  Variant (8)..(8): Xaa in position 8 is Ala, Ser or Val
DXXXXXGXRFDD

SEQ ID NO: 138251 - protein, 12 aa, Artificial sequence
  protein pattern
  Variant (2)..(2): Xaa in position 2 is Asp or Glu
  Variant (3)..(3): Xaa in position 3 is Ala or Gly
  Variant (4)..(4): Xaa in position 4 is Cys, Gly or Ser
  Variant (5)..(5): Xaa in position 5 is Phe, Ile or Leu
  Variant (6)..(6): Xaa in position 6 is any amino acid
  Variant (8)..(9): Xaa in position 8 to 9 is any amino acid
  Variant (12)..(12): Xaa in position 12 is Phe, Ile, Leu or Met
GXXXXXMXXQEX

SEQ ID NO: 138252 - protein, 11 aa, Artificial sequence
  protein pattern
  Variant (2)..(2): Xaa in position 2 is Leu, Pro or Val
  Variant (7)..(9): Xaa in position 7 to 9 is any amino acid
MXGMHGXXXAN

SEQ ID NO: 138253 - protein, 11 aa, Artificial sequence
  protein pattern
  Variant (2)..(2): Xaa in position 2 is Ala, Ile or Val
  Variant (4)..(4): Xaa in position 4 is Ile or Val
  Variant (6)..(6): Xaa in position 6 is any amino acid
  Variant (7)..(7): Xaa in position 7 is Ala, Ser or Thr
  Variant (8)..(8): Xaa in position 8 is Glu or Ser
  Variant (9)..(9): Xaa in position 9 is Ile, Leu or Val
  Variant (10)..(10): Xaa in position 10 is any amino acid
HXDXDXXXXXK

SEQ ID NO: 138254 - protein, 10 aa, Artificial sequence
  protein pattern
  Variant (3)..(3): Xaa in position 3 is any amino acid
  Variant (9)..(9): Xaa in position 9 is Ala, Cys, Thr or Val
  Variant (10)..(10): Xaa in position 10 is Asp or Pro
IGXDAFQEXX

SEQ ID NO: 138255 - protein, 11 aa, Artificial sequence
  protein pattern
  Variant (2)..(3): Xaa in position 2 to 3 is any amino acid
  Variant (4)..(4): Xaa in position 4 is Ile, Leu or Val
  Variant (5)..(5): Xaa in position 5 is Phe or Tyr
  Variant (6)..(6): Xaa in position 6 is Ala, Glu or Gly
  Variant (7)..(7): Xaa in position 7 is any amino acid
  Variant (11)..(11): Xaa in position 11 is Ala, Gln, Ser or Thr
VXXXXXXPGGX

SEQ ID NO: 138256 - DNA, 1023 bp, Escherichia coli
  CDS (1)..(1023): transl_table=11
atgaaaaaagtgttattgataatcttgttattgctggtggtactgggtatcgccgctggtgtgggcgtctggaaggttcgccatcttgccgacagcaaattgcttatcaaagaagagacgatatttaccctgaagccagggaccggacgtctggcgctcggtgaacagctttatgccgataagatcatcaatcgtccacgggtttttcaatggctgctgcgtatcgaaccggatctttctcactttaaagccgggacttaccgctttacaccgcagatgaccgtgcgcgagatgctgaaattgctggaaagcggtaaagaagcacagttccctctgcgactggtagaagggatgcgtctgagcgattacctcaagcaattgcgtgaggccccgtatatcaagcatacgctgagcgatgataagtacgccaccgtagcgcaggcacttgaactggaaaacccggagtggattgaaggttggttctggccagacacctggatgtataccgccaataccaccgatgtcgcgttactcaagcgagcgcacaagaaaatggtgaaagcggtcgatagcgcctgggaagggcgtgcggacggtctgccttataaagataaaaaccagttggtgacgatggcatcaattatcgaaaaagaaaccgccgttgccagtgaacgcgataaggttgcctcagtatttatcaaccgtttacgcattggtatgcgcctgcagaccgacccgaccgtgatttacgggatgggagagcgttataatggcaaactttctcgtgcagacctggaaacgccgacagcgtataacacctataccattaccggtctgccgccaggtgcgatagcgacgccgggggcggattcgctgaaggctgctgcgcatccggcaaaaacgccgtatctctattttgtggccgatggtaaaggtggtcacacgtttaataccaatcttgccagtcataacaagtctgtgcaggattatctgaaagtgcttaaggaaaaaaatgcgcagtaa

SEQ ID NO: 138257 - protein, 340 aa, Escherichia coli
MKKVLLIILLLLVVLGIAAGVGVWKVRHLADSKLLIKEETIFTLKPGTGRLALGEQLYADKIINRPRVFQWLLRIEPDLSHFKAGTYRFTPQMTVREMLKLLESGKEAQFPLRLVEGMRLSDYLKQLREAPYIKHTLSDDKYATVAQALELENPEWIEGWFWPDTWMYTANTTDVALLKRAHKKMVKAVDSAWEGRADGLPYKDKNQLVTMASIIEKETAVASERDKVASVFINRLRIGMRLQTDPTVIYGMGERYNGKLSRADLETPTAYNTYTITGLPPGAIATPGADSLKAAAHPAKTPYLYFVADGKGGHTFNTNLASHNKSVQDYLKVLKEKNAQ

SEQ ID NO: 138258 - DNA, 1128 bp, Mesorhizobium loti MAFF303099
  CDS (1)..(1128): transl_table=11
gtgttcatgaacttcgtcatctccctggtgatgctgatggttcttgccgcgggcgcagcactttacttcggcaagcaggaattcatcgaacccggtccttcggccaatggcgacacctttctggtcaagccgaacaccggcgtccaggacatcgccgaccagcttgagcgccgtggactgatcagcgacgcccgcgtcttccgccttggcgtgcgtgctttcggcaacgattccgcgctcaaggccggcgaatacgagatcaagccccgggcatccatgcgcgacatcatggagcttttgaaaagcggcaagtcggtgatgtattccctgaccattccggaagggctgacggtcgagcaggccctgcagcgtatcgccgatgaacccgccttgagcggcgacatgccggcgacaacgcccccggagggcagccttgccaccgacacgctgcgcttcacgcgcggtgcgacgcgccagcagatgatcgacaagctggtggccgatcagaagaaactggtcgacgaggtctggcagcggcgtgcgccggatctgccgctggccaatatcgaagactttgtcaccctggcctcgatcgtcgagaaggaaaccggcaagggtgacgagcgttcgcgcgtcgccgccgtcttcctcaaccgcttggccaagggcatgcgcctgcaatccgatccgaccatcatctatggtctgttcggcggcaagggaaagcccgcggaccgcccgatctaccagtcggacatccagaagcagacgccttacaatacctatgtgatcagcggcctgccgccgacgcccatcgccaatccgggccgtgcagcacttgaggccgtggccaatccatcgaagaccgacgatctctattttgtcgccgacggtgcaggcggtcacgtctttgccgcgacgctcgacgagcacaatgagaacgtcgcccgttatcgtgcgctgcagaagaagcaggccgatgacgcggccaaggccgccgctgccgctggtacaaacggcaatgccgacaagcctgctaccgacaaaccagctgccgacaagcctgccgacggcagcaccgggggcgacaatggcgacgccggcggcgacgcgggcgatgcccagtag

SEQ ID NO: 138259 - protein, 375 aa, Mesorhizobium loti MAFF303099
MFMNFVISLVMLMVLAAGAALYFGKQEFIEPGPSANGDTFLVKPNTGVQDIADQLERRGLISDARVFRLGVRAFGNDSALKAGEYEIKPRASMRDIMELLKSGKSVMYSLTIPEGLTVEQALQRIADEPALSGDMPATTPPEGSLATDTLRFTRGATRQQMIDKLVADQKKLVDEVWQRRAPDLPLANIEDFVTLASIVEKETGKGDERSRVAAVFLNRLAKGMRLQSDPTIIYGLFGGKGKPADRPIYQSDIQKQTPYNTYVISGLPPTPIANPGRAALEAVANPSKTDDLYFVADGAGGHVFAATLDEHNENVARYRALQKKQADDAAKAAAAAGTNGNADKPATDKPAADKPADGSTGGDNGDAGGDAGDAQ

SEQ ID NO: 138260 - DNA, 1047 bp, Pasteurella multocida subsp. multocida str. Pm70
  CDS (1)..(1047): transl_table=11
atgaaaaaatggcttacttcgtttttcctgctcattctcgtggggttagggattctgtttgttgcttaccaacatattcaacaatttatggacacgccggtcaacgtcaaagcgaatcagcttttaaccgtcgaacgcggcaccacaggcaataaacttgctacgcttttagaacaagagaagatcctcgataacgccaatttgctcccttacttgcttaaattaaatccccaactcaataaaatcaaagcgggaacgtattcaatgcaaggggtcaataccgtcgcagatttgattcatgtactcaatcaaggtaaagaagcccaattcagcattcaatttattgaaggtgataactttgcgaattggcgaaaaaatttggaaaaagcaccgcacttagtacaaaccttaaaaggcaaaacggaagccgacatttttgcgttattagagctacctcacgacgtaaaacaaattcaagagtggaaaaaagtggaaggctggctttatccagacacttaccactacacgcccaattctacggatcttgcattacttaaacgtgcgtcagagcggatgaaaaaggttctggcacaagcatgggaaaaacgagatgctgatttaccccttgcgaatgcttatgagatgctcattctagcctctattgtggaaaaagaaaccgcgattgaagcggaacgcggtaaagttgcctccgtgtttgtcaatcgtttaaaacaaaatatgcgcttacaaacggatcccactgtgatttatggtatgggcgaaaaatatgatggcaatatccgtaaaaaagatttagaaaccccaactgcgtataatacttacatcattaacggtttaccgccaacccccattgcgatgccgagtgaaagtgccttattcgcggtggcaaaaccagaaaaaactgattatttatactttgttgccgatggttctggtggacataaattcagcaaaacgctggctgaacacaatcgtgccgtacaacagtatttacgctggtatcgtagtcaaaaaaatggaaattaa

SEQ ID NO: 138261 - protein, 348 aa, Pasteurella multocida subsp. multocida str. Pm70
MKKWLTSFFLLILVGLGILFVAYQHIQQFMDTPVNVKANQLLTVERGTTGNKLATLLEQEKILDNANLLPYLLKLNPQLNKIKAGTYSMQGVNTVADLIHVLNQGKEAQFSIQFIEGDNFANWRKNLEKAPHLVQTLKGKTEADIFALLELPHDVKQIQEWKKVEGWLYPDTYHYTPNSTDLALLKRASERMKKVLAQAWEKRDADLPLANAYEMLILASIVEKETAIEAERGKVASVFVNRLKQNMRLQTDPTVIYGMGEKYDGNIRKKDLETPTAYNTYIINGLPPTPIAMPSESALFAVAKPEKTDYLYFVADGSGGHKFSKTLAEHNRAVQQYLRWYRSQKNGN

SEQ ID NO: 138262 - DNA, 1023 bp, Escherichia coli O157:H7 EDL933
  CDS (1)..(1023): transl_table=11
atgaaaaaagtgttattgataatcttgttattgctggtggtactgggtatcgccgctggtgtgggcgtctggaaggttcgctatcttgccgacagcaaattgcttatcaaagaagagacgatatttaccctgaagccagggaccggacgtctggcgcttggtgaacagctttatgccgataagatcatcaatcgcccacgggtttttcaatggttgctgcgtatcgaaccggatctttctcactttaaagccgggacttaccgctttacaccgcagatgaccgtgcgcgagatgctgaaattgttggaaagcggtaaagaagcacagttccctctgcgactggtagaagggatgcgtctgagcgactacctcaagcaattgcgtgaggccccgtatatcaagcacacgctgagcgatgataagtacatcaccgtagcgcaggcacttgaactggaaaacccggagtggattgaaggttggttctggccagacacctggatgtataccgccaataccaccgatgtcgcgttactcaagcgagcgcacaagaaaatggtgaaagcggtcgatagcgcctgggaagggcgtgcggacggtctgccttataaagataaaaatcagctggtgacgatggcatcaattatcgaaaaagaaaccgccattgccagtgaacgcgatcaggttgcctcggtatttatcaaccgtttacgcattggtatgcgcctgcagaccgacccaaccgtgatttacgggatgggagagcgttataatggcaaactttctcgtgcagacctggaaacgccgacagcgtataacacctataccattaccggtttgccgccgggtgcgatagctacgccgggggcggattcgctgaaggctgctgcgcatccggcaaaaacgccgtatctctattttgtggccgatggtaaaggtggtcacacgtttaataccaatcttgccagtcataacaagtctgtgcaggattatctgaaagtgcttaaggaaaaaaatgcgcagtaa

SEQ ID NO: 138263 - protein, 340 aa, Escherichia coli O157:H7 EDL933
MKKVLLIILLLLVVLGIAAGVGVWKVRYLADSKLLIKEETIFTLKPGTGRLALGEQLYADKIINRPRVFQWLLRIEPDLSHFKAGTYRFTPQMTVREMLKLLESGKEAQFPLRLVEGMRLSDYLKQLREAPYIKHTLSDDKYITVAQALELENPEWIEGWFWPDTWMYTANTTDVALLKRAHKKMVKAVDSAWEGRADGLPYKDKNQLVTMASIIEKETAIASERDQVASVFINRLRIGMRLQTDPTVIYGMGERYNGKLSRADLETPTAYNTYTITGLPPGAIATPGADSLKAAAHPAKTPYLYFVADGKGGHTFNTNLASHNKSVQDYLKVLKEKNAQ

SEQ ID NO: 138264 - DNA, 1221 bp, Agrobacterium tumefaciens str. C58
  CDS (1)..(1221): transl_table=11
gtgagcgatacgaatcagaacagccagggaccatcaggacaaaacggcgcgggcgaaggcaatcgcggcccgatcatcccaaagtccccgaccgaggcgctgcggccggaaaaagtgccggcgccgccgaagcgttcccgcaaggcccatggccagctggtgatcttcctgaattttctgatgacgcttgccgttgccgtctgcgtgctggccattgccgccttctattacatgatcaatgcgtttcaggagcccggtccgctcgaaacgaacacccatttcaccgtccgcaacggtgctggcctcatcgagatcgccaataatctcgaacgcaacgacatcatctccaacgcccgcgttttccgcctcatgaccggcagctatctgcagaaggatcagacgctgaaaaccggcgaatatgagatcaaggccggcgcatcgatgaaggacatcatgctgctgctcgaatccggcaaatcgatcctttattccgtatcgctgccggaaggcctgaccgtaaagcagatgttcgcgcgccttgccgcggacgaggtgctggatggcgaactgcccgcgacgctgccacccgaaggcagcctgcgcccggatacctatcgtttcacccgcggcaccaagcgcgaagaaatcatcagccagatgagtgcggcgcaggacaagctgatcgacatggtctgggagcggcgcgatcccgacctgccgatcaagaccatcgaggaattcgtcacgctcgcctcgatcgtcgagaaggaaaccggtaaggatgacgaacgcgcccatgtcgcctccgtcttctataaccgcctgaagaagggcatgcgcctgcaatccgatccgacgatcatctacggtctgttcggtggcgacggaaagccgtccgaccggccgatctaccagtcggacctgcagaagcagacgccgttcaatacctatgtcatcaagggcctgccgccatcgcccatcgccaatccgggacgggcagcacttgaggcagtcgccaatccatggcgcacggatgacctttatttcgtggccgacggcaccggcggccacgtctttgccaagacgcttgaagagcacaacgccaatgtccgccgctggcgcaagatcgaagccgaaaaggctgcttccggcggcaatcccgatgtggtcgtggatggtcaacccggcggcgccgaggcggaaaaacctgccaacaactga

SEQ ID NO: 138265 - protein, 406 aa, Agrobacterium tumefaciens str. C58
MSDTNQNSQGPSGQNGAGEGNRGPIIPKSPTEALRPEKVPAPPKRSRKAHGQLVIFLNFLMTLAVAVCVLAIAAFYYMINAFQEPGPLETNTHFTVRNGAGLIEIANNLERNDIISNARVFRLMTGSYLQKDQTLKTGEYEIKAGASMKDIMLLLESGKSILYSVSLPEGLTVKQMFARLAADEVLDGELPATLPPEGSLRPDTYRFTRGTKREEIISQMSAAQDKLIDMVWERRDPDLPIKTIEEFVTLASIVEKETGKDDERAHVASVFYNRLKKGMRLQSDPTIIYGLFGGDGKPSDRPIYQSDLQKQTPFNTYVIKGLPPSPIANPGRAALEAVANPWRTDDLYFVADGTGGHVFAKTLEEHNANVRRWRKIEAEKAASGGNPDVVVDGQPGGAEAEKPANN

SEQ ID NO: 138266 - DNA, 1026 bp, Yersinia pestis CO92
  CDS (1)..(1026): transl_table=11
atgaaaagaaaaagcaccaaagcactgatcctttttgttgtgatctgtttgggattactgctgttgggttatcaaaaagtacaagattttgcgcgtcagcccttggcgattaagcaagagacttactttaccttaccggcaggtaccgggcgggttgctctagagaatttattgctacgtgatcatgtgattgctaatacaggtttatttccctggctactgcgcatagaacccgaactggctaattttaaggctgggacatatcgttttacgccgggtatgacggtacgtgagatgctggagttgttggtcagtggtaaagaagcccagtttaccgttcgttttattgaaggtaagcgcctgcgtgattggctggatgaattacaacagtcaaaatatatcaaacatgtgctggaagggaaaacagatgctgaaattgcgcagttactggggttaaaagagagtgaacaccccgaaggctggctctatcctgatacctactcctataccgcaggtacaacggatttaacactgctcaaacgtgcccatcaacgaatggaggaaaccgttgcagaaatctggcaggggcgtgatgacggattgccgtataagaccccaagtgatttggttactatggcatcaatcattgaaaaagaaaccgcggtaaatgaggagcgggataaggtggcttctgtcttcattaaccgtttacgtcttggtatgcgcctacaaacggatccaacagtgatttatggtatgggcgaaaagtataacggcaacattactcgtaaagacttagataccccgacaccttataatacctatgttatttccggtttgccgccaacccccattgccatgccagggttggcatcgctgaccgctgctgcccatccggcccaaacgccctatctctattttgtcgcagacggcaagggcgggcatacattcaccactaatttagccagtcataatcaagccgtgcgtgtttatcgccagtcgctaaaggataaaaatgaacagtaa

SEQ ID NO: 138267 - protein, 341 aa, Yersinia pestis CO92
MKRKSTKALILFVVICLGLLLLGYQKVQDFARQPLAIKQETYFTLPAGTGRVALENLLLRDHVIANTGLFPWLLRIEPELANFKAGTYRFTPGMTVREMLELLVSGKEAQFTVRFIEGKRLRDWLDELQQSKYIKHVLEGKTDAEIAQLLGLKESEHPEGWLYPDTYSYTAGTTDLTLLKRAHQRMEETVAEIWQGRDDGLPYKTPSDLVTMASIIEKETAVNEERDKVASVFINRLRLGMRLQTDPTVIYGMGEKYNGNITRKDLDTPTPYNTYVISGLPPTPIAMPGLASLTAAAHPAQTPYLYFVADGKGGHTFTTNLASHNQAVRVYRQSLKDKNEQ

SEQ ID NO: 138268 - DNA, 1023 bp, Salmonella typhimurium LT2
  CDS (1)..(1023): transl_table=11
atgaaaaaattgtcaggcgttttccttctgctgttggttgtgctgggtattgccgtgggcgtggggatgtggaaagttcgccatctggcgaacagcacgttacttattaaagacgagactatctttacgctcaaggcgggaacggggcggctggcgcttggtgaccagctttatgatgaaaaaatcattaatcgcccccgggtatttcagtggctgctgcgcgtggagcctgagttatcacactttaaagcgggaacttaccgttttacgacggggatgaccgtacgggagatgcttgagttgctggagagcggcaaagaagcgcaattcccgttgcggtttgtggaagggatgcgccttagcgactacctgaaacagctacgagaggcgccgtatattcgccatacattgccggatgatgactacgccactgtcgctcaggcattaaagcttgcgcacccggaatgggtagaagggtggttctggcctgatacctggatgtataccgccaacaccagcgatgtcgctattctcaagcgagcgcatcaaaagatggtgaaagctgtcgatactgtctggaaaggtcgggccgaggggctgccttataaagatcagaaccaactggtgacaatggcctcgattattgaaaaagagacggctgtcgccagcgaacgcgatcaggtggcctcagtctttattaatcgcctgagaatcggtatgcgccttcagaccgatcccaccgtgatttacgggatggggacgagttataatggtaacttgtcgcgtgcggatctggaaaagccgacggcttataacacgtataccataaccgggctgccgccaggaccgattgcatcgcccagcgaagcgtcattgcaggcggcggcgcatccggcgaaaacgccgtatctctattttgtggccgacggtaaaggcggtcacacatttaacaccaatcttgccagccataatcggtcagtgcaggagtacctgaaagtgcttaaggaaaaaaatgggcagtaa

SEQ ID NO: 138269 - protein, 340 aa, Salmonella typhimurium LT2
MKKLSGVFLLLLVVLGIAVGVGMWKVRHLANSTLLIKDETIFTLKAGTGRLALGDQLYDEKIINRPRVFQWLLRVEPELSHFKAGTYRFTTGMTVREMLELLESGKEAQFPLRFVEGMRLSDYLKQLREAPYIRHTLPDDDYATVAQALKLAHPEWVEGWFWPDTWMYTANTSDVAILKRAHQKMVKAVDTVWKGRAEGLPYKDQNQLVTMASIIEKETAVASERDQVASVFINRLRIGMRLQTDPTVIYGMGTSYNGNLSRADLEKPTAYNTYTITGLPPGPIASPSEASLQAAAHPAKTPYLYFVADGKGGHTFNTNLASHNRSVQEYLKVLKEKNGQ

SEQ ID NO: 138270 - DNA, 1134 bp, Ralstonia solanacearum GMI1000
  CDS (1)..(1134): transl_table=11
atggtatgcaggcggccggagattgacccggtattatatggggctgttcggcgtgcatctggggcgcgctcaaccctctttcaagtgcgggcaagaccggcggaagccggttccgtgggcaacatccgaatttcgatgctttcttttctcaagcgcttgctgttgctggcgatcctggtcgggctggccgccgcgggcggcgtggtgtggtgggcccggcagccggtgagcctgtcggcgtcgccgctggaagtggtgatcaagcccaactcgagcgtactctcggtcgcgcggcagctcgagcacggcggcgtggacgtgcagccgcagctgttttcgctggtggcgcgcgccatgggcaaggcgaccagcctgaaggcgggcggctatgagctggaagccggcgcgaccccgctgtcgatcctcgacaagatggcacgcggcgaggtcacgcactacgtcgtcaccgtcatcgagggctggagcatgcgccagatgcgcgcggcggtggacgccgagccggcgctgcggcacgagaccgccggcctgccggacaccgagctgatgcgccggatcggcgcgaccgaggccacgccggagggcctgttcttccccgacacctacctgttcgcgcgcggcagcagcgacgtcgacctgttccgccatgcctaccaggccatgcagaagcgcctggccgaggcgtgggccaggcgcgcgccgggcctgccgtacaagacgccctacgaggcgctgaccatggcctccatcatcgagaaggaaaccggccagaagcgggaccgcccgatggtggcatcggtgttcgtcaaccggctgcgcaagaacatgctgctgcagaccgacccgaccgtcatctacggcatcggcgccggcttcgacggcaacctgcgcaaacgcgacctgcagaccgacacgccgtacaacacctacacccgcatcggcctgccgcccacgccgatcgcgctgccgggcatggcctcgctggacgcggcgatgaatccggcgccgtccgatgcgctgtacttcgtcgcgcgcggcgacggcaccagccagttctcgaccaacctcacggaccacaaccgggccgtcaacaaataccagcgcggccaaccatga

SEQ ID NO: 138271 - protein, 377 aa, Ralstonia solanacearum GMI1000
MVCRRPEIDPVLYGAVRRASGARSTLFQVRARPAEAGSVGNIRISMLSFLKRLLLLAILVGLAAAGGVVWWARQPVSLSASPLEVVIKPNSSVLSVARQLEHGGVDVQPQLFSLVARAMGKATSLKAGGYELEAGATPLSILDKMARGEVTHYVVTVIEGWSMRQMRAAVDAEPALRHETAGLPDTELMRRIGATEATPEGLFFPDTYLFARGSSDVDLFRHAYQAMQKRLAEAWARRAPGLPYKTPYEALTMASIIEKETGQKRDRPMVASVFVNRLRKNMLLQTDPTVIYGIGAGFDGNLRKRDLQTDTPYNTYTRIGLPPTPIALPGMASLDAAMNPAPSDALYFVARGDGTSQFSTNLTDHNRAVNKYQRGQP

SEQ ID NO: 138272 - DNA, 1041 bp, Agrobacterium tumefaciens str. C58
  CDS (1)..(1041): transl_table=11
atgacgcttgccgttgccgtctgcgtgctggccattgccgccttctattacatgatcaatgcgtttcaggagcccggtccgctcgaaacgaacacccatttcaccgtccgcaacggtgctggcctcatcgagatcgccaataatctcgaacgcaacgacatcatctccaacgcccgcgttttccgcctcatgaccggcagctatctgcagaaggatcagacgctgaaaaccggcgaatatgagatcaaggccggcgcatcgatgaaggacatcatgctgctgctcgaatccggcaaatcgatcctttattccgtatcgctgccggaaggcctgaccgtaaagcagatgttcgcgcgccttgccgcggacgaggtgctggatggcgaactgcccgcgacgctgccacccgaaggcagcctgcgcccggatacctatcgtttcacccgcggcaccaagcgcgaagaaatcatcagccagatgagtgcggcgcaggacaagctgatcgacatggtctgggagcggcgcgatcccgacctgccgatcaagaccatcgaggaattcgtcacgctcgcctcgatcgtcgagaaggaaaccggtaaggatgacgaacgcgcccatgtcgcctccgtcttctataaccgcctgaagaagggcatgcgcctgcaatccgatccgacgatcatctacggtctgttcggtggcgacggaaagccgtccgaccggccgatctaccagtcggacctgcagaagcagacgccgttcaatacctatgtcatcaagggcctgccgccatcgcccatcgccaatccgggacgggcagcacttgaggcagtcgccaatccatggcgcacggatgacctttatttcgtggccgacggcaccggcggccacgtctttgccaagacgcttgaagagcacaacgccaatgtccgccgctggcgcaagatcgaagccgaaaaggctgcttccggcggcaatcccgatgtggtcgtggatggtcaacccggcggcgccgaggcggaaaaacctgccaacaactga

SEQ ID NO: 138273 - protein, 346 aa, Agrobacterium tumefaciens str. C58
MTLAVAVCVLAIAAFYYMINAFQEPGPLETNTHFTVRNGAGLIEIANNLERNDIISNARVFRLMTGSYLQKDQTLKTGEYEIKAGASMKDIMLLLESGKSILYSVSLPEGLTVKQMFARLAADEVLDGELPATLPPEGSLRPDTYRFTRGTKREEIISQMSAAQDKLIDMVWERRDPDLPIKTIEEFVTLASIVEKETGKDDERAHVASVFYNRLKKGMRLQSDPTIIYGLFGGDGKPSDRPIYQSDLQKQTPFNTYVIKGLPPSPIANPGRAALEAVANPWRTDDLYFVADGTGGHVFAKTLEEHNANVRRWRKIEAEKAASGGNPDVVVDGQPGGAEAEKPANN

SEQ ID NO: 138274 - DNA, 1239 bp, Brucella melitensis 16M
  CDS (1)..(1239): transl_table=11
gtgaattcagaggagaaacccggaaccaatcctgctgaacagcagtccgtatccgagcctcagaacgaggctgtgccaaccgcgccggaaaaggctgcggaacctaagccttttgtgccgaaatccgcttccgaagccttgcgcccggaacccggcacaccgccgccccgcaatcgctcgcgccatgcgcgcagccagatcgtcgttttcatgaacttcatgctgtcgcttgtcgtgctggttttgcttggcgcgtcggcattgttctatttcggcaaattacagtttgatgcgcagggcccgctcacggcggaaacgacctttctcgtcaagcgcggcgctggcattgccgaagtgagcaacggtcttgaaagccgcgatatcgtcagcgatgcgcgcattttccgctatggcatgcgcacgctcgggcatgaaaacgacctgaaggcgggcgaatatgccattcccgtcggggcgtcgatgcgcgacgtgatgaacatcctcatcagcggcaaatccatcatgtatcccttcaccgtgccggaaggcctgacggtcaagcaggtgttcgaccgcatcgccgccgacccgatcctcattggcgacatgccgaaggaaatgccgccggaaggctcgctcttcaccgatacgctgaatttcacccgcggcaccacgcgttccgagataattgaccgcatgatcgcctcgcagaagaaactggtggacgacctttgggcaaagcgcaggcctgacctgccggttcgggacaagaacgaatttgtgacgcttgcctccatcgtggagaaggaaaccggcattgcttccgagcgtccgcatgtggcttcggtcttcgtcaaccgtctgaacaaggggatgcgtctccagtcggacccgacgatcatctatgggcttttcggcggcgcaggcaaaccgtcagaccgcccgatattcaagtcggatatcgagaagcccacgccttacaacacctatatcatcaatggtttgccgccgacacctattgccaatccgggcaaggcggcgcttgcggcggtcgccaatccgctccagaccgacgacctctattttgttgcggacggcacgggcggccatgtattctcggcgaccctgaaggggcacaatgacaatgtgcgcaagtggcgggccgcagaacagcaaaagaatatcgggcagcagaaagatacatccggcggctccggcaaacccgataccgggcagtag

SEQ ID NO: 138275 - protein, 412 aa, Brucella melitensis 16M
MNSEEKPGTNPAEQQSVSEPQNEAVPTAPEKAAEPKPFVPKSASEALRPEPGTPPPRNRSRHARSQIVVFMNFMLSLVVLVLLGASALFYFGKLQFDAQGPLTAETTFLVKRGAGIAEVSNGLESRDIVSDARIFRYGMRTLGHENDLKAGEYAIPVGASMRDVMNILISGKSIMYPFTVPEGLTVKQVFDRIAADPILIGDMPKEMPPEGSLFTDTLNFTRGTTRSEIIDRMIASQKKLVDDLWAKRRPDLPVRDKNEFVTLASIVEKETGIASERPHVASVFVNRLNKGMRLQSDPTIIYGLFGGAGKPSDRPIFKSDIEKPTPYNTYIINGLPPTPIANPGKAALAAVANPLQTDDLYFVADGTGGHVFSATLKGHNDNVRKWRAAEQQKNIGQQKDTSGGSGKPDTGQ

SEQ ID NO: 138276 - DNA, 1059 bp, Xanthomonas campestris pv. campestris str. ATCC 33913
  CDS (1)..(1059): transl_table=11
gtgggtgtggcggtgactggcaaacgcggatgtctggccgtgctggggacggtgctgttgcttgcggcgctgctggcgatcgcggccgtggtggcgtggcggcactacgtgcattttgccgagacgccggtcactgcgagcacgcccagcgtggtcatcgcgcccggcgattcgctcaaagcgacgctgcgcaagctgcgcgaggccggggtgcagcagggcagtgatctcgaatggcagttgctggcccgccaggtggatgcggccggcaagctcaaggtgggcgaatacgcgctgacgccggcgttgccgccgcgtgcgctgttattgcgcatgcgccagggccgggtgatccagtaccgcttcaccctggtggaaggctggaacttccgtcaactgcgcgcggccctgggcacggccacgccgctgcagcagaccatcgcgggcctggacgatgccgcactgatggcgcggctgggcgttgccggccagcatccggaagggcgcttcctaccggaaacgtatctgtaccagcgcggcgacagtgacctggacgtgctcaagcgcgcgcatgcggcaatggacaaggcgctggcgcaggcctgggaacagcgcgccccgcaactgccgctgagctcgcccgagcaggcgttgatcctggcctccatcatcgagaaggaaaccgcactgggcaccgagcggccgcagatcgcgggcgtgttcgtgcgccgcctgcagatgggcatgaagctgcagaccgacccgaccgtgatctatggcatcggcagcagctacgacggcaacatccgtcgccgcgatctcatcaccgacacgccgtacaacacctatacccgcaccggcctgacgcccacgccgatcgcgatgccgggccgcgaagcgctgctggcggcggtacgcccggcgccgggcaacgcgctgtacttcgtcgcggtgggcgatggcagcggtgcgcatacgttttcggccacgctggacgaacacaatgcggcggtggcgcgctatctgcagcgccgccgtcagccggagcccacgccatga

SEQ ID NO: 138277 - protein, 352 aa, Xanthomonas campestris pv. campestris str. ATCC 33913
MGVAVTGKRGCLAVLGTVLLLAALLAIAAVVAWRHYVHFAETPVTASTPSVVIAPGDSLKATLRKLREAGVQQGSDLEWQLLARQVDAAGKLKVGEYALTPALPPRALLLRMRQGRVIQYRFTLVEGWNFRQLRAALGTATPLQQTIAGLDDAALMARLGVAGQHPEGRFLPETYLYQRGDSDLDVLKRAHAAMDKALAQAWEQRAPQLPLSSPEQALILASIIEKETALGTERPQIAGVFVRRLQMGMKLQTDPTVIYGIGSSYDGNIRRRDLITDTPYNTYTRTGLTPTPIAMPGREALLAAVRPAPGNALYFVAVGDGSGAHTFSATLDEHNAAVARYLQRRRQPEPTP

SEQ ID NO: 138278 - DNA, 1074 bp, Xanthomonas axonopodis pv. citri str. 306
  CDS (1)..(1074): transl_table=11
gtgggtgtggcggtgactggcaaacgcggatgtctggccgtgctgggtacggtagtgctgctcgtagcgctgctggcgattgccgccgtggtggcgtggcggcattacctgcacttcgccgatacccccgtgcctgcgagcgcgcccagcgtggtgattgcgcccggcgattcgctcaaggctacattgcgcaagctgcgcgctgccggcctggcgcagggcaccgagctggaatggcagctgctggcgcgccaggtcgatgcggccggcaagctcaaggtgggcgagtacgcgctgtcgccagcgctgtcgccgcgcgaactgctgacgcgcatgcgccaggggcgggtgatccagtaccgcttcacgatcgtggaaggctggaattttcgtcagctgcgcgccgcactggcgaccgccacgccgctgcaacattccatcgatgcgctggacgatgcggcactgatggcccggctgggagttgccaggcagcatccggaagggcgcttcctgccggaaacctatgtgtaccagcgtggcgacagcgatatcgatgtactcaagcgcgcgcatgcggccatggacaaggcattggcgcaggcctgggagcagcgcgccccgaacctgccactcgcctcgccggagcaggcattgatcctggcctcgatcatcgaaaaagaaacggccctggcctccgagcgcccgctcatcgccggggtgttcctgcgccgcttgcagctgggcatgaagctgcagaccgaccccaccgtgatctacggcatcggcagcagctacgacggcaatatccgtcgccgcgacctgaccaccgatacgccgtacaacacctacacccgtaccggcctgacgccgacgccgatcgccatgccgggccgcgaggcgctgctggcggcggtgcggccggcgcccggcgaggcgctgtatttcgtggcggtgggcgatggcaccggggcgcacgcgttctcggccacgttggccgaacataacgcagcggtggcgcgctatctgcagcgccgccggctgccgagcacgccgcagacggagcctatgccatga

SEQ ID NO: 138279 - protein, 357 aa, Xanthomonas axonopodis pv. citri str. 306
MGVAVTGKRGCLAVLGTVVLLVALLAIAAVVAWRHYLHFADTPVPASAPSVVIAPGDSLKATLRKLRAAGLAQGTELEWQLLARQVDAAGKLKVGEYALSPALSPRELLTRMRQGRVIQYRFTIVEGWNFRQLRAALATATPLQHSIDALDDAALMARLGVARQHPEGRFLPETYVYQRGDSDIDVLKRAHAAMDKALAQAWEQRAPNLPLASPEQALILASIIEKETALASERPLIAGVFLRRLQLGMKLQTDPTVIYGIGSSYDGNIRRRDLTTDTPYNTYTRTGLTPTPIAMPGREALLAAVRPAPGEALYFVAVGDGTGAHAFSATLAEHNAAVARYLQRRRLPSTPQTEPMP

SEQ ID NO: 138280 - DNA, 1092 bp, Yersinia pestis KIM
  CDS (1)..(1092): transl_table=11
ttgtttttagaacgccgccacattcaatttaaaaccgccacattcaaatttaaaaatggccacccgatgaaaagaaaaagcaccaaagcactgatcctttttgttgtgatctgtttgggattactgctgttgggttatcaaaaagtacaagattttgcgcgtcagcccttggcgattaagcaagagacttactttaccttaccggcaggtaccgggcgggttgctctagagaatttattgctacgtgatcatgtgattgctaatacaggtttatttccctggctactgcgcatagaacccgaactggctaattttaaggctgggacatatcgttttacgccgggtatgacggtacgtgagatgctggagttgttggtcagtggtaaagaagcccagtttaccgttcgttttattgaaggtaagcgcctgcgtgattggctggatgaattacaacagtcaaaatatatcaaacatgtgctggaagggaaaacagatgctgaaattgcgcagttactggggttaaaagagagtgaacaccccgaaggctggctctatcctgatacctactcctataccgcaggtacaacggatttaacactgctcaaacgtgcccatcaacgaatggaggaaaccgttgcagaaatctggcaggggcgtgatgacggattgccgtataagaccccaagtgatttggttactatggcatcaatcattgaaaaagaaaccgcggtaaatgaggagcgggataaggtggcttctgtcttcattaaccgtttacgtcttggtatgcgcctacaaacggatccaacagtgatttatggtatgggcgaaaagtataacggcaacattactcgtaaagacttagataccccgacaccttataatacctatgttatttccggtttgccgccaacccccattgccatgccagggttggcatcgctgaccgctgctgcccatccggcccaaacgccctatctctattttgtcgcagacggcaagggcgggcatacattcaccactaatttagccagtcataatcaagccgtgcgtgtttatcgccagtcgctaaaggataaaaatgaacagtaa

SEQ ID NO: 138281 - protein, 363 aa, Yersinia pestis KIM
MFLERRHIQFKTATFKFKNGHPMKRKSTKALILFVVICLGLLLLGYQKVQDFARQPLAIKQETYFTLPAGTGRVALENLLLRDHVIANTGLFPWLLRIEPELANFKAGTYRFTPGMTVREMLELLVSGKEAQFTVRFIEGKRLRDWLDELQQSKYIKHVLEGKTDAEIAQLLGLKESEHPEGWLYPDTYSYTAGTTDLTLLKRAHQRMEETVAEIWQGRDDGLPYKTPSDLVTMASIIEKETAVNEERDKVASVFINRLRLGMRLQTDPTVIYGMGEKYNGNITRKDLDTPTPYNTYVISGLPPTPIAMPGLASLTAAAHPAQTPYLYFVADGKGGHTFTTNLASHNQAVRVYRQSLKDKNEQ

SEQ ID NO: 138282 - DNA, 1239 bp, Brucella suis 1330
  CDS (1)..(1239): transl_table=11
gtgaattcagaggagaaacccggaaccaatcctgctgaacagcagtccgtatccgagcctcagaacgaggctgtgccaaccgcgccggaaaaggctgcggaacctaagccttttgtgccgaaatccgcttccgaagccttgcgcccggaacccggcacaccgccgccccgcaatcgctcgcgccatgcgcgcagccagatcgtcgttttcatgaacttcatgctgtcgcttgtcgtgctggttttgcttggcgcgtcggcattgttctatttcggcaaattacagtttgatgcgcagggcccgctcacggcggaaacgacctttctcgtcaagcgcggcgctggcattgccgaagtgagcaacggtcttgaaagccgcgatatcgtcagcgatgcgcgcattttccgctatggcatgcgcacgctcgggcatgaaaacgacctgaaggcgggcgaatatgccattcccgtcggggcgtcgatgcgcgacgtgatgaacatcctcatcagcggcaaatccatcatgtatcccttcaccgtgccggaaggcctgacggtcaagcaggtgttcgaccgcatcgccgccgacccgatcctcattggcgacatgccgaaggaaatgccgccggaaggctcgctcttcaccgatacgctgaatttcacccgcggcaccacgcgttccgagataattgaccgcatgatcgcctcgcagaagaaactggtggacgacctttgggcaaagcgcaggcctgacctgccggttcgggacaagaacgaatttgtgacgcttgcctccatcgtggagaaggaaaccggcattgcttccgagcgtccgcatgtggcttcggtcttcgtcaaccgtctgaacaaggggatgcgtctccagtcggacccgacgatcatctatgggcttttcggcggcgcaggcaaaccgtcagaccgcccgatattcaagtcggatatcgaaaagcccacgccttacaacacctatatcatcaatggtttgccgccgacacctattgccaatccgggcaaggcggcgcttgcggcggtcgccaatccgctccagaccgacgacctctattttgttgcgggcggcacgggcggccatgtattctcggcgaccctgaaggggcacaatgacaatgtgcgcaagtggcgggccgcagaacagcaaaagaatatcgggcagcagaaagatacatccggcggctccggcaaacccgataccgggcagtag

SEQ ID NO: 138283 - protein, 412 aa, Brucella suis 1330
MNSEEKPGTNPAEQQSVSEPQNEAVPTAPEKAAEPKPFVPKSASEALRPEPGTPPPRNRSRHARSQIVVFMNFMLSLVVLVLLGASALFYFGKLQFDAQGPLTAETTFLVKRGAGIAEVSNGLESRDIVSDARIFRYGMRTLGHENDLKAGEYAIPVGASMRDVMNILISGKSIMYPFTVPEGLTVKQVFDRIAADPILIGDMPKEMPPEGSLFTDTLNFTRGTTRSEIIDRMIASQKKLVDDLWAKRRPDLPVRDKNEFVTLASIVEKETGIASERPHVASVFVNRLNKGMRLQSDPTIIYGLFGGAGKPSDRPIFKSDIEKPTPYNTYIINGLPPTPIANPGKAALAAVANPLQTDDLYFVAGGTGGHVFSATLKGHNDNVRKWRAAEQQKNIGQQKDTSGGSGKPDTGQ

SEQ ID NO: 138284 - DNA, 1023 bp, Shigella flexneri 2a str. 301
  CDS (1)..(1023): transl_table=11
atgaaaaaagtgttattgattatcttgttattgctggtggtactgggtatcgccgctggtgtgggcgtctggaaggttcgccatcttgccgacagcaaattgcttatcaaagaagagacgatatttaccctgaagccagggaccggacgtctggcgctcggtgaacagctttatgctgataagatcatcaatcgcccacgggtttttcaatggctgctgcgtatcgaaccggatctttctcactttaaagccgggacttaccgctttacaccgcagatgaccgtgcgcgagatgctgaaattgttggaaagcggtaaagaagcacagttcccgctgcgactggtagaagggatgcgtctgagcgactacctcaagcaattgcgtgaggctccgtatatcaagcacacgctgagtgacgataagtacgccaccgtagcgcaggcacttgaactggaaaacccggagtggattgaaggttggttctggccagacaccttgatgtataccgccaataccaccgatgtcgcgttactcaagcgagttcacaagaaaatggtgaaagcggtcgatagcgcctgggaagggcgtgcggacggtctgccttataaagataaaaatcagctggtgacgatggcatcaattatcgaaaaagaaaccgccgttgccagtgaacgcgatcaggttgcctcggtatttatcaaccgtttacgcattggtatgcgcctgcagaccgacccaaccgtgatttacgggatgggagagcgttataatggcaaactttctcgtgcagacctggaaacgccgacagcgtataacacctataccattaccggtttgccgccgggtgcgatagctacgccgggggcggattcgctgaaggctgctgcgcatccggcaaaaacgccgtatctctattttgtggccgatggtaaaggtggtcacacgtttaataccaatcttgccagtcataacaagtctgtgcaggattatctgaaagtgcttaaggaaaaaaatgcgcagtaa

SEQ ID NO: 138285 - protein, 340 aa, Shigella flexneri 2a str. 301
MKKVLLIILLLLVVLGIAAGVGVWKVRHLADSKLLIKEETIFTLKPGTGRLALGEQLYADKIINRPRVFQWLLRIEPDLSHFKAGTYRFTPQMTVREMLKLLESGKEAQFPLRLVEGMRLSDYLKQLREAPYIKHTLSDDKYATVAQALELENPEWIEGWFWPDTLMYTANTTDVALLKRVHKKMVKAVDSAWEGRADGLPYKDKNQLVTMASIIEKETAVASERDQVASVFINRLRIGMRLQTDPTVIYGMGERYNGKLSRADLETPTAYNTYTITGLPPGAIATPGADSLKAAAHPAKTPYLYFVADGKGGHTFNTNLASHNKSVQDYLKVLKEKNAQ

SEQ ID NO: 138286 - DNA, 1266 bp, Pseudomonas putida KT2440
  CDS (1)..(1266): transl_table=11
ttgcccgtacgttactggaaacctgaattcgtgagacgtaaattcctgctgttgctggaaatgggcttgatccttgccggcctggcgtttggctggtcggcctggaaggtcaactcggtcctggagcagcccctgcacatcacgcaggaacgcctgctggatgtgcccaatggcactaaccccaaccgcatgttctacagcatgcaaagggaagggttgctcgacgacgctgtctggttgcgtttgtactggcgcttcaacatggccggcacccccctgcacaccggcgagtaccgtcttacccctggcatgaccgtcgagcaattgttcgacgcctggcgccgtgccgacgtggtgcagtacaacctcaccctggtcgaaggctggaccttccgccaggtgcgtgcggccgtggccaagcatgaaaagatcaagcataccctggagggcttgtcggatgccgaggtcatggacaagctcggccataccggtgtgttccccgaaggccgcttcttccccgacacctaccgcttcgtgcggggtatgagcgatgtcgagttgctgcagcaggcctacatgcgtctggacgaggtgctggccaaggagtgggccgagcgttccaccgacctgccgtatcgtgacccgtaccaggcgctgatcatggcctccctggtagaaaaggaaaccggcattccgcaggagcgcgggcagatcgccggcgtgttcgtgcggcgcatgcgcctgggtatgatgctgcagaccgacccgacggttatctatggcatgggtgagcgctacaacggcaggatcacccgcgcggacctgcgcgagcctacgccttacaacacctacaccatgaccggcctgccgccgaccccgatcgccatggtcggccgcgaggcgattcacgcggcgctgaacccgtccaatggcaccagtctttacttcgtcgcccgcggcgatggcagccatgtgttttccgacgacctcgacgaccacaattcggcagtgcgcgagttccagctcaagcgccggtcggactaccgctccagccccgcgccgcagcaagaggccaagccaggtgccgatgatgccgaacaggcatcgggcgccgacgatgcgcagcgccctgagcccccagcagcggacccgtcagcaacggatgagccaactgcgcagccagcccccgatgaagcgcccgcgcaggatgcccctgccggcggtgcacaagcggccgagcggccgacgcctgacgaacaacattaa

SEQ ID NO: 138287 - protein, 421 aa, Pseudomonas putida KT2440
MPVRYWKPEFVRRKFLLLLEMGLILAGLAFGWSAWKVNSVLEQPLHITQERLLDVPNGTNPNRMFYSMQREGLLDDAVWLRLYWRFNMAGTPLHTGEYRLTPGMTVEQLFDAWRRADVVQYNLTLVEGWTFRQVRAAVAKHEKIKHTLEGLSDAEVMDKLGHTGVFPEGRFFPDTYRFVRGMSDVELLQQAYMRLDEVLAKEWAERSTDLPYRDPYQALIMASLVEKETGIPQERGQIAGVFVRRMRLGMMLQTDPTVIYGMGERYNGRITRADLREPTPYNTYTMTGLPPTPIAMVGREAIHAALNPSNGTSLYFVARGDGSHVFSDDLDDHNSAVREFQLKRRSDYRSSPAPQQEAKPGADDAEQASGADDAQRPEPPAADPSATDEPTAQPAPDEAPAQDAPAGGAQAAERPTPDEQH

SEQ ID NO: 138288 - DNA, 1017 bp, Salmonella enterica subsp. enterica serovar Typhi Ty2
  CDS (1)..(1017): transl_table=11
atgaaaaaattgtcaggcgttttccttctgctgttggttgtgctgggtattgccacgggcgtggggatgtggaaagttcgccatctggcgaacagcacgttacttattaaaaacgagactatctttacgctcaaggcgggaacgggtcggctggcgcttggtgaccagctttatgatgaaaaaatcattaatcgtccccgggtatttcagtggctgctgcgcgtggagcctgagttatcgcactttaaagcgggaacttaccgttttacgcccgggatgaccgtacgggagatgcttgagttgctggagagcggcaaagaagcgcaattcccgttgcggtttgtggaagggatgcgccttagcgattacctgaaacagttacgagaggcgccgtatattcgccatacattgccggatgatgactacgccactgtcgctcaggcattaaagcttgcgcacccggaatgggtagaagggtggttctggcctgatacctggatgtataccgccaacaccagcgatgtcgctattctcaagcgagcgcaccaaaagatggtgaaagctgtcgatactgtctggaaaggtcgggccgaggggctgccttataaagatcagaaccaactggtgacaatggcctcgattattgaaaaagagacggctgtcgccagcgaacgcgatcaggtggcctcagtctttattaatcgcctgagaatcggtatgcgccttcagaccgatcccaccgtgatttacgggatggggacgagttataatggtaacttgtcgcgtgcggatctggaaaagccgacggcttataacacgtataccataaccgggctgccgccaggaccgattgcatcgcccagcgaagcgtcattgcaggcggcggcgcatccggcgaaaacgccgtatctctattttgtggccgacggtaaaggcggtcacacatttaacaccaatcttgccagccataatcggtcagtgcaggagaaagtgcttaaggaaaaaaatgggcagtaa

SEQ ID NO: 138289 - protein, 338 aa, Salmonella enterica subsp. enterica serovar Typhi Ty2
MKKLSGVFLLLLVVLGIATGVGMWKVRHLANSTLLIKNETIFTLKAGTGRLALGDQLYDEKIINRPRVFQWLLRVEPELSHFKAGTYRFTPGMTVREMLELLESGKEAQFPLRFVEGMRLSDYLKQLREAPYIRHTLPDDDYATVAQALKLAHPEWVEGWFWPDTWMYTANTSDVAILKRAHQKMVKAVDTVWKGRAEGLPYKDQNQLVTMASIIEKETAVASERDQVASVFINRLRIGMRLQTDPTVIYGMGTSYNGNLSRADLEKPTAYNTYTITGLPPGPIASPSEASLQAAAHPAKTPYLYFVADGKGGHTFNTNLASHNRSVQEKVLKEKNGQ

SEQ ID NO: 138290 - DNA, 1032 bp, Nitrosomonas europaea ATCC 19718
  CDS (1)..(1032): transl_table=11
atgcctaaatcaacacgttttctgaaactcaccagtttcgttcttattgtcattctggttggcagtacgctgttttcagtatggttctatcgactggctacaactccgttgaatctccctgcagtacccagtgaattttcaattgagcccggaagtgggttacaccgtattgccggacaattggccgaagcaggtatcctttccaatgaatggtctttcatattgcttgcccatatcaccggatacaacgcatcactcaaggctggggattatcagcttaccgagaagctgtcaccgttagacctgctgaaatatctcacccggggaaaggtcaggcaatatgcgatcacctttcttgaaggatggaccttttctcaattcagaaaagctctggacgaacatcctgctctccggcatgactccgacaaactcaacgactcagaattactgcgcgcaatcggagcaaaagaatctcatgctgaaggtcttttcttcccggatacttacttctttacccgaaacagcagtgatctgaccattctgaaacgtgcctaccaggccatgcagcagcacctcgaaacagtgtggcttgcacgacaggaatttctcccgttaaaagatcagtatgatggcctgattctggcttcgatcatagaaaaagaaaccggagcagataatgagcgcacccagattgccggtgtattcatcaaccgtctgcgtcacaatatgaaactccagactgacccgactgtaatctacgggatgggtaacaaatttgatggaaacctgcgcaagatcgatcttcaaaccgaccatgaatataatacttatactcgcttcggcctgccgcccactcccattgccatgccaggcctggcttccatccgggcagcctttaatcctgcaattactgatgaactttattttgttgccagaggtgacggaacttcccacttctcatccacacttgaagagcataatcgtgccgtcctgaaatatcagaaatcatccataaagcattctgtccattaa

SEQ ID NO: 138291 - protein, 343 aa, Nitrosomonas europaea ATCC 19718
MPKSTRFLKLTSFVLIVILVGSTLFSVWFYRLATTPLNLPAVPSEFSIEPGSGLHRIAGQLAEAGILSNEWSFILLAHITGYNASLKAGDYQLTEKLSPLDLLKYLTRGKVRQYAITFLEGWTFSQFRKALDEHPALRHDSDKLNDSELLRAIGAKESHAEGLFFPDTYFFTRNSSDLTILKRAYQAMQQHLETVWLARQEFLPLKDQYDGLILASIIEKETGADNERTQIAGVFINRLRHNMKLQTDPTVIYGMGNKFDGNLRKIDLQTDHEYNTYTRFGLPPTPIAMPGLASIRAAFNPAITDELYFVARGDGTSHFSSTLEEHNRAVLKYQKSSIKHSVH

SEQ ID NO: 138292 - DNA, 1047 bp, Wigglesworthia glossinidia endosymbiont of Glossina brevipalpis
  CDS (1)..(1047): transl_table=11
atgtcttattatttatattgtattagatcaaaatataaaatgaaaaaaaaaataaataaaatattatatttattaatattaatacctatttttttttttagactatttatttttgaaagagaatctttgcacataaataataatgcattaattacaataaagaaaggtagcacaatattagatttgaaaaatttaatggaagaaaaaacatttaataatcatttatacttattgccatggttaattaaattatatcctaaatataaatacataaaggcaggaacttattttttaaaaacagaatataatattaaagacgctttaaatatttttgtgttaggaaaagaaaaacaattttctattactttttttgaaggatcaacattgcaagattgtttaattatattaaaaaattctccatatatagagcaagacctaataaatgtaaatatatacaatttatcagaaaaattagggtataaatacaaatttccactagaaggaagtttatatccagatacttatttgtatgtaaaaaatactaaagctagtgaaatattaaaaagagcaaaaagaaatatggatgttattttagaaaaaatatgggacaacagagaatatgatttgccatataaaaattctcaatcattattaattatggcttcgattatcgaaaaagaaacatcaataaaaaaagaacgtgcaattgtagcttctgtctttgtaaatagattaaaaaacaaaatgaaattgcaatctgatccaactgttatgtatggtttaagaaataaaaaaacaattaatcataatgatttgactatacctactaaatacaacacatatattattaatggactgcctcctactccaatatcaatgcctggttttgaatctatttatgcagctgctcatccaaaaaaaagtaattatttttattttgtatctaatggttacggcagtcatatatttagcgaaaactttaataatcataaaaaagcaataaaacaatatataaataaaaaggtacaatttaatgataaaaagtaa

SEQ ID NO: 138293 - protein, 348 aa, Wigglesworthia glossinidia endosymbiont of Glossina brevipalpis
MSYYLYCIRSKYKMKKKINKILYLLILIPIFFFRLFIFERESLHINNNALITIKKGSTILDLKNLMEEKTFNNHLYLLPWLIKLYPKYKYIKAGTYFLKTEYNIKDALNIFVLGKEKQFSITFFEGSTLQDCLIILKNSPYIEQDLINVNIYNLSEKLGYKYKFPLEGSLYPDTYLYVKNTKASEILKRAKRNMDVILEKIWDNREYDLPYKNSQSLLIMASIIEKETSIKKERAIVASVFVNRLKNKMKLQSDPTVMYGLRNKKTINHNDLTIPTKYNTYIINGLPPTPISMPGFESIYAAAHPKKSNYFYFVSNGYGSHIFSENFNNHKKAIKQYINKKVQFNDKK

SEQ ID NO: 138294 - DNA, 1035 bp, Haemophilus ducreyi 35000HP
  CDS (1)..(1035): transl_table=11
atgattaaaaaaatcttctttgcattcatcttacttatttttattactgcaggcgttatctactatggttatcaaaaaattagccacttagcacaacaacccttaacgcaccaagccaatcagctttttacgcttgaaaaaggcacatctagtcaacaattagcgacacaactctcaaaacaaggcattattcagcataacgatcttgatctattaccttatttgctcaaactaacacccgaacttgccgaatttaaagcaggcacttactcacttaagggcttaaccacgctagaagaattacttaaacatttatgcataggcaaagaagttcaattaaccgtaaaattgattgaaggtcaaacatttaaacaatggcgtgaacaacttaaacaagcggactatttacaacaaactttacaacatcactcagaagcagaaatagctaagttactcaatatacctcacgcaaaattagaaggctggattgcaccaaatacttatcattatgtgccttattctaccgatatagacttgctaaaacgtgcttatcaacaacaacaaaaagcacttgaatatgcttggcaaactcggacgcaagacttgccattagcgacaccttatgaaatgttaattttagcatctattgtagaaaaagagaccgctattgcgagtgaacgcccacaaattgcttcagtatttattaaccgcttgaaattaaagatgaaattacaaaccgatccgaccgttatttatggcatgggggatacttacgatggcaatattcgccgtaaagacttaacgaccctaacgccttataatacctatatgattgaaggattaccgcccacaccgattgcgatgccgagtgcagcatcattgaaagccgttgcccaaccagaaaatactgtttatctttactttgtagcagatggttcaggcggacataaattcagtaaaagtttgaatgaacacaataaagctgtccagcaatggattaaaattgaacgtaacaagaaaaatgagaacaaataa

SEQ ID NO: 138295 - protein, 344 aa, Haemophilus ducreyi 35000HP
MIKKIFFAFILLIFITAGVIYYGYQKISHLAQQPLTHQANQLFTLEKGTSSQQLATQLSKQGIIQHNDLDLLPYLLKLTPELAEFKAGTYSLKGLTTLEELLKHLCIGKEVQLTVKLIEGQTFKQWREQLKQADYLQQTLQHHSEAEIAKLLNIPHAKLEGWIAPNTYHYVPYSTDIDLLKRAYQQQQKALEYAWQTRTQDLPLATPYEMLILASIVEKETAIASERPQIASVFINRLKLKMKLQTDPTVIYGMGDTYDGNIRRKDLTTLTPYNTYMIEGLPPTPIAMPSAASLKAVAQPENTVYLYFVADGSGGHKFSKSLNEHNKAVQQWIKIERNKKNENK

SEQ ID NO: 138296 - DNA, 1035 bp, Bordetella pertussis Tohama I
  CDS (1)..(1035): transl_table=11
atgagaaaacgtattcgtttctattttctgctgctcgtgctggtggcgctgctcggcgccgcgctggcggccggcggcgcctggacctggatgcacaggccggtggcgctcaagtccgaccgcatcgatttcgtggtggatccgggcagcgcgccgcgcgccatcgcgcgcaccctcaaccaggccggcgtggcggtctgggagccgggcttcgtctggatggcgcgcctgtccgagctggacaagcagatcaaggccggcggctaccaggccatcgacggcgactcgccctggcagttgctgcaacggctggcgcgcggcgacatgagccagcgccagatcactttcctggagggctggacgttccggcagatgcgccaggcgctgcgcgaacatcccgacgtcaagcagaccctgggcgagaccagcgacgaggccctgatggaaaggctgggctcgacggtgactcatcccgagggcatgttctttcccgacacctatgtgttcactccgggcagcacggatttcgacatcctgcggcgcgcctaccaggaagggcagcgcatcctggagtcgacctgggccaagcgccaggatgggctgccggtgggcacgccctacgaagcgctgatcctggcctccatcgtcgagaaggagaccggccacgggtcggagcgcgcgcgcgtggccggggtgttcgccaaccggctgcgcatcggcatgctgctgcagaccgatccgaccgtgatctacggcatgggcgaggcctaccagggccgtatccgcaagcgcgacctgcagaccgacacgccatggaacacctacacccgtccgggcctgccgcccacgcccatcgccgcgcccgggcgcgccgcgctgctggcggcggtgcagcccgaacgccacaaatacctgtttttcgtgtcgcgcggcaacggcaccagcgagttctcggtcaacctgaacgaccacaaccgcaatgtgtcgcgctacatattgggacaagggcaaccgcaacaaggatcgcagcaatga

SEQ ID NO: 138297 - protein, 344 aa, Bordetella pertussis Tohama I
MRKRIRFYFLLLVLVALLGAALAAGGAWTWMHRPVALKSDRIDFVVDPGSAPRAIARTLNQAGVAVWEPGFVWMARLSELDKQIKAGGYQAIDGDSPWQLLQRLARGDMSQRQITFLEGWTFRQMRQALREHPDVKQTLGETSDEALMERLGSTVTHPEGMFFPDTYVFTPGSTDFDILRRAYQEGQRILESTWAKRQDGLPVGTPYEALILASIVEKETGHGSERARVAGVFANRLRIGMLLQTDPTVIYGMGEAYQGRIRKRDLQTDTPWNTYTRPGLPPTPIAAPGRAALLAAVQPERHKYLFFVSRGNGTSEFSVNLNDHNRNVSRYILGQGQPQQGSQQ

SEQ ID NO: 138298 - DNA, 1047 bp, Bordetella parapertussis 12822
  CDS (1)..(1047): transl_table=11
ttgcgcacacttatgagaaaacgcattcgtttctattttctgctgctcgtgctggtggcgctgctcggcgccgcgctggcggccggcggcgcctggacctggatgcacaggccggtggcgctcaagtccgaccgcatcgatttcgtggtggatccgggcagcacgccgcgcgccatcgcgcgcaccctcaaccaggccggcgtggcggtctgggagccgggcttcgtctggatggcgcgcctgtccgagctggacaagcagatcaaggccggcggctaccaggccatcgacggcgactcgccctggcagttgctgcaacggctggcgcgcggcgacatgagccagcgccagatcactttcctggagggctggatgttccggcagatgcgccaggcgctgcgcgaacatcccgacgtcaagcagaccctgggcgagaccagcgacgaggccctgatggaaaggctgggctcgacggtgacccatcccgagggcatgttctttcccgacacctatgtgttcactccgggcagcacggatttcgacatcctgcggcgcgcctaccaggaagggcagcgtatcctggagtcgacctgggccaagcgccaggatgggctgccggtgggcacgccctacgaagcgctgatcctggcctccatcgtcgagaaggagaccggccacgggccggagcgcgcgcgcgtggccggggtgttcgccaaccggctgcgcatcggcatgctgctgcagaccgatccgaccgtgatctacggcatgggcgaggcctaccagggccgtatccgcaagcgcgacctgcagaccgacacgccatggaacacctacacccgtccgggcctgccgcccacgcccatcgccgcgcccgggcgcgccgcgctgctggcggcggtgcagcccgaacgccacaaatacctgttcttcgtgtcgcgcggcaacggcaccagcgagttctcggtcaacctgaacgaccacaaccgcaatgtgtcgcgctacatattgggacaagggcaaccgcaacaaggatcgcagcaatga

SEQ ID NO: 138299 - protein, 348 aa, Bordetella parapertussis 12822
MRTLMRKRIRFYFLLLVLVALLGAALAAGGAWTWMHRPVALKSDRIDFVVDPGSTPRAIARTLNQAGVAVWEPGFVWMARLSELDKQIKAGGYQAIDGDSPWQLLQRLARGDMSQRQITFLEGWMFRQMRQALREHPDVKQTLGETSDEALMERLGSTVTHPEGMFFPDTYVFTPGSTDFDILRRAYQEGQRILESTWAKRQDGLPVGTPYEALILASIVEKETGHGPERARVAGVFANRLRIGMLLQTDPTVIYGMGEAYQGRIRKRDLQTDTPWNTYTRPGLPPTPIAAPGRAALLAAVQPERHKYLFFVSRGNGTSEFSVNLNDHNRNVSRYILGQGQPQQGSQQ

SEQ ID NO: 138300 - DNA, 993 bp, Chromobacterium violaceum ATCC 12472
  CDS (1)..(993): transl_table=11
atgaagaaaatttcccgcgttctgttgctgctgctgttgtgcgcggccggctggctgggctgggcgctgctgctgcccgtcgacatgcccgcaggcggctacaagctgctggtcggccccaaccgcacgatgaagcagatcgcgcatgcgctggcgaaggacggcgcgatacgcaatggccagctgatgatcgcgctggcgcggatttccggttccgatcgcaaggtcaaggccggcctgtaccggctggagggcgggcagtcgatgctggacgtgctggaccggctggtgcagggccatccggacgaggccagcctgaccgcgatagaaggctggactttccgccagctgcgccaggcggtggaccgcaatccggatatcaagcacgacgcgctgaagatgagcaatgccgagctgatgcatcagctggacctgcccgacatcaatcccgagggcttgttctttcccagcacctatctgttcacgccgggctcttccgatatcgatctgtaccggcaggccttttcgacgatggcgcagcagctggacgccgcctgggcggcgcgcaagccgggcctgccttacgccacgccgtacgagttgttgaccatggccagcctgatcgagaaggaaacctccagcgaggccgaccggccgatggtggcggcggtgttcgtcaaccggctgaagaagggcatgcggctgcagaccgatccctcggtgatctacggcatgggcagcagctaccagggcaatatcgccaaggccgacttgcgccgcgatacgccgtacaatacctatacccgcgccggcctgacgccgacgccgatctcgctgccgggcaaggccgcgctgtacgcggcggcccagccggccgaaaccgacgcgctgtatttcgtcgcccgcggcgacggcagctcccagttttccagcaccctggacgagcataaccaggcggtgcgcaaatacatcctgaagaaaggccagcaatga

SEQ ID NO: 138301 - protein, 330 aa, Chromobacterium violaceum ATCC 12472
MKKISRVLLLLLLCAAGWLGWALLLPVDMPAGGYKLLVGPNRTMKQIAHALAKDGAIRNGQLMIALARISGSDRKVKAGLYRLEGGQSMLDVLDRLVQGHPDEASLTAIEGWTFRQLRQAVDRNPDIKHDALKMSNAELMHQLDLPDINPEGLFFPSTYLFTPGSSDIDLYRQAFSTMAQQLDAAWAARKPGLPYATPYELLTMASLIEKETSSEADRPMVAAVFVNRLKKGMRLQTDPSVIYGMGSSYQGNIAKADLRRDTPYNTYTRAGLTPTPISLPGKAALYAAAQPAETDALYFVARGDGSSQFSSTLDEHNQAVRKYILKKGQQ

SEQ ID NO: 138302 - DNA, 1017 bp, Photorhabdus luminescens subsp. laumondii TTO1
  CDS (1)..(1017): transl_table=11
atgaaatggaaaaaacgcctttttgccctattggctttgattgtcattacggcagcaatattactctatgctggctatgaaaaagttgaaaaatttgcggatcaaacattaacaattaaacagaatcgaatatttaccctgccaacaggtattggtcgtcatggtttggaagcgttactggttcgggataacctgattgaagatagtcatattttcccttggttattaagattggagccaaaacttgccgagttcaaagcgggaacttaccaattaacacgagaaatgactttacgggaaatgttgcaattattctctagtggtaaagaagcgcaatttacggtccgttttgttgaaggtagccgtttatctgattggtggagaatactacagcaatctgaatatcttaaacatgaattggataataaagatgctcaggaattggctgaaatactcgatattaaagatacagatactctggaagggtggctttatcctgatacctatcactatacggcaggcacaagcgatgtagcattgctgaaacgagcatatcgacagatgaaaatgacgctggaagaggaatgggaaggtcgcgacaaaaatctgccctataagaatgcttatgaaatgttgattatggcgtcgattattgaaaaagaaactggtgttgaggctgagcggacaaaagttgcttctgtatttattaatcgtttacggttgaatatgcgacttcaaactgatccgacagtgatttatggtttaggtgaaaaatatacaggcactatttttcgtaaagatttaacaacattgacgccctacaatacttatatgattaatggtctgccacctacaccgattgcaatgcctggccttgcttctataaaagcggctgcacacccggcaaaaaccgaatttctctattttgtggcgaatggcaaaggtggtcatacttttacgaccaatctggctgcgcataacaaggcggtaaatatttaccgtcagaggttaaaatag

SEQ ID NO: 138303 - protein, 338 aa, Photorhabdus luminescens subsp. laumondii TTO1
MKWKKRLFALLALIVITAAILLYAGYEKVEKFADQTLTIKQNRIFTLPTGIGRHGLEALLVRDNLIEDSHIFPWLLRLEPKLAEFKAGTYQLTREMTLREMLQLFSSGKEAQFTVRFVEGSRLSDWWRILQQSEYLKHELDNKDAQELAEILDIKDTDTLEGWLYPDTYHYTAGTSDVALLKRAYRQMKMTLEEEWEGRDKNLPYKNAYEMLIMASIIEKETGVEAERTKVASVFINRLRLNMRLQTDPTVIYGLGEKYTGTIFRKDLTTLTPYNTYMINGLPPTPIAMPGLASIKAAAHPAKTEFLYFVANGKGGHTFTTNLAAHNKAVNIYRQRLK

SEQ ID NO: 138304 - DNA, 1017 bp, Vibrio vulnificus YJ016
  CDS (1)..(1017): transl_table=11
gtgataaaaaaaataatagggctgctctttattgccgcgttgatgataggcgttgctactttttgggcatattcgcaaaccaaaacctacgttaaccaaccgctcaaactcgagggcagtgagatcatcaccattccttcaggaagtggttttggccgcacattggccattctgacagagaaaggctggattgaggaacccacacatctggcgcgcttaattcccaaactctacccagaaattactcgaataaaagcaggtacctaccaaatccaatcagagatgtcgctttatcaagctttggaagtgttcaatcttggcaaagaacatcaatttaccatcacatttgtcgagggaagtcgtttccaagagtggatggtgcagatggcacaagacccttatttggttcatgaattggcaggtttgagcgaagcagaaattgccaagcgactggagataccctatgaaaagcttgaaggcctttttcttgcggaaacctatcactatacctacggcacttctgatgttgagttactcaaacgcgcacatgagaagttaaatcgagtgctggataaacattggcagcagcgtcaagataagttgccgctaaaaaacagttatgaagcgctaattctagcttccattattgagaaagaaaccgctattgatgaagaacgagagcgagttgcgtctgtatttgtgaaccgcttaaataagcgaatgcgcttgcaaacggaccctacggtgatctatggcatgggggaggcctacgatggcaacattcgcaagaaagatctacgcacgccaacgccatacaatacttacgtgattaacggattgccaccgacgccgattgcgatggcgggagaagcctctatcgctgccgcattaaatccagagaacagcagctatctttactttgtcgctagcggtaagggtgggcatgtgttctcaaaaacattagctgaacataatagagcagtaagagcatatctgcgggaattgaagaaaagatga

SEQ ID NO: 138305 - protein, 338 aa, Vibrio vulnificus YJ016
MIKKIIGLLFIAALMIGVATFWAYSQTKTYVNQPLKLEGSEIITIPSGSGFGRTLAILTEKGWIEEPTHLARLIPKLYPEITRIKAGTYQIQSEMSLYQALEVFNLGKEHQFTITFVEGSRFQEWMVQMAQDPYLVHELAGLSEAEIAKRLEIPYEKLEGLFLAETYHYTYGTSDVELLKRAHEKLNRVLDKHWQQRQDKLPLKNSYEALILASIIEKETAIDEERERVASVFVNRLNKRMRLQTDPTVIYGMGEAYDGNIRKKDLRTPTPYNTYVINGLPPTPIAMAGEASIAAALNPENSSYLYFVASGKGGHVFSKTLAEHNRAVRAYLRELKKR

SEQ ID NO: 138306 - DNA, 987 bp, Herminiimonas arsenicoxydans
  CDS (1)..(987): transl_table=11
ttgattaaaaaattcttcaccctgattattctgctggcaattgtcgccgcagcggccttcgtgttctgggcgcagcagcctatcacccggaatgaccagcccgccatcgacttcacgattaatcccggcagcggcgtaaaaagcagcatgcagcaaattgaaaatgccggtgcgccggtgcaaccttttctgatgatggtgctggcgcaagtcaccggcaacagcacgaaactgaaagccggtagttacgaattgaagccaggcacgacgccgtcccgcttgctgacgcaattagtgcgcggcgagtttgcccaggaagcgctgaccgtcatcgagggctggaccttcaggcagatgcgtgaggtgatcaatgcgaatccggcgctcaggcatgacaccgcgggtttgtccgaccaggatttgatggcaaggatctcgagcgattacaaaacgccggaaggcctgttttatcccgatacctatctgttcgcaaagaattccagcgacttgcagatttacaaacaggcgcacaatctgatgctcaagcgcctgaatgaagcctggctggcacgcaatccgtcgctgccgtatgcctcgccttatgaagccttgatcatggcttccatcgtggaaaaggaaaccggcaaaaaatctgaacgcacgatgattgccggcgtcttcgtcaatcgcctgaagaagggcatgctgctgcaaaccgatccgaccgtcatttacggcatgggcgatagttacaagggcaatatccgcaagagcgacctgctgactgacaccccgcacaacacgtatactcgctccggcttgccgcctacgccgattgccttgccgggcatggaatcgctgcatgcagcgatgaacccggccgctaccgatgcagtgtatttcgtcgcgcgcggcgatggcagcagccagttttccgcgaatctggacgaccacaacaatgcggtcaacaagtatcagcgcaagtaa

SEQ ID NO: 138307 - protein, 328 aa, Herminiimonas arsenicoxydans
MIKKFFTLIILLAIVAAAAFVFWAQQPITRNDQPAIDFTINPGSGVKSSMQQIENAGAPVQPFLMMVLAQVTGNSTKLKAGSYELKPGTTPSRLLTQLVRGEFAQEALTVIEGWTFRQMREVINANPALRHDTAGLSDQDLMARISSDYKTPEGLFYPDTYLFAKNSSDLQIYKQAHNLMLKRLNEAWLARNPSLPYASPYEALIMASIVEKETGKKSERTMIAGVFVNRLKKGMLLQTDPTVIYGMGDSYKGNIRKSDLLTDTPHNTYTRSGLPPTPIALPGMESLHAAMNPAATDAVYFVARGDGSSQFSANLDDHNNAVNKYQRK

SEQ ID NO: 138308 - DNA, 1014 bp, Dichelobacter nodosus VCS1703A
  CDS (1)..(1014): transl_table=11
atgattgccaaaattttccggttgttgattttatttattttgtttgccggcattgccgtggtttcgcttggatatcaacaatataaccacagtatcacgcatcatctgcaacctacggaacaagatattatcagcgttcgcgccggcgatacgttaggcacgattgctgccgaattggcgcaaaaacatgatttgcccaatccttgggcggttaaaatttatgccaaacttcacccagaaatacaaaaaatccaagccggtgattaccgcattcatgccaatagcaccgtattagatttattagcggatatggttgccggtcgggtgattgtttttgaatttcgtttggtagaaggtaaaacgtttgccgaaatgatgcatttgctcgcacaatcgccggaattaacgcataccttaaacggaaaatcgcgccaagaaatcgcgcagattttaggcattgagggcgatcctgaagggtggttttatccggatacttatcgctatacacgccacagtagcgatcaagaattgttgcaacgtttgcaccaaaatatgcgcgctgttttgcaagaacattggcaagatcgcgacgatcgtctaccgttgaaaacgccttatgaagctttgattttggcgtccatcattgaaaaagaaaccggcgtcgccgatgaacgcgcgcaagttgccggtgtatttgtgcgccgtttgcaaaaaaagatgcgcctgcaaaccgatcccagcgtgatttacggcatgaatcattatcaaggcacgattacacggcaggatttacaaaaagatacgccttataacacgtacacccgtttaggattaccgccaacgccaattgccatgcccagcgaagcttctatttatgccgcgctgcaccctgatgaaggcgatgctttatattttgtcgccgacggcaaaggcggtcatattttttccgcaacttatgaagcgcatttaaaagccgtgcaacgttatcgtcgaagtcaaaatcatgcgcggtaa

SEQ ID NO: 138309 - protein, 337 aa, Dichelobacter nodosus VCS1703A
MIAKIFRLLILFILFAGIAVVSLGYQQYNHSITHHLQPTEQDIISVRAGDTLGTIAAELAQKHDLPNPWAVKIYAKLHPEIQKIQAGDYRIHANSTVLDLLADMVAGRVIVFEFRLVEGKTFAEMMHLLAQSPELTHTLNGKSRQEIAQILGIEGDPEGWFYPDTYRYTRHSSDQELLQRLHQNMRAVLQEHWQDRDDRLPLKTPYEALILASIIEKETGVADERAQVAGVFVRRLQKKMRLQTDPSVIYGMNHYQGTITRQDLQKDTPYNTYTRLGLPPTPIAMPSEASIYAALHPDEGDALYFVADGKGGHIFSATYEAHLKAVQRYRRSQNHAR

SEQ ID NO: 138310 - DNA, 1074 bp, Acinetobacter sp. ADP1
  CDS (1)..(1074): transl_table=11
ttgattgatatgcccaagcagcccacaaaacccaaaatgaagaaaaaaccgcagcctcaaacagagtcatggtttaaaacaaacaaatggctaatggcagcgctcgtcttgttatgtgtggttggtattgtgctatgggcaaatttgtttaagccttatccgattgatggtaaaaggcagatgttggcgattgcgccaggcgatacctatacacgctttatagatcgcatggagaaagatggaaagatcagtttgccgattgtgcttaaaatttatcaaaaatttctcattcatgacagtttaaaggcaggtgtgtacgaaatccgtcaagggatgagtattcgccaagtgatggtaatgctgtccaatgcagaaaatgcgcagatgaaccgaattttggtgattgagggaacaacattcaaacagttgattgagaatcttaaaaaagatccactcgtgaccaaaactgtagtgaatttaccgtattccgagatgttaaaagctttggatattccttaccaacatccagaaggcttatttgaaccgaatacctacttttttgcaaaaggtgagacggataagaaaattttgactgatctgtatcgttatcaaatgaaaaccctgaatgaagaatggcagaagcgtgctcgtgatcttccttataaaaataaatatgaagcattaattatggcttcgattattgaaaaagaaaccagtatcgattcagagcttgaacaggtttcgggtgtatttgtacgtcgtttaagactcgggatgcgcttgcaaacggatccgaccgtaatttatggcatgggcgatcgatatcaaggcaaaattagccgtgaggatttacgaacagcaacggcctacaatacctataccatggcggggcttcctccaacgccaattgctttgccaggcaaaaaagcaattgcggctgccatgcatccagatcagtcagacaatatttattttgtggcaacaggtaatggcggacataaatttagcgccaatttacaagaccataatcaagcggttcaacaatacttgtccgtgttaagatcgaaaaattaa

SEQ ID NO: 138311 - protein, 357 aa, Acinetobacter sp. ADP1
MIDMPKQPTKPKMKKKPQPQTESWFKTNKWLMAALVLLCVVGIVLWANLFKPYPIDGKRQMLAIAPGDTYTRFIDRMEKDGKISLPIVLKIYQKFLIHDSLKAGVYEIRQGMSIRQVMVMLSNAENAQMNRILVIEGTTFKQLIENLKKDPLVTKTVVNLPYSEMLKALDIPYQHPEGLFEPNTYFFAKGETDKKILTDLYRYQMKTLNEEWQKRARDLPYKNKYEALIMASIIEKETSIDSELEQVSGVFVRRLRLGMRLQTDPTVIYGMGDRYQGKISREDLRTATAYNTYTMAGLPPTPIALPGKKAIAAAMHPDQSDNIYFVATGNGGHKFSANLQDHNQAVQQYLSVLRSKN

SEQ ID NO: 138312 - DNA, 1020 bp, Erwinia carotovora subsp. atroseptica SCRI1043
  CDS (1)..(1020): transl_table=11
atgaaaaaaaagaaaattggtttgctgattatcgccgctgttgttctgatgttgctggtagcgtggcagaaaatgcagcgttttgctgattctccattggctatcgaaaacgaaactattttcacgcttccggctggtacgggaagagaagggctggaaacgctgcttctcgatcaaaaaattattactgatggtgcgttttttccgtggttgctgcgtatcgaacctgaattggcaaaattcaaggcaggtacgtaccgctttacgacgggaatgaccgtacgcgagatgttggccttactgtccagcggcaaggaagcgcaattcaccatccgctttgtcgaaggttcacgtctaaaagagtggatcgtcacattgctgcaggcaccttatatcaagcatgcactggccgataaaaccgaacaggacatcgccactcagttggaaatcaacgataaggcgaacccggaaggttggttttatcctgacacgtattcatacacggccggtacgagcgatagcgccctgttacagcgtgcgcatcagcgtatgaaaaaaacggtggatgacgtatggaaagggcgtgaagaaggcttaccctacaagacacctgacgagttgctgacgatggcgtcaatcattgaaaaagaaacggcaatcaatgaagaacgtacgcaggtcgcttccgtttttatcaatcgcttacggcttggtatgcggctgcaaactgatcccacggtgatttatggcatgggggatgactataaaggtgtgataacccgtaaagcattagatacgccgacgccttacaatacgtatgtcatcatcggcttaccgccgacgccgatcgcgatgccggggaaagcgtcattggatgcggctgcacatcctgctaaaacgtcgtatctgtatttcgtggcggatggaaaaggcggacacagttttaccactaaccttgcagaccataatcgtgctgtaaaggtataccgctcagcgttaaaggaacgggatgaacagtaa

SEQ ID NO: 138313 - protein, 339 aa, Erwinia carotovora subsp. atroseptica SCRI1043
MKKKKIGLLIIAAVVLMLLVAWQKMQRFADSPLAIENETIFTLPAGTGREGLETLLLDQKIITDGAFFPWLLRIEPELAKFKAGTYRFTTGMTVREMLALLSSGKEAQFTIRFVEGSRLKEWIVTLLQAPYIKHALADKTEQDIATQLEINDKANPEGWFYPDTYSYTAGTSDSALLQRAHQRMKKTVDDVWKGREEGLPYKTPDELLTMASIIEKETAINEERTQVASVFINRLRLGMRLQTDPTVIYGMGDDYKGVITRKALDTPTPYNTYVIIGLPPTPIAMPGKASLDAAAHPAKTSYLYFVADGKGGHSFTTNLADHNRAVKVYRSALKERDEQ

SEQ ID NO: 138314 - DNA, 1026 bp, Yersinia pseudotuberculosis IP 32953
  CDS (1)..(1026): transl_table=11
atgaaaagaaaaagcaccaaagcactgatcctttttgttgtgatctgtttgggattactgctgttgggttatcaaaaagtacaagattttgcgcgtcagcccttggcgattaagcaagagacttactttaccttaccggtaggtaccgggcgggttgctctagagaatttattgctacgtgatcatgtgattgctaatacaggtttatttccctggctactgcgcatagaacccgaactggctaattttaaggctgggacatatcgttttacgccgggtatgacggtacgtgagatgctggagttgttggtcagtggtaaagaagcccagtttaccgttcgttttattgaaggtaagcgcctgcgtgattggctggatgaattacaacagtcaaaatatatcaaacatgtgctggaagggaaaacagatgctgaaattgcgcagttactggggttaaaagagagtgaacaccccgaaggctggctctatcctgatacctactcctataccgcaggtacaacggatttaacactgctcaaacgtgcccatcaacgaatggagaaaaccgttgcagaaatctggcaggggcgtgatgacggattgccgtataagaccccaagtgatttggttactatggcatcaatcattgaaaaagaaaccgcggtaaatgaggagcgggataaggtggcttctgtcttcattaaccgtttacgtcttggtatgcgcctacaaacggatccaacagtgatttatggtatgggcgaaaagtataacggcaacattactcgtaaagacttagataccccgacaccttataatacctatgttatttccggtttgccgccaacccccattgccatgccagggttggcatcgctgaccgctgctgcccatccggcccaaacgccctatctctattttgtcgcagacggcaagggcgggcatacattcaccactaatttagccagtcataatcaagccgtgcgtgtttatcgccagtcgctaaaggataaaaatgaacagtaa

SEQ ID NO: 138315 - protein, 341 aa, Yersinia pseudotuberculosis IP 32953
MKRKSTKALILFVVICLGLLLLGYQKVQDFARQPLAIKQETYFTLPVGTGRVALENLLLRDHVIANTGLFPWLLRIEPELANFKAGTYRFTPGMTVREMLELLVSGKEAQFTVRFIEGKRLRDWLDELQQSKYIKHVLEGKTDAEIAQLLGLKESEHPEGWLYPDTYSYTAGTTDLTLLKRAHQRMEKTVAEIWQGRDDGLPYKTPSDLVTMASIIEKETAVNEERDKVASVFINRLRLGMRLQTDPTVIYGMGEKYNGNITRKDLDTPTPYNTYVISGLPPTPIAMPGLASLTAAAHPAQTPYLYFVADGKGGHTFTTNLASHNQAVRVYRQSLKDKNEQ

SEQ ID NO: 138316 - DNA, 1074 bp, Mannheimia succiniciproducens MBEL55E
  CDS (1)..(1074): transl_table=11
gtgaatctccgggtgtttttattgatgatgaaaaaatgtattcgttttatttttctgttgcttttaatgttcgcagctgccggattttggggctacaattatattcaaaaattggtcaatgaacccgttaatattaaagcggaacaattacttactctggagcgggggactaccggtaaaaaactttttgccttgctggaaaaggaaaatatcattgccgataatatacttttccctttgttattaaaacttcagccccaatttaataatgtaaaggcgggaacttattcattagaaggcgtaaaaactctaggcgatttattaaccttgcttaacagcggtaaagaagcgcagttcgctttacgttttaccgacggcgaaacctggaagcaggtgaaaaaatcactggaaaacgcaccgcacttgaaacatgaattgaaagataaaaccgacgttgaggtttttcatcaatttaaagagatgttgcccgaatttgaggtgcaaaatgcgtacaaaaccttagacggctggatttatcccgatacgtataattacacgccgaattctacggatgtggctttagtcaaacgatctgtcgagcgaatggtgaaaacgctggaaaaagcatgggcggaacgtgatgaggatttgccgttgaataatccttatgaaatgttgattcttgcctctattgtggaaaaagaaagcggtatttccgccgaacgcggaaaaatcgcctcggtgtttgttaatcgtctgaaagccaaaatgaagttacaaacggatccgacggtaatttacggcatgggtgaaagttatcagggcaatattcgtaaaaaagatttggaatcgccgacaccttataatacctatgtgattgacggtttgccgcctacaccgattgcaaacccgagtgaagatgcgttaaacgcagttgcgcatcctgaaaggacggactttttatattttgtcgccgacggctcgggcgggcataagttcagccgtagtctgattgaacacaacaaagcggtgcaggaatatttgctttggttgcgccggaataaaaacaaataa

SEQ ID NO: 138317 - protein, 357 aa, Mannheimia succiniciproducens MBEL55E
MNLRVFLLMMKKCIRFIFLLLLMFAAAGFWGYNYIQKLVNEPVNIKAEQLLTLERGTTGKKLFALLEKENIIADNILFPLLLKLQPQFNNVKAGTYSLEGVKTLGDLLTLLNSGKEAQFALRFTDGETWKQVKKSLENAPHLKHELKDKTDVEVFHQFKEMLPEFEVQNAYKTLDGWIYPDTYNYTPNSTDVALVKRSVERMVKTLEKAWAERDEDLPLNNPYEMLILASIVEKESGISAERGKIASVFVNRLKAKMKLQTDPTVIYGMGESYQGNIRKKDLESPTPYNTYVIDGLPPTPIANPSEDALNAVAHPERTDFLYFVADGSGGHKFSRSLIEHNKAVQEYLLWLRRNKNK

SEQ ID NO: 138318 - DNA, 996 bp, Methylococcus capsulatus str. Bath
  CDS (1)..(996): transl_table=11
atgaggcgtaccctgctgctcgcggtaatggcgctggtggccggcgccgcggtgaaggatttcatcgagtctaccgagcggccgcttgccaacaccgagccagtcgtgttcgagatcgcacggggacagggcctgaaggacgtggctctggcgctgaaggaggcgggcgtgatcgatgagccctggtggctcatgctgcaggcctggagggaaggtctggcgcgcaggctccagtcgggggaatacgagattccgccgggcctggaccgacgcgggttgctggcgctgttcgcttccgggaaagtgctacagcatgccatgaccctggtcgaaggctggactttccggcagatgttggcggcgctgcgggcccagccggctctcgagcacctcgtcacggcggagagcgacggtgtcgtgctgatgcgggtgctgggaatcccggaaggagatccggaagggcggtttttccccgatacttatttcttcaccaagggcacgtcggacgtcgagatcctcaagcgcgctcaccggcgtatggcgacggtcctcgctgcggaatgggcgcggcgggcgccggaccttccctaccggacgccggacgatgcactcatcatggcttccatcatcgagaaagaaaccgccctgcccgctgaaaaggccgaagtggccggtgtgctggtccggcggctgcgcaccgggatgcctttgcaggtcgatccgactgtgatctacggcctgggcgaccgctttgacggcaatctgcgtcgcgaacacctcaaggcggacaccccctacaacacctatctccatcgcggtctgccgccggcaccgatcgccgcgcccggcctggcttcgctgcgggccgcgctgaacccggcaccgggcgacagtctgtattacgtggcacggggagacggcggccaccgcttctcgcggacctgggacgaacaccgacaggcggtagagctttatcaaaaggtcgggcagccatga

SEQ ID NO: 138319 - protein, 331 aa, Methylococcus capsulatus str. Bath
MRRTLLLAVMALVAGAAVKDFIESTERPLANTEPVVFEIARGQGLKDVALALKEAGVIDEPWWLMLQAWREGLARRLQSGEYEIPPGLDRRGLLALFASGKVLQHAMTLVEGWTFRQMLAALRAQPALEHLVTAESDGVVLMRVLGIPEGDPEGRFFPDTYFFTKGTSDVEILKRAHRRMATVLAAEWARRAPDLPYRTPDDALIMASIIEKETALPAEKAEVAGVLVRRLRTGMPLQVDPTVIYGLGDRFDGNLRREHLKADTPYNTYLHRGLPPAPIAAPGLASLRAALNPAPGDSLYYVARGDGGHRFSRTWDEHRQAVELYQKVGQP

SEQ ID NO: 138320 - DNA, 1002 bp, Azoarcus sp. EbN1
  CDS (1)..(1002): transl_table=11
atgaagtcgctgctcctccgattgtttctcgtcgtcgcactcggcgctgcagcgagtctcgccgccgcgtggtggtatgtcacgcgtccgctgccgctcgcccggccggtcgtcgacttcacggtgcagcgcgggtttacgatgcgcgagacggctgcggcgatcgccggtgccggtgtcgatgtcgatccgcgcgtgctgtactgggtcgcgcggctcacgggcaaggccgaccgcattctggcgggcagctacgaggtccacaccggggtcacgccgtggctgctgatcctcaagctgtctagcggtgacgtgtcgcaggctcaactgcgcctcgtcgagggctggaatttccgccaggtacgggccgcgctcgaagcaagccccgaactgatacaggataccgtgggcctgtcggaggcggagatcctgcagcgcatcggcgcgacggagtcccatcccgaagggctgttctttcccgatacctatcttttcgacaaacagtcgagcgcgctggcgctgctcgcccgcacgtatcgggcgatgcacgagcggctcgcgcaggcgtgggagacgcgaaaccccgatctgcctctcgcgtcgccgtacgaagcgctgatcctcgcctcgatcgtcgagaaggaaacaggtcgcgcggaagatcgcacgctcattgcatcggtgttcgtgaaccgcctgcgcagcggcatgcgtttgcagaccgatccgacggtgatctatggccagggcaacgcgttcgacgggaatctgcgcaagcgcgacctcgaaaccgaccacgcctacaacacctatacgcgcaccgggcttccgccgaccccgatcgcgatgccgggactcgacgcgctgctggccgcggtcaggccgccgacgaccgattacctctatttcgtctctcgcggtgacggcacgagcgagttttcgacgaatctgaacgaccataacaaggccgtgagtcaataccagcggagaacgggaagttga

SEQ ID NO: 138321 - protein, 333 aa, Azoarcus sp. EbN1
MKSLLLRLFLVVALGAAASLAAAWWYVTRPLPLARPVVDFTVQRGFTMRETAAAIAGAGVDVDPRVLYWVARLTGKADRILAGSYEVHTGVTPWLLILKLSSGDVSQAQLRLVEGWNFRQVRAALEASPELIQDTVGLSEAEILQRIGATESHPEGLFFPDTYLFDKQSSALALLARTYRAMHERLAQAWETRNPDLPLASPYEALILASIVEKETGRAEDRTLIASVFVNRLRSGMRLQTDPTVIYGQGNAFDGNLRKRDLETDHAYNTYTRTGLPPTPIAMPGLDALLAAVRPPTTDYLYFVSRGDGTSEFSTNLNDHNKAVSQYQRRTGS

SEQ ID NO: 138322 - DNA, 1044 bp, Haemophilus influenzae 86-028NP
  CDS (1)..(1044): transl_table=11
atgaagaaatttttaattgcgattttacttttaatttttattttagcgggcgtggcgagttttgcttattacaaaatgactgaatttgtaaaaacaccagtaaatgtgcaggcagatcaacttttaactattgaacgtggcacaacaggtttaaaattagccgcactttttgagcaagaaaagttaattgatgatgggaaattattgccttatttgcttaagttgaaacctgagctaaataaaataaaagcagggacttattctcttgagaatgttaaaactgtgcaagatttactggatttgctcaattccggtaaagaagtgcagttcaatgtaaaatggattgaaggaaaaacctttaaagattggcgaaaagatcttgaaaatgcaccgcacttggtgcaaaccttgaaagataagagtaacgaagaaattttcacattacttgacttgcctgatattggtcaaaatcttgaactaaaaaatgtggaaggttggctttatcctgatacttataattatacgcctaaatccacagacttagagctacttaagcgatcggctgagcgaatgaaaaaggcgttaaataaggcttggaacgagcgcgacgaggatttacctttggcgaacccttatgaaatgttgattttggcttctatcgtggaaaaagaaacgggtattgctaatgagagggcaaaagtagcctctgtatttatcaaccgcttaaaagcaaaaatgaaattacaaacggatccaacggtaatttatggtatgggtgagaattacagcggtaatattcgtaaaaaagatttagaaaccccaacgccttataatacttatgtgattgatggattgccgccaacgcctattgctatgccaagtgaaagttcgttacaggctgttgcaaaacctgaaaaaacagatttctattattttgtggcagatggttctggtgggcataaatttacccgaaatttgaatgaacataacaaagcggtgcaagaatatttacgctggtatcgcagccagaaaaatgccaaataa

SEQ ID NO: 138323 - protein, 347 aa, Haemophilus influenzae 86-028NP
MKKFLIAILLLIFILAGVASFAYYKMTEFVKTPVNVQADQLLTIERGTTGLKLAALFEQEKLIDDGKLLPYLLKLKPELNKIKAGTYSLENVKTVQDLLDLLNSGKEVQFNVKWIEGKTFKDWRKDLENAPHLVQTLKDKSNEEIFTLLDLPDIGQNLELKNVEGWLYPDTYNYTPKSTDLELLKRSAERMKKALNKAWNERDEDLPLANPYEMLILASIVEKETGIANERAKVASVFINRLKAKMKLQTDPTVIYGMGENYSGNIRKKDLETPTPYNTYVIDGLPPTPIAMPSESSLQAVAKPEKTDFYYFVADGSGGHKFTRNLNEHNKAVQEYLRWYRSQKNAK

SEQ ID NO: 138324 - DNA, 1014 bp, Colwellia psychrerythraea 34H
  CDS (1)..(1014): transl_table=11
gtgctcaaaaaacttattattattactttgttggcattacttggtgcagtagccaccttaagctatcaatttgatcaggcgttacatacccctttaacaatagaaaaaaatacttatttaaaagtaatgcctggcagctctgttagctcattcgccaaaaaattagcacaaaaacaatggataccaacccgtttttggctgagaaattatggtcgtctatttccacaaaaagcaaatattaaagcgggtacctacttaataaccaaaggtacaaccttagcgcaattattagtccagctcgttggtggaaaagagcaccaattctctgtcacctttattgaagggacactttttaaagatgtattagttatacttgcagggcatccttatattaaacaaacaattgatgataaatcgattagtgaaatagcggtaaaactcggcattgactcaataaatcctgaagggtggttatttcctgatacttatgcattcacagctgatacgaaagatataacactgcttcaacgtgctaacgtcaatatgcagacgcaattgagtgcattatggcagagcagagcggaaaacttaccttacaaaacaccttatcaagcattgattatggcctcgatcatagaaaaggaaacaagttatattgccgaacaacccataatatcatcggttttcgttaatcgcttacgaaaaaatatgcgtttacaaaccgatcctacggttatttatggtttaggtgatcgctatgcgggagatataacccgtgcacacctgcgcgaaaaaacggcttacaatacttatagaattaatggtttaccgccaacgcctatcgcaatggcgggtttgtcagccctacaagctacattaaatccagtagcgagtgattatttttactttgttagtggtggtgatggcaaacatgtttttagtaaaacgctagctgaacataattttgccgttaaacgttacttaaaagagcaaagaaaaaataaatcaaagtaa

SEQ ID NO: 138325 - protein, 337 aa, Colwellia psychrerythraea 34H
MLKKLIIITLLALLGAVATLSYQFDQALHTPLTIEKNTYLKVMPGSSVSSFAKKLAQKQWIPTRFWLRNYGRLFPQKANIKAGTYLITKGTTLAQLLVQLVGGKEHQFSVTFIEGTLFKDVLVILAGHPYIKQTIDDKSISEIAVKLGIDSINPEGWLFPDTYAFTADTKDITLLQRANVNMQTQLSALWQSRAENLPYKTPYQALIMASIIEKETSYIAEQPIISSVFVNRLRKNMRLQTDPTVIYGLGDRYAGDITRAHLREKTAYNTYRINGLPPTPIAMAGLSALQATLNPVASDYFYFVSGGDGKHVFSKTLAEHNFAVKRYLKEQRKNKSK

SEQ ID NO: 138326 - DNA, 996 bp, Dechloromonas aromatica RCB
  CDS (1)..(996): transl_table=11
gtgcgcaccctgaccaagattcttttcgctgtttttgtgttgttcgcgatcgcggctggcgggctgtggtggtgggcaaatcagccattgtcgctgcgctcttcaccgctcgattttcgtattgcggccggtagcagcctgcgttcggcgattacccagatgcgggagtcgggtattgaggtcgagcctggcttgctcgccttcctggcacggcttaaccgggccgatacggccatcaaggcaggtagctatgcggtcaaggatggggtaaccccgatccgcctgctggataaattgctcaagggcaaagttacgcaaggtgaactgaccctggttgaaggctggacttttcggcaatggcgagcccgtctggataaacatccggatctgaagcacgaattgcttggcttgagcgaagcggaaatcatcgaaaagctgggtttgagcgttgcaggactggaagggcagttgttcccggatacttatctgttcgacaaacaatccagcgatctcgaactgctcgcgcgggcccagcgggccatgcagcgcaaactggatgcggaatgggcaggccgcgccgccggtcttccctacaaaacttcgaatgacgcgctgatcatggcatccatcgtcgagaaagaaaccgggcgcgaatcggatcgagagctcgttgccgcagtcttcgtcaatcgcttgcgcaaagggatgttgctgcagactgatccgactgtgatctacggcattggcgagaaatttgatggcaatctgagaaagcgcgacctgctcacggacaccccgtacaatacctacacccgtcctggcttgccgccaacgccgatcgcgatgccggggcaggcttccatcagggcggcgctgaatccggcgcccagcgacgtcatctatttcgtggctcgaggcgatggcagcagtgaattttcccggaccctggacgaacacaaccgggcggttaacaaatatcagagaggtgggaagtga

SEQ ID NO: 138327 - protein, 331 aa, Dechloromonas aromatica RCB
MRTLTKILFAVFVLFAIAAGGLWWWANQPLSLRSSPLDFRIAAGSSLRSAITQMRESGIEVEPGLLAFLARLNRADTAIKAGSYAVKDGVTPIRLLDKLLKGKVTQGELTLVEGWTFRQWRARLDKHPDLKHELLGLSEAEIIEKLGLSVAGLEGQLFPDTYLFDKQSSDLELLARAQRAMQRKLDAEWAGRAAGLPYKTSNDALIMASIVEKETGRESDRELVAAVFVNRLRKGMLLQTDPTVIYGIGEKFDGNLRKRDLLTDTPYNTYTRPGLPPTPIAMPGQASIRAALNPAPSDVIYFVARGDGSSEFSRTLDEHNRAVNKYQRGGK

SEQ ID NO: 138328 - DNA, 1002 bp, Thiobacillus denitrificans ATCC 25259
  CDS (1)..(1002): transl_table=11
atgctgcgctctatgaagatctggtttaaacgcttgctcggattcggcacgctggcggcagtgctgctcgcggcggggcttgcctggtatgcgacgcggccgctcgtcataacgcccttgccgaaaacggtcaacgtcgcgcccggcatgcacctcaagagcctgagcgtgatgctcgaacgggaaggcgtcgtcggcgacgcgcgggtgttctggctgctcggtcgcgtgctcggcaaggccgggacgctcaaggtcggcgtctacacgctggacaagccgctcacaccgatcgagctctacggcaagatcgagcgcggcgacgtctcgcaggcgatggtgcagttcatcgagggacggagctggcgcgaaatacggacggtgctcgcgtcgcaaccgctcctgaagaacgagagcgcaggcatgagcgacacacaggtgttgcgcgcaatcggcgcgagcgaggcataccccgagggcctgttctttcccgacacctatttctacgcgccgcacacgtccgatctcaacgtgctgcgccgcgcatatcgcctgcagcgtgaaaaactcacgagcgcatggcaggcgcgcgcgccggggctaccctacgaaaccccctatgaggccctgatcatggcgtcgatcgtggagaaggaaaccggcgccgcgttcgagcgcccgatgatcgcgggcgtgttcctcaaccggctcaagctcggcatgcggctgcaaaccgatccgaccgtgatttacggtctaggcgaacgcttcgacggcaatttgcgcaaagtcgatcttcttgccgacacgccgtacaacacctatacccgaaccgggctgccgcccacaccgatcgcgatgccgagcgcggaggcgatccgcgcggcgttgaacccggcgcagaccgatgcgctctatttcgtctcgcgcggcgacggcacccacgtcttttcgagcgacctcgcggcacacaaccgcgccgtccgccgctaccagaaatga

SEQ ID NO: 138329 - protein, 333 aa, Thiobacillus denitrificans ATCC 25259
MLRSMKIWFKRLLGFGTLAAVLLAAGLAWYATRPLVITPLPKTVNVAPGMHLKSLSVMLEREGVVGDARVFWLLGRVLGKAGTLKVGVYTLDKPLTPIELYGKIERGDVSQAMVQFIEGRSWREIRTVLASQPLLKNESAGMSDTQVLRAIGASEAYPEGLFFPDTYFYAPHTSDLNVLRRAYRLQREKLTSAWQARAPGLPYETPYEALIMASIVEKETGAAFERPMIAGVFLNRLKLGMRLQTDPTVIYGLGERFDGNLRKVDLLADTPYNTYTRTGLPPTPIAMPSAEAIRAALNPAQTDALYFVSRGDGTHVFSSDLAAHNRAVRRYQK

SEQ ID NO: 138330 - DNA, 1020 bp, Burkholderia sp. 383
  CDS (1)..(1020): transl_table=11
atgtccctactgaagaaatgcgccgcgacgatcgtggcgctggccgtcgttgtggccgctgccggcgcgggcggcggatattactgggcaacccggccactgctgctgggttcggcatcgctcgacgtcacgatcaagccgcgcagcagcgtgaagagcgttgcgctccagttgaagcgcggcggcgtgccggtcgagccgctcggctttgtcgcgatgacgcgcgtgctcgggctgtcgagccggctcaagtccggcaactacgaattcaagaccggcatcacgccatacgaggtcctgcagaagatcgcgcgcggcgacgtgaacgagtacgtcgcgacggtcatcgaaggctggaccttcaagcggatgcgcgcggaactcgactcgaaccccgatcttgcgcacgcgacggccggcatgagcgacgccgagctgctgcgcgcgatcggcgcgtcggacaacgcggtgcagcgcggcagcggcgaggggctgttctttcccgatacctatctgttcgacaagggtacgagcgacctgaacatctaccggcgcgcgtaccatctgatgcagacgcgtctcgacgaggcctgggccgcgcgcgtgccgggcttgccgtacaagacaccttacgaagcgctgacgatcgcgtcgatcgtcgagaaggaaacgggccacgcggccgatcgcgcgttcgttgcggccgtgttcgcgaaccggctgcgcatcggcatgccgctgcagaccgatccgtcggtgatctacgggctcggcgatgcgtacgacggccggctgcgcaagcgcgacctgcaagcggacactccttacaatacctacacccgacgcgggctgccgccgacgccgatcgcgttgccgggcgtggccgcgctgcaggcggcgatcaatccggcacagacgagcgcgctctatttcgtcgcgaaaggcgatggcacgagcgtgttctcggacacgctcggcgaccacaacaaggccgtggacaagtacatacgaggtcaataa

SEQ ID NO: 138331 - protein, 339 aa, Burkholderia sp. 383
MSLLKKCAATIVALAVVVAAAGAGGGYYWATRPLLLGSASLDVTIKPRSSVKSVALQLKRGGVPVEPLGFVAMTRVLGLSSRLKSGNYEFKTGITPYEVLQKIARGDVNEYVATVIEGWTFKRMRAELDSNPDLAHATAGMSDAELLRAIGASDNAVQRGSGEGLFFPDTYLFDKGTSDLNIYRRAYHLMQTRLDEAWAARVPGLPYKTPYEALTIASIVEKETGHAADRAFVAAVFANRLRIGMPLQTDPSVIYGLGDAYDGRLRKRDLQADTPYNTYTRRGLPPTPIALPGVAALQAAINPAQTSALYFVAKGDGTSVFSDTLGDHNKAVDKYIRGQ

SEQ ID NO: 138332 - DNA, 987 bp, Rhodospirillum rubrum ATCC 11170
  CDS (1)..(987): transl_table=11
atgcgggccattctcggtgttttcctggtcgcggttctggcggcgctgaccgtttttggcggttatctgtatgtgaccgatcgcttcgtcgctgcgggcccgttggctgcggagcgcgtggtggtggtggccccgggcagcggggtggacggcatcgccgccaccctggcccgcgagggcgtgatcaatgatcccctgatcttcaaaatcggcgtgcggctggccgaaacggcccgccagctcaaggccggcgaataccgcttcaccccgggcatgagcgccgagcaggtgatggggctgctggtctccgggcaggtggtggttcaccgcttcaccgtggccgaggggctgaccacccgcgtcgtccgcgacatcgtcctcgcccaggaagacctggtcggcgagatttcgctggagccgggcgaaggcgcgcttctgcccgagacctataattatctgcgcggcgatagccgcgacgccgtcgtcaagcggatgggcgcggccatgggcgaggccatcgacagcctgtgggagcatcgcgcccccggactgccggtgaccaccaaggctcaggcggtggttctggcgtcgatcgtcgagaaggaaaccgccgttccggcggagcgggcgcgggtggccggggttttcatcaaccggctgcgcatcggcatgccgctgcaatccgatccgacggtgatctatggcctgtcggctggcacgggaaccctaggccgcgccctgacccgcaaggatcttgagaccccccacgcctggaacacctatgtgatccccggcctgccgcccagcccgatctgcaatccgggccgcgagtccctggccgccgtgctcaatccggccgatggcggggatctttatttcgtcgccgatggcagcggcgggcatgtcttcgccgccagcctcgatgcgcataaccgcaatgtcgcgcgctggcgcaagatccagcgcgatcaggccaagcgggagtga

SEQ ID NO: 138333 - protein, 328 aa, Rhodospirillum rubrum ATCC 11170
MRAILGVFLVAVLAALTVFGGYLYVTDRFVAAGPLAAERVVVVAPGSGVDGIAATLAREGVINDPLIFKIGVRLAETARQLKAGEYRFTPGMSAEQVMGLLVSGQVVVHRFTVAEGLTTRVVRDIVLAQEDLVGEISLEPGEGALLPETYNYLRGDSRDAVVKRMGAAMGEAIDSLWEHRAPGLPVTTKAQAVVLASIVEKETAVPAERARVAGVFINRLRIGMPLQSDPTVIYGLSAGTGTLGRALTRKDLETPHAWNTYVIPGLPPSPICNPGRESLAAVLNPADGGDLYFVADGSGGHVFAASLDAHNRNVARWRKIQRDQAKRE

SEQ ID NO: 138334 - DNA, 1020 bp, Burkholderia thailandensis E264
  CDS (1)..(1020): transl_table=11
atgtccctactgaagaagtgcgccgcgctcgcggcgctcgccgtcgtattgctgggcgccgcgtgcgcgggcggcgcctattattgggccacccggccgctcgcgctcgccgcgccgaccctcgatgtcacgatcaagccccgcagcagcgtgcgcagcgtcgcgcagcagctcatgcacggcggcgtgcctgtcgagccgcgcctgttcgtcgcgatgacgcgcgcgctgttcctgtcgagccgcctcaagtcaggcaactacgagttcaagacgggcgtgacgccttacgacgtgctgcagaaggttgcgcgcggggacgtcaacgaatacgtcgtgaccgtgatcgagggctggacgttcaggcgcatgcgcgcggagctcgacgcgaatgcggcgctcacgcattcgagcgcggggatgagcgacgcggcgctgttgcgcgcaatcggcgcgtccgacgaggctgtcgcgcgcggcgcgggcgaggggctgttctttccggatacctacctgttcgacaagggcacgagcgatctgaacgtctatcggcgcgcataccggctgatgcagacgcgccttgccgacgcgtggaccgcgcgccggcccggcctgccgttcaagacgccttacgaggcgctgacggtcgcgtcgctcatcgaaaaggagacggggcacgcggccgatcgcgcgttcgtgtcgggcgtgttcgcgaaccgcctgcgggccgggatgccgctgcagaccgatccttcggtgatctacggaatgggcgacgcgtacgcggggcggttgcgcaagcacgatctgcagaccgacactccgtacaatacctacacgcgccgcgggctgcccccgacgccgatcgcgctgccgggcgaggcggcgctctacgccgcagtgaacccggcggcgacgtccgcgctctatttcgtcgcgaagggcgacggcacgagcgtcttttccgacacgctcggggatcacaacaaggccgtggacaaatacatacgaggtcaatga

SEQ ID NO: 138335 - protein, 339 aa, Burkholderia thailandensis E264
MSLLKKCAALAALAVVLLGAACAGGAYYWATRPLALAAPTLDVTIKPRSSVRSVAQQLMHGGVPVEPRLFVAMTRALFLSSRLKSGNYEFKTGVTPYDVLQKVARGDVNEYVVTVIEGWTFRRMRAELDANAALTHSSAGMSDAALLRAIGASDEAVARGAGEGLFFPDTYLFDKGTSDLNVYRRAYRLMQTRLADAWTARRPGLPFKTPYEALTVASLIEKETGHAADRAFVSGVFANRLRAGMPLQTDPSVIYGMGDAYAGRLRKHDLQTDTPYNTYTRRGLPPTPIALPGEAALYAAVNPAATSALYFVAKGDGTSVFSDTLGDHNKAVDKYIRGQ

SEQ ID NO: 138336 - DNA, 1068 bp, Saccharophagus degradans 2-40
  CDS (1)..(1068): transl_table=11
atgagaaagttaatagtaactctctctttattcttggcttttgtagtggtacttagcggtgccgttggggcgtatttttggcagtggctgaatgcacctattgcttaccaagcgcaatacttgcaaagcgttaataacgtgtatcgcgtagagcgtggtagtaacttaacgcaaatagccaatgtattggcgcgcgagcaaataattgaatggcctaaagtgtgggtgctttatgctcgtgcctctcaaaaaacagcggtaaaagtaggtgaatataaactactggctggtgacacaccgcttgtactattaaaccgcttagtttctggcgatgtagtaagttacagcgttactttaattgaaggcagcacctttaaagactttttaactgcgctacacgcgcaagaaaaattgcaaaaaacacttgcgagaaaaaccacagagcaaattcttgccgatttgaatttagatattcagcacccagaagggtggttcttccctgatacgtacaattatattgcaggggattccgacgcagatattctaaaacgcgcccataaaactatgcgtaaagtgttagacactcagtggcaggcacgcgcgcaaaacctgccttacacacaaccttacgaggccttaataatggcctcgatagttgagaaagaaaccggcgtaccttacgagcgtgacgaaatagcaggggtgtttattcgccgcttacaaaaaagaatgcgtttacaaacagacccaacagtcatttatgggatgggcgaaaactacgcgggcaatattacccgcaaagatttgagaacacctacaccgtacaatacttatgtaattaaagggttgccacccacaccgattgccatgccgggtaaagaggcaatttacgctgcgctgcacccagccgatggcgagcacctgtattttgtggccaaaggcgatggctcgcattatttctcgtcaacattagacgagcacctagctgcagtagcgaaataccaaaagcgtcgaacctctaattaccggtctgcgccgccagtaaatacacctaccaaaaataattag

SEQ ID NO: 138337 - protein, 355 aa, Saccharophagus degradans 2-40
MRKLIVTLSLFLAFVVVLSGAVGAYFWQWLNAPIAYQAQYLQSVNNVYRVERGSNLTQIANVLAREQIIEWPKVWVLYARASQKTAVKVGEYKLLAGDTPLVLLNRLVSGDVVSYSVTLIEGSTFKDFLTALHAQEKLQKTLARKTTEQILADLNLDIQHPEGWFFPDTYNYIAGDSDADILKRAHKTMRKVLDTQWQARAQNLPYTQPYEALIMASIVEKETGVPYERDEIAGVFIRRLQKRMRLQTDPTVIYGMGENYAGNITRKDLRTPTPYNTYVIKGLPPTPIAMPGKEAIYAALHPADGEHLYFVAKGDGSHYFSSTLDEHLAAVAKYQKRRTSNYRSAPPVNTPTKNN

SEQ ID NO: 138338 - DNA, 1005 bp, Methylobacillus flagellatus KT
  CDS (1)..(1005): transl_table=11
atgcgcatattgaaaatattgttcgttttagtgacattttcggtcatcacctttgctgcatggatggcttactttgtgaccacgcccttgcagttccctacggagacggtcgaattggatttgcgcatgggcagcagcctgcgcactatttccgatcaattggtagcccaaggcgtgctcaaggaaccatggagcttcattctattggttagggccatgaagatggctggtggcatcaaggctggtaactatttactggagtctggccagacaccctacgagctgttcattaccctaagcaatggtaatgtgactcaggacagcattactttcatcgaagggtggacgtttgcgcaaatgcgccaagcattgaatcagcatgaatccgtgcgccatctcaccatggcttataccgacgaagaaatcatgcgcaatatcggtgcaactgagaccgtacccgaagggatgttctttccggacacttatttcttcagcaagggcatgagcgatcaggatattctcaaacgggcctatgctgcgatgcaaaatcgcctcaaggcggcgtgggagcagcgtgcaccagggctaccctacaattcgccttatgaagcattgatcatggcctcgatcgtggagaaagaaacaggaaaggcaagtgagaggcccattatcgccggtgtctttctcaatcgcctgcgtataggcatgcgcctgcagaccgaccccacggtgatctatggcatgggggaagcattcgacggcaacctgcgcaagcgtgaccttcagcgcgatacgcctttcaacacctatacgcgggccggcctgcctcccacgcccattgccatgccgggtatggcggccattaatgcggcgctgcacccagccaagaccgatgctctgtatttcgttggcaagggagacggtagtcaccaattctcccgcacgcttagcgagcacaaccgagcggtcgtacggtatcaactgaaaggcggcaatgcgcggtag

SEQ ID NO: 138339 - protein, 334 aa, Methylobacillus flagellatus KT
MRILKILFVLVTFSVITFAAWMAYFVTTPLQFPTETVELDLRMGSSLRTISDQLVAQGVLKEPWSFILLVRAMKMAGGIKAGNYLLESGQTPYELFITLSNGNVTQDSITFIEGWTFAQMRQALNQHESVRHLTMAYTDEEIMRNIGATETVPEGMFFPDTYFFSKGMSDQDILKRAYAAMQNRLKAAWEQRAPGLPYNSPYEALIMASIVEKETGKASERPIIAGVFLNRLRIGMRLQTDPTVIYGMGEAFDGNLRKRDLQRDTPFNTYTRAGLPPTPIAMPGMAAINAALHPAKTDALYFVGKGDGSHQFSRTLSEHNRAVVRYQLKGGNAR

SEQ ID NO: 138340 - DNA, 1038 bp, Burkholderia xenovorans LB400
  CDS (1)..(1038): transl_table=11
atgcagtccaaccttgccacgtttcgcatgtccctgttcaagaaatgtttcattgccggctcactcgtcgtcgtgctggccgcagccgcaattgctggcggataccactgggccaccagcccgctcgaactgaccccggcgcaactggatgtcaccgtcaagccgcatagcagcttgcgcagcgtcacgctgcaactcaatcgcggcggcgtgcccgtcgagcctgaactgtttgtcctgatgacgcggttgctggggctgcaaagcgcgctgaaatcgggcaactacgagttcaagacgggtgtgacgccttacgaggtgctgcagaaaatcgctcgcggcgacgtcaacgaatacgtggcgaccattatcgaaggctggaccttcaagcgcatgcgcgccgagctggatgccaatccggcgctcaaacacgacacggccggcatgagcgacacggatctgatgaacgcgatcaatgcaccggaagcgccgatcggcaatggcgaagggctgttttttccggacacgtacctgttcgacaagaacaccagtgatctcgacgtgtaccgccgcgcctaccgcctgatgcgcgtgcgtctggacgaagcgtggatggcgcgcgcgccgaacctgccgtacagaacgccgtacgacgcgttgacgatggcgtcgatcatcgaaaaggaaaccggcaagacgtcggaccggccgatggtggcggcggtgttcgcgaaccggctgcgcgtgggcatgccgctgcaaaccgatcccaccgtgatctatggcatgggcgacagctacgccggccgtatcagaaaaaaagacctgcagactgacactccctacaatacctacacccggatgggactgccgccaacgcccatctcgctgcccagtgtggcgtcgctgcaggcggcgctgaatccggcgcaaactaccgcgctgtacttcgtttcgcgcggcgacggcagcagtatcttttccgacaccctcggcgatcacaacaaggccgtggacaaatacattcgagggcaatga

SEQ ID NO: 138341 - protein, 345 aa, Burkholderia xenovorans LB400
MQSNLATFRMSLFKKCFIAGSLVVVLAAAAIAGGYHWATSPLELTPAQLDVTVKPHSSLRSVTLQLNRGGVPVEPELFVLMTRLLGLQSALKSGNYEFKTGVTPYEVLQKIARGDVNEYVATIIEGWTFKRMRAELDANPALKHDTAGMSDTDLMNAINAPEAPIGNGEGLFFPDTYLFDKNTSDLDVYRRAYRLMRVRLDEAWMARAPNLPYRTPYDALTMASIIEKETGKTSDRPMVAAVFANRLRVGMPLQTDPTVIYGMGDSYAGRIRKKDLQTDTPYNTYTRMGLPPTPISLPSVASLQAALNPAQTTALYFVSRGDGSSIFSDTLGDHNKAVDKYIRGQ

SEQ ID NO: 138342 - DNA, 999 bp, Ralstonia metallidurans CH34
  CDS (1)..(999): transl_table=11
atgaaacgtctgttcctgcgcctggtcggggttctggtggtcttcgccatggccgccgccggtggctttgcctggtgggcccaccagccactcggcctgaccacatcccccatcgaagtcgtcatcaagccgaattccggcgttctcagcgtgggtcggcagatccagcgcggtggcgtgggcatggatccgcgcctgttccagatcctggtccgcatcaccggccacggcccggacctcaaggccgggggctaccagttcgagacgggcgccacgccgctggacgtgatcggcaaactggcccggggcgaggtcacgcactacgtcgtgaccgtcatcgagggttgggaattccgcaagatgcgcgcggtcgtggatgccaaccctgcgctgaagcacgacacggtgggcatgtccgacgccgatttgatgcacgcgatcggcgcggccgaatccgcgccggaagggctgttctttcccgatacctatctgttcgcgcgcggcagcagcgatatcgaactctacaagcacgcctatcgcgccatgcagcggcggctgaacgaggcctggaacgcacgcgcgcccgacctgccgtacaagacgccgtatgaggcgctggtgatggcatccatcgttgagaaggagacggggcaggcggcggagcgcccgatgatcgcggccgtgttcgtcaaccgtctgcgcaagaacatgatgctgcagaccgatccgaccgtgatctacggcctgggtgagcaattcgacggcaacctgcgcaagagggatttgctgacggacaccccgtacaatacgtacacccgtacgggcctgccgccgacgccgattgccttgccgagtctggcgtcgctggccgcagccacgacgccggcgccatcggacgccttgtatttcgtggcacgcggcgacggcagcagccatttctccaattcactacccgaacacaatcgcgcggtcgacaagtaccagcgcggcaaaccataa

SEQ ID NO: 138343 - protein, 332 aa, Ralstonia metallidurans CH34
MKRLFLRLVGVLVVFAMAAAGGFAWWAHQPLGLTTSPIEVVIKPNSGVLSVGRQIQRGGVGMDPRLFQILVRITGHGPDLKAGGYQFETGATPLDVIGKLARGEVTHYVVTVIEGWEFRKMRAVVDANPALKHDTVGMSDADLMHAIGAAESAPEGLFFPDTYLFARGSSDIELYKHAYRAMQRRLNEAWNARAPDLPYKTPYEALVMASIVEKETGQAAERPMIAAVFVNRLRKNMMLQTDPTVIYGLGEQFDGNLRKRDLLTDTPYNTYTRTGLPPTPIALPSLASLAAATTPAPSDALYFVARGDGSSHFSNSLPEHNRAVDKYQRGKP

SEQ ID NO: 138344 - DNA, 1017 bp, Alkalilimnicola ehrlichei MLHE-1
  CDS (1)..(1017): transl_table=11
atgaactgggcccgtctcacgctgctgacgacgctgctcttggtgatggccgccctggcggtcggtgcctgggcctggcaggcctgggaccggctcactgcgcctatcacagcggacggggagtcggtggtcatcgagatcccccggggcgcctccttccgccaagtggttgagcggctggagcgggagacggccttcgaggatggcctggccctgcggctgtacgcccgctataccggcgacgacgcccgggtccaggcgggcgagtacgccctggagccgggcatcagcgtgctggatgccctggagcggttcgcccgaggcgaggtcgtccagcaccgcatcaccgtggtcgagggcctcaccttccgccagatgcggcgtctcatcgaagcccacccggccctggagcagacccttaaggggctggacgatgagggggtgatggccgagctgggcaagccggatcgtcacccggagggctggttctaccccagtacctacaccttcccccgcgggaccaccgaccgtgacctgctggcccgcgccatgcgccgcatggagcgccgcctggaggaggagtgggcggcgcgggccgacggactgcccctggagacgccctacgaggcgctgattctggcctccatcatcgagcgcgagaccgggcgggacggggagcgggcgaaggtggccggcgtcttcacccggcggctggaaaagggcatgcgcctgcagaccgacccgacggtcatctacggcatgggtgaggcctatgacgggcgcatacgcagcgccgatctgcgccgggacacgccttataacacctacacccgccacggcctgcccccgacgcccattgccatgcccggcagcgcctcgatccgcgcggccgtgaacccggcggaccacgactacctctacttcgtctcgcgcggcgacggcagccaccaattctcccgcaccctggcggaacacaaccgtgccgtgcgccgctacattctgggggagggcgaatga

SEQ ID NO: 138345 - protein, 338 aa, Alkalilimnicola ehrlichei MLHE-1
MNWARLTLLTTLLLVMAALAVGAWAWQAWDRLTAPITADGESVVIEIPRGASFRQVVERLERETAFEDGLALRLYARYTGDDARVQAGEYALEPGISVLDALERFARGEVVQHRITVVEGLTFRQMRRLIEAHPALEQTLKGLDDEGVMAELGKPDRHPEGWFYPSTYTFPRGTTDRDLLARAMRRMERRLEEEWAARADGLPLETPYEALILASIIERETGRDGERAKVAGVFTRRLEKGMRLQTDPTVIYGMGEAYDGRIRSADLRRDTPYNTYTRHGLPPTPIAMPGSASIRAAVNPADHDYLYFVSRGDGSHQFSRTLAEHNRAVRRYILGEGE

SEQ ID NO: 138346 - DNA, 1011 bp, Shewanella sp. ANA-3
  CDS (1)..(1011): transl_table=11
atgaaaaaaatcattctgatcgcaagttctacgttgttgaccttgctgaccttagcttgtttggttggttattggggctatcgaacgattattgattacagccaaacccccttagtcttaaccgaagccaaagaattaaccattgcccgtggcaccagtgtgcaccaattagcgcagcagttagaaaccgatggtgttatccaagacaaatggaaactcaaatggttactgaaattgcgcccggagctggcgaagatccgtactggtctttacgagatgtcaccttcgcagtcgattgccgacttactcaacgatttagcgaatggtaaggtgaaaacctttagcctgaccttagtcgaaggcaaaaccattgccgagtgggaacaacaactcgcgagtgcgccgcacttacagttgtcccccgaagtctttagtgcggtattgatggagcagggcgacgattcggcgttgcccgaaggaaaattcttccccgatacttaccattacactgccgatagcgatgctaaggcgctgctcacccaaagttataagatgatggagcaggagctggccaaagcatgggcggagcgtgtgcccggtttaccacttaaatcgccctaccagatgttgatcttggcatcgattgttgagaaagaaactggccaagcgtttgagcgtgatcaaatcgctggcgtctttatcaatcgactcaatctggggatgaagctgcaaaccgatccaacggtcatttatggtatgggcgatagatttaaaggcaatatcacccgtaaagatctcgtcgaagagaccccctttaacacctatcggattttcggtttaccgccaacgccgattgctgcgccgagtaaggcgtcattgcaggcggtgtctaaacctgccaaggtcagttatttatattttgtgtcgcgcaacgatggcacccatgtgttttcgaccaccttggaagaacacaatcgcgccgtcgatatttatcagagaaagaaaaaatga

SEQ ID NO: 138347 - protein, 336 aa, Shewanella sp. ANA-3
MKKIILIASSTLLTLLTLACLVGYWGYRTIIDYSQTPLVLTEAKELTIARGTSVHQLAQQLETDGVIQDKWKLKWLLKLRPELAKIRTGLYEMSPSQSIADLLNDLANGKVKTFSLTLVEGKTIAEWEQQLASAPHLQLSPEVFSAVLMEQGDDSALPEGKFFPDTYHYTADSDAKALLTQSYKMMEQELAKAWAERVPGLPLKSPYQMLILASIVEKETGQAFERDQIAGVFINRLNLGMKLQTDPTVIYGMGDRFKGNITRKDLVEETPFNTYRIFGLPPTPIAAPSKASLQAVSKPAKVSYLYFVSRNDGTHVFSTTLEEHNRAVDIYQRKKK

SEQ ID NO: 138348 - DNA, 1005 bp, Azoarcus sp. BH72
  CDS (1)..(1005): transl_table=11
atgaaacgtctcttgattcgtcttgccgctctgttcggcgtgatcctgctgtcgacgatcggcgcgctcacctggtacgccgggcgtcccttgacgctgcagcagccggtggtcgatttcaccgtgcaacgcggattcaccatgcgtcaggccgccgcggccatcgcccgcgcgggtgtcgacgtccagcccgacctgctctactggatcgcgcgcctgggcggcaaggcggccttgatcaaggctggcagctacgaggttcacgccggtgtcacgccgtggcagctggtgctcaagctctccgccggcgatgtctcgcagggcgaagtgctgttcgtcgagggctggaatttccgccaggtgcgcgaggcgctggaaaaccatccctatctgcagccggacacgcgcgggctctccgaggaggagatcatgcggcgcatcggcgccggcgagtcgcgcgccgaaggcctgttctttcccgatacctatctgttcgacaagcagtcgagcgcgcttgccgtgctgcgccgcgcctacgtcgccatgcagcaacggctggcggcagcttgggagagccgtgatcctgcgctgccgctcgcgtcgccctacgaactgctcgtgctcgcatccatcgtcgagaaagaaacggggcggccggaggatcgcggcctgatcgcatcggtgtttgccaatcgcctgcgcatcggcatgcggctgcagaccgatcccacggtgatctatggcctggggaccgccttcgatgggcggttgcgccggcgcgacctggacaccgaccatccgtggaatacgtacacgcgcgccggccttccgcccacgcccatcgcgattccgggccgcgactccctgcaggcggcggtgcggccggccaagaccgactatctctatttcgtctcgcgcggcgatggcaccagcgtcttctcgcgcacgctcgaagaccacaatcgcgcggtcgatcgttaccagcgcaacggcaaaggaagctga

SEQ ID NO: 138349 - protein, 334 aa, Azoarcus sp. BH72
MKRLLIRLAALFGVILLSTIGALTWYAGRPLTLQQPVVDFTVQRGFTMRQAAAAIARAGVDVQPDLLYWIARLGGKAALIKAGSYEVHAGVTPWQLVLKLSAGDVSQGEVLFVEGWNFRQVREALENHPYLQPDTRGLSEEEIMRRIGAGESRAEGLFFPDTYLFDKQSSALAVLRRAYVAMQQRLAAAWESRDPALPLASPYELLVLASIVEKETGRPEDRGLIASVFANRLRIGMRLQTDPTVIYGLGTAFDGRLRRRDLDTDHPWNTYTRAGLPPTPIAIPGRDSLQAAVRPAKTDYLYFVSRGDGTSVFSRTLEDHNRAVDRYQRNGKGS

SEQ ID NO: 138350 - DNA, 1041 bp, Haemophilus somnus 2336
  CDS (1)..(1041): transl_table=11
atgaagaaaattttattcattgtattgttgtttttgtgtggtgcaggcggtagcgttttttgggcatattggcaaataactgactttgtaaaacaacctgttaaagtcaaagaagagcaacttttaactgttgtgcgaggaacgaccggcaataaattggcaatattattagaaaatgaagggttaatcgaaaatgggaaatggttgccttggctgcttaaattaaaacccgaattgaataaaattaaagccggtacttattccctcgttaatgtagaaaatattcaagatcttcttgatgtacttaatcagggcaaagaggtgcaatttaatttgcaattgattgaagggcaacgttttaaaacttggcgtaaaattttagaaaatgcaccgcacttgcggcaaacattacaaggaaaatcggagaaagagatttttactttgctggagttgccggcttattcaaaagctgtttatgaatggaaaacgattgatggttggttatatccggatacttatagttacacgcctaactctagcgatttggcactgttaaaacgtgcggcttcccgtaccataaaagcgttagagcgagcttggcaacaaagaaatgtaaatttgccattgaaaaatccctatgaaatgttaattcttgcttctattgtggaaaaggaaacagcattgagtgaggagagagcgaaagtagcgggcgtttttgtgaatcgtttaaataagcaaatgaaattacaaacagatccaacggtgatctatggtatgggtgatgattataaaggtaatattcggaaaaaagatttattgacaccaaccccttataatacctatgtgattgatggtttaccgccgacgccgattgctatggtaagcgaggaaagtttacaggctgttgctaaaccggaacagcatgattatttatattttgtcgcagatggaagcggtggacacaagtttagtaaaacattggcagaacataaccgtgctgtgcaagaatatttgcgttggtaccgttctcaatcaaaatag

SEQ ID NO: 138351 - protein, 346 aa, Haemophilus somnus 2336
MKKILFIVLLFLCGAGGSVFWAYWQITDFVKQPVKVKEEQLLTVVRGTTGNKLAILLENEGLIENGKWLPWLLKLKPELNKIKAGTYSLVNVENIQDLLDVLNQGKEVQFNLQLIEGQRFKTWRKILENAPHLRQTLQGKSEKEIFTLLELPAYSKAVYEWKTIDGWLYPDTYSYTPNSSDLALLKRAASRTIKALERAWQQRNVNLPLKNPYEMLILASIVEKETALSEERAKVAGVFVNRLNKQMKLQTDPTVIYGMGDDYKGNIRKKDLLTPTPYNTYVIDGLPPTPIAMVSEESLQAVAKPEQHDYLYFVADGSGGHKFSKTLAEHNRAVQEYLRWYRSQSK

SEQ ID NO: 138352 - DNA, 993 bp, Pseudoalteromonas tunicata D2
  CDS (1)..(993): transl_table=11
gtgcgtattaaattattaattacagtaacattactgattttagctttaacgagcgctgctgtttggcaattcaaacaattaccattacagcgaatatcaattgagcagcctcgtttgtttttagtgcaatcgggtatcggcttaaaaaaattgtgtcaacaatggcaaacaattgcgttggttgactcatgccttgggctggaaattttagcaaaactcgatccaagtctgacagatttaaaagcgggcatgtatcaattgcgcccgggtactgtgcttgaaaatgtaagacgaattaatcaaggtgatgctcacttatttagttttaccattattgaagggcaaactttatatcaaatcattgataagatagccgcagcaccttatttgagcgtgccgaactttatatttgaacttgatgaacttgaagccgcgcttaattttaccggtgatcatcttgaagggtggctctatcccgaaacctattattatcgtgctaatgaaaccgcaatttccttgttaaaacgtgcttcgtcgaaaatgaaaacttatttacaacaagcatgggagcgccgagcagagaatttaccgtatgcaaatgcgtatgaggcgttgatcatggcctcaattatcgaaaaagaaactggtattgccagcgagcgtcctttaattgcatccgtttttattaatcgcctgaataaaaaaatgcgcttacaaaccgatcctacagtgatttatggcttgggcgaggcatttgatggcgatattaagcgaagccatctaaagcagttgactccttttaatacatatatgatcaatggattacctccaacacctatcgcgagcccatctgctgcggccattgatgccgctttaaatcctctgcaatcagattattattattttgttgctaaaggggatgggagtcaccaattttctaaaacgctgagtgagcataatgctgctgtgcgtaaataccaattaaagaagtaa

SEQ ID NO: 138353 - protein, 330 aa, Pseudoalteromonas tunicata D2
MRIKLLITVTLLILALTSAAVWQFKQLPLQRISIEQPRLFLVQSGIGLKKLCQQWQTIALVDSCLGLEILAKLDPSLTDLKAGMYQLRPGTVLENVRRINQGDAHLFSFTIIEGQTLYQIIDKIAAAPYLSVPNFIFELDELEAALNFTGDHLEGWLYPETYYYRANETAISLLKRASSKMKTYLQQAWERRAENLPYANAYEALIMASIIEKETGIASERPLIASVFINRLNKKMRLQTDPTVIYGLGEAFDGDIKRSHLKQLTPFNTYMINGLPPTPIASPSAAAIDAALNPLQSDYYYFVAKGDGSHQFSKTLSEHNAAVRKYQLKK

SEQ ID NO: 138354 - DNA, 1011 bp, Photobacterium sp. SKA34
  CDS (1)..(1011): transl_table=11
gtgttaaagaagttgattcttattgttttcattcttgctgcaatggcggcaggtgctgctgtctgggcgtatactcaagttaagaacgagctaaatctgcctgtcattaatactgagcaggtaatgttaacagttaaaccagggacatcgtttagagggttaattaatcagcttgtacaagataaagtgatcaagacatcacaatggacgcgctgggtcggaaagttagagccatctttaacggatattaaagcagggacttacggcttagagccaaagataacattgcaagaagccttggcattgattgcttctggtaaggagtttcaatactcaattaccttggttgaaggtgagcgttttagtgaatggttaaaaaaaattcaagccgcgcctgaattaaagcatgttagtgatggtatggaagagtcacaaattgcgaaagcaattggtattgataacatgaaaattgaaggttacttattgcctgatacttatcattacacggcgggtactaccgatattgcggtactaaaacgtgcttatctcgcgatgaataaagagttagccaaagcgtgggaagtacgtgagaaagatttgcctttaaaagatccttatcaagtattgatcatggcttctattattgaaaaagaaacttctgtaccaacagaacgaggtatggttgcttctgtttttatgaatcgcttacgtaaagggatgcctttacaaacagacccaacggttatttatggcatgggtgataaatatgacggtaatattcgtaaaaaagatctcagaaccccaacgccttataacacttataccatgaaaggtttaccaccaacgccgatagcaatgccaagtaaagcgtcagtatttgcagccgttaaccctgatgaaagcaattactattacttcgttgctgatggtaaaggtgggcataaattctctgcaactttggttgagcataaccgagcggttcgtgcatacctaaaaacattaagaaaatag

SEQ ID NO: 138355 - protein, 336 aa, Photobacterium sp. SKA34
MLKKLILIVFILAAMAAGAAVWAYTQVKNELNLPVINTEQVMLTVKPGTSFRGLINQLVQDKVIKTSQWTRWVGKLEPSLTDIKAGTYGLEPKITLQEALALIASGKEFQYSITLVEGERFSEWLKKIQAAPELKHVSDGMEESQIAKAIGIDNMKIEGYLLPDTYHYTAGTTDIAVLKRAYLAMNKELAKAWEVREKDLPLKDPYQVLIMASIIEKETSVPTERGMVASVFMNRLRKGMPLQTDPTVIYGMGDKYDGNIRKKDLRTPTPYNTYTMKGLPPTPIAMPSKASVFAAVNPDESNYYYFVADGKGGHKFSATLVEHNRAVRAYLKTLRK

SEQ ID NO: 138356 - DNA, 1026 bp, Oceanospirillum sp. MED92
  CDS (1)..(1026): transl_table=11
ttgttaaagaagtttattgttgtatcagtagtgctgataacacttgtgattgttgctgggctatgggtttggaacgactataaggcatacatcaatcagcctgtaggcttaactgaaaagatagagtttgaagtaaaaaaaggctctaatttcaatggcttggttaagcagcttaatgaagtttctgggccactaaatgagcactacttcaagctatatggcagacagtctggattggccggaaaaattaaagccggtatttatgagctggatatcgatacgacaccagctagttttttagcagcaattacgtcaggtcgttcgattagttatcaatttacgatcatcgaaggaagtaccttcaaagagttgcgcgcacgcttaaatgataatcctcatattgtagatgacctaaagggcctaaacctcgatcagataaaagcgaaattatcgatcagcgagcaccctgaagggatgtttctggccgaaacctacagctttgataagaacagtgctgcttcaacattgctgaaaagagcaaataaaatgctaatcgaagcgcttgattcagcttgggagggtaaggatgcagcgctgccgtataagtcagcttatgaggcccttatcatggcatctattgttgaaaaagagacggcccgtccagatgagcgacctgtcatcgcaggtgtttttgttcgtcgtttgaataaaaggatgcgattgcaaacggatcctactgtgatttatggcatgggtgatagttataaaggcaatatccgcagatctgatctgcgtaaaccgacgccttataatacttatgttattccagcgctcccgcctacgcctattgcgatggttggtcgtgaagctatagaggcgtcagtgcaccctaaagagggtaaggcgctttatttcgttgctaagggcgatggtagtcattatttctcggcaacgttaaaagagcacaataatgcggtaaggaaatatcagcttaatcgccgtaaagactatcgctcttctccttaa

SEQ ID NO: 138357 - protein, 341 aa, Oceanospirillum sp. MED92
MLKKFIVVSVVLITLVIVAGLWVWNDYKAYINQPVGLTEKIEFEVKKGSNFNGLVKQLNEVSGPLNEHYFKLYGRQSGLAGKIKAGIYELDIDTTPASFLAAITSGRSISYQFTIIEGSTFKELRARLNDNPHIVDDLKGLNLDQIKAKLSISEHPEGMFLAETYSFDKNSAASTLLKRANKMLIEALDSAWEGKDAALPYKSAYEALIMASIVEKETARPDERPVIAGVFVRRLNKRMRLQTDPTVIYGMGDSYKGNIRRSDLRKPTPYNTYVIPALPPTPIAMVGREAIEASVHPKEGKALYFVAKGDGSHYFSATLKEHNNAVRKYQLNRRKDYRSSP

SEQ ID NO: 138358 - DNA, 1032 bp, Oceanobacter sp. RED65
  CDS (1)..(1032): transl_table=11
atgaataaacgcttaggtgtagtgatagtgatgctcatgatgtggttcttgggcgtctgcatttatggaatataccaactagagcgtcctcttaatcttgctgaatctatggtcaagacctatcccaaaggcaagccgttatcatggtttttcttgcgcttagaagaacagggtgtgattgcggatgtgcgacccattatgatcattgcaaagatgacaggtgatgcgcgcaaaactaaagccggagattatgaactgacgcccgaaatgacatcatgggatgttttgaatttacttgttgctggcgacactgttgaataccgtgtaactctagtagaaggccagaccgtgcagcaaacattaagacgcttagctgctcatcctcaaatcaagcaagatgtaccggccgagccagatgctttgatgcaatacttaggtttagaaggacatccagagggacgctttttccctgatacatatctctttcactcaggtacgcgagcttctgaaattttagtgcgcgctcagattcgcttagaaaccgtgctggcggaggaatggcgtgatcgtcaagaaggcttaccctatgacagtccatacgaagcattaattatggcttccattatcgaaaaggaaaccgcggttcccgaagagcgtgatgaaattgcgggggtttttgttaggcgcttacaaaagaacatgcgtttgcaaacagacccaacagttatttatggcttgggcgatcgatacaaagggaatattcgacgcaagcacttgctggaaaaaacagcgtacaatacctatcgaataaatggcttgccgccgacgcctattgcacttgttggtagagaggcaattcatgcggcgcttaatccagcccctggcaaaactttgtattttgtagcgaaaggcaacggctaccaccatttctcagaaacgctgcaggaacataatgctgcagtgcgaaaatatcagattcgtaaaagagaaaaagaatatcgatctacccctgagttgaaccctgttcaatga

SEQ ID NO: 138359 - protein, 343 aa, Oceanobacter sp. RED65
MNKRLGVVIVMLMMWFLGVCIYGIYQLERPLNLAESMVKTYPKGKPLSWFFLRLEEQGVIADVRPIMIIAKMTGDARKTKAGDYELTPEMTSWDVLNLLVAGDTVEYRVTLVEGQTVQQTLRRLAAHPQIKQDVPAEPDALMQYLGLEGHPEGRFFPDTYLFHSGTRASEILVRAQIRLETVLAEEWRDRQEGLPYDSPYEALIMASIIEKETAVPEERDEIAGVFVRRLQKNMRLQTDPTVIYGLGDRYKGNIRRKHLLEKTAYNTYRINGLPPTPIALVGREAIHAALNPAPGKTLYFVAKGNGYHHFSETLQEHNAAVRKYQIRKREKEYRSTPELNPVQ

SEQ ID NO: 138360 - DNA, 987 bp, Alteromonadales bacterium TW-7
  CDS (1)..(987): transl_table=11
gtgttaaaagttattttatcagtcgcttttttagcgattattagcaccgctattggctatcagcatttgcaggcaaccttgcaaagcccactaaaagtaagcgaaaacacgcaatttgaggtaaaaaagggcaccggttttaataaactatgccaacagtggcaagcaaataactgggttgaaagctgctggcgttaccaagttatagcaaagcttgaccccacgctaaccgatttgaaagccgggctttacgcgctttcaaataccagtgttattaacaacataaaaaaaataaaccaaggtcaacaaatcagctttagctttaccattattgaaggccaagcgctgcgcgatgtaatagcaaatattaaaaatgcgccaaatttaaataacgatctaaagttaaacgagttaggtaagcaaattataaatgaagatacattgcttgagggctggttatttccagatacctaccactaccagcataatgatactgcaagcagtgtattaaaacgcgccgcgcaaaccatgcaacaaacactaagcaatgcatggcaaaaacgtgctaacaatttaccttacaacaccgcgtacgaggcgctcataatggcctcaattattgaaaaagaaaccgcattagccagcgaacgcccgttaattgcctcggtttttgttaataggttaaacacaaaaatgcgcctacaaaccgatccaaccgtaatatacggcttaggtgaaaactttgacggcgatattaaatacaaagatttacgcaatcacacgccatacaatacctaccgtattgatggattaccgccaacgcccatagctatgccatcaaaagaagctattttagcggcggtaaatccgccacaaagcgactatgtttactttgtagcaaaaggcgatggcagccaccaattttctaccacgttaaaacaacataacgcggcagttaaaacctatattttaaataaaaagaattaa

SEQ ID NO: 138361 - protein, 328 aa, Alteromonadales bacterium TW-7
MLKVILSVAFLAIISTAIGYQHLQATLQSPLKVSENTQFEVKKGTGFNKLCQQWQANNWVESCWRYQVIAKLDPTLTDLKAGLYALSNTSVINNIKKINQGQQISFSFTIIEGQALRDVIANIKNAPNLNNDLKLNELGKQIINEDTLLEGWLFPDTYHYQHNDTASSVLKRAAQTMQQTLSNAWQKRANNLPYNTAYEALIMASIIEKETALASERPLIASVFVNRLNTKMRLQTDPTVIYGLGENFDGDIKYKDLRNHTPYNTYRIDGLPPTPIAMPSKEAILAAVNPPQSDYVYFVAKGDGSHQFSTTLKQHNAAVKTYILNKKN

SEQ ID NO: 138362 - DNA, 1074 bp, Candidatus Desulfococcus oleovorans Hxd3
  CDS (1)..(1074): transl_table=11
gtgacaagtgcccgtcaccttaccgtacacgtttacccatggttgaaagcaggacaaatgccggcacccaaacgcatccttattcttgttgtcatactggccgtcgccggcgcaggggcatggttcggtctgcttcggtacggcgccacacccgccgatcccggtgcccgcaatgaacaggtactggtagttgccccgggcatgggcatcaacgccgtggcgaccctgctgcaccgggccgggattatccatcacccggatctgttccggctctttgcccgaacagcccggggcagacacgtcatcaaggcaggagaataccgggtgtcggcggccatgccgccgtcggacatcctggaccggctcttttccggggacgtggtgctctaccgggtaaccattcccgaaggtttcgccattgaccagattgccggcgcagtggcccaggccgggctggccacaagcgaggcttttgccgctgccgccagggacagcgggcttgcaaaagagatgggcattccggccgacacattggaaggatacctgtttcccgagacctactattttccggcaaccgccactccccgaaaaatggcgaccgccatggtggaccgctttaacgccgtattcaccgacgagtggaaaacacgcgccacacaacagggattttcggtccaccagatcgtgaccctggcgtcgatcattgaaaaagagacggcccacccggacgaacggcccgtgatcgcgtcggtgttccacaaccggctggcaaaaagaatgcggctggagagcgaccccacggtgatatacggcattcccgactttgacggcaatatcacccgtgcccatctgcgacaggaaaccccttacaacacctaccggattcggggtcttccgccggggcccattgccagcccgggcaaagaatcgctctacgcggccctttttccggcccaaaccggctatctctattttgtggcaaaaaacgacggcacccaccacttttccgccacccttgcagagcacaaccgggccgttcagacatatcaactgggaaggcggcgtaaaaaatag

SEQ ID NO: 138363 - protein, 357 aa, Candidatus Desulfococcus oleovorans Hxd3
MTSARHLTVHVYPWLKAGQMPAPKRILILVVILAVAGAGAWFGLLRYGATPADPGARNEQVLVVAPGMGINAVATLLHRAGIIHHPDLFRLFARTARGRHVIKAGEYRVSAAMPPSDILDRLFSGDVVLYRVTIPEGFAIDQIAGAVAQAGLATSEAFAAAARDSGLAKEMGIPADTLEGYLFPETYYFPATATPRKMATAMVDRFNAVFTDEWKTRATQQGFSVHQIVTLASIIEKETAHPDERPVIASVFHNRLAKRMRLESDPTVIYGIPDFDGNITRAHLRQETPYNTYRIRGLPPGPIASPGKESLYAALFPAQTGYLYFVAKNDGTHHFSATLAEHNRAVQTYQLGRRRKK

SEQ ID NO: 138364 - DNA, 1203 bp, Pseudomonas putida GB-1
  CDS (1)..(1203): transl_table=11
gtgagacgtaaattcctgctgttgctggaaatgggtctgatcctcgccggcctggcgctaggctggtcggcctggaaggtcaactcggtcctggagcagcccttgcacgtgacgcaggagcgcctgctcgacgtgcccaatggtactacccccaaccgcatgttctatcgcatgcaaacggaagggttgctcgacgacgccgtctggttgcgcttgtactggcgcttcaacatggcgggtaccccgctgcataccggagagtatcgccttacccccggcatgaccgtcgagcagctgttcgatgcctggcgccggggcgacgtggtgcagtacaacctgaccttggtcgaaggctggaccttccgccaggtgcgctcggccgtggccaagcatgaaaagatcaaacataccctggagggcttgtcggacgccgaggtcatggacaagctcggccataccggtgtgttccccgaaggccgcttcttcccggacacctaccgcttcgtacggggcatgagtgacgtcgagttgctgcagcaggcctacatgcgcctggatgaagtgttggccaaggagtgggccgaacgcacgaccgacctgccgtatcgcgacccgtaccaggcgttgatcatggcctcccttgtggaaaaggaaaccggaattccgcaggagcgcgggcagattgccggcgtgttcgtgaggcgcatgcgcctgggcatgatgctgcagaccgacccgacagtgatctacggcatgggtgaacgctacaacggcaagatcacccgcgccgacctgcgcgagcctacgccctacaacacctacaccatgacaggcctgccgccgaccccgatcgccatggttggccgcgaggctattcacgcggcgctgaacccgtccgatggcaccagcctgtacttcgtcgctcgtggcgatggcagccatgtgttctccgatgacctcgatgatcataactcggcggtgcgcgagttccagctcaagcgccgggcggactaccgttccagccccgcgccgcagcaagacaccaagccaggcgtggatgacgccgacgacgcgcagcagcctgagccgccagcggcggacgagccggccgcgcagccagcgcccgatgaaccgcccgtgcaggatgcccctgccggcggtgcgcaagcggccgaacggccaacgcctgacgaacaacattga

SEQ ID NO: 138365 - protein, 400 aa, Pseudomonas putida GB-1
MRRKFLLLLEMGLILAGLALGWSAWKVNSVLEQPLHVTQERLLDVPNGTTPNRMFYRMQTEGLLDDAVWLRLYWRFNMAGTPLHTGEYRLTPGMTVEQLFDAWRRGDVVQYNLTLVEGWTFRQVRSAVAKHEKIKHTLEGLSDAEVMDKLGHTGVFPEGRFFPDTYRFVRGMSDVELLQQAYMRLDEVLAKEWAERTTDLPYRDPYQALIMASLVEKETGIPQERGQIAGVFVRRMRLGMMLQTDPTVIYGMGERYNGKITRADLREPTPYNTYTMTGLPPTPIAMVGREAIHAALNPSDGTSLYFVARGDGSHVFSDDLDDHNSAVREFQLKRRADYRSSPAPQQDTKPGVDDADDAQQPEPPAADEPAAQPAPDEPPVQDAPAGGAQAAERPTPDEQH

SEQ ID NO: 138366 - DNA, 1080 bp, Xanthomonas albilineans
  CDS (1)..(1080): transl_table=11
atgcgcttcgaggtggtcgtgaccagggctaaacgcgggggtctgatgctggtggcggcggtgctggcgcttgcgctgctgctcgcagcggccggtgcatggtggtggcagagctatcgcgctttcaccgaccgcccgctgcaggcggctcagccaagcgtggaggtggcgcgtggtgcttcgttcaatagcgtgctgcgcaggttgcgcgatgctggcgtcaaccagggcagcgacttgcaatggcaggtgctggcgcgcgaactcggcgtcgccggcaagctcaggttcggcgaatacgcgctacagccgccacttagcccgcgcgccttgctgctgcggatgcgcaaggggcaggtgatccaatatcgcttcaccatcgtcgaaggctggagcctgcgccaactgcgcgcggcgctgaatgcggccacgccactgcgtcatatcaccgccgatctcggcgacaacgacctgatggccaaactcgcccagcctggtcaagctgcggaaggccgttttctgcccgagacctatctctaccagcgcggcgacagcgatctggatctgctgcggcgcgcgcataaggcgatggacaaggcgctggccgacgcatgggacagccgtgccgctggcctgctactgtcatcgccggaacaggcgctgatcctggcctcgatcgtggagaaggaaaccgctctggccgccgaacgcccgcagatcgccggcgtgttcgtgcggcgcctgcaactggggatgaaactgcagaccgatccgagcgtgatctacggcatcggtagcgcctacgccggcaacatccgcaagcgtgatctggaaaccgatacgccctacaacacctacacccgcaccggcttgccgccgaccccgattgccatgccagggcgcgaggcgctgcgcgccgcgacgcatcctgcgccgggcgacagcttgtatttcgtggcgatcggcgatggcagcggtgcgcatgcattttcttccagttatgccgaacacaacgcggcggtggcgcgttacctgcagcgcttgcgccagacgcgtagcgacgcggaggagaatccatga

SEQ ID NO: 138367 - protein, 359 aa, Xanthomonas albilineans
MRFEVVVTRAKRGGLMLVAAVLALALLLAAAGAWWWQSYRAFTDRPLQAAQPSVEVARGASFNSVLRRLRDAGVNQGSDLQWQVLARELGVAGKLRFGEYALQPPLSPRALLLRMRKGQVIQYRFTIVEGWSLRQLRAALNAATPLRHITADLGDNDLMAKLAQPGQAAEGRFLPETYLYQRGDSDLDLLRRAHKAMDKALADAWDSRAAGLLLSSPEQALILASIVEKETALAAERPQIAGVFVRRLQLGMKLQTDPSVIYGIGSAYAGNIRKRDLETDTPYNTYTRTGLPPTPIAMPGREALRAATHPAPGDSLYFVAIGDGSGAHAFSSSYAEHNAAVARYLQRLRQTRSDAEENP

SEQ ID NO: 138368 - DNA, 1044 bp, Haemophilus influenzae
  CDS (1)..(1044): transl_table=11
atgaagaaatttttaattgcgattttacttttaattttgattttagcgggcgtggcgagtttttcttattacaaaatgactgaatttgtaaaaacaccagtaaatgtgcaggcagatgaacttttaacgattgaacgtggcacaacaagttcaaaattagccacactttttgagcaagaaaagttaattgctgatgggaaattattaccttatttgctgaagttgaaacctgagttaaataaaataaaagcagggacttattctcttgagaatgttaaaactgtgcaagatttactggatttgctcaattccggtaaagaagtgcagttcaatgtaaaatggattgaaggaaaaacctttaaagattggcgaaaagatcttgaaaatgcaccgcacttggtgcaaaccttgaaagataagagtaacgaagaaattttcgcattacttgatttgcctgatattggtcaaaatcttgaactaaaaaatgtggaaggttggctttatcctgatacttataactatacgcctaaatcgacagacttagagctacttaagcgatcggctgagcgaatgaaaaaggcgttaaataaggcttggaacgagcgtgacgaggatttacctttagcgaatccttatgaaatgttgattttggcttctatcgtggaaaaagaaacgggtattgctaatgagagggcaaaagtggcatctgtatttatcaaccgtttaaaagcaaaaatgaaattacaaacggatccaacggtaatttatggtatgggcgaaaattacaatgggaatattcgcaaaaaagatttagaaaccaagacgccttataatacgtatgtgattgatggattgccgccaacgcctattgctatgccaagtgaaagttcgttacaggctgttgcgaaccctgaaaaaacagatttttattattttgtagcagatggttctggtgggcataaatttacccgaaatttgaatgaacataacaaagcggtgcaagaatatttacgttggtatcgcagtcagaaaaatgccaaataa

SEQ ID NO: 138369 - protein, 347 aa, Haemophilus influenzae
MKKFLIAILLLILILAGVASFSYYKMTEFVKTPVNVQADELLTIERGTTSSKLATLFEQEKLIADGKLLPYLLKLKPELNKIKAGTYSLENVKTVQDLLDLLNSGKEVQFNVKWIEGKTFKDWRKDLENAPHLVQTLKDKSNEEIFALLDLPDIGQNLELKNVEGWLYPDTYNYTPKSTDLELLKRSAERMKKALNKAWNERDEDLPLANPYEMLILASIVEKETGIANERAKVASVFINRLKAKMKLQTDPTVIYGMGENYNGNIRKKDLETKTPYNTYVIDGLPPTPIAMPSESSLQAVANPEKTDFYYFVADGSGGHKFTRNLNEHNKAVQEYLRWYRSQKNAK

SEQ ID NO: 138370 - DNA, 27 bp, Artificial sequence
  primer
atgaaaaaagtgttattgataatcttg

SEQ ID NO: 138371 - DNA, 25 bp, Artificial sequence
  primer
ttactgcgcatttttttccttaagc

SEQ ID NO: 138372 - protein, 301 aa, Artificial sequence
  consensus sequence
  Variant (2)..(35): Xaa in position 2 to 35 is any amino acid
  Variant (36)..(38): Xaa in position 36 to 38 is any or no amino acid
  Variant (40)..(40): Xaa in position 40 is any amino acid
  Variant (42)..(42): Xaa in position 42 is any amino acid
  Variant (44)..(59): Xaa in position 44 to 59 is any amino acid
  Variant (60)..(60): Xaa in position 60 is any or no amino acid
  Variant (62)..(71): Xaa in position 62 to 71 is any amino acid
  Variant (72)..(72): Xaa in position 72 is any or no amino acid
  Variant (75)..(99): Xaa in position 75 to 99 is any amino acid
  Variant (100)..(122): Xaa in position 100 to 122 is any or no amino acid
  Variant (125)..(127): Xaa in position 125 to 127 is any amino acid
  Variant (129)..(129): Xaa in position 129 is any amino acid
  Variant (132)..(157): Xaa in position 132 to 157 is any amino acid
  Variant (159)..(160): Xaa in position 159 to 160 is any amino acid
  Variant (162)..(164): Xaa in position 162 to 164 is any amino acid
  Variant (167)..(175): Xaa in position 167 to 175 is any amino acid
  Variant (176)..(176): Xaa in position 176 is any or no amino acid
  Variant (180)..(180): Xaa in position 180 is any amino acid
  Variant (185)..(188): Xaa in position 185 to 188 is any amino acid
  Variant (191)..(193): Xaa in position 191 to 193 is any amino acid
  Variant (195)..(195): Xaa in position 195 is any amino acid
  Variant (198)..(199): Xaa in position 198 to 199 is any amino acid
  Variant (202)..(204): Xaa in position 202 to 204 is any amino acid
  Variant (206)..(206): Xaa in position 206 is any amino acid
  Variant (217)..(217): Xaa in position 217 is any amino acid
  Variant (219)..(221): Xaa in position 219 to 221 is any amino acid
  Variant (222)..(226): Xaa in position 222 to 226 is any or no amino acid
  Variant (228)..(231): Xaa in position 228 to 231 is any amino acid
  Variant (232)..(232): Xaa in position 232 is any or no amino acid
  Variant (235)..(237): Xaa in position 235 to 237 is any amino acid
  Variant (239)..(239): Xaa in position 239 is any amino acid
  Variant (244)..(246): Xaa in position 244 to 246 is any amino acid
  Variant (255)..(255): Xaa in position 255 is any amino acid
  Variant (257)..(262): Xaa in position 257 to 262 is any amino acid
  Variant (264)..(266): Xaa in position 264 to 266 is any amino acid
  Variant (268)..(272): Xaa in position 268 to 272 is any amino acid
  Variant (278)..(278): Xaa in position 278 is any amino acid
  Variant (280)..(280): Xaa in position 280 is any amino acid
  Variant (282)..(284): Xaa in position 282 to 284 is any amino acid
  Variant (285)..(286): Xaa in position 285 to 286 is any or no amino acid
  Variant (288)..(290): Xaa in position 288 to 290 is any amino acid
  Variant (292)..(293): Xaa in position 292 to 293 is any amino acid
  Variant (296)..(297): Xaa in position 296 to 297 is any amino acid
  Variant (299)..(300): Xaa in position 299 to 300 is any amino acid
GXXXXXXXXXXXXXXXXXXXXXXXXXXXXXXXXXXXXXKXGXYXXXXXXXXXXXXXXXXXGXXXXXXXXXXXEGXXXXXXXXXXXXXXXXXXXXXXXXXXXXXXXXXXXXXXXXXXXXXXXXEGXXXPXTYXXXXXXXXXXXXXXXXXXXXXXXXXXWXXRXXXLPXXXXXXXXXXASIXEKETXXXXERXXXAXVFXXRLXXXMXLQTDPTVIYGXGXXXXXXXXGXXXXXDLXXXTXYNTYXXXGLPPTPIAXPXXXXXXAXXXPXXXXXLYFVAXGXGXXXXXFXXXLXXHNXXVXXY

SEQ ID NO: 138373 - protein, 52 aa, Artificial sequence
  protein pattern
  Variant (2)..(7): Xaa in position 2 to 7 is any amino acid
  Variant (8)..(8): Xaa in position 8 is any or no amino acid
  Variant (10)..(11): Xaa in position 10 to 11 is any amino acid
  Variant (12)..(12): Xaa in position 12 is any or no amino acid
  Variant (15)..(15): Xaa in position 15 is Ile or Leu
  Variant (16)..(16): Xaa in position 16 is Ile or Val
  Variant (21)..(21): Xaa in position 21 is Ala, Gly or Ser
  Variant (22)..(24): Xaa in position 22 to 24 is any amino acid
  Variant (25)..(25): Xaa in position 25 is Asp or Glu
  Variant (26)..(28): Xaa in position 26 to 28 is any amino acid
  Variant (29)..(29): Xaa in position 29 is Ile or Val
  Variant (30)..(30): Xaa in position 30 is Ala or Ser
  Variant (31)..(31): Xaa in position 31 is Ala, Gly or Ser
  Variant (34)..(34): Xaa in position 34 is any amino acid
  Variant (35)..(35): Xaa in position 35 is Asn or Arg
  Variant (37)..(37): Xaa in position 37 is Leu or Met
  Variant (38)..(40): Xaa in position 38 to 40 is any amino acid
  Variant (42)..(42): Xaa in position 42 is any amino acid
  Variant (45)..(45): Xaa in position 45 is Ser or Thr
  Variant (48)..(48): Xaa in position 48 is Ser or Thr
  Variant (50)..(50): Xaa in position 50 is Ile or Met
PXXXXXXXLXXXASXXEKETXXXXXXXXXXXVFXXRXXXXMXLQXDPXVXYG

SEQ ID NO: 138374 - protein, 41 aa, Artificial sequence
  protein pattern
  Variant (2)..(2): Xaa in position 2 is any amino acid
  Variant (3)..(4): Xaa in position 3 to 4 is any or no amino acid
  Variant (8)..(10): Xaa in position 8 to 10 is any amino acid
  Variant (15)..(15): Xaa in position 15 is Ala, Gly, Ser or Thr
  Variant (16)..(16): Xaa in position 16 is Ala or Pro
  Variant (18)..(18): Xaa in position 18 is Ala, Cys or Ser
  Variant (19)..(19): Xaa in position 19 is any amino acid
  Variant (20)..(20): Xaa in position 20 is Ala, Pro or Val
  Variant (21)..(21): Xaa in position 21 is Gly or Ser
  Variant (22)..(22): Xaa in position 22 is any amino acid
  Variant (23)..(23): Xaa in position 23 is Ala, Asp, Glu or Ser
  Variant (24)..(24): Xaa in position 24 is Ala or Ser
  Variant (25)..(25): Xaa in position 25 is Ile, Leu or Val
  Variant (26)..(26): Xaa in position 26 is any amino acid
  Variant (28)..(28): Xaa in position 28 is Ala or Val
  Variant (29)..(30): Xaa in position 29 to 30 is any amino acid
  Variant (32)..(37): Xaa in position 32 to 37 is any amino acid
  Variant (39)..(39): Xaa in position 39 is Phe or Tyr
  Variant (41)..(41): Xaa in position 41 is Ala, Gly or Ser
PXXXNTYXXXGLPPXXIXXXXXXXXXAXXXPXXXXXXYXVX

SEQ ID NO: 138375 - protein, 41 aa, Artificial sequence
  protein pattern
  Variant (3)..(3): Xaa in position 3 is any amino acid
  Variant (4)..(4): Xaa in position 4 is Phe or Leu
  Variant (5)..(5): Xaa in position 5 is any amino acid
  Variant (7)..(7): Xaa in position 7 is Asp or Glu
  Variant (9)..(10): Xaa in position 9 to 10 is any or no amino acid
  Variant (12)..(35): Xaa in position 12 to 35 is any amino acid
  Variant (36)..(37): Xaa in position 36 to 37 is any or no amino acid
  Variant (39)..(40): Xaa in position 39 to 40 is any amino acid
EGXXXPXTXXYXXXXXXXXXXXXXXXXXXXXXXXXXXWXXR

SEQ ID NO: 138376 - protein, 18 aa, Artificial sequence
  protein pattern
  Variant (2)..(2): Xaa in position 2 is any amino acid
  Variant (4)..(4): Xaa in position 4 is Gly, Ser or Thr
  Variant (5)..(6): Xaa in position 5 to 6 is any amino acid
  Variant (8)..(8): Xaa in position 8 is Ala, Asn, Ser or Thr
  Variant (9)..(9): Xaa in position 9 is any amino acid
  Variant (10)..(10): Xaa in position 10 is Asp, Asn, Ser or Thr
  Variant (12)..(12): Xaa in position 12 is any amino acid
  Variant (13)..(13): Xaa in position 13 is Ala, Asp, Glu, Gly, Gln or Ser
  Variant (16)..(16): Xaa in position 16 is any amino acid
  Variant (17)..(17): Xaa in position 17 is Ala, Asn or Ser
GXGXXXFXXXLXXHNXXV

SEQ ID NO: 138377 - DNA, 1623 bp, Escherichia coli; identical to SEQ ID NO: 33417
  CDS (1)..(1623): transl_table=11

SEQ ID NO: 138378 - protein, 540 aa, Escherichia coli; identical to SEQ ID NO: 33418

SEQ ID NO: 138379 - DNA, 2248 bp, Zea mays subsp. mays; identical to SEQ ID NO: 33095
  CDS (149)..(2074)

SEQ ID NO: 138380 - protein, 641 aa, Zea mays subsp. mays; identical to SEQ ID NO: 33098

SEQ ID NO: 138381 - DNA, 2388 bp, Arabidopsis thaliana
  CDS (391)..(2247)
acaacaccacttgggggaggctcccatacacaaaacgaaggcgcgaatttcaaggactcttctcgacgaccaaaccacataaaacactcttaccagaatttgtgttgtcttcgttcatttccttctcctcttcttcttcttcttcgtcgtaattttgattgtttctttgcgaaaagtcgtttttttaatcaagtctgaatcacgttttattgatctacactcgcgtgggttctccgtttcgtgcttagatcagagagctccctcccgtgattccgagctttaaggtcggaaatggcggctcatgtttctactggaaacattcataatttctatcttgcggggcaggtttacaggggacaagctttttcatggagttctgcttctactttcatggcaaatccattcaaagagccctcttggtcaagtggggtatttaaggctctaaaagctgagagatgtggttgttactctcgtggtatttcccccatcagtgagacctcaaaacctatcagggctgtttcggtatcttcttcaacaaagtattatgatttcactgtgattggtagtggagtagcgggtctgcgttatgctttagaagttgcaaagcaaggaacagtcgcagtgattaccaaagatgagcctcatgagagtaacacaaactatgctcaaggtggtgttagtgctgtgttatgccctttggattctgttgaaagtcatatgcgggacactatggtcgctggtgctcatctttgtgatgaagaaaccgtaagagttgtgtgtactgaagggcctgaaaggattcgtgaactgattgcaatgggagcatcatttgatcacggcgaggatggaaatttgcatttggccagagagggtggtcactcgcattgtaggatcgttcacgctgctgatatgacaggaagagagattgagagagctttacttgaagctgtacttaatgatcccaacatatctgtcttcaaacaccattttgcaatcgatctgctcacttctcaggatggcttgaacacagtttgtcatggtgtggacactttgaatatcaaaactaatgaggtagtacgctttatatcgaaggtgacattgcttgcttcaggtggagctgggcatatctatccatcaaccacaaatcctctggtggctactggagatgggatggcgatggctcatcgagctcaagctgtgatctcaaatatggaatttgtgcagtttcatcctactgccctagccgacgaaggtcttcccatcaaactacaaactgctagggaaaacgcgttcctcatcaccgaggcggtgagaggtgatggtggcatcctctataatctaggaatggagcgattcatgcctgtttacgatgaacgagctgagcttgctccaagagacgtggttgcaagaagtattgatgaccagcttaagaaacgaaacgaaaagtatgtgttacttgacataagccataagccaagagaaaagattcttgcccatttcccgaacatagcttctgaatgtcttaaacacggtctggatatcacccgtcagcctattccggttgtccctgcagcccattacatgtgtggaggagttcgtgctggtttacaaggcgaaaccaatgtccttggattgtttgtagcaggtgaagtagcatgtacaggcctccacggggcaaatcgtcttgctagtaactcgcttttagaagctctggttttcgcgagacgggctgttcagccttcgactgagctcatgaaacgcacaagacttgatgtatgcgcatcagagaaatggacaaggcctgttgttgcgacagctagattgctaggagatgaagtaatagcaaagattatagctttgactaaagaagtgagaagagagcttcaggaggtaatgtggaagtatgttggtattgtcagatcgacaattcggctcaccactgctgagaggaaaatcgcagagctagaagcaaaatgggaaacatttttgtttgaacatggatgggaacaaacagtggtagctcttgaagcttgtgagatgagaaacttgttctgttgcgctaagcttgtggtgagcagcgcgttagctagacatgaaagcagaggtcttcattacatgacagactttccttttgtggaagaaagcaagcggattccgacgattattctaccgtcttctcctacaacagctagttggagctcaaggcggttacagaatataagtagcagctcacttattgattgctaaaactgcaggagtttttgttcttatttgaatccaaacctctctgattattgtatcaatttgaaaaaatttggatctcaaaaggaatctctgattctgacactctgtaatacaaaaggaaataaattattcatttgagatatc

SEQ ID NO: 138382 - protein, 618 aa, Arabidopsis thaliana
MANPFKEPSWSSGVFKALKAERCGCYSRGISPISETSKPIRAVSVSSSTKYYDFTVIGSGVAGLRYALEVAKQGTVAVITKDEPHESNTNYAQGGVSAVLCPLDSVESHMRDTMVAGAHLCDEETVRVVCTEGPERIRELIAMGASFDHGEDGNLHLAREGGHSHCRIVHAADMTGREIERALLEAVLNDPNISVFKHHFAIDLLTSQDGLNTVCHGVDTLNIKTNEVVRFISKVTLLASGGAGHIYPSTTNPLVATGDGMAMAHRAQAVISNMEFVQFHPTALADEGLPIKLQTARENAFLITEAVRGDGGILYNLGMERFMPVYDERAELAPRDVVARSIDDQLKKRNEKYVLLDISHKPREKILAHFPNIASECLKHGLDITRQPIPVVPAAHYMCGGVRAGLQGETNVLGLFVAGEVACTGLHGANRLASNSLLEALVFARRAVQPSTELMKRTRLDVCASEKWTRPVVATARLLGDEVIAKIIALTKEVRRELQEVMWKYVGIVRSTIRLTTAERKIAELEAKWETFLFEHGWEQTVVALEACEMRNLFCCAKLVVSSALARHESRGLHYMTDFPFVEESKRIPTIILPSSPTTASWSSRRLQNISSSSLIDC

SEQ ID NO: 138383 - DNA, 1938 bp, Oryza sativa (japonica cultivar-group); identical to SEQ ID NO: 33437
  CDS (1)..(1938)

SEQ ID NO: 138384 - protein, 645 aa, Oryza sativa (japonica cultivar-group); identical to SEQ ID NO: 33438

SEQ ID NO: 138385 - DNA, 1545 bp, Mesorhizobium loti MAFF303099
  CDS (1)..(1545): transl_table=11
atgagcgccgatgtccgcagcttttttggtcgacccatcatcattggcggtggcattgccggattgttgaccgcgcttcatctggcgccagaacccgtgcttgttttgtccaggacgccactcggatctgaagcatcgagcgcgtgggcacagggcgggctggctgccagtcttggcattgacgataatccggcgctgcacctcgccgatacgctcgccgccggcgatggcctgtgcgacgcagacatcgccagccgtatcctccatgcggcccctaacgcgattgaggccctggcaaaccttggggtctgcttcgatcggacgccagaaggagccctgcggcttggcttggaggccgcgcatggccgccggcgcatcgttcatgccggcggcgacggcagcggacaggaaatcatgcgcgcgcttgtcgaaaccgtgcgttccacgccgtcgattgtggtcgtcgagggtgtggaggcgcggcggctggcagtggaggacaatacggtccgcggcgtctgggcaagctgttcgatgagccctgtgttcctgggtacgggacgggtgatccttgccaccggcggcattggcggactgttcttcgacagcaccaacccttcggggagttgcggacagggcctggggcttgcggcccgtgccggtgctgtccttgctgatctcgaattcgtccagttccacccgaccgcgcttgatgggccggctcgcccgatgccgctgatcagcgaagcggttcgcggcgaaggtgctgtgatcgtcgacgagacaggccgacgttttctcgaaggcctggatggggcggaactcgcgccgcgcgacgtggtggcgggcgccatctggacccatcttgcaaacggccacctcgtctttctcgatggccgagaaaagcccggtccgacattcgcgcggcagtttccgacgattgcatcagcctgcaggcgcgcaggtatcgaccccgcgcgcgatctcatccccgtccggccggcccagcactatcacatgggcggcgtcgcggtggaccaggatggacggacttccgttgccggactgtgggcttgcggcgaagttgcctccaccggactgcacggcgccaacaggctcgccagcaactcgctgaccgaggctgtggtgtgcgcgcgctgggtcgccgaaagcgtggcgggatctgctatcggcgtcaggacacgatcgacggcacgcgaaattccggcgcccgatccagtttccttgcgccctctcttgacacgcacccttggcgtgagccgtgatggcgcgatgttgcgcgaggccattcggacattgctgccgctggccaaacgccccgatgccacgtccgatcccgcagcagtgggactgatgatcgcggttgccgccttgctgcgccaggaaagccgcggcgctcactaccgcacggactttcccgatcgtgctgccatcgcccgccgctccaggctcaggcttgatgaagccttagcggcagccgacgaactggcatgttcgccaacgcttgaagaggtcgagccatga

SEQ ID NO: 138386 - protein, 514 aa, Mesorhizobium loti MAFF303099
MSADVRSFFGRPIIIGGGIAGLLTALHLAPEPVLVLSRTPLGSEASSAWAQGGLAASLGIDDNPALHLADTLAAGDGLCDADIASRILHAAPNAIEALANLGVCFDRTPEGALRLGLEAAHGRRRIVHAGGDGSGQEIMRALVETVRSTPSIVVVEGVEARRLAVEDNTVRGVWASCSMSPVFLGTGRVILATGGIGGLFFDSTNPSGSCGQGLGLAARAGAVLADLEFVQFHPTALDGPARPMPLISEAVRGEGAVIVDETGRRFLEGLDGAELAPRDVVAGAIWTHLANGHLVFLDGREKPGPTFARQFPTIASACRRAGIDPARDLIPVRPAQHYHMGGVAVDQDGRTSVAGLWACGEVASTGLHGANRLASNSLTEAVVCARWVAESVAGSAIGVRTRSTAREIPAPDPVSLRPLLTRTLGVSRDGAMLREAIRTLLPLAKRPDATSDPAAVGLMIAVAALLRQESRGAHYRTDFPDRAAIARRSRLRLDEALAAADELACSPTLEEVEP

SEQ ID NO: 138387 - DNA, 1767 bp, Escherichia coli O157:H7 EDL933
  CDS (1)..(1767): transl_table=11
  misc_feature (763)..(763): k is g or t
  misc_feature (764)..(764): m is a or c
atgaaattgccagtcagagaatttgatgcagttgtgattggtgccggcggcgcaggtatgcgcgcggcgctgcaaatttcccagagcggccagacctgtgcgctgctctctaaagtcttcccgacccgttcccataccgtttctgcgcaaggcggcattaccgttgcgctgggtaatacccatgaagataactgggaatggcatatgtacgacaccgtgaaagggtcggactatatcggtgaccaggacgcgattgaatatatgtgtaaaaccgggccggaagcgattctggaactcgaacacatgggcctgccgttctcgcgtctcgatgatggtcgtatctatcaacgtccgtttggcggtcagtcgaaaaacttcggcggcgagcaggcggcacgcactgcggcagcggctgaccgtaccggtcacgcactgttgcacacgctttatcagcagaacctgaaaaaccacaccaccattttctccgagtggtatgcgctggatctggtgaaaaaccaggatggcgcggtggtgggttgtaccgcactgtgcatcgaaaccggtgaagtggtttattttaaagcccgcgctaccgtgctggcgactggcggagcagggcgtatttatcagtctaccactaacgcccacattaacaccggcgacggcgtcggcatggctatccgcgcaggcgtaccggtgcaggatatggaaatgtggcaattccacccgaccggcattgccggtgcgggcgtactggtcacckmaggttgccgtggtgaaggcggttatctgctgaacaaacatggcgaacgctttatggagcgttatgcgccgaacgccaaagacctggcgggccgtgatgtggtggcgcgttcaatcatgattgaaatccgtgaaggtcgcggctgtgatggtccgtgggggccacacgcgaaactgaaactcgatcacctgggtaaagaagttctcgaatcccgtctgccgggtatcctggagctttcccgtaccttcgctcacgttgatccggtgaaagagccgattccggttatcccaacctgtcactacatgatgggcggtattccgaccaaagttaccggtcaggcgctgactgtgaatgagaaaggcgaagatgtggttgttccggggctgttcgcggtaggtgaaattgcctgcgtatcggtacacggtgctaaccgtctgggcggcaactcgctgctggacctggtggtctttggtcgcgcagcgggtctgcatctgcaagagtctatcgccgagcagggcgcattgcgcgatgccagcgagtctgatgttgaagcatctttggatcgtctgaaccgctggaacaataatcgtaacggtgaagatccggtggcgattcgtaaagcgctgcaagaatgtatgcagcataacttctcggtcttccgtgaaggtgatgcgatggctaaagggcttgagcagttgaaagtgatccgcgagcgtctgaaaaatgcccgtctggatgacacttccagcgagttcaacacccagcgcgttgagtgcctggaactggataacctgatggaaacggcgtatgcaacggctgtttctgccaacttccgtaccgaaagccgtggcgcacatagccgcttcgacttcccggatcgtgatgatgaaaactggctgtgccactccctgtatctgccagagtcggaatccatgacgcgccgaagcgtcaacatggaaccgaaactgcgcccggcattcccgccgaagattcgtacttactaa

SEQ ID NO: 138388 - protein, 588 aa, Escherichia coli O157:H7 EDL933
  misc_feature (255)..(255): The Xaa at location 255 stands for Stop, Ala, Glu, or Ser.
MKLPVREFDAVVIGAGGAGMRAALQISQSGQTCALLSKVFPTRSHTVSAQGGITVALGNTHEDNWEWHMYDTVKGSDYIGDQDAIEYMCKTGPEAILELEHMGLPFSRLDDGRIYQRPFGGQSKNFGGEQAARTAAAADRTGHALLHTLYQQNLKNHTTIFSEWYALDLVKNQDGAVVGCTALCIETGEVVYFKARATVLATGGAGRIYQSTTNAHINTGDGVGMAIRAGVPVQDMEMWQFHPTGIAGAGVLVTXGCRGEGGYLLNKHGERFMERYAPNAKDLAGRDVVARSIMIEIREGRGCDGPWGPHAKLKLDHLGKEVLESRLPGILELSRTFAHVDPVKEPIPVIPTCHYMMGGIPTKVTGQALTVNEKGEDVVVPGLFAVGEIACVSVHGANRLGGNSLLDLVVFGRAAGLHLQESIAEQGALRDASESDVEASLDRLNRWNNNRNGEDPVAIRKALQECMQHNFSVFREGDAMAKGLEQLKVIRERLKNARLDDTSSEFNTQRVECLELDNLMETAYATAVSANFRTESRGAHSRFDFPDRDDENWLCHSLYLPESESMTRRSVNMEPKLRPAFPPKIRTY

SEQ ID NO: 138389 - DNA, 1809 bp, Escherichia coli O157:H7 EDL933; identical to SEQ ID NO: 33105
  CDS (1)..(1809): transl_table=11

SEQ ID NO: 138390 - protein, 602 aa, Escherichia coli O157:H7 EDL933; identical to SEQ ID NO: 33106

SEQ ID NO: 138391 - DNA, 1701 bp, Sulfolobus solfataricus P2
  CDS (1)..(1701): transl_table=11
atggaaaagatcgaatacgacgctgttgtaattggaggaggactagcaggattaatgagtgcacatgagatagcctctgctggttttaaagttgctgttatttcaaaggtatttcccacgagatcgcattctgcagcagcagaaggtggaatagcagcctatattcctgggaattcagatccaaatgataacccagattatatgacatacgatacagttaaaggcggagattatttagttgatcaagatgcagcggaattactttccaacaaatctggagaaatagtaatgttactagaaagatggggtgcactattcaataggcaaccggatggcagagttgcagtcaggtattttggaggacagacctatccgagaactagatttgttggagacaaaactggaatggcactgttacatacacttttcgaaaggacttctggtttaaatgtagatttttacaacgagtggttctctttagacttagttactgatgataagaaggtagctggtatagtggcaatgcaaatgaagacattaactccattcttctttaagactaaggctgtcgtattagcgactggaggaatgggaatgttatatagacatacaacaaatagctacatcaatactggcgatggctttggcatagcattaagagctggagctgcattaaaagatccagaatttgtacaatttcatccaacagcactctacccatcagacgttttaattagtgaggctgctagaggtgaaggagctatattgaaaaatataaaaggagaaagatttatgacgagatatgctcctaaaaagctagatctagcacctagggatatagtttcaagagcaataattactgaaataaaagagggaagaggattccctggtgggtatgttggtctggatttgactcatttaggtgaagaatacatcaaagagagattagctttagctgtggaagcggcaaaaagctttgcaggtgttgatgcgtttactgaacctattccagtaagacctgctcaacattattatatgggaggaatagacgtggatatagagggtaggaaccctgatattgtggggctattctctgcaggtgaagcagcttgtgtatcagtacatggtgctaatagattaggttctaattcacttctggatactttagtattcggtcaagttacgggtagggctgtggttcaatttctcaagtctaattcaagtaatcccacatcaaattatgagaaagaagctgagaaagttgttgatgatgcttataagttagtaaaaagtgagagtggcgtgcattttggtcaaatactagaaaaactaagagacacgatgtgggattatgtgggaatatatagagatgagggtggactacttaatgcgatgtctgagataaacaaattaagaggtatgattagcaatatgtatgtgacagataagagtaaagtctataacacagaattctttaacgccctagaattgaggaatatgttagatttagcattcgtaatagctaaatcagctttagaaagaaaagagtcaagaggagcgcattatagaacggattatccggatagggatgataataattggttaaaacacacaattgcgtatttaaggggtaatacggttgaggttacattcaaaccagttaagataaccagatggaaaccagaacctagggtgtattaa

SEQ ID NO: 138392 - protein, 566 aa, Sulfolobus solfataricus P2
MEKIEYDAVVIGGGLAGLMSAHEIASAGFKVAVISKVFPTRSHSAAAEGGIAAYIPGNSDPNDNPDYMTYDTVKGGDYLVDQDAAELLSNKSGEIVMLLERWGALFNRQPDGRVAVRYFGGQTYPRTRFVGDKTGMALLHTLFERTSGLNVDFYNEWFSLDLVTDDKKVAGIVAMQMKTLTPFFFKTKAVVLATGGMGMLYRHTTNSYINTGDGFGIALRAGAALKDPEFVQFHPTALYPSDVLISEAARGEGAILKNIKGERFMTRYAPKKLDLAPRDIVSRAIITEIKEGRGFPGGYVGLDLTHLGEEYIKERLALAVEAAKSFAGVDAFTEPIPVRPAQHYYMGGIDVDIEGRNPDIVGLFSAGEAACVSVHGANRLGSNSLLDTLVFGQVTGRAVVQFLKSNSSNPTSNYEKEAEKVVDDAYKLVKSESGVHFGQILEKLRDTMWDYVGIYRDEGGLLNAMSEINKLRGMISNMYVTDKSKVYNTEFFNALELRNMLDLAFVIAKSALERKESRGAHYRTDYPDRDDNNWLKHTIAYLRGNTVEVTFKPVKITRWKPEPRVY

SEQ ID NO: 138393 - DNA, 1842 bp, Agrobacterium tumefaciens str. C58; identical to SEQ ID NO: 33113
  CDS (1)..(1842): transl_table=11

SEQ ID NO: 138394 - protein, 613 aa, Agrobacterium tumefaciens str. C58; identical to SEQ ID NO: 33114

SEQ ID NO: 138395 - DNA, 1779 bp, Ralstonia solanacearum GMI1000
  CDS (1)..(1779): transl_table=11
atggtcgcagtcaagactgggctgccgcgccgcaagttcgacgtcgtgatcgtcggcgcgggcggcgcgggcatgcgcgcatcgctgcagctcgctgaagccggcctttccgtggccgtgctgtccaaggttttccccacccgctcccacaccgtggcggcgcaaggtggcatcggtgcttcgctgggcaacatgagcgaagacaactggcactatcacttctacgacaccatcaagggttccgactggctcggcgaccaggatgcgatcgagttcatgtgccgccaggcgccgcaagtggtctatgaactggagcacttcggcatgccgttcgaccgcaatgccgacggcaccatctaccagcgcccgttcggcggccacacgtccaactacggcgagaagccggtgcagcgtgcctgcgccgccgccgaccggaccggccacgcgctgctgcacacgctgtaccagcgcaacgtgcgtgccaagacccacttcttcgtcgaatggatggcgctggacctgatccgcgaccaggacggcgacgtgctgggcgtgaccgcgctggaaatggaaaccggcgaggtctacatcctcgaagccaagaccacgctgttcgccacgggcggtgccggccgtatctacgcagcttccaccaacgccttcatcaacacgggtgacggcctgggcatggcggcgcgcgccggcatcccgctggaagacatggagttctggcagttccacccgaccggcgtggccggcgcgggcgtgctgatcaccgaaggcgtgcgcggcgagggcggtatcctgcgtaacaaggacggcgagcgcttcatggagcgctatgccccgacgctgaaggatctggcgccgcgtgacttcgtgtcgcgctcgatggaccaggaaatcaaggaaggccgcggctgcggcccgaacggcgactacgtgctgctcgacctgacccacgtcggtgccgagaccatcatgaagcgcctgccgtccatccgcgagatcggcctgaagttcgccaacgtggacgccatcaaggaaccgatcccggtggtgccgaccatccactaccagatgggcggtatcccgaccaactatcacggtcaggtcgtggtgccgaagaacggcagcccgaacgaagtcgtgaacggcttctacgcgatcggcgaatgctcgtgcgtgtcggtgcacggcgccaaccgcctgggcacgaactcgctgctcgacctggtggtgttcggccgctcggccggtaaccacatcgtcgcgcagaacctgaagaaccgcgaacacaagccgctgccggccgatgccgccgaccgcgcgctggcccgcctggccaagctggacagctccagctcgggcgagtacgcgcaggacgtcgccaacgatatccgccgcaacatgcaggcgcatgccggcgtgttccgcacgcagaagctgatggacgaaggcgtcgagcgcatcatggaagtgaccgagcgcgccgccaacatccacctgaaggacaagtcgaaggtgttcaacaccgcgcgcgtcgaagcgctggaagtggccaacctggtggaagtcgccaaggcgacgatggtgtcggccgccgcccgcagggaatcgcgcggcgcacacgcccacagcgatttcccgaaccgtgacgacgacaactggctcaagcacacgctgttctacagcgaaggcaaccgcctcgagtacaagcccgtgcagatgaagccgctgtcggtggaaagcgtgccgcccaaggcgcggaccttctaa

SEQ ID NO: 138396 - protein, 592 aa, Ralstonia solanacearum GMI1000
MVAVKTGLPRRKFDVVIVGAGGAGMRASLQLAEAGLSVAVLSKVFPTRSHTVAAQGGIGASLGNMSEDNWHYHFYDTIKGSDWLGDQDAIEFMCRQAPQVVYELEHFGMPFDRNADGTIYQRPFGGHTSNYGEKPVQRACAAADRTGHALLHTLYQRNVRAKTHFFVEWMALDLIRDQDGDVLGVTALEMETGEVYILEAKTTLFATGGAGRIYAASTNAFINTGDGLGMAARAGIPLEDMEFWQFHPTGVAGAGVLITEGVRGEGGILRNKDGERFMERYAPTLKDLAPRDFVSRSMDQEIKEGRGCGPNGDYVLLDLTHVGAETIMKRLPSIREIGLKFANVDAIKEPIPVVPTIHYQMGGIPTNYHGQVVVPKNGSPNEVVNGFYAIGECSCVSVHGANRLGTNSLLDLVVFGRSAGNHIVAQNLKNREHKPLPADAADRALARLAKLDSSSSGEYAQDVANDIRRNMQAHAGVFRTQKLMDEGVERIMEVTERAANIHLKDKSKVFNTARVEALEVANLVEVAKATMVSAAARRESRGAHAHSDFPNRDDDNWLKHTLFYSEGNRLEYKPVQMKPLSVESVPPKARTF

SEQ ID NO: 138397 - DNA, 1746 bp, Pyrobaculum aerophilum str. IM2
  CDS (1)..(1746): transl_table=11
atggatattttgaaatacgacctcgtaataataggttccggcatagcgggtttacgcgcggccacagcggcagcttgggctagtggcgggaagatatcaattgcaatattgtctaaaattcaggcaatgcgtagccacagcctttcggcagagggggggatgtctgcggttttgtacccagacaagacgaaggactcactagacttacacgcatacgacactgtaaagggcagcgactttcttgcagatcaagacgcggtagagatcctagttgagtacgcgccgaaagaagtgcgttatctagaaagaatcggcgttccctggactagggagccagacggcagaatttcgcagaggccttttggaggcatgtcaatcccgaggactacctttgcagctgacaagacgggcttctttataatgtctactctattttcagagacgagaaggtttgacaacattcacgtttatcacgaacattttgtgactaagtttattatagaggatggggtatttaaaggcgtcactgcctacgatttaaaaaggggggagttcaagcttttctatgccaaggccggcataatagcgacaggaggcgccgggaggctgtaccgcttcacaacaactgcgcattctactactggcgagactttaggatatgccttaagggccgggctcgccattaaagacatggagtttgtgcagtggcacccaaccgcgctagttcccagcggaatactagtaagcgaggccgccaggggtgaggggggctacctcataaataaagagggagagcggttcatgaagagatatgcgccgcagagaatggagctagccccgagagacattgtatctagggccattttaactgaatgcatggaggggagggggtttcagcacgagtctggcatgtgttacgtggggttagatctaagacatttaggcgaggagaaaataaacaagagaattccgtttattcgcgagctggcccataaatatgccggcattgacgtgctctctgagccaataccagtgaggcctgctgtccattacacaatgggaggcatccacacggacacatggggccgcgtgttgacagcagatgggaggtgggtcagaggtctgtgggcagccggcgaggcggctgccgtaagcgtacacggagcaaataggcttggctctaactccttaagcgagtgctctgtatggggcaggctgacgggagagcaggcggctaagtacatactcgagacgcctccgctttcctcgcccgacggtaaattaatagaggcggcagaaaaggaagaaagcagagtttttgacagactgttacacaaagaggtcaactcaatttcgccatatgaggtaaagagaaaacttaatgatataatggaagagcactttgggccctttagacacggatcctcaatggcagaaggactagccaagcttaaaaaattaagagaaatcacttcgttccgcgtcgaggatagtagcagagtgtataaccagaatttaaaagacgcattggaaatagacggcatgctggacttagccttagtattgggcattggggcttacgctaggacggagtcgcgaggagctcattacagacttgattttccaaagagagatgatgtaaattggctaaagcatacagttgcatatctacacgggggcgagataaaattaacttataccccggttactataacaaaatggcaaccagaggaaaggaagtattga

SEQ ID NO: 138398 - protein, 581 aa, Pyrobaculum aerophilum str. IM2
MDILKYDLVIIGSGIAGLRAATAAAWASGGKISIAILSKIQAMRSHSLSAEGGMSAVLYPDKTKDSLDLHAYDTVKGSDFLADQDAVEILVEYAPKEVRYLERIGVPWTREPDGRISQRPFGGMSIPRTTFAADKTGFFIMSTLFSETRRFDNIHVYHEHFVTKFIIEDGVFKGVTAYDLKRGEFKLFYAKAGIIATGGAGRLYRFTTTAHSTTGETLGYALRAGLAIKDMEFVQWHPTALVPSGILVSEAARGEGGYLINKEGERFMKRYAPQRMELAPRDIVSRAILTECMEGRGFQHESGMCYVGLDLRHLGEEKINKRIPFIRELAHKYAGIDVLSEPIPVRPAVHYTMGGIHTDTWGRVLTADGRWVRGLWAAGEAAAVSVHGANRLGSNSLSECSVWGRLTGEQAAKYILETPPLSSPDGKLIEAAEKEESRVFDRLLHKEVNSISPYEVKRKLNDIMEEHFGPFRHGSSMAEGLAKLKKLREITSFRVEDSSRVYNQNLKDALEIDGMLDLALVLGIGAYARTESRGAHYRLDFPKRDDVNWLKHTVAYLHGGEIKLTYTPVTITKWQPEERKY

SEQ ID NO: 138399 - DNA, 1956 bp, Arabidopsis thaliana; identical to SEQ ID NO: 33115
  CDS (1)..(1956)

SEQ ID NO: 138400 - protein, 651 aa, Arabidopsis thaliana; identical to SEQ ID NO: 33116

SEQ ID NO: 138401 - DNA, 2022 bp, Corynebacterium glutamicum ATCC 13032
  CDS (1)..(2022): transl_table=11
atgagcactcactctgaaaccacccgcccagagttcatccacccagtctcagtcctcccagaggtctcagctggtacggtccttgacgctgcagagccagcaggcgttcccaccaaagatatgtgggaataccaaaaagaccacatgaacctggtctccccactgaaccgacgcaagttccgtgtcctcgtcgttggcaccggcctgtccggtggtgctgcagcagcagccctcggcgaactcggatacgacgtcaaggcgttcacctaccacgacgcacctcgccgtgcgcactccattgctgcacagggtggcgttaactccgcccgcggcaagaaggtagacaacgacggcgcataccgccacgtcaaggacaccgtcaagggcggcgactaccgtggtcgcgagtccgactgctggcgtctcgccgtcgagtccgtccgcgtcatcgaccacatgaacgccatcggtgcaccattcgcccgcgaatacggtggcgccttggcaacccgttccttcggtggtgtgcaggtctcccgtacctactacacccgtggacaaaccggacagcagctgcagctctccaccgcatccgcactacagcgccagatccacctcggctccgtagaaatcttcacccataacgaaatggttgacgtcattgtcaccgaacgtaacggtgaaaagcgctgcgaaggcctgatcatgcgcaacctgatcaccggcgagctcaccgcacacaccggccatgccgttatcctggcaaccggtggctacggcaacgtgtaccacatgtccaccctggccaagaactccaacgcctcggccatcatgcgtgcatacgaagccggcgcatacttcgcgtccccatcgttcatccagttccacccaaccggcctgcctgtgaactccacctggcagtccaagaccattctgatgtccgagtcgctgcgtaacgacggccgcatctggtcccctaaggaaccgaacgataaccgcgatccaaacaccatccctgaggatgagcgcgactacttcctggagcgccgctacccagcattcggtaacctcgtcccacgtgacgttgcttcccgtgcgatctcccagcagatcaatgctggtctcggtgttggacctctgaacaacgctgcatacctggacttccgcgacgccaccgagcgcctcggacaggacaccatccgcgagcgttactccaacctcttcaccatgtacgaagaggcaattggcgaggacccatactccagcccaatgcgtattgcaccgacctgccacttcaccatgggtggcctctggactgacttcaacgaaatgacgtcactcccaggtctgttctgcgcaggcgaagcatcctggacctaccacggtgcaaaccgtctgggcgcaaactccctgctctccgcttccgtcgatggctggttcaccctgccattcaccatccctaactacctcggcccattgcttggctccgagcgtctgtcagaggatgcaccagaagcacaggcagcgattgcgcgtgcacaggctcgcattgaccgcctcatgggcaaccgcccagagtgggtcggtgacaacgttcacggacctgagtactaccaccgccagcttggcgatatcctgtacttctcctgtggcgtttcccgaaacgtagaagacctccaggatggcatcaacaagatccgtgccctccgcgatgacttctggaagaacatgcgcatcaccggcagcaccgatgagatgaaccaggttctcgaatacgcagcacgcgtagccgactacatcgacctcggcgaactcatgtgtgtcgacgccctcgaccgcgacgagtcctgtggcgctcacttccgcgacgaccacctctccgaagatggcgaagcagaacgtgacgacgaaaactggtgcttcgtctccgcatgggaaccaggcgagaacggaaccttcgtccgccacgcagaaccactgttcttcgaatccgtcccactgcagacaaggaactacaagtaa

SEQ ID NO: 138402 - protein, 673 aa, Corynebacterium glutamicum ATCC 13032
MSTHSETTRPEFIHPVSVLPEVSAGTVLDAAEPAGVPTKDMWEYQKDHMNLVSPLNRRKFRVLVVGTGLSGGAAAAALGELGYDVKAFTYHDAPRRAHSIAAQGGVNSARGKKVDNDGAYRHVKDTVKGGDYRGRESDCWRLAVESVRVIDHMNAIGAPFAREYGGALATRSFGGVQVSRTYYTRGQTGQQLQLSTASALQRQIHLGSVEIFTHNEMVDVIVTERNGEKRCEGLIMRNLITGELTAHTGHAVILATGGYGNVYHMSTLAKNSNASAIMRAYEAGAYFASPSFIQFHPTGLPVNSTWQSKTILMSESLRNDGRIWSPKEPNDNRDPNTIPEDERDYFLERRYPAFGNLVPRDVASRAISQQINAGLGVGPLNNAAYLDFRDATERLGQDTIRERYSNLFTMYEEAIGEDPYSSPMRIAPTCHFTMGGLWTDFNEMTSLPGLFCAGEASWTYHGANRLGANSLLSASVDGWFTLPFTIPNYLGPLLGSERLSEDAPEAQAAIARAQARIDRLMGNRPEWVGDNVHGPEYYHRQLGDILYFSCGVSRNVEDLQDGINKIRALRDDFWKNMRITGSTDEMNQVLEYAARVADYIDLGELMCVDALDRDESCGAHFRDDHLSEDGEAERDDENWCFVSAWEPGENGTFVRHAEPLFFESVPLQTRNYK

SEQ ID NO: 138403 - DNA, 1671 bp, Methanopyrus kandleri AV19; identical to SEQ ID NO: 33117
  CDS (1)..(1671): transl_table=11

SEQ ID NO: 138404 - protein, 556 aa, Methanopyrus kandleri AV19; identical to SEQ ID NO: 33118

SEQ ID NO: 138405 - DNA, 1950 bp, Streptomyces coelicolor A3(2)
  CDS (1)..(1950): transl_table=11
atgacaacctacgccgactacacgaccggggagccggtcgccgacaccaaggcccccgccggacccgtcaacgagcgctgggacacgcgccgtttcgaggcgaagctggtcaaccccgccaaccggcgcggcaagaccgtcatcgtcgtcggcaccggcctcgcgggcggctccgcgggcgcgaccctggccgaacagggctaccacgtcgtccagttctgctatcaggactccccgcgccgggcccactccatcgccgcgcagggcggcatcaacgccgcgaagaactaccgcaacgacggcgactcgatccaccgcctgttctacgacaccgtcaagggcggcgacttccgctcccgcgagtccaacgtccaccggctggcgcagatctcggtcgagatcatcgaccagtgcgtggcgcagggcgtgccgttcgcccgtgagtacggcggtctgctcgacacccgctccttcggcggcgtgcaggtctcccgcaccttctacgcccgcggccagacagggcagcagctgctgctcggcgcctaccaggcgctcagccggcagatcgcggccggcaccatcgagatgcacgcccgcaccgagatgctcgacctgatcgtcgtcgacggccgggcccgcggcatcgtcgcccgggacctggtcaccgggaagatcgacacctactacgcggacgccgtcgtcctggccagcggcggctacggcaacgtcttctacctctccaccaacgccatgaactccaacgcgaccgccgtctggcgggcgcaccggcgcggtgcctacttcgccaacccctgcttcacgcagatccacccgacctgcattccgcgcaccggcgaccaccagtccaagctgacgctgatgagcgagtcgctgcgcaacgacggccggatctgggtgcccaaggccaagggcgacgaccggcccgcgaacaagatccccgaggacgagcgcgactactacctggagcgcatctacccgtccttcggcaacctggtcccgcgcgacatcgcctcccgcgccgcgaagaacgtctgcgacgagggcaggggagtgggtcccggcggccagggcgtgtacctggacttcgccgacgcgatcaagcgcatgggccgcaaggcggtcgaggccaagtacggcaacctcttcgacatgtaccagcggatcaccgacgaggacccgtaccgggtgcccatgcggatctacccggcggtgcactacacgatgggcggactgtgggtcgactacgacctccagaccaccgtccccggcctgttcgcgatcggcgaggccaacttctccgaccacggcgccaaccggctcggcgcctccgcgctgatgcagggcctggccgacggctacttcgtactgccggccaccatcaacgactacctcgcccgcaacccgctgggggacgacgtcgacgacgaccacccggtggtccaggaggtgctggccgagaccgaggaccggctgaacctgctgctgtccgtggacggcgaccgcaccccggactccttccaccgggaactgggcgagctgatgtgggagttctgcggcatggcccgcaccgactccggcctgcgcaaggccctggagcgcatcccgcagatccgcgaggagttctggcggcgcatcaaggtccccggcaccggcgaggagttcaaccagtcgctggagaaggccaaccgcatcgtcgactacctggaactcgccgagctgatgtgcctcgacgcgctgcaccgcgccgagtcctgcggcggccacttccgcgaggagtcccagaccccggacggcgaggcggcccgcagggacgaggagttcggctacgccgcggcctgggagttcaccggcaccggtgacgcccccaccctgcacaaggaagacctggtcttcgagtacgtccaccccacccagcggagctacgcatga

SEQ ID NO: 138406 - protein, 649 aa, Streptomyces coelicolor A3(2)
MTTYADYTTGEPVADTKAPAGPVNERWDTRRFEAKLVNPANRRGKTVIVVGTGLAGGSAGATLAEQGYHVVQFCYQDSPRRAHSIAAQGGINAAKNYRNDGDSIHRLFYDTVKGGDFRSRESNVHRLAQISVEIIDQCVAQGVPFAREYGGLLDTRSFGGVQVSRTFYARGQTGQQLLLGAYQALSRQIAAGTIEMHARTEMLDLIVVDGRARGIVARDLVTGKIDTYYADAVVLASGGYGNVFYLSTNAMNSNATAVWRAHRRGAYFANPCFTQIHPTCIPRTGDHQSKLTLMSESLRNDGRIWVPKAKGDDRPANKIPEDERDYYLERIYPSFGNLVPRDIASRAAKNVCDEGRGVGPGGQGVYLDFADAIKRMGRKAVEAKYGNLFDMYQRITDEDPYRVPMRIYPAVHYTMGGLWVDYDLQTTVPGLFAIGEANFSDHGANRLGASALMQGLADGYFVLPATINDYLARNPLGDDVDDDHPVVQEVLAETEDRLNLLLSVDGDRTPDSFHRELGELMWEFCGMARTDSGLRKALERIPQIREEFWRRIKVPGTGEEFNQSLEKANRIVDYLELAELMCLDALHRAESCGGHFREESQTPDGEAARRDEEFGYAAAWEFTGTGDAPTLHKEDLVFEYVHPTQRSYA

SEQ ID NO: 138407 - DNA, 1755 bp, Streptomyces coelicolor A3(2); identical to SEQ ID NO: 33119
  CDS (1)..(1755): transl_table=11

SEQ ID NO: 138408 - protein, 584 aa, Streptomyces coelicolor A3(2); identical to SEQ ID NO: 33120

SEQ ID NO: 138409 - DNA, 1962 bp, Streptomyces coelicolor A3(2); identical to SEQ ID NO: 33121
  CDS (1)..(1962): transl_table=11

SEQ ID NO: 138410 - protein, 653 aa, Streptomyces coelicolor A3(2); identical to SEQ ID NO: 33122

SEQ ID NO: 138411 - DNA, 1731 bp, Streptomyces coelicolor A3(2); identical to SEQ ID NO: 33123
  CDS (1)..(1731): transl_table=11

SEQ ID NO: 138412 - protein, 576 aa, Streptomyces coelicolor A3(2); identical to SEQ ID NO: 33124

SEQ ID NO: 138413 - DNA, 1956 bp, Drosophila melanogaster
  CDS (1)..(1956)
atgaatcgcctgtttctcaaaagggcgggacagcatgtaaccaggagccttcttggtccaaatgggagtcgtctgcttcaagtgtcctgcgttcgagatgccagttgcaaagatgagtactccttgatagaccacaagttcgatgcgattgtcattggtgccggtggagctggaatgcgggctggatttgggctggcggagaagggtttccaaacggccattatatcaaagctatttcccacccgatctcacacggtggctgcccagggtggtgttaatgccgccctctcaaatatggacaaggacgactggaagtaccacttctacgacacggtgaagggctccgattggctgggtgatcagaacgcgatccattacatgtgtcgggaggcggagagggcggtctgcgaactggacatgtacgggatgcccttctcgcgaaagcccgatggcaagatctaccagcgaccttttggaggtcagaccttggactacggaaagggcggggtggccagaagggcgtgtgcatgtgcagatcgcacgggtcacgcccttatccacacactgtacggacaaacgctgaagcactccgattcttgccactattttgtggactacttcgttctggatctgatcatgtcgcagggtgcatgtgtgggatgtttggcttggaaactggatgatggcaccttccatcggtttttggccaaaaatacggttgttgccgccggcggttgtggtcgggtgtacttctccacgaccgccggacacacatgtaccggcgatggcaatgcgtgggtgtctagacaggagctgccgctcatggatatggaatttgtgcagtttcatcccactggcatctacggagccggatgccttatcaccgagggagttaggggcgaaggcggtttcttcttgaactgcaagggagaacgtttcatggaacgctatgctccaaaggccaaggatctggcgtccagagatgtggtggcgcgggccatgaccatggaggttcttgctggcaatggttgtggtccgctcaaggatcatgtgcaccttcagctccaccatatcgacgccaagatcatcaagcaacgattgccgggcattatggtcaccgcccggatttttgccaaagtggatgtgaccaaggaaccagtaccagtgctgccaactgtgcactacaacatgggcggcataccaacggattacaagggtcgtgtggtcaccatcgatgagaatggcaaggaacaggttgtcaagggactgtactcctgcggggaaacttcctgcgcctcagtacacggagcaaatcgattgggtgccaactccctgctggatctgatcatctttggccgcgtctgtgctctggacattgccgcaaacaactgtccgggggataagccgccccaggtggaggacaaagccacggagaagtcgctggataattttaagcgcctgcgctgcgccgacggatgcattcccactgcggtgttgagaatggaacttcagcggaccatgaccaaacatgcggctgttttccgggagggaaaactgctcaaggagggtctgctcaaagtggccgagttatgtgaacagttcaaggacatcaagacaaccgatcgtacgatggtgtggaactccaacctagttgagacgctagagctgcagaatatgctagccaatgcggtgcacatcattacagccatggaaaatcgcaaggagtcgaggggctcccatgctcgcgaggatttcaagacgcgcgtggatgagctggactatggagcaccactggccggacagaaaaagaaaccattcgaggagcattggcgcaagcacaccatgacctttgcactgggtaacaaaggatgtgcatcgatcaaatatcgcccggttgtggacaccaccttggacagctccgttgcacccattccacctgctccgcgcacctactga

SEQ ID NO: 138414 - protein, 651 aa, Drosophila melanogaster
MNRLFLKRAGQHVTRSLLGPNGSRLLQVSCVRDASCKDEYSLIDHKFDAIVIGAGGAGMRAGFGLAEKGFQTAIISKLFPTRSHTVAAQGGVNAALSNMDKDDWKYHFYDTVKGSDWLGDQNAIHYMCREAERAVCELDMYGMPFSRKPDGKIYQRPFGGQTLDYGKGGVARRACACADRTGHALIHTLYGQTLKHSDSCHYFVDYFVLDLIMSQGACVGCLAWKLDDGTFHRFLAKNTVVAAGGCGRVYFSTTAGHTCTGDGNAWVSRQELPLMDMEFVQFHPTGIYGAGCLITEGVRGEGGFFLNCKGERFMERYAPKAKDLASRDVVARAMTMEVLAGNGCGPLKDHVHLQLHHIDAKIIKQRLPGIMVTARIFAKVDVTKEPVPVLPTVHYNMGGIPTDYKGRVVTIDENGKEQVVKGLYSCGETSCASVHGANRLGANSLLDLIIFGRVCALDIAANNCPGDKPPQVEDKATEKSLDNFKRLRCADGCIPTAVLRMELQRTMTKHAAVFREGKLLKEGLLKVAELCEQFKDIKTTDRTMVWNSNLVETLELQNMLANAVHIITAMENRKESRGSHAREDFKTRVDELDYGAPLAGQKKKPFEEHWRKHTMTFALGNKGCASIKYRPVVDTTLDSSVAPIPPAPRTY

SEQ ID NO: 138415 - DNA, 1596 bp, Chlorobium tepidum TLS; identical to SEQ ID NO: 33125
  CDS (1)..(1596): transl_table=11

SEQ ID NO: 138416 - protein, 531 aa, Chlorobium tepidum TLS; identical to SEQ ID NO: 33126

SEQ ID NO: 138417 - DNA, 1638 bp, Yersinia pestis KIM; identical to SEQ ID NO: 33435
  CDS (1)..(1638): transl_table=11

SEQ ID NO: 138418 - protein, 545 aa, Yersinia pestis KIM
MKPTLLLHTSYDMQSSSEHISDVLIIGSGAAGLSLALRLAPHCKVTVLSKGPLNEGATFYAQGGIAAVFDETDSISSHVDDTLIAGAGLCDKEAVEFIASNARSCVQWLIDQGVLFDTETSANGEERYHLTREGGHSHRRILHTADATGKEVETTLVGKASNHPNISVKERCNAVDLITSNKIGLAGTKRVVGAYVWNRELEKVETFRAKAVVLATGGAAKVYQYTTNPDISSGDGIAMAWRAGCRVANLEFNQFHPTCLFHPQARNFLLTEALRGEGAYLKRPDGSRFMLDFDPRGELAPRDIVARAIDHEMKRLGADCMYLDISHKPTDFVMQHFPMIYEKLLSLGIDLTKEAIPIVPAAHYTCGGVMVDQHGRTDLDGLYAIGEVSYTGLHGANRMASNSLLECLVYGWSAAEDILTRLPTAKLAKHLPDWDESRVDNSDERVVIQHNWHELRLFMWDYVGIVRTTKRLERALRRINTLQQEIDEYYANFRISNNLLELRNLVQVAELIVRCAMERKESRGLHYTLDYPDQIENPQPTILHP

SEQ ID NO: 138419 - DNA, 1641 bp, Thermosynechococcus elongatus BP-1; identical to SEQ ID NO: 33127
  CDS (1)..(1641): transl_table=11

SEQ ID NO: 138420 - protein, 546 aa, Thermosynechococcus elongatus BP-1; identical to SEQ ID NO: 33128

SEQ ID NO: 138421 - DNA, 1632 bp, Bifidobacterium longum NCC2705
  CDS (1)..(1632): transl_table=11
atgagcaacactgaaatcgtcgtcgtgggcgcaggcgtcgccggactgtccgcggcactggccgtggccggcaccggacacgacgtgaccttggtaaccaaggccggactggtggaatcgaacacctatcatgcgcagggcggcatcgccgcggccatcttctccgacgacgacccgaagctgcacgccgccgacaccatggccgcgggccatggcctgtgcgacccgaaggccgtggacatcctcacccgtgagggtgcggagcgcgtccgcgagttcgccgcggccggcgtccacttcgaccgcgacgcgcagggacacatgctgcgcggcctggaagcggctcattcgcgcgcccgcgtggtgcatgccgggggagacgccaccggcaaagtgctcgaactggacgtctccgccatggtgcgcaagaacccgcgcatccacatcatcgagaacgccttcctcaaagacctcatcgtgcgggacggccacatcgccggcgtccgcctgctgatcgacgggcaggacaaggatctggccgccggccgggtgatcttggccaccggtggcgcaggccgtatgtacccgtacaccaccaatccgccggtctccactgcggacggtctcgccgccgcatggcgtgcgggcgcccaggtcgccgatctggagttctaccagttccatcccaccgccatggccgtgggcgagcacttcctcgtctccgaagccgtgcgcggcgaaggcgcggtgctgctggacgaacacggccaccggtatatgaaggacatcgatccgcgcgccgaactcgcaccgcgcgacgtcgtggcccgcgagaacttccgcgtgatgcagacgcaaggtggcaagcccgtgatgctcgacgtctcgccgatgacccgcgagaaccccgacctggccagcttcctggcccaccgattcccgaccatcgatgcctatacgcgttcgcttggcttcgactggagcaaggagctgatcccggtggcgcccgccgcgcactactacatgggaggcattcgcaccgatctggacgcccggacctccatccccggcctgtacgcggccggcgaatgcgctcgtaccggtgtcatgggctccaaccgccttgcctccaactcgctgctcgaaggacttgtctacggacgccgcgccggtcttgccgccgtcgcggacggtgacgacgcggtctgggcacccgaaccgttcctgaactccgccaccggtgccgtgttcgaccatgcgccgatcgcgctggccgctcctgccactacggctgctgctgacgataccgccgccgacaaggtctgggaccgtacccgcatccagaacaccatgtggcatggcgtcggcgtactgcgcgacgaggccggactgaaaaccgccatcgccgaactcggccaaggcctcgccgccgcaaacgcccaggctgatataaacgccgatggcgctgcaagcagcgttgaggctttggagaaccgcaacatgctcaccgtaggctatgtggccgccaccgccgcgctcgcccgcaccgagtcgagaggcgcccacgcccgcaccgactacagcgagccagtcgacaactgggcccactccgtcgcctacatcaaggactga

SEQ ID NO: 138422 - protein, 543 aa, Bifidobacterium longum NCC2705
MSNTEIVVVGAGVAGLSAALAVAGTGHDVTLVTKAGLVESNTYHAQGGIAAAIFSDDDPKLHAADTMAAGHGLCDPKAVDILTREGAERVREFAAAGVHFDRDAQGHMLRGLEAAHSRARVVHAGGDATGKVLELDVSAMVRKNPRIHIIENAFLKDLIVRDGHIAGVRLLIDGQDKDLAAGRVILATGGAGRMYPYTTNPPVSTADGLAAAWRAGAQVADLEFYQFHPTAMAVGEHFLVSEAVRGEGAVLLDEHGHRYMKDIDPRAELAPRDVVARENFRVMQTQGGKPVMLDVSPMTRENPDLASFLAHRFPTIDAYTRSLGFDWSKELIPVAPAAHYYMGGIRTDLDARTSIPGLYAAGECARTGVMGSNRLASNSLLEGLVYGRRAGLAAVADGDDAVWAPEPFLNSATGAVFDHAPIALAAPATTAAADDTAADKVWDRTRIQNTMWHGVGVLRDEAGLKTAIAELGQGLAAANAQADINADGAASSVEALENRNMLTVGYVAATAALARTESRGAHARTDYSEPVDNWAHSVAYIKD

SEQ ID NO: 138423 - DNA, 1599 bp, Leptospira interrogans serovar Lai str. 56601
  CDS (1)..(1599): transl_table=11
atgccccgtatcaaaacggactttttagtcctagggagcggaattacaggtctttttgcggccttaaaactcgctccctacggctccgtaatcataatcacaaaaaaatcggactatgaatccaacacaaactatgcacaaggtgggatcgcttccgtatttgcagaaggagataaactagaagatcacgtaagagatactctagaagcaggagcctggctttgtgatcctgcggcggttcaagttttagtagaagaagggcctcctctagtaaaagaacttttaaattacggagttccgttcaatttagaaccttccggtaaatttgatctttccagagaaggggggcacggtaaaaaccgaattgtacacgcacacgacagaaccggaagagaaatcgaaaaaactcttttaaatgtggtaaaacaaaatataaacattcaaatattagaatatcatactttagtagatttaattactccacatcatttaaaacaaaaaggtttaatctgttacggggcctacgtcctttccaaccatacgggagaagtatttcctattttagcaagagaaacaattcttgccaccggcggagcaggccaggtttattctcataccactaatcctaaaatcgctaccggagacggtgtagcttctgcatacagagcgggtgccctaattaaaaacatggaattctatcaatttcatcctactgcactttatcacaaagacggaaattcttttttgatctcagaagcggtgcgtggtaaaggagcaattttactcaatcgagacggcgaaacgtttatgaaacgttatcatcctatgggtgatctagctcctagggacgtggtagcaagagccatagattcagagatgaaaaaaagaggagaagctcatgtttggttggacgttacacaccttccttcttctcaaattagagaatcctttccttccatttatgaaaaatgtaaggaactgggtattgatatcaccacggatcggattccggtcgttccggttgcacattttttatgtggaggtgtagcttcagatttagaaggtagaactacgatttctaatctttcagcagctggagaaaccgcttgtactggtgttcacggtggcaaccgtcttgcttctaacagtcttttagaatgtctcgtattctctaatcggatcgctggaagaatttcaaaagaaagtccgaaatttaccaaagcacacgatgaaattccttcttggaacaaagagggtatggtcaacacagaagagtgggttttgatttctcacgatctaaacgaaattaaaaatacgatgagcaattacgttggaatcgtccgctctaatctcagattagaaagggcaaaacgtagaatggatctgatctacgacgaagtaaaggactactacaatcgaaccgtgatcacaaatccactgatcgaattgcgtaacttggtaattgtaggagaactgatcattcgttctgcacttgccagaaaagaaagtagaggtcttcatttttccacagattatcctgaaaatagaaatccttctagaatagatacggaaatcagaaacgaaaaagttcttctttga

SEQ ID NO: 138424 - protein, 532 aa, Leptospira interrogans serovar Lai str. 56601; identical to SEQ ID NO: 33214

SEQ ID NO: 138425 - DNA, 1614 bp, Shewanella oneidensis MR-1
  CDS (1)..(1614): transl_table=11
atgaaacaagtagttgaacaccaatctgacatattagtcataggtagcggtgccgcaggtctgacactagctttgcatcttgctgaaaaagcaaacgtaattctgctctcaaaaggcccactcagtgaagggtcaacatactacgcccagggcggtatcgcctctgtcttcgatgaaagtgacacgattgaatcccacgtggccgatacattagtcgctggtgcaggtttgtgtgataaagacgtggtgacttttaccgccgaaaatgccaagagtgcaatgcaatggcttatcgaatgtggggtcgccttcgataaagaagaagctgcaggcaataatcccaaggatgcaccttatcaccttacgcgtgaaggcggtcatagccatagacgcattctgcatgctgcggatgcgacaggcaaagaggtacaaactacgctacaagaacgtgccctcgaccacccaaatatccaagttttagagcgctataacgccatcgaccttatcaccactcgcaagttaaaccgccctggtaatcgcgtattaggtgcctatgtgtggaaccgtaatgctgagcaggtggaaacgatcaaggctaaatttgtcgccttagccactggtggtagctccaaggtttaccagtatacttccaatcccgatgtcgctagcggtgatggtattgcgatggcttggcgtgcaggttgccgcgttgccaatatggaattcaatcaatttcatccaacctgtctttaccatgccgatgcgcgcaatttcctgctgaccgaagcattgcgcggtgaaggtgcttatttacgtcgccctgatggcagccgctttatgccagactttgatgaacgcgctgagttagcacctcgagacatcgttgcccgcgccatcgactatgagatgaaacgtctcggtgcagattgtgtgtatctggatatcagccataaagatgctgactttgtgatgaagcatttcccgaccatttacagtcgctgcttagaactcggtatcgatattactaaggacgccattccagtggttcccgctgcccactatacctgcggtggcgtcatgactgacctacatggtcaaaccgatctcaatggtctttatgccattggtgaagttgcttatactggcttacatggcgccaatcgccttgccagtaactcactgcttgagtgtctcgtgtttgcccgtgcagcctctgaagatattgagagccaactacacaagatcccattacccgggctcattcctgcatgggatgagagtaaagtctccaactcggatgaagaagtggttattgcccacaattggcacgaactgcgcctgtttatgtgggactatgtgggtatcgttcgctcagataagcgtttggagcgcgcgctacgccgctgcttgatgttacagcaagaaatccaagagtattacagcaacttcagagtcagtaataatttgcttgaactgcgtaacttagtgcaagtggcggaactgattatccgctgcgcgatggatcgcaaagaaagccgtggcctgcactacaatattgatcatcctgaaaagttagattcaccgctaccgaccattttgcaacctgaaaaataa

SEQ ID NO: 138426 - protein, 537 aa, Shewanella oneidensis MR-1
MKQVVEHQSDILVIGSGAAGLTLALHLAEKANVILLSKGPLSEGSTYYAQGGIASVFDESDTIESHVADTLVAGAGLCDKDVVTFTAENAKSAMQWLIECGVAFDKEEAAGNNPKDAPYHLTREGGHSHRRILHAADATGKEVQTTLQERALDHPNIQVLERYNAIDLITTRKLNRPGNRVLGAYVWNRNAEQVETIKAKFVALATGGSSKVYQYTSNPDVASGDGIAMAWRAGCRVANMEFNQFHPTCLYHADARNFLLTEALRGEGAYLRRPDGSRFMPDFDERAELAPRDIVARAIDYEMKRLGADCVYLDISHKDADFVMKHFPTIYSRCLELGIDITKDAIPVVPAAHYTCGGVMTDLHGQTDLNGLYAIGEVAYTGLHGANRLASNSLLECLVFARAASEDIESQLHKIPLPGLIPAWDESKVSNSDEEVVIAHNWHELRLFMWDYVGIVRSDKRLERALRRCLMLQQEIQEYYSNFRVSNNLLELRNLVQVAELIIRCAMDRKESRGLHYNIDHPEKLDSPLPTILQPEK

SEQ ID NO: 138427 - DNA, 1605 bp, Pseudomonas putida KT2440; identical to SEQ ID NO: 33131
  CDS (1)..(1605): transl_table=11

SEQ ID NO: 138428 - protein, 534 aa, Pseudomonas putida KT2440; identical to SEQ ID NO: 33132

SEQ ID NO: 138429 - DNA, 1608 bp, Vibrio vulnificus CMCP6
  CDS (1)..(1608): transl_table=11
atgaacgcaaaccgtgaacatgaatgtgatgtgttagtggtgggcagcggagctgctggcttgtcgttggccttgcgcgtcgccaatcactgcaaagttatcgtgttaagtaaaggacctcgtagcgagggagcaacctactatgctcaaggtggtatcgctgcggtattcgatgaatcagacagtattgagtcacacgttcaagacactctgatcgccggagacggcatctgtgaagaagcaacggtgaagttcatcgctgaaaacgccaaagagtgtgtgcaatggttaattgatggcggtgtgccctttgatcgtgaagaggacgactctgatgacgaaccgcgttatcacttaacccgcgaaggcggccatagccatcgccgtattttgcacgcagccgatgccacaggcatggcgatgcaaacctcgctgcaagacaatgctcacaaccatcctaatattcatgttttagagcgtcataatgccctcgacttgatcaccgaagacaaaattggcggcgataaaaataaagtgatcggcgcgtacgtctggaaccgaaatcaagagcatgtggaaaccgttaaggcgaagtttgtcgtgctcgcgaccggtggcgcatcaaaagtttatcagtacacctccaacccagatgtttcttctggtgatggtattgcgattgcttggcgcgcaggatgtcgcgtggccaatatggaatttaaccaattccacccaacctgtttataccacccagaagctcgcaacttcctcctgacagaagcattacgtggtgaaggcgcctatttacgtcgtccggatggttcacgcttcatgcccgattttgacccgcgtgaagagctggctcctcgtgatgtcgtggcacgagcaattgacttcgaaatgaaacgtcttggcgctgactgcatgtaccttgatatcagccacaaacccgctgagttcattaccaaacacttcccaatgatccactcacgtctgatggatttgggcattgatatgaccaaagagccgatccccatcgttccggccgcacattacacctgtggcggtgtgatggtcgataccaatgggcaaacagatttgcacaatctctatgccatcggcgaagtgagctacactggcctacacggagcaaaccgtatggcttcaaattccttgttggagtgtgtggtttatgcatgggcggcagcaaaagacattttgaaaaaacacaaacaagtcgacttagcgtccagcttaccaagctgggacgaaagccaagtgacctgcagtgatgaagaagtgatcatccaacacaactggcatgagctgcgactgtttatgtgggattacatgggtattgtacgcactgacaagcgccttgagcgtgcactgcgtcgcattcaaatgttgcaacaagagacgcatgaatactacagtaacttccgcgtatccaataacttattggagctgcgtaacttactgcaagtcgcagagctgatggttcgttgtgcgatgcaaaggaaagagagccgcggtttacactacacactcgattaccctgagcaacttgaaaacagtggcccgacgattttgcgcccagaagagtaa

SEQ ID NO: 138430 - protein, 535 aa, Vibrio vulnificus CMCP6
MNANREHECDVLVVGSGAAGLSLALRVANHCKVIVLSKGPRSEGATYYAQGGIAAVFDESDSIESHVQDTLIAGDGICEEATVKFIAENAKECVQWLIDGGVPFDREEDDSDDEPRYHLTREGGHSHRRILHAADATGMAMQTSLQDNAHNHPNIHVLERHNALDLITEDKIGGDKNKVIGAYVWNRNQEHVETVKAKFVVLATGGASKVYQYTSNPDVSSGDGIAIAWRAGCRVANMEFNQFHPTCLYHPEARNFLLTEALRGEGAYLRRPDGSRFMPDFDPREELAPRDVVARAIDFEMKRLGADCMYLDISHKPAEFITKHFPMIHSRLMDLGIDMTKEPIPIVPAAHYTCGGVMVDTNGQTDLHNLYAIGEVSYTGLHGANRMASNSLLECVVYAWAAAKDILKKHKQVDLASSLPSWDESQVTCSDEEVIIQHNWHELRLFMWDYMGIVRTDKRLERALRRIQMLQQETHEYYSNFRVSNNLLELRNLLQVAELMVRCAMQRKESRGLHYTLDYPEQLENSGPTILRPEE

SEQ ID NO: 138431 - DNA, 1617 bp, Pseudomonas syringae pv. tomato str. DC3000; identical to SEQ ID NO: 33139
  CDS (1)..(1617): transl_table=11

SEQ ID NO: 138432 - protein, 538 aa, Pseudomonas syringae pv. tomato str. DC3000; identical to SEQ ID NO: 33140

SEQ ID NO: 138433 - DNA, 1623 bp, Vibrio parahaemolyticus RIMD 2210633; identical to SEQ ID NO: 33141
  CDS (1)..(1623): transl_table=11

SEQ ID NO: 138434 - protein, 540 aa, Vibrio parahaemolyticus RIMD 2210633; identical to SEQ ID NO: 33142

SEQ ID NO: 138435 - DNA, 1572 bp, Bacteroides thetaiotaomicron VPI-5482; identical to SEQ ID NO: 33143
  CDS (1)..(1572): transl_table=11

SEQ ID NO: 138436 - protein, 523 aa, Bacteroides thetaiotaomicron VPI-5482; identical to SEQ ID NO: 33144

SEQ ID NO: 138437 - DNA, 1611 bp, Coxiella burnetii RSA 493
  CDS (1)..(1611): transl_table=11
atgcccacctatgatgtcctggttatcggcagcggcgcggcagggctgggcctggctttgagccttgctagcgaaatgcgcgtcgctgttttaagcaaagatgatcttaccgccggctcttctccgcatgcgcaggggggaatcgcggcggtgatgaacgcggcagatgacagtgtggaattgcacgttcaggataccttaaacgcgggcggcgggctttgcgatcctgaggcggttagagcaacggtgacgcaggccaaatccgctgtcgaatggctggttcaacaaggcgttcaatttacgacggatagtaaaaataattatcacctcactcaagaaggcggccatagtcggcgacggatcttgcatgctgctgataaaactggcgctgttattgtcaagacactcgccgaacaagtgctctctcatcctaacatcgattgttttacggatcatattgccatcgatttgttgatcgaaaataacgtctgtaagggcgcagaggtttatgacggcgagcaacagcgttctttacgattccatgccacccacacggttctcgccactggcggcgccagttttgcctatctccacaccagtaatcctaatcgcacgagcggcgatggcattgcaatggcctggcgtgccggctgtcgggtagcaaatttggaatttaatcaattccacccgacttgcctttatcatccgctggcgaatcattatttaattaccgaggttgttcgcggtgaaggcggctatttgctgttaccggatggaaagcgttttatgcccaattacgatgatcgagcggagatggcccctcgagacattgtcgctcgagcgattgatatggagttaaagaaaaataattgggatcacgtttatttggatattagtcatcgcccggctgattttatcaaaaaagcttttccgacgatttatgcgacttgtttgaatttcggttttgacatgactgaaggaccgttaccggttgtgccagcggctcattatacgtgcggtggagtgatgaccgatttacaaggtcaaacggatatggctcgcttatatgcgattggcgaagtggcttatacggggctgcacggtgcgaaccggatggcgagtaattcattattagaatgcttggttttcgccgcaagctgcgcacgagcgattaaacgctcagcggcccccatcccgcgacttgccgaggaagccgcccatccatttttttctctggactccgcgggtaagccgcgagaagacagcagaacggtggatgacttcatacatcaagttcgtaaaattatgtgggatcatgtcggcattgttcgcagcgatatccggctaattaaagcgaaaaatgatttacaaaagctccttcagcaaataaatgtcgttttccctctccaaatcctgagtaaatcccttattgaactaagaaatgtaatgacagtggcacagctcgtcgtagaaagcgctttaatgagaaaagaaagtcgaggcttgcattataatgtggattatcctcatccgttggctcaggcaagaaacactattttgcatcttaatccatcgccaacaatgtccgcaatcggcgaaaagcaattttag

SEQ ID NO: 138438 - protein, 536 aa, Coxiella burnetii RSA 493
MPTYDVLVIGSGAAGLGLALSLASEMRVAVLSKDDLTAGSSPHAQGGIAAVMNAADDSVELHVQDTLNAGGGLCDPEAVRATVTQAKSAVEWLVQQGVQFTTDSKNNYHLTQEGGHSRRRILHAADKTGAVIVKTLAEQVLSHPNIDCFTDHIAIDLLIENNVCKGAEVYDGEQQRSLRFHATHTVLATGGASFAYLHTSNPNRTSGDGIAMAWRAGCRVANLEFNQFHPTCLYHPLANHYLITEVVRGEGGYLLLPDGKRFMPNYDDRAEMAPRDIVARAIDMELKKNNWDHVYLDISHRPADFIKKAFPTIYATCLNFGFDMTEGPLPVVPAAHYTCGGVMTDLQGQTDMARLYAIGEVAYTGLHGANRMASNSLLECLVFAASCARAIKRSAAPIPRLAEEAAHPFFSLDSAGKPREDSRTVDDFIHQVRKIMWDHVGIVRSDIRLIKAKNDLQKLLQQINVVFPLQILSKSLIELRNVMTVAQLVVESALMRKESRGLHYNVDYPHPLAQARNTILHLNPSPTMSAIGEKQF

SEQ ID NO: 138439 - DNA, 1818 bp, Streptomyces avermitilis MA-4680; identical to SEQ ID NO: 33145
  CDS (1)..(1818): transl_table=11

SEQ ID NO: 138440 - protein, 605 aa, Streptomyces avermitilis MA-4680; identical to SEQ ID NO: 33146

SEQ ID NO: 138441 - DNA, 1584 bp, Nitrosomonas europaea ATCC 19718; identical to SEQ ID NO: 33147
  CDS (1)..(1584): transl_table=11

SEQ ID NO: 138442 - protein, 527 aa, Nitrosomonas europaea ATCC 19718; identical to SEQ ID NO: 33148

SEQ ID NO: 138443 - DNA, 1443 bp, Helicobacter hepaticus ATCC 51449
  CDS (1)..(1443): transl_table=11
atgggacaatatgatgtgattatcattggcgcaggagtggcaggattgtattgtgcgagacatttgcctcctgatttaaaagtattaattttatgtaaggctcaaccttgggaatgcaatacattctatgcacaaggcggtataagcatagcaaaagatgaaagtgatgtccctttgcatatacaagatacgcttcttgcaggcgcacgtttaaataccctagaatgtgtcaataggcttgtaaaaggtagcaatgagattcttagtgagcttattgcaagtggtttagcatttgatagagatgaaaggggtgcgctgctttatgctaaagagggagggcattctcacgcgagaatcgtccattcaggaggagatgccacagggcgtagtcttcatacgcatcttattgataaacttcgtgcgacattgtggaaaaatgctgaagtagtagatttgctcattgaagaggataaatgctatggcgtatgtgtgcagacaaaatccggattacataatctctatgcacatcatatagttattgcaagtgggggtgttgggggattatttaagtaccacacaaatgcctatacaatcagtagcgacatacacggcattattttagaacataatctcgccttgcaagatatggaaatgttacaatttcaccctacgacttatatcaataatcctcaagcacgaaaatatcttatctctgaagcagtgcgcggcgagggtggagtgattgttgatagagagggcaggagatttttgtttgattacgatgagcgaggggagcttgctccgcgtgatattgtggcacgagggattatggattattgtcttaaatatcagcaagaggcttttttggatttaagtgcatttacttatgatgggtttagagcgcgttttcctaacatattccgcgatttgcacacttgcaaacttaatatccctacagataaaatacccatttcaccagcatttcattattcaatgggcggtattttgacaaatgcagattctctcgtgcagggcatgagtaatctctatgcgattggagaatgcgcgtgtaatggagttcacggggcaaatcgccttgcttcaaactcgctccttgaggggcttatctttggtaaaaatgtagcccaacatattgtagagaatcggacgcaaacacctattcgacattttcctgtatgcgatgaggtgctagaaaaagagggtgatagtaagcttaaaaatgttttgcgtgagattatgtgggataaggtggggattattcgctctcaaagtggattagattctgcacttggagggattgaagtgatgttagaatctcatatcgggcgtatgttacgcttaagactgcttgtagcaaaaaagattgttcaatccgctttaaagcgcaaacaaagtataggagctcattttagagtggattaa

SEQ ID NO: 138444 - protein, 480 aa, Helicobacter hepaticus ATCC 51449
MGQYDVIIIGAGVAGLYCARHLPPDLKVLILCKAQPWECNTFYAQGGISIAKDESDVPLHIQDTLLAGARLNTLECVNRLVKGSNEILSELIASGLAFDRDERGALLYAKEGGHSHARIVHSGGDATGRSLHTHLIDKLRATLWKNAEVVDLLIEEDKCYGVCVQTKSGLHNLYAHHIVIASGGVGGLFKYHTNAYTISSDIHGIILEHNLALQDMEMLQFHPTTYINNPQARKYLISEAVRGEGGVIVDREGRRFLFDYDERGELAPRDIVARGIMDYCLKYQQEAFLDLSAFTYDGFRARFPNIFRDLHTCKLNIPTDKIPISPAFHYSMGGILTNADSLVQGMSNLYAIGECACNGVHGANRLASNSLLEGLIFGKNVAQHIVENRTQTPIRHFPVCDEVLEKEGDSKLKNVLREIMWDKVGIIRSQSGLDSALGGIEVMLESHIGRMLRLRLLVAKKIVQSALKRKQSIGAHFRVD

SEQ ID NO: 138445 - DNA, 1683 bp, Rhodopirellula baltica SH 1; identical to SEQ ID NO: 33149
  CDS (1)..(1683): transl_table=11

SEQ ID NO: 138446 - protein, 560 aa, Rhodopirellula baltica SH 1; identical to SEQ ID NO: 33150

SEQ ID NO: 138447 - DNA, 1767 bp, Wigglesworthia glossinidia endosymbiont of Glossina brevipalpis; identical to SEQ ID NO: 33151
  CDS (1)..(1767): transl_table=11

SEQ ID NO: 138448 - protein, 588 aa, Wigglesworthia glossinidia endosymbiont of Glossina brevipalpis; identical to SEQ ID NO: 33152

SEQ ID NO: 138449 - DNA, 1668 bp, Prochlorococcus marinus subsp. pastoris str. CCMP1986
  CDS (1)..(1668): transl_table=11
atgctaagaccgccattttcgcaagaatcaatatctattgataaatgggatgtgattgtcattggtgcaggagcagctggtttaatgacttgtttggaattgccagaaaatttaaatgtccttcttttaaataggaatacaagtaaaagatcatctagtagatgggcccaaggagggattgcatcagtagttagacctgaagattcttttgctcttcatgttgaagacaccttaaaagctggagatgatttgtgtgacttatctgctgttgaaatgcttgtgaaagatgctcctggttgcgttgataggttacaaaatttaggtatgatttttgatcagagctcagatcaactatcaacaactttagaagcggcccattcttgtagaagagttttgcatgttaaagatagaacaggtagagcacttgtagaagtcttagaggatcatatcgaaaacaaggagaatattttgcattgtcgaggtgtaagagtaacagaattgcttattgaaaaggaagtatgtaaaggagttcaggtattagatggatctaatttatattggattacttctaaagctgttgttttagccacaggaggagggggacacttatttactaatactacaaatcctgcccaatctgctggggaaggaatagctctttcatggaaagctggagttgcaatagaggatttagaatttattcaatttcatcctacggcattaaagttttatggttctccctgctttctaatctctgaagcccttagaggtgagggagcagttctcgttgataagaatggtgagagcccagtaaagcatttggaaaatggtgatctagctacaagagatcaagttagtagagcaattatgaataatatgcaagaaaacgatgttgatcatgttggtttggatttaagatttattgatccagaaaaaattgtagaaagatttcctatgattataagtagatgtcaagattatggagttaatcctttaaatgaggtgattcctgttgcgccagcagctcactattggatgggaggtgttcataccgatttaaatgcatcttctacaatgaaaggattatatgccgtgggagaagtagcttctacaggagtgcatggtgcaaatagactagctagtaattcgcttatggaatgtctagtatttgcaagaaaaatgtcttgtatcgagttgaatgctccttataacctaagaaggttagatagatatactacggaaatttttatggataatccaaaggaagattttatcttaggtgtttcagataagattgatagtttgagaaaattatgctggtctaatttaggtgtctctcgtaataaaaaaaatatgaataaacttttaaaaactcttcaagatgagatagatcaactacaaaaaaatcctttacttgaatgtcttaataaaatagaaattgatcaaaaattgaaactaagtgagccaaataggagaggacttaatttattgcttgatttgcataatagacaaattacaacattgctattgttaaaagcttgtctttttcgagaggaaagtagaggaggccattatagggatgattttccaattaaagaaacaacttggaaatgccatactaggcagcaactaaatcaagaaataattaaaaggtttattaaaaattag

SEQ ID NO: 138450 - protein, 555 aa, Prochlorococcus marinus subsp. pastoris str. CCMP1986
MLRPPFSQESISIDKWDVIVIGAGAAGLMTCLELPENLNVLLLNRNTSKRSSSRWAQGGIASVVRPEDSFALHVEDTLKAGDDLCDLSAVEMLVKDAPGCVDRLQNLGMIFDQSSDQLSTTLEAAHSCRRVLHVKDRTGRALVEVLEDHIENKENILHCRGVRVTELLIEKEVCKGVQVLDGSNLYWITSKAVVLATGGGGHLFTNTTNPAQSAGEGIALSWKAGVAIEDLEFIQFHPTALKFYGSPCFLISEALRGEGAVLVDKNGESPVKHLENGDLATRDQVSRAIMNNMQENDVDHVGLDLRFIDPEKIVERFPMIISRCQDYGVNPLNEVIPVAPAAHYWMGGVHTDLNASSTMKGLYAVGEVASTGVHGANRLASNSLMECLVFARKMSCIELNAPYNLRRLDRYTTEIFMDNPKEDFILGVSDKIDSLRKLCWSNLGVSRNKKNMNKLLKTLQDEIDQLQKNPLLECLNKIEIDQKLKLSEPNRRGLNLLLDLHNRQITTLLLLKACLFREESRGGHYRDDFPIKETTWKCHTRQQLNQEIIKRFIKN

SEQ ID NO: 138451 - DNA, 1650 bp, Synechococcus sp. WH 8102
  CDS (1)..(1650): transl_table=11
atggacccttcccgcccacttgatgccatcgatcccggcccctgggatgttgtggtggtgggtgctggggcagcgggtttgatgacctgccttgagttgccagaggggttgtcggtgttgctgctgaaccgcaacaccggacgccgctcctccagccgctgggcccaggggggcatcgccgccgtgacccgccctgaagactcagcgggcagccatgccgacgacaccctgaacgccggcgctggcctatgtgacggcgatgccgtgcggtttttggtggacgccgcaccgcgttgtgtggatcgcctccagcagctggggatggcctttgaccgcgacggccatggcctggccacgaccctggaagcagcccacagccatcgacgtgtgcttcatgtgcaggaccgcaccggacgcgccctggtggatgtcctgcgtgagcgggtcgaacgacggcccggcttgctgcaccggcggggcgtgcgggtcaccaggcttgatgtgcagaacggccgctgttgtggggtgcaagtgctggatggccgccacctgcaacacatccaggcccgcgccgtggtgctggccagcggcggcggtggacatctgtttgccaacaccaccaatccggcccaggcctgcggagagggcattgccctggcctggcaagccggtgcagcggtagaagatctggaattcgtgcagttccatcccacggccctgcggctggacgatgccccctgcttcctgatttcagaggcagtgcgcggggaaggcggggtgttggtggatgcccaggggggaagtccggtggaccacctgctgcaacgtgacctggcccccagggatcaggtgagtcgggccctggtgcagcgcatgtgggagcagggcgtggcccagatgtggcttgatttttccgccattccccgtgcccaggcggaagcgcgtttccccacgattctcgaccgctgcagcgaattcggactcaaccccctcgaacggccaatccctgttgcgcctgcggcgcattactggatgggcggtgtcgcaacggatctgcaagccgcgacagaccttcccggcctctacgccgttggcgaggtggcctgcactggggtccatggcgccaaccggctggccagcaactccctgatggaatgcctcgtgttcgcccatcgcctggcggagatcgacctggggcctgccatcaagccgtcgaaccctgccccgccgcaggcttacgggcaagcactggagggagcgatcaccagcgcggggttgatggagcagatcgagcagctgcgcctgttctgctggcaacgggctggcgtggaccgcagtggacgccggctcaacgccggcctggatcacttgcgctgcgagctggaacgcctggatcaacaacccttgctgaactgtctgcagcgggatgctttgttgctggatgacagcagtcgccgcgatctgaatctgttgctggatctccgccaccgactggtgaccagcaagctgatgctggaggcctgcctgttccgccaagagagcaggggaggacatttccgcacggatgccccctcatcgcagccccaatggcaatgccactcgcgtcagagccgagcccggggtctccacacccgggctgttcgcccttga

SEQ ID NO: 138452 - protein, 549 aa, Synechococcus sp. WH 8102
MDPSRPLDAIDPGPWDVVVVGAGAAGLMTCLELPEGLSVLLLNRNTGRRSSSRWAQGGIAAVTRPEDSAGSHADDTLNAGAGLCDGDAVRFLVDAAPRCVDRLQQLGMAFDRDGHGLATTLEAAHSHRRVLHVQDRTGRALVDVLRERVERRPGLLHRRGVRVTRLDVQNGRCCGVQVLDGRHLQHIQARAVVLASGGGGHLFANTTNPAQACGEGIALAWQAGAAVEDLEFVQFHPTALRLDDAPCFLISEAVRGEGGVLVDAQGGSPVDHLLQRDLAPRDQVSRALVQRMWEQGVAQMWLDFSAIPRAQAEARFPTILDRCSEFGLNPLERPIPVAPAAHYWMGGVATDLQAATDLPGLYAVGEVACTGVHGANRLASNSLMECLVFAHRLAEIDLGPAIKPSNPAPPQAYGQALEGAITSAGLMEQIEQLRLFCWQRAGVDRSGRRLNAGLDHLRCELERLDQQPLLNCLQRDALLLDDSSRRDLNLLLDLRHRLVTSKLMLEACLFRQESRGGHFRTDAPSSQPQWQCHSRQSRARGLHTRAVRP

SEQ ID NO: 138453 - DNA, 1590 bp, Chromobacterium violaceum ATCC 12472; identical to SEQ ID NO: 33159
  CDS (1)..(1590): transl_table=11

SEQ ID NO: 138454 - protein, 529 aa, Chromobacterium violaceum ATCC 12472; identical to SEQ ID NO: 33160

SEQ ID NO: 138455 - DNA, 1440 bp, Wolinella succinogenes DSM 1740
  CDS (1)..(1440): transl_table=11
atggtttatgatgtcattattattggggcggggatcgcagggctttatgcgagcctccagctccccaaggataaaaaagtcctcattctctgtaaagaccaaccttgggaatgcaacaccttctatgcccaaggaggaatcgccctcgccaaagaccaagaggatgtgcctcttcatgtgagtgacacgctaggtgcgggcgtaggactttgcgatgttaaagcagtggagaccctgagccaaaaaagcctaggggtgctggctgatctattgcgtcgaggagttccttttgatcgggacttggagggaaatctcctctacacccaagagggcgcgcactccatctcaaggatcgttcatgcaggaggcgatgggacggggcgcgtggtgcatagccatctgatgggatccattcatcacacgctttggaagaatgccaccgtcactaatttgcttttggatgacacgcgctgccatggcgtgagcgtcaccaccaagcgaggcaactacaacctctacgctaatgaagtgattatcgctacaggcggtgtgggagcgctttttgaataccataccaatgctcacaccatcagcagtgacctgcacgggatgattattgagcatggcttgaagctccgcgacatggagatgttacagttccatccaaccgtttttgtcaagagcagtcatgcacgaaagattcttctctcggaagcccttaggggggagggggcaaaggtggtcgatgaatcgggtcggcgatttttagtcgattacgatgcacgcggtgaattagcccccagagatgtgatttctagggcgatttttgattacaaaaaacggacgcaaagcgaggtctatctcgacctcgcctcctttaaagagaacttttttagggagcgattccccaatatttatcgcaatctcacctcctatggctttagaatccctgaggataaaatccccatctcaccagcgtttcactactgcatggggggaattgagacggatgagtttgcgcgcgttttgggaatggagaatctctacgccgtcggtgagtgtgcaaggacgggagtccatggagctaatcgcctagcgagcaactcacttctagagggattggtcttttctcaaatggcggcggagcatatcatgggcaaagagacccatttcaagcctagagagtttcgcctcaccgaggagaatctagagcgcgaatatgacaatgaactcaaaggggtgcttcgctcgctcatgtggaacaaagtaggaatcgcaagagagagaagcgggctcaatgaagccctaggtggagtggaagtgatgcttcgcacaggggtggggcggatgttgcgcctgcgcctattgacagcccaagagatcatcaaaggggcattggcgcgccaagaatcccttggcgctcactacatgatcggttaa

SEQ ID NO: 138456 - protein, 479 aa, Wolinella succinogenes DSM 1740
MVYDVIIIGAGIAGLYASLQLPKDKKVLILCKDQPWECNTFYAQGGIALAKDQEDVPLHVSDTLGAGVGLCDVKAVETLSQKSLGVLADLLRRGVPFDRDLEGNLLYTQEGAHSISRIVHAGGDGTGRVVHSHLMGSIHHTLWKNATVTNLLLDDTRCHGVSVTTKRGNYNLYANEVIIATGGVGALFEYHTNAHTISSDLHGMIIEHGLKLRDMEMLQFHPTVFVKSSHARKILLSEALRGEGAKVVDESGRRFLVDYDARGELAPRDVISRAIFDYKKRTQSEVYLDLASFKENFFRERFPNIYRNLTSYGFRIPEDKIPISPAFHYCMGGIETDEFARVLGMENLYAVGECARTGVHGANRLASNSLLEGLVFSQMAAEHIMGKETHFKPREFRLTEENLEREYDNELKGVLRSLMWNKVGIARERSGLNEALGGVEVMLRTGVGRMLRLRLLTAQEIIKGALARQESLGAHYMIG

SEQ ID NO: 138457 - DNA, 1593 bp, Gloeobacter violaceus PCC 7421; identical to SEQ ID NO: 33163
  CDS (1)..(1593): transl_table=11

SEQ ID NO: 138458 - protein, 530 aa, Gloeobacter violaceus PCC 7421; identical to SEQ ID NO: 33164

SEQ ID NO: 138459 - DNA, 1605 bp, Photorhabdus luminescens subsp. laumondii TTO1; identical to SEQ ID NO: 33165
  CDS (1)..(1605): transl_table=11

SEQ ID NO: 138460 - protein, 534 aa, Photorhabdus luminescens subsp. laumondii TTO1; identical to SEQ ID NO: 33166

SEQ ID NO: 138461 - DNA, 1647 bp, Vibrio vulnificus YJ016
  CDS (1)..(1647): transl_table=11
gtgaactcattcactttagaccgggattttgaaaattttatgaacgcaaaccgtgaacatgaatgtgatgtgttagtggtgggcagcggagctgctggcttgtcgttggccttgcgcgtcgccaatcactgcaaagttatcgtgttaagtaaaggacctcgtagcgagggagcaacctactatgctcaaggtggtatcgctgcggtattcgatgaatcagacagtattgagtcacacgttcaagacactctgatcgccggagacggcatctgtgaagaagcaacggtgaagtttatcgctgaaaacgccaaagagtgtgtgcaatggttaattgatggcggtgtgccctttgatcgtgaagaggacgactctgacgacaaaccgcgttatcacttaacccgcgaaggcggtcatagtcatcgccgtattttgcacgcagccgatgccacaggcatggcgatgcaaacctcgctgcaagacaatgctcacaaccatcctaatattcatgttttagagcgtcataatgccctcgacttgatcaccgaagacaaaattggcggcgataaaaataaagtgatcggcgcgtacgtctggaaccgaaaccaagagcatgtggaaaccgttaaggcgaagtttgtcgtgctcgcgaccggcggtgcatcaaaagtttatcagtacacctccaatccagatgtttcttctggtgatggtattgcgattgcttggcgcgcaggatgtcgcgtggccaatatggaatttaaccaattccacccaacctgtttataccacccagaagctcgcaatttcctcctgacagaagcattacgtggtgaaggcgcctatttacgtcgtccggatggttcacgcttcatgcccgattttgacccgcgtgaagagctggctcctcgagatgtcgtggcacgagcaattgacttcgaaatgaaacgtcttggcgctgactgcatgtaccttgatatcagccacaaacccgctgaattcattaccaaacacttcccaatgatccactcacgtctgatggatttgggcattgatatgaccaaagagccgatccccatcgttccggccgcacattacacctgtggcggtgtgatggtcgataccaacgggcaaacagatttgcacaatctctatgccatcggcgaagtgagctacacaggcctacacggagcaaaccgtatggcttcaaattccttgctggagtgtgtggtctatgcatgggcggcggcaaaagacattttgaaaaaacacaaacaagtcgacttagcctccagcttaccaagctgggacgaaagccaagtgacctgcagtgatgaagaagtgatcatccaacacaactggcatgagctgcgactgtttatgtgggattacatgggcatcgtacgcactgacaagcgccttgagcgtgcactgcgtcgcattcaaatgttgcaacaagagacgcacgaatactacagtaacttccgcgtatccaataacttattggagttgcgtaacttactgcaagtcgcggagctgatggtacgttgtgcgatgcaaaggaaagagagccgcggtttacactacacactcgattaccctgagcaacttgaaaacagtggcccgacgattttgcgcccagaagagtaa

SEQ ID NO: 138462 - protein, 548 aa, Vibrio vulnificus YJ016
MNSFTLDRDFENFMNANREHECDVLVVGSGAAGLSLALRVANHCKVIVLSKGPRSEGATYYAQGGIAAVFDESDSIESHVQDTLIAGDGICEEATVKFIAENAKECVQWLIDGGVPFDREEDDSDDKPRYHLTREGGHSHRRILHAADATGMAMQTSLQDNAHNHPNIHVLERHNALDLITEDKIGGDKNKVIGAYVWNRNQEHVETVKAKFVVLATGGASKVYQYTSNPDVSSGDGIAIAWRAGCRVANMEFNQFHPTCLYHPEARNFLLTEALRGEGAYLRRPDGSRFMPDFDPREELAPRDVVARAIDFEMKRLGADCMYLDISHKPAEFITKHFPMIHSRLMDLGIDMTKEPIPIVPAAHYTCGGVMVDTNGQTDLHNLYAIGEVSYTGLHGANRMASNSLLECVVYAWAAAKDILKKHKQVDLASSLPSWDESQVTCSDEEVIIQHNWHELRLFMWDYMGIVRTDKRLERALRRIQMLQQETHEYYSNFRVSNNLLELRNLLQVAELMVRCAMQRKESRGLHYTLDYPEQLENSGPTILRPEE

SEQ ID NO: 138463 - DNA, 1617 bp, Rhodopseudomonas palustris CGA009; identical to SEQ ID NO: 33167
  CDS (1)..(1617): transl_table=11

SEQ ID NO: 138464 - protein, 538 aa, Rhodopseudomonas palustris CGA009; identical to SEQ ID NO: 33168

SEQ ID NO: 138465 - DNA, 1596 bp, Geobacter sulfurreducens PCA; identical to SEQ ID NO: 33169
  CDS (1)..(1596): transl_table=11

SEQ ID NO: 138466 - protein, 531 aa, Geobacter sulfurreducens PCA; identical to SEQ ID NO: 33170

SEQ ID NO: 138467 - DNA, 1614 bp, Bdellovibrio bacteriovorus HD100; identical to SEQ ID NO: 33175
  CDS (1)..(1614): transl_table=11

SEQ ID NO: 138468 - protein, 537 aa, Bdellovibrio bacteriovorus HD100; identical to SEQ ID NO: 33176

SEQ ID NO: 138469 - DNA, 1986 bp, Nasonia vitripennis; identical to SEQ ID NO: 33179
  CDS (1)..(1986)

SEQ ID NO: 138470 - protein, 661 aa, Nasonia vitripennis; identical to SEQ ID NO: 33180

SEQ ID NO: 138471 - DNA, 1983 bp, Anopheles gambiae str. PEST; identical to SEQ ID NO: 33181
  CDS (1)..(1983)

SEQ ID NO: 138472 - protein, 660 aa, Anopheles gambiae str. PEST; identical to SEQ ID NO: 33182

SEQ ID NO: 138473 - DNA, 1929 bp, Magnaporthe grisea 70-15; identical to SEQ ID NO: 33183
  CDS (1)..(1929)

SEQ ID NO: 138474 - protein, 642 aa, Magnaporthe grisea 70-15; identical to SEQ ID NO: 33184

SEQ ID NO: 138475 - DNA, 2136 bp, Yarrowia lipolytica CLIB122; identical to SEQ ID NO: 33189
  CDS (1)..(2136)

SEQ ID NO: 138476 - protein, 711 aa, Yarrowia lipolytica CLIB122; identical to SEQ ID NO: 33190

SEQ ID NO: 138477 - DNA, 1986 bp, Apis mellifera; identical to SEQ ID NO: 33191
  CDS (1)..(1986)

SEQ ID NO: 138478 - protein, 661 aa, Apis mellifera; identical to SEQ ID NO: 33192

SEQ ID NO: 138479 - DNA, 1902 bp, Aspergillus nidulans FGSC A4; identical to SEQ ID NO: 33193
  CDS (1)..(1902)

SEQ ID NO: 138480 - protein, 633 aa, Aspergillus nidulans FGSC A4; identical to SEQ ID NO: 33194

SEQ ID NO: 138481 - DNA, 1980 bp, Tribolium castaneum; identical to SEQ ID NO: 33201
  CDS (1)..(1980)

SEQ ID NO: 138482 - protein, 659 aa, Tribolium castaneum; identical to SEQ ID NO: 33202

SEQ ID NO: 138483 - DNA, 2577 bp, Tribolium castaneum; identical to SEQ ID NO: 33203
  CDS (1)..(2577)

SEQ ID NO: 138484 - protein, 858 aa, Tribolium castaneum; identical to SEQ ID NO: 33204

SEQ ID NO: 138485 - DNA, 1668 bp, Prochlorococcus marinus str. AS9601
  CDS (1)..(1668): transl_table=11
atgttaaggcctccattttcgcaagaaccgataccaatcaacaattgggatgtaatcgttataggcgctggagcagctggccttatgacttgtcttgaattaccctcaaatttaaaagtgcttcttttaaatagaaatactagtaagatatcttccagtagatgggctcaaggcggaattgcatctgttgttagacaagatgattcatttgatcttcatgctgaggatactttaaaagcaggtgatggattatgtgattttcaagctgtagaaatgttagttaaagaagctccaggatgtgtagaaaggttgcagaatttagggatgatttttgatcaaagctctgatcaactagctactaccttggaagcagcccattcacgaagaagagtcttacatgttaaagatcgtactggaagagcattagttgaagttctagaagatcatattgaaaatgaaaaaaatattcttcattgcaggggtgtaagagtaactgaacttctcattgagaataaagaatgtagaggagttcaggttcttgatggagcaaatttatattggattaaatctagagctgttgttttggctacaggtgggggtgggcacttatttacaaatacaacgaatcctgctcaatcctctggtgaagggattgctcttgcatggaaagcaggagctgctatcgaagatttagagttcgtgcaatttcatccaacagctttaaaattttatggtgcaccttgcttcttaatatctgaggcgcttagaggggaaggagcgatattagttgataaaaatggtgaaagtccagttaaaaatcttgaaaatcgtgatctagcaactagagatcaggtaagtagagcaattatgaaaaatatgcatgataataatgtagaccatgttggcttagatcttcgttatattgacccagaaaaaattgtagagcgcttccctacgatcttaagtcgatgtcaggattatggcgttaaccctttaaatgaggttattccagtagctcctgcagctcattattggatgggaggtgttaaaactgatctaaatgcatcttcaacaagaaaaggattatatgccgttggagaagttgcttctacaggtgtgcatggtgctaatagactggcaagtaattcattgatggagtgtcttgttttcgcaagaaaaatgtcttcaattgttttgaatgacttttctaaatttgaaaaatttgatagatcatttcaagagtttaatattgaagatcctaaagaacatcaaatttctataattgctgaaaaaattgatgaactaagaaaactttgttggttaaatttaggtgtatcgcgaaataaggtaaatatgagtaaatttttaaattatattcaaaatgatatagataaattaaataaaaatgatttactaaatagtcttgaaaaaataaaatttgatcaaaaaataaaacttagtgaacgtaatagaagagcattaaatcttttacttgatttaaagaatagacaaataacaacaataactttattaaaagcttgtctctttagagaagaaagtagaggagggcattatagagatgatttccctgataaagataaaaattgggaatgccatactagacaacagttagatcaaaaaattcaaaaaagatttattaaaaattaa

SEQ ID NO: 138486 - protein, 555 aa, Prochlorococcus marinus str. AS9601
MLRPPFSQEPIPINNWDVIVIGAGAAGLMTCLELPSNLKVLLLNRNTSKISSSRWAQGGIASVVRQDDSFDLHAEDTLKAGDGLCDFQAVEMLVKEAPGCVERLQNLGMIFDQSSDQLATTLEAAHSRRRVLHVKDRTGRALVEVLEDHIENEKNILHCRGVRVTELLIENKECRGVQVLDGANLYWIKSRAVVLATGGGGHLFTNTTNPAQSSGEGIALAWKAGAAIEDLEFVQFHPTALKFYGAPCFLISEALRGEGAILVDKNGESPVKNLENRDLATRDQVSRAIMKNMHDNNVDHVGLDLRYIDPEKIVERFPTILSRCQDYGVNPLNEVIPVAPAAHYWMGGVKTDLNASSTRKGLYAVGEVASTGVHGANRLASNSLMECLVFARKMSSIVLNDFSKFEKFDRSFQEFNIEDPKEHQISIIAEKIDELRKLCWLNLGVSRNKVNMSKFLNYIQNDIDKLNKNDLLNSLEKIKFDQKIKLSERNRRALNLLLDLKNRQITTITLLKACLFREESRGGHYRDDFPDKDKNWECHTRQQLDQKIQKRFIKN

SEQ ID NO: 138487 - DNA, 1701 bp, Prochlorococcus marinus str. NATL1A
  CDS (1)..(1701): transl_table=11
atggatttaaatactgggtttaataaaaatgatatttactcaactaattgggatgtaattgttattggagcaggagctgcaggtttgatgtcatctcttgagttgccatcaaatctgaaaattttacttttaaaccgcaataccagtaagcgttcttctagtagatgggcacaaggaggaatggctgctgttactcgaattgaagatagcgaggatattcatgctaacgacacaatcaaagctggggcaggcctttgtgatttagaagcagttcagatgtttgttcatagtgctccgagattggtagatagacttttgaaactaggaatggaatttgatagaacctctggaaaattatctacaactcttgaagctgctcacactcatagaagagtgcttcacgtaaaagatagaactggtaaggcattggttgatgtccttaatgagcaagttgatcaaagaggtaatgttctgcatcaaagaggaataagagttactcagatttgggttgaaagaggaaaatgctccggggtacaagttctagatggaccagctttgcgttggatcaaagcaaaggcagttgttttagctactggcggcggaggccatttatttgccaatactacaaatccaactcaagcagcaggtgagggaattgctctagcttggagatctggggcttgcatagaagatctcgaattttttcagtttcacccaactgctctgaaattggataatgcgccttcgtttttgatttctgaagcggtaaggggagagggcgcagttttagtggattcattcggcgagagtcccgtagctcatcttgaagggaaagatcttgcatcaagagatcaagtcagcagggcattgtttcaagcgatgcaaaagcaaaaagttgatcacattggtcttgatgttaaatccatttctgttgaggatgtagaagcgcgctttccgtcaatttttcaaaggtgcagagaacttggcttagaacctttaaaagaagcaatccctgtggctccctctgcccattattggatgggtggtgtcgctacaaacttgaaagcacaaacaaatgtcaaaggacttttcgcgattggtgaggtggcatgtactggcctgcatggtgccaatagacttgcaagtaattcattaatggaatgtttggtctttgcaaatcaaatgagaaatattgaattaaatgattttataacttccgatatttcaggaaataatttaagttttaacaaatcagatcttcgcttttctaaggagcaaggaactagttatttatcaaaagaaattgaaaaacttagacaattatgctggcgtgaagctggagttgatcgatcacgaaaaggaatgaattctgctcttgtaaaagttaaacaagattatcaaaatcttttaaccgagcccttattaaatttggttttttctcagtcaaaatatgaaattcatgaattcgaggaacttgctaggagagaccttaatttgctacttgatttgagtaatcgacaaatgtcaagtttgcttatgttggaagcttgtttgtttcgtgaagaaagtagaggaggtcattttagagatgatttccctacctcagttcctttttggcaatgtcatactagacaaatgaagggaaagaacattcatacaagacccattgtcgataaagctggcttccctaaaaatctttag

SEQ ID NO: 138488 - protein, 566 aa, Prochlorococcus marinus str. NATL1A
MDLNTGFNKNDIYSTNWDVIVIGAGAAGLMSSLELPSNLKILLLNRNTSKRSSSRWAQGGMAAVTRIEDSEDIHANDTIKAGAGLCDLEAVQMFVHSAPRLVDRLLKLGMEFDRTSGKLSTTLEAAHTHRRVLHVKDRTGKALVDVLNEQVDQRGNVLHQRGIRVTQIWVERGKCSGVQVLDGPALRWIKAKAVVLATGGGGHLFANTTNPTQAAGEGIALAWRSGACIEDLEFFQFHPTALKLDNAPSFLISEAVRGEGAVLVDSFGESPVAHLEGKDLASRDQVSRALFQAMQKQKVDHIGLDVKSISVEDVEARFPSIFQRCRELGLEPLKEAIPVAPSAHYWMGGVATNLKAQTNVKGLFAIGEVACTGLHGANRLASNSLMECLVFANQMRNIELNDFITSDISGNNLSFNKSDLRFSKEQGTSYLSKEIEKLRQLCWREAGVDRSRKGMNSALVKVKQDYQNLLTEPLLNLVFSQSKYEIHEFEELARRDLNLLLDLSNRQMSSLLMLEACLFREESRGGHFRDDFPTSVPFWQCHTRQMKGKNIHTRPIVDKAGFPKNL

SEQ ID NO: 138489 - DNA, 1599 bp, Clostridium thermocellum ATCC 27405; identical to SEQ ID NO: 33209
  CDS (1)..(1599): transl_table=11

SEQ ID NO: 138490 - protein, 532 aa, Clostridium thermocellum ATCC 27405; identical to SEQ ID NO: 33210

SEQ ID NO: 138491 - DNA, 1605 bp, Herminiimonas arsenicoxydans; identical to SEQ ID NO: 33211
  CDS (1)..(1605): transl_table=11

SEQ ID NO: 138492 - protein, 534 aa, Herminiimonas arsenicoxydans; identical to SEQ ID NO: 33212

SEQ ID NO: 138493 - DNA, 1548 bp, Dehalococcoides sp. BAV1
  CDS (1)..(1548): transl_table=11
ttgaactccaggtacgactatataattgtgggcagcggtattgccggtttgtatactgctttactggcgcgtggccggggaagtgttttgctggttaccaaaggcaagatacaggattgcaatacccgccatgctcagggaggcatagccgccgccattggcccggatgattctccccgtttgcattttgaagataccctgatagccggagacggtttatgtgaccgtgagatggtgcgtttgctggcagacgaagctccacagcgtattgccgagcttgtttatctgggagtgccttttgacagtgtaaacggtgaaatagctcttaccttagaggctgctcacagtcgtccccgcatacttcatgccgggggggatgccaccggcaaacacattgaaatcaccctgaacaactgggtacggactaccgagattgaggttctggaagatactctggccaaagagctgattatagaaaacggccagatcaagggtgtggcaactctggatacaaataccggtgccatccagaactacctgtgccgttttgtgatactggcaaccggcggagctggtcagcttttcagttttaccactaacccggaggttgccactgctgatggggtagctctggctttcagggctggggctgagataaaagatatggagttttaccagttccatcctaccgctattcacctgccgggggttgccccttttcttatttcagaggcagttcggggagaaggcggtattttgcggaatatagagggcaaacgctttatgcccgaatattcccctcaggccgaacttgccccaagagacgtggtagctcgcagtattcaccttgagatgcttaaaaccggtgctgaccatgtttatctggatgttacccatttgcctccccacaaagtaagcagccgcttccctcagatataccgtttttgtctggatcacggactggatattacccgtgaggccatacctgtttctccggcggcccattatatgataggcgggataaaagtagacagctggggagaaaccaatatcaaggggctttttgcctgcggcgaagtagcctgtaccggtgttcacggggcgaaccgtctggcttcaaattcgcttttagaggtgttggtattcggtaggcggattatagaatacactgccggtgaaaaccagcctgaaatgcttgctccgctgccccaactgactaaaagattgctgggatggggcaaatacgtgcgtgatttacccgagccttcaatacccgctctccagaagcttctctgggaagactctggtataataagaagctatggcggtttggtgaaagctcaggagatactctcaggctggcaatacagtctgggtgacgtttccaaccgcaaagggattgaacttgcaaaccttattttggccggaaggcttatggtagaatcagccctgctcaggcaggaaagccgcggggcacattaccgtactgattttcctgaccaccagcccgaatgggaaaaacatatagtctttattaaggaggattaa

SEQ ID NO: 138494 - protein, 515 aa, Dehalococcoides sp. BAV1; identical to SEQ ID NO: 33254

SEQ ID NO: 138495 - DNA, 1482 bp, Thermus thermophilus HB27
  CDS (1)..(1482): transl_table=11
atggagcgccatcgcacagacctcctcgtcctgggcgccggggtggcgggggtctacgccgccttggccgcggaggaaaagggagcccgggtcctcctcgtgagcaaggaccccctccccgcgggctccaccccctgggcccaagggggggtggcctttcccgtgggggaggaggaccagaaggcccacctccgggacaccctcgtggccggccggggtctcgtggaggaaggggtggcccgctccatcctggaggaggccccccgccacctggagaggcttcgcgccttcggccttcccttccaccccgagcccacccgggaaggggggcactcccgcgcgagggtcttccacctgggcggggaccggagcgggcttctcctcctcgaggggctccttaagcggctttccacccccgtggtccccgcccaggccttgagcctccttgtctccgggaaccgggtggccggggccctcctctgggggccgggggggctttgggaggtccgggccggagccgtcctcctcgccacgggagggtttggccgcctcttccccgtgaccacgaacccccacggggccacgggggacgggatggccctcgcctggcgggcgggggcggggctacgggaccttgagttcgtccagttccaccccacggcccttcccaacggggccctggtctccgaggcctgccggggggagggggccctcctcctgaacgcccacggggagcggttcatgccccgctacgaccccctggcggagctcgccccacgagacgtggtggcccgggccgtcttccgggagagggagcgcacgggcggggtttacctggacctgaggccaatcccccacctggaggagcgcttccccacggtggtggcccaagcccgggccttaggcctggaccccctgagggcgcccgtccccgtggccccggcggcccactacgccatggggggggtgaggaccgacgccttcggccacacggggatccccgggctcttcgccgcgggggaggtggcctccaccggcttccacggggcgaaccgcctggcctccaacagcctcctcgagggcctggtggtggggtggcgggccgccctaagggccctggaggacctggcctttcccccaagagccacccccctccccgccctcgccgccccacccgaggcggtggcgtccctaagggaggaagcgggggaggccctcggggtggtgcggcggaaagaaaccctcctcgccttcctccgccgggcggaggccgtgcccctggaggaggtggaacaggccagcagggaccggctcgaggcgggaagcctcctcctcctcatgcgcctcctcgcccgggcggccttggcccgggaggagagccggggcgcccacttccgggaggacttccccctggaagaccgccccaggcacagcctcttccaggggtggcgcctcggtttccttcccgtgggtgtggagtag

SEQ ID NO: 138496 - protein, 493 aa, Thermus thermophilus HB27
MERHRTDLLVLGAGVAGVYAALAAEEKGARVLLVSKDPLPAGSTPWAQGGVAFPVGEEDQKAHLRDTLVAGRGLVEEGVARSILEEAPRHLERLRAFGLPFHPEPTREGGHSRARVFHLGGDRSGLLLLEGLLKRLSTPVVPAQALSLLVSGNRVAGALLWGPGGLWEVRAGAVLLATGGFGRLFPVTTNPHGATGDGMALAWRAGAGLRDLEFVQFHPTALPNGALVSEACRGEGALLLNAHGERFMPRYDPLAELAPRDVVARAVFRERERTGGVYLDLRPIPHLEERFPTVVAQARALGLDPLRAPVPVAPAAHYAMGGVRTDAFGHTGIPGLFAAGEVASTGFHGANRLASNSLLEGLVVGWRAALRALEDLAFPPRATPLPALAAPPEAVASLREEAGEALGVVRRKETLLAFLRRAEAVPLEEVEQASRDRLEAGSLLLLMRLLARAALAREESRGAHFREDFPLEDRPRHSLFQGWRLGFLPVGVE

SEQ ID NO: 138497 - DNA, 1587 bp, Desulfovibrio vulgaris subsp. vulgaris str. Hildenborough; identical to SEQ ID NO: 33215
  CDS (1)..(1587): transl_table=11

SEQ ID NO: 138498 - protein, 528 aa, Desulfovibrio vulgaris subsp. vulgaris str. Hildenborough; identical to SEQ ID NO: 33216

SEQ ID NO: 138499 - DNA, 1683 bp, Picrophilus torridus DSM 9790
  CDS (1)..(1683): transl_table=11
atggaaaagatgaagtatgacgcagttataatgggtgcaggccttgccggtctcatggccgcaaatgagatcgcatccgccggctatagcgttgcagttgtttcaaaggtttttccaacaaggtcgcattcatcagccgcagagggtggtatagcagcatacataccaggaaactctgatccaaatgacgatccagattacatgagctatgatgagataaagggcggtgattatttagtagatcaggatgctgcagagctattatcatcaaaatctggagaaatagtaagaacccttgattcctggggtgcaccgtttaacaggcagcctgacggcaggatagcattaagatactttggcggccagacatatccaagaacgaggtttgttggtgataaaacaggcatggcccttcttcatacgctttatgaaagggcatctggttttaacatagatttctacaatgaatggtatgtaatagatctattaaaggagaagaaggccgcaggtcttgtggcacttaaaatgcgctcacttgagcccatatatcttactgccaaagccataataatagcatcaggcggtcttggtatgatatacaagcacagcacaaacagttatataaacaccggtgatggctatggcattgcgcttagggccggtgttccgttaaaggatcctgagtttgttcagttccatccaacaggtctctatccatctgatatattgataagtgaggccgccagggccgagggtggcatactaagaaacaataaaaatgaaaggtttatggagaaatacgcaccgcataagtttgatcttgcaccaagggacattgtttcaaggtcaatgaccatagaaataaacgagggccgtggatttcctggaggctatcttgggcttgatctgacacatcttggcagggattatataatagaaagattaagccttgcctatgaggctgcaaagacatttgccggtgtggatgcaacagaggagatgattcctgtaaggccggcccagcattacttcatgggcggcatagatgttgatataacaggtgcatcaccacttccgggattatttgcggccggagaggctgcctgtgtatcagttcatggtgccaaccgtcttggttcaaactcccttcttgaaacgctggtttatggcagggagacaggcaaaaatgttgtggaattcctaaagaaggagcatgacatcccggatttaaatcctgaaaaatcactggatgatgcatataaatacgttaagagggagacaggcgagcactttggatcgatactaaacgatttaagggaaacaatgtgggacaatgtcggcatattccgtgatgagaaaaagctttcaaaggccgtctctgacataaaatccttaagaaagcgtgccgaatcattatacgtaacagataaaagcaataactataataccgaattcttcaatgcccttgagcttagaaacatgcttgatgttgcatatgttatagccgagagcgctttaaacagaaaggaatcccgtggtgcgcattacagaacagattttcctgacagaaacgatgatagctggttaaagcacacaatatcatatctatcaaatgaggatgttaggatagattacaagccggtcaagatgaccaggtggaagcctgaggttagggtgtattaa

SEQ ID NO: 138500 - protein, 560 aa, Picrophilus torridus DSM 9790
MEKMKYDAVIMGAGLAGLMAANEIASAGYSVAVVSKVFPTRSHSSAAEGGIAAYIPGNSDPNDDPDYMSYDEIKGGDYLVDQDAAELLSSKSGEIVRTLDSWGAPFNRQPDGRIALRYFGGQTYPRTRFVGDKTGMALLHTLYERASGFNIDFYNEWYVIDLLKEKKAAGLVALKMRSLEPIYLTAKAIIIASGGLGMIYKHSTNSYINTGDGYGIALRAGVPLKDPEFVQFHPTGLYPSDILISEAARAEGGILRNNKNERFMEKYAPHKFDLAPRDIVSRSMTIEINEGRGFPGGYLGLDLTHLGRDYIIERLSLAYEAAKTFAGVDATEEMIPVRPAQHYFMGGIDVDITGASPLPGLFAAGEAACVSVHGANRLGSNSLLETLVYGRETGKNVVEFLKKEHDIPDLNPEKSLDDAYKYVKRETGEHFGSILNDLRETMWDNVGIFRDEKKLSKAVSDIKSLRKRAESLYVTDKSNNYNTEFFNALELRNMLDVAYVIAESALNRKESRGAHYRTDFPDRNDDSWLKHTISYLSNEDVRIDYKPVKMTRWKPEVRVY

SEQ ID NO: 138501 - DNA, 1530 bp, Bacillus thuringiensis serovar konkukian str. 97-27
  CDS (1)..(1530): transl_table=11
atgccaagtgcagatgtcttaattattggaagtggtgttgcggcacttcgtgttgcaaaagagatttgtcacgaaaagaatgtgattgttatcacaaaggaaacgaatcgtaataataatacacatttagcgcaaggtggaattgccgcagcggttgctacatatgacgatccgaatgatcattttgaagatacattagtagcaggatgtcgttataacaatgaagatgtggtccgttatttagttgaagaaggaccgaaagaaatgaagaatctcattgaaaatggaatgcaatttgatggagatgaaacgggtccccatcttggaaaagaaggtgcacatcgaaagcgtcgtattttacatgcaggtggcgatgcaacaggaaagaatttattagagcatttcattcaagaagtagttccgcatgttacggtagtggaacaggaaatggtgcttgattttattatagaaagtgaaaaatgtgttggagctttaacgcgagatagtaaagggaagttgaagcgttatgatgcagattatactgtgctagcctcaggcggggttggtggtttatacgcctttacttctaatgataaaacaatcacgggtgatggacttgcaatggtataccgcgcaggtggggagctcgtagatttagagtttgtacaatttcatccaacaatgttatatgcgggcgggcgatgctgtggcctcgtttctgaagctgtccgtggggaaggagctgtccttataaatggaaaagggcagcgttttatgatggatatacacgatgattacgatctcgcaccgcgtgatgtggtggcaagagcgattcatgaacagcttttgtcgggtgaaaaagtgtatttgaatattgagtctatccaaaatttccaagaacgttttccaactgtatcagcattgtgtaaaaagaatggtgttgatattactaaaaaacgcattccggtcgtacccggagctcattttcatatgggcggtgtgaaaacaaacattgatggggagacgtctattccaaatttatatgcagtcggtgaagtagcttgtaatggtgttcatggagcaaatagattagcgagtaattcgttattagaaggtcttgtgtttggaaaaagaataggacaacatattttaacgaaagcgacaaaagacaaattgaacgacttcgctgagaaggaaaagaaatttatcgttctaaatcatttgccgacgaaagaagaaatacaagaatgcatgatgaaatatgttgggattgtacgaacagagcaaagtttatcttatgcgaagaggtggcttagtaaatacggtgttcgaaatatgatattacaacatgatgctcttacaaatgaagagataacgcttattaatatgttaacagtttgtgagcttatcgttgtatcagctttgcaaagagaagagagtattggtggtcattatcgaagtgattatccacatagaaatagcgcacaaaaagagatcattcgagtgaaaagaaaactacaacttgtgtaa

SEQ ID NO: 138502 - protein, 509 aa, Bacillus thuringiensis serovar konkukian str. 97-27
MPSADVLIIGSGVAALRVAKEICHEKNVIVITKETNRNNNTHLAQGGIAAAVATYDDPNDHFEDTLVAGCRYNNEDVVRYLVEEGPKEMKNLIENGMQFDGDETGPHLGKEGAHRKRRILHAGGDATGKNLLEHFIQEVVPHVTVVEQEMVLDFIIESEKCVGALTRDSKGKLKRYDADYTVLASGGVGGLYAFTSNDKTITGDGLAMVYRAGGELVDLEFVQFHPTMLYAGGRCCGLVSEAVRGEGAVLINGKGQRFMMDIHDDYDLAPRDVVARAIHEQLLSGEKVYLNIESIQNFQERFPTVSALCKKNGVDITKKRIPVVPGAHFHMGGVKTNIDGETSIPNLYAVGEVACNGVHGANRLASNSLLEGLVFGKRIGQHILTKATKDKLNDFAEKEKKFIVLNHLPTKEEIQECMMKYVGIVRTEQSLSYAKRWLSKYGVRNMILQHDALTNEEITLINMLTVCELIVVSALQREESIGGHYRSDYPHRNSAQKEIIRVKRKLQLV

SEQ ID NO: 138503 - DNA, 1635 bp, Acinetobacter sp. ADP1; identical to SEQ ID NO: 33219
  CDS (1)..(1635): transl_table=11

SEQ ID NO: 138504 - protein, 544 aa, Acinetobacter sp. ADP1; identical to SEQ ID NO: 33220

SEQ ID NO: 138505 - DNA, 1602 bp, Erwinia carotovora subsp. atroseptica SCRI1043; identical to SEQ ID NO: 33221
  CDS (1)..(1602): transl_table=11

SEQ ID NO: 138506 - protein, 533 aa, Erwinia carotovora subsp. atroseptica SCRI1043; identical to SEQ ID NO: 33222

SEQ ID NO: 138507 - DNA, 1590 bp, Desulfotalea psychrophila LSv54; identical to SEQ ID NO: 33223
  CDS (1)..(1590): transl_table=11

SEQ ID NO: 138508 - protein, 529 aa, Desulfotalea psychrophila LSv54; identical to SEQ ID NO: 33224

SEQ ID NO: 138509 - DNA, 1608 bp, Burkholderia mallei ATCC 23344; identical to SEQ ID NO: 33227
  CDS (1)..(1608): transl_table=11

SEQ ID NO: 138510 - protein, 535 aa, Burkholderia mallei ATCC 23344; identical to SEQ ID NO: 33228

SEQ ID NO: 138511 - DNA, 1647 bp, Burkholderia pseudomallei K96243; identical to SEQ ID NO: 33229
  CDS (1)..(1647): transl_table=11

SEQ ID NO: 138512 - protein, 548 aa, Burkholderia pseudomallei K96243; identical to SEQ ID NO: 33230

SEQ ID NO: 138513 - DNA, 1602 bp, Methylococcus capsulatus str. Bath; identical to SEQ ID NO: 33231
  CDS (1)..(1602): transl_table=11

SEQ ID NO: 138514 - protein, 533 aa, Methylococcus capsulatus str. Bath; identical to SEQ ID NO: 33232

SEQ ID NO: 138515 - DNA, 1584 bp, Azoarcus sp. EbN1; identical to SEQ ID NO: 33233
  CDS (1)..(1584): transl_table=11

SEQ ID NO: 138516 - protein, 527 aa, Azoarcus sp. EbN1; identical to SEQ ID NO: 33234

SEQ ID NO: 138517 - DNA, 1608 bp, Synechococcus elongatus PCC 6301
  CDS (1)..(1608): transl_table=11
gtgatcatcgtcggtgccggtgcggctggcctctacaccggtctctgcctgccgtcccattatcgggtggcaattctcagtaaggatctgccgcagcgatcggccagtgactgggcgcaggggggcttggcggcagtgacagctccagatgattcagccgatttgcactacgctgacacccttaaagcgggtgcagacctctgtgaaccggcagcggtccgcttgctggttgagtcggctccacgttgtgtggcttcgctgcttgaactgggggttgccttcgatcgcacgaacgatcatctggccttgaccctggaggccgctcattcccgccatcgggtgttgcacgcggctgacaccacggggcgggcgatcgtgacgacgctgcttgagcaagttctgcagcgccccaatcttgaaattttggctcagagcctggcagttgacctttggcgcgatcgcgagggtcactgctgtggtctcttgctcctgcaaggtcagcagctacgctggctagctgcccgcgccgtcattctggcttgtggcggtggggggcaagtcttctcgcagacgaccaatccagctttgagcaccggcgatggcgtggctttggcaggccgagcaggagcgaagctgcgagatctcgagtttttccaattccatccgactgcactggtttggccgggtgcaccgcgctttttgatcagtgaagcagtccggggcgaaggggctcatgtggtggatgcccagggcgatcgcttcctgtttcgctacgacgatcgcggcgaactggcaccccgcgaaattgtcagccgtgctatctaccggcatttactagagacgggtacggagcaggtctggctagatttgcgaccgattccggcagcgaccgtcgagcatcgcttccccaatatcttgcagaagtgtcgccgctggggtttggatcccctccagcaaccgctaccgattgcgcctgctgcgcactactggatgggtggcgtctacaccaatctcaacggcgcaaccacttgtcctggcctctacgccgttggcgaaacagcttgtacgggcgtgcatggagccaaccgccttgccagtaattccctgctggaatgtttggtgtttggtcgtcagtttcaaaacctgcaacttcctgctgcgatcgccgcttctagtcgcctcgattcagtccacccattaagcgtgatgggcgatcgcgatcgctggaaaaagcaacgacaagcgctgcaggatttggtctggaaagctgcaggcatctgtcgcgatgccgatcgcttgcaggcggcgttagcccaggtcgaagtctggcaagccgacttggacgctgagcccctcagtcaagcaatcgcggcgattcccctgggacagacccagcagctagacggtctagacgctgaagcgctgagggattggggcgaactgcgcaacctcttagcgatcgcccagttgatcctcaaaagcgctgatttccgcacagaaagccggggtggtcactaccggagcgactaccccaaatccaatccaggttggcgagtccatacggatgttcaatcaggccgatggggcacgaccgcgatcgggccatga

SEQ ID NO: 138518 - protein, 535 aa, Synechococcus elongatus PCC 6301
MIIVGAGAAGLYTGLCLPSHYRVAILSKDLPQRSASDWAQGGLAAVTAPDDSADLHYADTLKAGADLCEPAAVRLLVESAPRCVASLLELGVAFDRTNDHLALTLEAAHSRHRVLHAADTTGRAIVTTLLEQVLQRPNLEILAQSLAVDLWRDREGHCCGLLLLQGQQLRWLAARAVILACGGGGQVFSQTTNPALSTGDGVALAGRAGAKLRDLEFFQFHPTALVWPGAPRFLISEAVRGEGAHVVDAQGDRFLFRYDDRGELAPREIVSRAIYRHLLETGTEQVWLDLRPIPAATVEHRFPNILQKCRRWGLDPLQQPLPIAPAAHYWMGGVYTNLNGATTCPGLYAVGETACTGVHGANRLASNSLLECLVFGRQFQNLQLPAAIAASSRLDSVHPLSVMGDRDRWKKQRQALQDLVWKAAGICRDADRLQAALAQVEVWQADLDAEPLSQAIAAIPLGQTQQLDGLDAEALRDWGELRNLLAIAQLILKSADFRTESRGGHYRSDYPKSNPGWRVHTDVQSGRWGTTAIGP

SEQ ID NO: 138519 - DNA, 1509 bp, Neisseria gonorrhoeae FA 1090
  CDS (1)..(1509): transl_table=11
atgcaaaccgattgcgacgtattgattgccggaaacgggctggcggcactgacgctcgccctgtcgctgcctgaatcgttccgcatcgtcattttgtgcaaaaaccggctggacgacaccgccagccgtcatgcgcaaggcgggattgcggcggcgtggtcgggagaggacgacatcggaaaacacgtcgccgatactttggaagcgggcgcaggtttgtgcgacgaagccgccgtccgcaccatcctgtcgcagggcaaaccggcaatcgaatggctgctggcgcagggcgtggcgttcgaccggaatcataacgacctgcacctgacgcgcgaaggcgggcatacctgccgccgaatcgcccacgtcgccgactacacgggcgaagccgtcatgcagagcctgattatccaaatacgccgccgaccgaacatccgcgtttacgagcggcagatggcgttggacgttcaaaccgaatcaggcgcagcgtgcggactgaccgtcctcgactgccgaacgcaagaaacctaccgcatccgtgcccgccataccgtactcgcaggcggcggcctcgggcaaatttacgccgccaccaccacgccgcccgaatgcacgggcgacgccatcgccatggcgatacgcgcgggttgcgcaatcgaaaacctcgaatttatccaattccaccccacaggcttggcaaggccgtctgaaaacggccgcaccttcctgatttccgaagccgtgcgcggcgaaggcggcatcctgaccaatcaatcgggcgaacggtttatgccgcattacgaccgccgcgccgaactcgcgccgcgcgacatcgttgcccgcgccatcgccgccgaaaccgccaaacaaacgcaagacttcgtctcgctcgacatcagccgccaacccgcagcgttcgtccgtcggcatttcccgtccatccatcggcactgcctgtcccaatgcggcttggacatcacgcgccaagccatccccgtccgccccgtgcaacactacacctgcggcggcatccaaaccgaccccagcggcagaacctccctgccgcagctctacgccttaggcgaaaccgcctgtaccggactgcacggagccaaccgcctcgccagcaactccctgctcgaatgcgtcgttaccgccaggcttgccgcccaaggcatcgcggacggacaagcgttccaaatcgaaccattccaaaggccgtctgaaagcccctccgccgaaacagacatcttttcaaacgacctccaaaacacattcagccgccctgtcctgcaaacgttcaaccaacgccatctcggcatcctccgcaacgataccgacctgcaccgcgccatcgaccaactgcggctttggaagcaaaaccaagccgaaccgcacaccgcgtccgaatacgaaaaccgcaacctactcgaatgcagcctcgccgtcgcccaagccgcatacaggcggagacagaacatcggtgcgcattttaatagtgattgttaa

SEQ ID NO: 138520 - protein, 502 aa, Neisseria gonorrhoeae FA 1090
MQTDCDVLIAGNGLAALTLALSLPESFRIVILCKNRLDDTASRHAQGGIAAAWSGEDDIGKHVADTLEAGAGLCDEAAVRTILSQGKPAIEWLLAQGVAFDRNHNDLHLTREGGHTCRRIAHVADYTGEAVMQSLIIQIRRRPNIRVYERQMALDVQTESGAACGLTVLDCRTQETYRIRARHTVLAGGGLGQIYAATTTPPECTGDAIAMAIRAGCAIENLEFIQFHPTGLARPSENGRTFLISEAVRGEGGILTNQSGERFMPHYDRRAELAPRDIVARAIAAETAKQTQDFVSLDISRQPAAFVRRHFPSIHRHCLSQCGLDITRQAIPVRPVQHYTCGGIQTDPSGRTSLPQLYALGETACTGLHGANRLASNSLLECVVTARLAAQGIADGQAFQIEPFQRPSESPSAETDIFSNDLQNTFSRPVLQTFNQRHLGILRNDTDLHRAIDQLRLWKQNQAEPHTASEYENRNLLECSLAVAQAAYRRRQNIGAHFNSDC

SEQ ID NO: 138521 - DNA, 1572 bp, Bacteroides fragilis NCTC 9343; identical to SEQ ID NO: 33239
  CDS (1)..(1572): transl_table=11

SEQ ID NO: 138522 - protein, 523 aa, Bacteroides fragilis NCTC 9343; identical to SEQ ID NO: 33240

SEQ ID NO: 138523 - DNA, 1617 bp, Pseudomonas syringae pv. syringae B728a; identical to SEQ ID NO: 33241
  CDS (1)..(1617): transl_table=11

SEQ ID NO: 138524 - protein, 538 aa, Pseudomonas syringae pv. syringae B728a; identical to SEQ ID NO: 33242

SEQ ID NO: 138525 - DNA, 1692 bp, Pseudomonas fluorescens Pf-5; identical to SEQ ID NO: 33243
  CDS (1)..(1692): transl_table=11

SEQ ID NO: 138526 - protein, 563 aa, Pseudomonas fluorescens Pf-5; identical to SEQ ID NO: 33244

SEQ ID NO: 138527 - DNA, 1890 bp, Psychrobacter arcticus 273-4; identical to SEQ ID NO: 33245
  CDS (1)..(1890): transl_table=11

SEQ ID NO: 138528 - protein, 629 aa, Psychrobacter arcticus 273-4; identical to SEQ ID NO: 33246

SEQ ID NO: 138529 - DNA, 1599 bp, Colwellia psychrerythraea 34H; identical to SEQ ID NO: 33247
  CDS (1)..(1599): transl_table=11

SEQ ID NO: 138530 - protein, 532 aa, Colwellia psychrerythraea 34H; identical to SEQ ID NO: 33248

SEQ ID NO: 138531 - DNA, 1578 bp, Dechloromonas aromatica RCB; identical to SEQ ID NO: 33249
  CDS (1)..(1578): transl_table=11

SEQ ID NO: 138532 - protein, 525 aa, Dechloromonas aromatica RCB; identical to SEQ ID NO: 33250

SEQ ID NO: 138533 - DNA, 2604 bp, Thermobifida fusca YX
  CDS (1)..(2604): transl_table=11
gtgaacgcgagccctgccccgataccgctgcggctgaccgcaccagagcccggctggaccgcacacaccgatgtggtcatcgtcggatcagggatcgcagggctcagcaccgcactgcgctacatcgagcggacccccacaggcagggtcgtgctcgtcaccaaggacctcatcgccaacggctccacccggtgggcacaaggcgggatcgctgccgccgtcgaccccggcgacaacccgtgggcccacctggtggacaccatcgaagccggggcagggctgtgcgacccagacgcggtccgcatcctcgttgacgaaggccccgcagccctgcactggctgatcgaccagggaaccgtcttcgaccgcaccgacaccggggacctcgccctcaccagggaaggcggccaccgcgcgcaccgcatcgcacacgccggtggggacgctaccggcgcggagatcgaacgcgccctcgtcgaagcggtccgcgcctgcgaccgcattgaactcatcgaacacgctttcgtccccgacctgctcgtcggcgtcgacacccaggggcagcgccgggtcgccggggtcaccgtgcacgtcatgggcgagggcgaacgcgacggcgtgggcgcaatccacgccacagccgttgtgctcgccaccggaggcatgggacaggtgttcgccgccaccaccaacccggaagtgtccaccggagacggtctcgcgttggcgctgcgcgccggagcacgcgtccaagacctcgaattcgtgcaattccaccccaccgtgctgtggctgggcgcccacgcccgcggccgccagcccctcgtctccgaagcggtccgcggcgaaggcgcgttcctcgtcgacgtgcacggccgccgcttcatgcgcggcgtccacgagctcgcggacctcgccccccgcgacgtcgtcgcccgcgaaatcgcccgggccatggccgaaaccggcgccgaccatgtctacctggacgcccgccacttcggcgccgacaagtgggaacgccgcttccccaccatcctcgcctcgtgccgcacccacggcatcgacccggtcaccgacctcatccccgtcgccccggccgcgcactacgcgtccggcggcatccgcgtcgaccacgacgggcgcaccgacctcgccggactgtacgcggtcggcgagaccgcccgaaccggcgtgcacggagccaaccggctcgcctccaactccctgctcgaaggagtggtcttcgccgaccggatcgccgccgccctcgccgacgagcagcctcccgcgttgaccggtccggtcctgcccgccggaggcggccccagcgggctcgcggacccggagatcctccccgaactgcgggaagccatgtcccgctacgtcggagtgcgccgcgacgcggcagggcttgccaaagccaccgcggtactggaagagctcaccgcccgcgctaccgccaccaaccccgcgccgggcgtgcccgcctggcaggccaccaacctgctcaccgtcgcctgggccctggtgcgggcagcggaacgccgccaggaaacccgcggctcccactggcgggccgactacgagcagccgtcggctcaggcacgctcccggaccttcatcctcgacccgtcgggaatcagggaggacacgtcgatgcgcccctacacgctgccggaggaactcgtcgaggagctcaaccggatcaccgtgcccgaagctgcgctgcgcggagccgcaccggagaaaacccggcccgccgtggcatggcacgaagagctcatccgcaccgcgctcgccgaggactgctccggacaccaggtcgacgtcaccacggtcgccacgattcctcccgcacagatccgcaccgccgacgtagtcgcccgccgggacggggtggtcgccgggctgcccctcgcggaactcgtcttccgcctcgtatgcgaaggcgttgtcgaagtgatccggcacgctcgcgacggcgactccgtcaaacgcggcgacattctcatgacggtcactgcgcgcacccgcgacctgctcaccgcggaacggaccgccctgaacttcctcacccacctgtcggggatcgctaccgccacccgcgcctgggtggacgcggtagccggcactaaagccgcgattcgggacagccgcaaaacccacccgggcctgcgcgtcctggaaaaatacgcggttcgctgcggcggcggggtcaaccaccgcttcgggctcgcggatgccgctttgatcaaggacaaccacatcgccgcggccgggggagtagccgaagcagtgcgagcagtccgggagcgtttccccgacatcccgctggaggtggaagtcgaccggatcgaccagatcgaaccggcgctggccgcgggcgcggaagagatcctgctcgacaacttcaccgtgcccgaactgcgggaagcagtcgctctggtcgcgggccgcgcccgcttggaggccagcggcgggctcaccctcgatcgggcagcggatgtggcggccaccggagtggactatcttgcggttggcgcgctcacccactccagtcccgcactggacatcgcgctcgatctccgtgagaacttctga

SEQ ID NO: 138534 - protein, 867 aa, Thermobifida fusca YX
MNASPAPIPLRLTAPEPGWTAHTDVVIVGSGIAGLSTALRYIERTPTGRVVLVTKDLIANGSTRWAQGGIAAAVDPGDNPWAHLVDTIEAGAGLCDPDAVRILVDEGPAALHWLIDQGTVFDRTDTGDLALTREGGHRAHRIAHAGGDATGAEIERALVEAVRACDRIELIEHAFVPDLLVGVDTQGQRRVAGVTVHVMGEGERDGVGAIHATAVVLATGGMGQVFAATTNPEVSTGDGLALALRAGARVQDLEFVQFHPTVLWLGAHARGRQPLVSEAVRGEGAFLVDVHGRRFMRGVHELADLAPRDVVAREIARAMAETGADHVYLDARHFGADKWERRFPTILASCRTHGIDPVTDLIPVAPAAHYASGGIRVDHDGRTDLAGLYAVGETARTGVHGANRLASNSLLEGVVFADRIAAALADEQPPALTGPVLPAGGGPSGLADPEILPELREAMSRYVGVRRDAAGLAKATAVLEELTARATATNPAPGVPAWQATNLLTVAWALVRAAERRQETRGSHWRADYEQPSAQARSRTFILDPSGIREDTSMRPYTLPEELVEELNRITVPEAALRGAAPEKTRPAVAWHEELIRTALAEDCSGHQVDVTTVATIPPAQIRTADVVARRDGVVAGLPLAELVFRLVCEGVVEVIRHARDGDSVKRGDILMTVTARTRDLLTAERTALNFLTHLSGIATATRAWVDAVAGTKAAIRDSRKTHPGLRVLEKYAVRCGGGVNHRFGLADAALIKDNHIAAAGGVAEAVRAVRERFPDIPLEVEVDRIDQIEPALAAGAEEILLDNFTVPELREAVALVAGRARLEASGGLTLDRAADVAATGVDYLAVGALTHSSPALDIALDLRENF

SEQ ID NO: 138535 - DNA, 1587 bp, Ralstonia eutropha JMP134; identical to SEQ ID NO: 33251
  CDS (1)..(1587): transl_table=11

SEQ ID NO: 138536 - protein, 528 aa, Ralstonia eutropha JMP134; identical to SEQ ID NO: 33252

SEQ ID NO: 138537 - DNA, 1626 bp, Thiobacillus denitrificans ATCC 25259
  CDS (1)..(1626): transl_table=11
atgcacagacacgacgtcctcatcctcgggagcggccttgccgcactgacgaccgcactcaagctcgccgaccagcgtcgggtcgcgatcgtgaccaaacggcggatgaccgacggcgcgagcgattgggcgcaaggcgggatcgcggctgccctcgccagcggcgactcgatcgaagcccacgtgcacgacacgctcgtcgcgggtgccgggctctgcgacgaggcggtcacccggctcgtcgcgagccaggcgcgcgagatgatcgactggctcacccgcaacggcgtcgccttcacgccggaccccgagagccccggtgcgctccatctggcgcgcgagggcggccattcgaaacgccgcgtcgtccacgccgcggatgcgacgggccacgccgtgcagaccacgctactcgaccgggtgcgcgcgcatccgaacatcgagaccttcgaggatcacgtcgcgatcgacctcatttccggcaagcgcgccggcggcgaggagcgccagatccatggtgcctatgcgctgaacaagggcagcggcgaggtcgagacctttgcggcggggcacaccgtgctggccaccggcggcgccggcaaggtctatttgtatacgaccaaccccgataccgcgaccggcgacggcatcgccatggcctggcgcgccggctgccgcgtcgccaatctcgagttcgtgcagttccacccgacctgcctctaccatccgcacgccaagtccttcctcattagcgaggccgtacgcggcgagggcggacatctgctgctgcccgacggcagccgcttcatgcagttccatgacacgcgcgcagaactcgcgccgcgcgatgtcgtggcgcgcgcaatcgacttcgaaatgaagaagcgcgggatcgactgcgtctatctcgatatcagccacaagccagccgacttcgtgcgcgcgcatttcccgaccatctaccagcgctgcctcgaactcggcatcgacatcacgcgggagccgattccggtcgttcccgccgcccactacacctgcggcggcgtggtgaccgataccgaggcgcgcaccgatctttgcaacctccatgccgtcggcgaagtcaccttcacgggcctgcacggggcgaaccgcctggcgtcgaactcgctgctcgagtgtctggtcttcggccacgcggcggcgcgcgacatcctctcgacgccgccggcgccgacgctagaactgccgccctgggacgcctcgcgcgtgaccgacgccgacgaggaagtggtgatctcgcacaactgggacgagcttcggcgtttcatgtgggactacgtcggcatcgtgcgcacgaacaagcggctggcccgcgcatcgcatcgcatccgtctgctgcgcggggaaatcgacgagttctatcgcaatttccgcgtcagcaacgacctgatcgaactacgcaatctcgtgcaaagcgccgatctgatcgtgcgctgcgcccaactgcggcaggaaagccgcggcctgcattacagccgcgactatcccgagatcctgccagtcgccggcaacaccgtgctcaacccgcgtccgggtacgctgtgtccgagcgtttgtggcgtgaccagcgaagcgacactctga

SEQ ID NO: 138538 - protein, 541 aa, Thiobacillus denitrificans ATCC 25259
MHRHDVLILGSGLAALTTALKLADQRRVAIVTKRRMTDGASDWAQGGIAAALASGDSIEAHVHDTLVAGAGLCDEAVTRLVASQAREMIDWLTRNGVAFTPDPESPGALHLAREGGHSKRRVVHAADATGHAVQTTLLDRVRAHPNIETFEDHVAIDLISGKRAGGEERQIHGAYALNKGSGEVETFAAGHTVLATGGAGKVYLYTTNPDTATGDGIAMAWRAGCRVANLEFVQFHPTCLYHPHAKSFLISEAVRGEGGHLLLPDGSRFMQFHDTRAELAPRDVVARAIDFEMKKRGIDCVYLDISHKPADFVRAHFPTIYQRCLELGIDITREPIPVVPAAHYTCGGVVTDTEARTDLCNLHAVGEVTFTGLHGANRLASNSLLECLVFGHAAARDILSTPPAPTLELPPWDASRVTDADEEVVISHNWDELRRFMWDYVGIVRTNKRLARASHRIRLLRGEIDEFYRNFRVSNDLIELRNLVQSADLIVRCAQLRQESRGLHYSRDYPEILPVAGNTVLNPRPGTLCPSVCGVTSEATL

SEQ ID NO: 138539 - DNA, 1830 bp, Anabaena variabilis ATCC 29413; identical to SEQ ID NO: 33255
  CDS (1)..(1830): transl_table=11

SEQ ID NO: 138540 - protein, 609 aa, Anabaena variabilis ATCC 29413; identical to SEQ ID NO: 33256

SEQ ID NO: 138541 - DNA, 1617 bp, Pseudomonas fluorescens PfO-1; identical to SEQ ID NO: 33259
  CDS (1)..(1617): transl_table=11

SEQ ID NO: 138542 - protein, 538 aa, Pseudomonas fluorescens PfO-1; identical to SEQ ID NO: 33260

SEQ ID NO: 138543 - DNA, 1560 bp, Carboxydothermus hydrogenoformans Z-2901; identical to SEQ ID NO: 33263
  CDS (1)..(1560): transl_table=11

SEQ ID NO: 138544 - protein, 519 aa, Carboxydothermus hydrogenoformans Z-2901; identical to SEQ ID NO: 33264

SEQ ID NO: 138545 - DNA, 1587 bp, Burkholderia sp. 383
  CDS (1)..(1587): transl_table=11
atgaaattcgacgtggcgatcgtcggcagcggcctggcagggctgtcggtcgcactcaacctggccagcacgcgacgtgtcgcgctgatcgcgaaacggtcgatgatggagggcgcgagcgataacgcgcaaggcggcatcgcggctgtcctcgattcggcggacagcatcgagaaccacgtcgacgacacgctggtcgccggtggcggcttgtgcgacgaaggcgcgacgcgctatatcgtcgagcacggccgcgaagcgatcgaatggctgatctcgcagggcgtgccgttcacgaaggacgacgcggccgaactcggcttccacctcacgcgcgaaggcggccacagccaccgccggatcatccatgcggccgatgcgaccggccatgcggtgctcgccacgctgtcggcgcgtgcgcgccagcatccgaacatcacgttcttcgaaaaccaccacgcgatcgacctgatcacgtcggaccggctcggcctgcccggccgccgctgtcacggcctgtacgcgctcgacgtcgacaacgatcgcacgatcacgatcgaggcgccgcatacggtgctcgcaacgggcggcgccggcaaggtgtacctgtacacgacgaaccccgacaccgcgaccggcgacggcatcgcgatggcgtggcgtgcgggctgccgcgtgtcgaacatggagttcatccagttccacccgacctgcctgttccatccgtatgcgaagtcgttcctgatttccgaagccgtacgcggcgaaggcggcctgttgaagctgcccgacggcacgcgcttcatgcccgcgcacgatccgcgagccgaactcgcgccgcgcgacatcgtcgcgcgcgcgatcgacttcgagatcaagaagcgcgggatcgactgcgtgtatctcgacatcagccaccagccggaagcgttcctgcgcgaacacttcccgacgatccacgcgcgctgcctcgaattcggcatcgacatcgcgaaagagccgattcccgtcgtgccggccgcgcactacacgtgcggcggcgtcgtcaccgacctcgccgggcgcaccgatctcgcgggcctgtatgcggtcggcgaaacgtcgtacacggggctccacggcgcgaaccggctcgcgagcaactcgctgctcgaatgtctggtgatcggccgcgcggcggccgaggcgatcgaggcatccggcttcgatgccgaaacgccggccacgctgcccgcgtgggacgaaagccgcgtgtcggatgcggacgaggaagtcgtcgtcgcgcacaactgggacgagctgcgccgcctgatgtggaactacgtcggcatcgtgcgcaccgacaagcgcctcgaacgcgcgaagcaccggctgtcgctgctgcgcgacgagatccacgagtactacgcgaacttccgcgtgacgcgcgacctgctcgagctgcgcaacctcgtcgacgtggcaacgctgatcgtgaagagcgcacactcgcgccgcgaaagccgcgggctgcactacagccgcgactggccgaactcgctgccgaaagcgctgccgagcgtgctcacgccgcgcgcgcgccgctga

SEQ ID NO: 138546 - protein, 528 aa, Burkholderia sp. 383
MKFDVAIVGSGLAGLSVALNLASTRRVALIAKRSMMEGASDNAQGGIAAVLDSADSIENHVDDTLVAGGGLCDEGATRYIVEHGREAIEWLISQGVPFTKDDAAELGFHLTREGGHSHRRIIHAADATGHAVLATLSARARQHPNITFFENHHAIDLITSDRLGLPGRRCHGLYALDVDNDRTITIEAPHTVLATGGAGKVYLYTTNPDTATGDGIAMAWRAGCRVSNMEFIQFHPTCLFHPYAKSFLISEAVRGEGGLLKLPDGTRFMPAHDPRAELAPRDIVARAIDFEIKKRGIDCVYLDISHQPEAFLREHFPTIHARCLEFGIDIAKEPIPVVPAAHYTCGGVVTDLAGRTDLAGLYAVGETSYTGLHGANRLASNSLLECLVIGRAAAEAIEASGFDAETPATLPAWDESRVSDADEEVVVAHNWDELRRLMWNYVGIVRTDKRLERAKHRLSLLRDEIHEYYANFRVTRDLLELRNLVDVATLIVKSAHSRRESRGLHYSRDWPNSLPKALPSVLTPRARR

SEQ ID NO: 138547 - DNA, 1596 bp, Geobacter metallireducens GS-15; identical to SEQ ID NO: 33267
  CDS (1)..(1596): transl_table=11

SEQ ID NO: 138548 - protein, 531 aa, Geobacter metallireducens GS-15; identical to SEQ ID NO: 33268

SEQ ID NO: 138549 - DNA, 1605 bp, Desulfovibrio desulfuricans G20
  CDS (1)..(1605): transl_table=11
atgtccactttccgtcccgtcactcctgttctggtcatcggatccggtattgccggatgcactgcggctcttactctggccgacatgggtatagaggtcaccctgataaccagcggtgatacgcttgataaaggcaacactgcgctggcacagggaggcattgttttccgtgcgcacgacggtgaccccaagcagctggaaaaagatattctggtggccggtcacaggtacaattcgacaaaagccgtacgccatgtgagcgttgaaggacctaaggccgttcaggacgttcttgtggacaggctgtccattccttttgcccgtcagcaggacgacagcaagaccggcgccgactgcgagtgggacatgaccatggagggcggtcacgctgctcagcgtattctgcattgtgctgattacaccggccgggccattatggacgggctgatgcgcgaggtgcaggcatcacccaatatacgggtgctcaccaaccgcaccgccatcgacctgttgaccagtcatcaccacggtaccagtctggagttcaaataccagctggtgaaccagtgcgccggagcatatgtttttaacgaacagttacgttgtgtggagaccattctggcagattttaccgtgctggccacgggaggaataggacagatttacctgcacacaaccaactctcctgtgtgtgtcggttccggtctggccatggcatacagggctggtgggcgaattgaaaatgcagaatttgttcagtttcatcccacagcgctgtatcaccgcactgaacgccgttttttgattaccgaggccatgcgcggtgagggagcccggcttgtcaatgcgtccggcgaacctttcatgcaccgctatgatccccgggccgatcttgcgccgcgtgacattgtggcccgcgccattgtggaagaaatgctctccacaggcagcgactgtgtttttctggatgcggccaactatgtcgagcacaatcttgaaacgcggtttcctaccattttccagcgatgcctgaatcttggtattgatatccgcagacagcccattcccgttgtgcccgcagcacattatttctgcggaggggtgctggccgacctgaacggcaggactacgctggaacgcctttacagtgtgggcgaatgcaactgcaccggggtacacggcgccaacagacttgccagcacttccctgcttgaagccctgctgtggggccgcaacgcggcattgaatattcatggcagactgggacgccgggcagcgctgaataagaggctgcgtgattccattcctgactggaatccgctgggcgatgaaaaaaatgatgacccggccctgattgctcaggactggacaaccctgcgcaataccatgtggaattacgtgggcattaccagaacatccagccgtctgcagcgtgctcatgacgagatgcgcgacctgtggcgtcatgtgagtgacttttacaagcgcactcccctctccaagccgcttgtggatcttttccacggctgtcaggcgggttacgtggttaccatggcggcacgccgcaacaaacagagcgttggctgccattaccggatagactga

SEQ ID NO: 138550 - protein, 534 aa, Desulfovibrio desulfuricans G20
MSTFRPVTPVLVIGSGIAGCTAALTLADMGIEVTLITSGDTLDKGNTALAQGGIVFRAHDGDPKQLEKDILVAGHRYNSTKAVRHVSVEGPKAVQDVLVDRLSIPFARQQDDSKTGADCEWDMTMEGGHAAQRILHCADYTGRAIMDGLMREVQASPNIRVLTNRTAIDLLTSHHHGTSLEFKYQLVNQCAGAYVFNEQLRCVETILADFTVLATGGIGQIYLHTTNSPVCVGSGLAMAYRAGGRIENAEFVQFHPTALYHRTERRFLITEAMRGEGARLVNASGEPFMHRYDPRADLAPRDIVARAIVEEMLSTGSDCVFLDAANYVEHNLETRFPTIFQRCLNLGIDIRRQPIPVVPAAHYFCGGVLADLNGRTTLERLYSVGECNCTGVHGANRLASTSLLEALLWGRNAALNIHGRLGRRAALNKRLRDSIPDWNPLGDEKNDDPALIAQDWTTLRNTMWNYVGITRTSSRLQRAHDEMRDLWRHVSDFYKRTPLSKPLVDLFHGCQAGYVVTMAARRNKQSVGCHYRID

SEQ ID NO: 138551 - DNA, 1668 bp, Prochlorococcus marinus str. MIT 9312
  CDS (1)..(1668): transl_table=11
atgttaaggcctccattttcgcacgaaccgattccattaaataattgggatgtcattgttataggtgctggagctgcaggacttatgacttgtcttgagttacctgcaaatttaaaagtgctacttttaaatagaaacacaagcaaggtatcttctagtagatgggctcaaggaggaatagcatctgttgttagacaggacgattcattcgatcttcatgctgatgatactttaaaagcaggagatggactatgtgattttcaagcggtagaaatgctggttaaagaagcccctggttgtgttgacaggttgcagaatttagggatgatttttgatcaaagttttgatcaactagctactactttagaagcggcccattctcgcagaagagtcttgcatgttaaagatcgtactggaagagcattagttgaagttctagaagatcatattgaaaataaaaaaaatattcttcactgtaggggtgtaagagtaactgaacttcttattgaaaatgaagaatgcaagggagttcaggttcttgatggagctaatttgtattggattaaatcgagagctgttgttttagctacaggtggaggtgggcatttatttactaatacaaccaatcccgcgcaatcctctggagaagggatcgctcttgcatggaaagcaggtgctgctattgaagatttagagtttgttcaatttcatccaaccgctttaaaattctatggcgccccttgtttcttaatatctgaggcacttagaggagaaggcgcaatattaatcgataaaaatggtgaaagcccagttaaaaatcttaaaaatcgtgatttagctactagagatcaggtaagtagagcaattatgaagaatatgtatgacaataatgtggatcatgttggcttagatcttcgttacattgatccagaaaaacttgtagagcgatttcccacaattttaagtagatgtcaggattatggcgttaatcctttaaatgagattattcctgtcgctccagcagctcattattggatgggaggcgttaaaactgatttaagtgcatcttctacaagaaaaggattatatgctgtaggagaagttgcttctacaggtgtgcatggtgcgaatagattggcaagtaattcactaatggaatgcctcgtttttgcgagaaaactgtcttcaattgttctgagtgatcctcctaaattcgcaaaatttgatagatcattccaagagttcgatattaaagacccgaaagaagatcaaatttctcaaattgcagaaaaaattgatgaattaagaaaactatgttggtcaaatctaggtgtatctcgaaataaagtaaatatgagtaaatttctcgatactattcaagatgatatggctcaattacaaaaaaattccttactaaatagtcttgaaaaaataaattttgatcaagaaattagacttagtgaacctaatagaagggcacttaatcttttacttgatttaaagaatagacaaataacaactataactttattaaaagcttgtctttttagagaagaaagcagaggaggtcattatagagatgattttccaaataaagataaaaattgggtatgccatactagacaactgttagataaagaaattcataaaagatttattaaaaattag

SEQ ID NO: 138552 - protein, 555 aa, Prochlorococcus marinus str. MIT 9312
MLRPPFSHEPIPLNNWDVIVIGAGAAGLMTCLELPANLKVLLLNRNTSKVSSSRWAQGGIASVVRQDDSFDLHADDTLKAGDGLCDFQAVEMLVKEAPGCVDRLQNLGMIFDQSFDQLATTLEAAHSRRRVLHVKDRTGRALVEVLEDHIENKKNILHCRGVRVTELLIENEECKGVQVLDGANLYWIKSRAVVLATGGGGHLFTNTTNPAQSSGEGIALAWKAGAAIEDLEFVQFHPTALKFYGAPCFLISEALRGEGAILIDKNGESPVKNLKNRDLATRDQVSRAIMKNMYDNNVDHVGLDLRYIDPEKLVERFPTILSRCQDYGVNPLNEIIPVAPAAHYWMGGVKTDLSASSTRKGLYAVGEVASTGVHGANRLASNSLMECLVFARKLSSIVLSDPPKFAKFDRSFQEFDIKDPKEDQISQIAEKIDELRKLCWSNLGVSRNKVNMSKFLDTIQDDMAQLQKNSLLNSLEKINFDQEIRLSEPNRRALNLLLDLKNRQITTITLLKACLFREESRGGHYRDDFPNKDKNWVCHTRQLLDKEIHKRFIKN

SEQ ID NO: 138553 - DNA, 1653 bp, Synechococcus elongatus PCC 7942; identical to SEQ ID NO: 33269
  CDS (1)..(1653): transl_table=11

SEQ ID NO: 138554 - protein, 550 aa, Synechococcus elongatus PCC 7942; identical to SEQ ID NO: 33270

SEQ ID NO: 138555 - DNA, 1599 bp, Rhodospirillum rubrum ATCC 11170; identical to SEQ ID NO: 33271
  CDS (1)..(1599): transl_table=11

SEQ ID NO: 138556 - protein, 532 aa, Rhodospirillum rubrum ATCC 11170; identical to SEQ ID NO: 33272

SEQ ID NO: 138557 - DNA, 1602 bp, Burkholderia thailandensis E264
  CDS (1)..(1602): transl_table=11
atgaatttcgatgtggcgatcgtgggcagcggcctcgccggtctgtcggtcgcgctcaatctcgctcaaacgcgccgcgtcgcgctgatcgcgaagcgctcgatgatggagggcgcgagcgactacgcgcaaggcggcatcgccgcagtgctcgattcggcggacagcgtcgagaatcacgtgaacgacacgctgatcgcaggcggcggcctgtgcgacgaagccgcgacgcgctacatcgtcgagcacggccgcgaggcaatcgaatggctgatctcgcaaggcgtgccgttcacgaaggacgacgccgccgaactcggctttcacctgacgcgcgaaggcggccatagccatcgccgcatcatccacgcggccgacgcgacgggccacgcggtgctcgcgacgctgtccgagcgtgcccgcacgcatccgaacatcacgttcttcgaggatcaccatgcgatcgatctgatcacgtccgatcgcctcgggctacctggcctgccgggccggcgctgcgtgggcctctacgcactcgacgtgcagacgggccggacagtgacgatcgaggcgccgcacacggtgctcgcgacgggcggcgcgggcaaggtgtatctgtacacgacgaacccggacacggcgacgggcgacggcatcgcgatggcgtggcgcgcgggcgcgcgcgtcgcgaacatggagttcatccagttccatccgacgtgcctgttccatccgtacgcgaagtcgttcctcatttccgaggccgtgcgcggcgaaggcggcctgctcaagctgccggacggcacccgcttcatgcccgcgcacgatccgcgcgcggaactcgcgccgcgcgacatcgtcgcgcgcgcgatcgacttcgagatcaagaagcgcgggatcgattgcgtatatctcgacatcagccatcagcccgaggcattcctgcgcgagcatttcccgacgatctacgcgcgctgcctcgagttcggcatcgacatctcgaaggagccgatcccggtcgtgccggccgcgcactacacgtgcggcggcgtcgtcactgatctggccgggcgcaccgatatcgcgggcctgtacgcagtcggcgagacgtcgtacacgggcctgcacggcgcgaaccgtctcgcgagcaattcgctgctcgaatgcctcgtgatcggccgcgcgaccgccgagtcgatcgaagccgccggctacgattcggcgacgcacggcccgctgcccgcatgggacgagagccgcgtcgcggacgccgacgaggaggtggtcgtcgcgcacaactgggacgaactgcgccgcctgatgtggaactacgtcggcatcgtgcgcaccgacaagcgcctcgagcgcgcgcagcatcggctcaagctgctgcgcgacgagatccacgagtattacgcgcacttccgcgtgagccgcgatctgctcgagttgcgcaatctcgtggacgtcgcgtcgctgatcgtcgacggcgcgcgggcacgccacgaaagccgcgggctgcactacagccgcgactggccgcacgcattgccgaaggcgctgccgaccgtgctcacgccgtcgcggcgcatgccgaagtaa

SEQ ID NO: 138558 - protein, 533 aa, Burkholderia thailandensis E264
MNFDVAIVGSGLAGLSVALNLAQTRRVALIAKRSMMEGASDYAQGGIAAVLDSADSVENHVNDTLIAGGGLCDEAATRYIVEHGREAIEWLISQGVPFTKDDAAELGFHLTREGGHSHRRIIHAADATGHAVLATLSERARTHPNITFFEDHHAIDLITSDRLGLPGLPGRRCVGLYALDVQTGRTVTIEAPHTVLATGGAGKVYLYTTNPDTATGDGIAMAWRAGARVANMEFIQFHPTCLFHPYAKSFLISEAVRGEGGLLKLPDGTRFMPAHDPRAELAPRDIVARAIDFEIKKRGIDCVYLDISHQPEAFLREHFPTIYARCLEFGIDISKEPIPVVPAAHYTCGGVVTDLAGRTDIAGLYAVGETSYTGLHGANRLASNSLLECLVIGRATAESIEAAGYDSATHGPLPAWDESRVADADEEVVVAHNWDELRRLMWNYVGIVRTDKRLERAQHRLKLLRDEIHEYYAHFRVSRDLLELRNLVDVASLIVDGARARHESRGLHYSRDWPHALPKALPTVLTPSRRMPK

SEQ ID NO: 138559 - DNA, 1635 bp, Syntrophus aciditrophicus SB; identical to SEQ ID NO: 33273
  CDS (1)..(1635): transl_table=11

SEQ ID NO: 138560 - protein, 544 aa, Syntrophus aciditrophicus SB; identical to SEQ ID NO: 33274

SEQ ID NO: 138561 - DNA, 1713 bp, Syntrophus aciditrophicus SB; identical to SEQ ID NO: 33275
  CDS (1)..(1713): transl_table=11

SEQ ID NO: 138562 - protein, 570 aa, Syntrophus aciditrophicus SB; identical to SEQ ID NO: 33276

SEQ ID NO: 138563 - DNA, 1599 bp, Novosphingobium aromaticivorans DSM 12444; identical to SEQ ID NO: 33279
  CDS (1)..(1599): transl_table=11

SEQ ID NO: 138564 - protein, 532 aa, Novosphingobium aromaticivorans DSM 12444; identical to SEQ ID NO: 33280

SEQ ID NO: 138565 - DNA, 1668 bp, Saccharophagus degradans 2-40; identical to SEQ ID NO: 33281
  CDS (1)..(1668): transl_table=11

SEQ ID NO: 138566 - protein, 555 aa, Saccharophagus degradans 2-40; identical to SEQ ID NO: 33282

SEQ ID NO: 138567 - DNA, 1617 bp, Methylobacillus flagellatus KT; identical to SEQ ID NO: 33283
  CDS (1)..(1617): transl_table=11

SEQ ID NO: 138568 - protein, 538 aa, Methylobacillus flagellatus KT; identical to SEQ ID NO: 33284

SEQ ID NO: 138569 - DNA, 1599 bp, Burkholderia xenovorans LB400; identical to SEQ ID NO: 33285
  CDS (1)..(1599): transl_table=11

SEQ ID NO: 138570 - protein, 532 aa, Burkholderia xenovorans LB400; identical to SEQ ID NO: 33286

SEQ ID NO: 138571 - DNA, 1608 bp, Ralstonia metallidurans CH34
  CDS (1)..(1608): transl_table=11
atgaactacgacgtcgcgatcgtcggcagcgggctggccggccttaccgtcgctttgcagcttgccgatacccaccgggttgtcatcctcagcaaacgcgccatgacaacgggggctagcgattgggcccagggcggaatcgccgcggtgctcgactcgggcgatagtcacgacgaacacacgcaggacacgctggttgcaggtgcaggactttgcgacgaggatgcgacgcgcttcatcgtggagcatggccgcgaagcgatccaatggctgatcgaccgcggggtgccgttcacgcgcgacgaacaggccgaactcggcttccacctcacccgcgaaggcgggcatagccgtcgccgcatcatccacgttgccgacgccacgggccatgcggtggtgaccacgctggccgagcaggcccgccagcatccgaacatcacgatcctcgaagaccagttcgcagtcgacctgatcacgtccgccaagctcggcttgcccggcaaccgttgctatggcctgtacgtgctcgatgcggaaacgggcgaagtgcgcacgctcacagccacgcatacggtactggccgccggcggcgcgggcaaggtctacctctatacgaccaaccccgatacggctacgggcgacggcatcgccatggcctggcgcgcgggctgccgggtgtcgaacatggaattcatccagttccacccgacctgcctctatcacccctacgcgaagtcgttcctgatctcggaagccgtgcgcggcgaaggcggcctgctgaggctgccggatggcacgcgcttcatgcccgagcatgatgcccgcgccgaactggcgccgcgtgacgtggtagcccgcgccatcgacttcgaaatgaagaagcgcggcctggattgcgtgtatctcgacatcacgcaccagcccgtgtcgttcctcaaggaacacttcccgacgatctacgcccgctgcctggaactcggcatcgatatcgcacgcgagccgattcccgtggtgccggccgcgcactacacctgtggtggcgtggtcaccgatacggcgggccgcaccgatctcggcaatctctacgcagttggcgagacgggctgcacgggcctgcacggcgccaaccgcctggcctcgaactcgctgctcgaatgcatggtgatcggccgtgccgcggctgcggacattgcctcgcaaggcaaggccgacgcgccggacatcacgctgccggcctgggacgagagccgcgtatcggatgccgacgaggaagtcgtcgtctcgcacaactgggatgagctgcgccgcctgatgtggaactacgtcggcatcgtgcgcaccgacaagcggctggagcgcgcgcagcaccggatcggcatgctgcgcgaggagattgccgagtactacgcgaatttccgcgttactcgcgatctgttggaattgcgcaacctggtggaagtggcgtcgctgatcgtcgacagcgcctactcgcgccacgaaagccgtggcctgcactacagccgtgactatccggaaacgctgccgaaggcgctgcctaccgtgctgcaaccgctgacgggccgcgcggcaagccgccggaaggtctga

SEQ ID NO: 138572 - protein, 535 aa, Ralstonia metallidurans CH34
MNYDVAIVGSGLAGLTVALQLADTHRVVILSKRAMTTGASDWAQGGIAAVLDSGDSHDEHTQDTLVAGAGLCDEDATRFIVEHGREAIQWLIDRGVPFTRDEQAELGFHLTREGGHSRRRIIHVADATGHAVVTTLAEQARQHPNITILEDQFAVDLITSAKLGLPGNRCYGLYVLDAETGEVRTLTATHTVLAAGGAGKVYLYTTNPDTATGDGIAMAWRAGCRVSNMEFIQFHPTCLYHPYAKSFLISEAVRGEGGLLRLPDGTRFMPEHDARAELAPRDVVARAIDFEMKKRGLDCVYLDITHQPVSFLKEHFPTIYARCLELGIDIAREPIPVVPAAHYTCGGVVTDTAGRTDLGNLYAVGETGCTGLHGANRLASNSLLECMVIGRAAAADIASQGKADAPDITLPAWDESRVSDADEEVVVSHNWDELRRLMWNYVGIVRTDKRLERAQHRIGMLREEIAEYYANFRVTRDLLELRNLVEVASLIVDSAYSRHESRGLHYSRDYPETLPKALPTVLQPLTGRAASRRKV

SEQ ID NO: 138573 - DNA, 1569 bp, Acidobacteria bacterium Ellin345; identical to SEQ ID NO: 33287
  CDS (1)..(1569): transl_table=11

SEQ ID NO: 138574 - protein, 522 aa, Acidobacteria bacterium Ellin345; identical to SEQ ID NO: 33288

SEQ ID NO: 138575 - DNA, 1590 bp, Myxococcus xanthus DK 1622; identical to SEQ ID NO: 33289
  CDS (1)..(1590): transl_table=11

SEQ ID NO: 138576 - protein, 529 aa, Myxococcus xanthus DK 1622; identical to SEQ ID NO: 33290

SEQ ID NO: 138577 - DNA, 1467 bp, Rubrobacter xylanophilus DSM 9941; identical to SEQ ID NO: 33291
  CDS (1)..(1467): transl_table=11

SEQ ID NO: 138578 - protein, 488 aa, Rubrobacter xylanophilus DSM 9941; identical to SEQ ID NO: 33292

SEQ ID NO: 138579 - DNA, 1554 bp, Mesorhizobium sp. BNC1
  CDS (1)..(1554): transl_table=11
atgaacggctttgatcttcacgacctcagcggccgcccggtcattatcggcgctggccttgctgggctcgcaaccgcgcttcatctttcacccatgcctgtcgtggtgctttccaaggcacctctcggcgaggaggcatcgagcgcctgggcgcagggcgggctcgcggcagccatggggccggacgatgatcccgaccttcatctggccgatacgctcgccgcaggggacgggctttgcgatcccgacattgtcggcaaggtcgtccgagcagcacctcgggcgatcgaggacctggcacgcttcggcgtccgctttgacaaggcagaggacggtccgctgctccttggacttgaggcggcgcatagccgccgccgcatcatccatgcggaaggagacgccacgggccgcgaaatcatgcgcgcgcttgtggccgcggtgcgccggactccctcgatcaccgtgctggaaggtttcgaagcgcggcggctcctcacggaagacggtgccatttccggggttgtcgccgccgggccggacagtccggtgctgcttgctaccagccgcgttgtgatcgccaccggcagtatcggcggtttgtacgaggataccacaacgcctttgggttccttcggccaagggcttgcgcttgccgcacatgccggcgcggcgcttcgcgatctggaattcgtgcagttccatcccaccgcgctcgatgggaccgggcgtccgatgcgcctcgtcagcgaggccgtgcgcggggagggcgcggttctcatcgacgagactggccgtcgtttcctcgagggcacgccgggcgccgagcttgcgccgcgcgacgtggtggcgcgcgcggtggcgtggcatctctccatgggccatcgcgtttttctcgatgcgcggggggccatcgggaccagcttcgctctccgctttcccagtatttacgccttctgcagagccgcgggccttgatccgtcgcgtgtgccgatccccattcgccctgccgtccattaccacatgggcggcattgccgttaacggcgaaggccgcagctccgtgcgcggcctatgggcgtgcggcgaggtagcctcgaccggccttcacggcgcgaaccggctcgccagcaattcgctgatcgaggcggccgtctttggccgttgggtggcggaaagcatcgccggcgcgggcgatgcgatgcgccatcggccgggctccttcgccatgcccggcagtgcggatgcttcagtcgtgcgtccggtcgtctcgcgtgccttgggcgtcatccgcgatgcggacacaatgcgggatgcaattgcttcgctccttcctctggccgagcgcaaaggacccgcttctgatcccgcggcggtcgcattgatgatggttgtctccgcgctggcgcgcgaggaaagccggggcgggcatttccgcgccgatttcccccggcgcagtgagtatgcggtgcattcgcgccttacgctggccaacgcattcgagacggcgcggagtctcgtgcccgagcctgcaatcccgatggccaggagcgcatga

SEQ ID NO: 138580 - protein, 517 aa, Mesorhizobium sp. BNC1
MNGFDLHDLSGRPVIIGAGLAGLATALHLSPMPVVVLSKAPLGEEASSAWAQGGLAAAMGPDDDPDLHLADTLAAGDGLCDPDIVGKVVRAAPRAIEDLARFGVRFDKAEDGPLLLGLEAAHSRRRIIHAEGDATGREIMRALVAAVRRTPSITVLEGFEARRLLTEDGAISGVVAAGPDSPVLLATSRVVIATGSIGGLYEDTTTPLGSFGQGLALAAHAGAALRDLEFVQFHPTALDGTGRPMRLVSEAVRGEGAVLIDETGRRFLEGTPGAELAPRDVVARAVAWHLSMGHRVFLDARGAIGTSFALRFPSIYAFCRAAGLDPSRVPIPIRPAVHYHMGGIAVNGEGRSSVRGLWACGEVASTGLHGANRLASNSLIEAAVFGRWVAESIAGAGDAMRHRPGSFAMPGSADASVVRPVVSRALGVIRDADTMRDAIASLLPLAERKGPASDPAAVALMMVVSALAREESRGGHFRADFPRRSEYAVHSRLTLANAFETARSLVPEPAIPMARSA

SEQ ID NO: 138581 - DNA, 1716 bp, Trichodesmium erythraeum IMS101; identical to SEQ ID NO: 33295
  CDS (1)..(1716): transl_table=11

SEQ ID NO: 138582 - protein, 571 aa, Trichodesmium erythraeum IMS101; identical to SEQ ID NO: 33296

SEQ ID NO: 138583 - DNA, 1614 bp, Shewanella sp. MR-4
  CDS (1)..(1614): transl_table=11
atgaaacaagtagttgaacaccaatctgacatattagtcataggtagcggtgccgcaggtctgacactagctttgcatcttgctgaaaaagcaaacgtaattctgctctcaaaaggcccactctccgaagggtcgacatactacgcccaaggcggtatcgcctccgtgttcgatgaaagtgataccatcgaatcccatgtggccgatacgttagtggccggtgccggcttgtgcgataaagaagtggtaacttttaccgctgaaaacgccaagagcgccatgcaatggttaattgaatgtggcgtggcattcgataaagaagaaaccgctggcgataatgccaaagacgcaccttatcatttaacccgcgaaggcggccacagccatagacgcattctgcatgccgcagatgcgacgggcaaagaagtgcaaaccacgctgcaagaacgcgccctcgcccaccccaatattcaagttttagaacgttacaacgccatcgacctcatcaccacccgtaaattaaatcgccccggcaatcgcgtgctaggcgcttatgtgtggaaccgtaatgccgagcaggtcgaaaccattaaggcaaaatttgtcgcattagctacaggtggtagctctaaagtctaccaatacacctcaaaccccgatgtggcgagtggcgatggcattgccatggcgtggcgcgcaggttgccgtgtggccaacatggaatttaatcaattccatccaacctgcctttaccatgccgatgcccgtaacttcctgctgaccgaagccctgcgcggtgaaggtgcttatttgcgccgccccgatggcagtcgctttatgccagactttgacgaacgcgccgaactcgcacctcgcgatatcgtagcccgagccatcgactacgaaatgaaacgcttaggtgccgattgcgtctatttagatatcagccataaagacagcgactttgtcatcaagcatttcccgacgatctacagtcgctgcttagagctggggatcgatatcaccaaagatgccattcctgtggtgcctgctgcccactatacctgtggtggtgtaatgacggacttgcatggccaaaccgacctcaacggcctctacgccataggtgaggtagcttataccggcttacatggtgcgaaccgcttggcaagcaactcgctgctggagtgcttggtatttgcccgcgccgcgtcgcaggatattgagagccaaatgcacaaaatcccattaccggggcaaattccagcgtgggacgagagtaaagtctccaactccgatgaagaagtggtgattgcccacaactggcacgaactgcgcctctttatgtgggactatgtgggaatcgtacgctcggataaacgcttggagcgcgcactgcgccgctgcttgatgttgcagcaggaaatccaagagtattacagcaacttcagagtcagtaataatctgctggaactgcgtaacttagtgcaagtagccgagcttattatccgctgcgcgatggagcgcaaggaaagccgtggtttgcactacaatatcgaccatcccgaaaaggttgactctccgcaaccgacgattctgcagcctgaaaaataa

SEQ ID NO: 138584 - protein, 537 aa, Shewanella sp. MR-4
MKQVVEHQSDILVIGSGAAGLTLALHLAEKANVILLSKGPLSEGSTYYAQGGIASVFDESDTIESHVADTLVAGAGLCDKEVVTFTAENAKSAMQWLIECGVAFDKEETAGDNAKDAPYHLTREGGHSHRRILHAADATGKEVQTTLQERALAHPNIQVLERYNAIDLITTRKLNRPGNRVLGAYVWNRNAEQVETIKAKFVALATGGSSKVYQYTSNPDVASGDGIAMAWRAGCRVANMEFNQFHPTCLYHADARNFLLTEALRGEGAYLRRPDGSRFMPDFDERAELAPRDIVARAIDYEMKRLGADCVYLDISHKDSDFVIKHFPTIYSRCLELGIDITKDAIPVVPAAHYTCGGVMTDLHGQTDLNGLYAIGEVAYTGLHGANRLASNSLLECLVFARAASQDIESQMHKIPLPGQIPAWDESKVSNSDEEVVIAHNWHELRLFMWDYVGIVRSDKRLERALRRCLMLQQEIQEYYSNFRVSNNLLELRNLVQVAELIIRCAMERKESRGLHYNIDHPEKVDSPQPTILQPEK

SEQ ID NO: 138585 - DNA, 1614 bp, Shewanella sp. MR-7
  CDS (1)..(1614): transl_table=11
atgaaacaagtagttgaacaccaatctgacatattagtcataggtagcggtgccgcaggtctgacactagctttgcatcttgctgaaaaagcaaacgtaattctgctctcaaaaggcccactctctgaagggtcgacatactacgcccaaggcggtatcgcctccgtgttcgatgaaagtgacaccatcgaatcccatgtggccgataccttagtggccggtgctggtttgtgcgataaagatgtggtgacttttaccgctgaaaacgctaaaagtgccatgcagtggttaattgaatgtggcgtggcattcgataaagaagaaaccgctggtgataatgccaaagacgcaccttatcatttgacacgcgaaggcggccacagccatagacgcattctgcatgctgccgatgcgacgggcaaagaagtgcaaaccacgctgcaagaacgcgccctcgcccaccccaatattcaagttttagaacgttacaacgccatcgacctcatcaccacccgtaaattgaatcgccccggcaatcgcgtgttgggcgcttatgtgtggaaccgtaatgccgagcaggtcgaaaccattaaggcaaaatttgtcgcattagctacaggtggtagctctaaagtctaccaatacacctcaaaccccgatgtggcgagtggtgatggtattgccatggcgtggcgcgcaggttgccgtgtggccaacatggaatttaatcaattccatccaacctgcctttaccatgccgatgcccgtaacttcctgctgactgaagccctgcgcggtgaaggtgcttatttgcgccgccccgatggcagtcgctttatgccagactttgacgaacgcgccgaactcgcacctcgcgatatcgtagcccgagccatcgactacgaaatgaaacgcttaggtgccgattgcgtctatttagatatcagccataaagacagcgactttgtcatcaagcatttcccgacgatctacagtcgctgcttagagctggggatcgatatcaccaaagatgccattcctgtggtgcctgctgcccactatacctgtggtggtgtaatgacggacttgcatggccaaaccgacctcaacggcctctacgccataggtgaggtagcttataccggcttacatggtgcgaaccgcttggcaagcaactcgctgctggagtgcttggtatttgcccgcgccgcgtcgcaggatattgagagccaaatgcacaaaatcccattaccggggcaaattccagcgtgggacgagagtaaagtctccaactccgatgaagaagtggtgattgcccacaactggcacgaactgcgcctctttatgtgggactatgtgggaatcgtacgctcggataaacgcttggagcgcgcactgcgccgctgcttgatgttgcagcaggaaatccaagagtattacagcaacttcagagtcagtaataatctgctggaactgcgtaacttagtgcaagtagccgagcttattatccgctgcgcgatggagcgcaaggaaagccgtggtttgcactacaatatcgaccatcccgaaaaggttgactctccgcaaccgacgattctgcagcctgaaaaataa

SEQ ID NO: 138586 - protein, 537 aa, Shewanella sp. MR-7
MKQVVEHQSDILVIGSGAAGLTLALHLAEKANVILLSKGPLSEGSTYYAQGGIASVFDESDTIESHVADTLVAGAGLCDKDVVTFTAENAKSAMQWLIECGVAFDKEETAGDNAKDAPYHLTREGGHSHRRILHAADATGKEVQTTLQERALAHPNIQVLERYNAIDLITTRKLNRPGNRVLGAYVWNRNAEQVETIKAKFVALATGGSSKVYQYTSNPDVASGDGIAMAWRAGCRVANMEFNQFHPTCLYHADARNFLLTEALRGEGAYLRRPDGSRFMPDFDERAELAPRDIVARAIDYEMKRLGADCVYLDISHKDSDFVIKHFPTIYSRCLELGIDITKDAIPVVPAAHYTCGGVMTDLHGQTDLNGLYAIGEVAYTGLHGANRLASNSLLECLVFARAASQDIESQMHKIPLPGQIPAWDESKVSNSDEEVVIAHNWHELRLFMWDYVGIVRSDKRLERALRRCLMLQQEIQEYYSNFRVSNNLLELRNLVQVAELIIRCAMERKESRGLHYNIDHPEKVDSPQPTILQPEK

SEQ ID NO: 138587 - DNA, 1635 bp, Alkalilimnicola ehrlichei MLHE-1; identical to SEQ ID NO: 33299
  CDS (1)..(1635): transl_table=11

SEQ ID NO: 138588 - protein, 544 aa, Alkalilimnicola ehrlichei MLHE-1; identical to SEQ ID NO: 33300

SEQ ID NO: 138589 - DNA, 1542 bp, Rhizobium leguminosarum bv. viciae 3841; identical to SEQ ID NO: 33305
  CDS (1)..(1542): transl_table=11

SEQ ID NO: 138590 - protein, 513 aa, Rhizobium leguminosarum bv. viciae 3841; identical to SEQ ID NO: 33306

SEQ ID NO: 138591 - DNA, 1503 bp, Solibacter usitatus Ellin6076; identical to SEQ ID NO: 33307
  CDS (1)..(1503): transl_table=11

SEQ ID NO: 138592 - protein, 500 aa, Solibacter usitatus Ellin6076; identical to SEQ ID NO: 33308

SEQ ID NO: 138593 - DNA, 1620 bp, Magnetococcus sp. MC-1; identical to SEQ ID NO: 33309
  CDS (1)..(1620): transl_table=11

SEQ ID NO: 138594 - protein, 539 aa, Magnetococcus sp. MC-1; identical to SEQ ID NO: 33310

SEQ ID NO: 138595 - DNA, 1614 bp, Shewanella sp. ANA-3; identical to SEQ ID NO: 33311
  CDS (1)..(1614): transl_table=11

SEQ ID NO: 138596 - protein, 537 aa, Shewanella sp. ANA-3; identical to SEQ ID NO: 33312

SEQ ID NO: 138597 - DNA, 1596 bp, Mycobacterium smegmatis str. MC2 155; identical to SEQ ID NO: 33313
  CDS (1)..(1596): transl_table=11

SEQ ID NO: 138598 - protein, 531 aa, Mycobacterium smegmatis str. MC2 155; identical to SEQ ID NO: 33314

SEQ ID NO: 138599 - DNA, 1728 bp, Nocardioides sp. JS614; identical to SEQ ID NO: 33315
  CDS (1)..(1728): transl_table=11

SEQ ID NO: 138600 - protein, 575 aa, Nocardioides sp. JS614; identical to SEQ ID NO: 33316

SEQ ID NO: 138601 - DNA, 1590 bp, Azoarcus sp. BH72; identical to SEQ ID NO: 33317
  CDS (1)..(1590): transl_table=11

SEQ ID NO: 138602 - protein, 529 aa, Azoarcus sp. BH72; identical to SEQ ID NO: 33318

SEQ ID NO: 138603 - DNA, 1647 bp, Mycobacterium sp. KMS
  CDS (1)..(1647): transl_table=11
atgaccggccccgggggcagaagcgcagcgaccggggggaaggcggttcgtcgcggttgcggcggcaccacacactggcagcagcgtgccgacgtcgtcgtgatcggcaccggcgtcgccggtctggtggcggggctggcggcacatcgccgaggccgccgggtcatcgtgctgagcaaggcccccgaacaggccggatcgacggccaccggatacgcccagggcgggatcgcggtggtgttgcccggcggcaggtgcgatgacgcggattcggtcgacgcccacgtcgccgacaccctcaccgccggtggcgggttgtgcgacccggaggcggtgcggtccatcgtcgccgacgggtatcgcggggtgcgcgatctcgtcgacgacggcgcccgcttcgacgaggccacccccggccgctgggcgctgacgcgtgagggcggacattcccggcgccggatcatccacgccggcggcgatgccaccggcgcggaggtgcagcgcgcgctcgaccatgcggcacgggtgctcgacatccgacacaaccacgtggcggtgcgggtgctgcacgacgacgccgcggtgaccggcgtactggtcctcagcgaggacggacccggcatcgtgcacgccccggcggtgatcctcgcgaccggcgggctcggccacctctatgcggccaccacgaacccggaggcctccaccggcgacggcatcgcgctggcgctgtgggccggcgtaccggtcagcgacatcgagttcgtccagttccaccccacgatgctgttcgacggcttcaccaacggcaggcgtccgctgatcaccgaggcgctgcgcggagagggcgcgagactcgtcgacgcgcacggtgacccggttaccgctggtgtgcatccgctgggtgacctcgcaccgcgcgatgtggtcgccggcgcgatcgacgcgcggctcaaggcgaccggcgacccgtgcgtctacctggacgcccgccacctggccgggatcgcacaccgtttcccgacggtcaccgccgcctgccggcaggccgggatcgaccccgctcgccagcccatccccgtcgtccctggggctcattacagctgcggcggtgtcgtcaccgacgtcgacggccgcacggcgctacccggtctgtacgccgccggggaggtggcccgcaccgggatgcacggcgccaaccggctggcgtccaacagcctgctcgaagggctggtcgtcggggcgcgcgcgggccgaggtgccgccgaacacgccgcggcggcgggcccgacccgcgctgtggcgcccgagcgactcgtgggcgagaccctcgaccgccgggagctacaggcggcgatgagccgcgacgcgtcggtggtgcgcgacgccgaaggtctgatgcggttgggcgacgtgctcgccaaggcgcgtgcccgtccgctgcgctcccgcgccgatgtcgaggacgccgcgctcaccctgaccgcgcgggcggtttcggtcgccgcgctgcagcgcgcggaatcgcgggggtgccaccaccgcgccgaccatccggacaccgacccggtgcaggcggtcagcggggcggtcgacctggacgaacacggacacctacgactgaagatgagggcggacgcgtgctgctga

SEQ ID NO: 138604 - protein, 548 aa, Mycobacterium sp. KMS
MTGPGGRSAATGGKAVRRGCGGTTHWQQRADVVVIGTGVAGLVAGLAAHRRGRRVIVLSKAPEQAGSTATGYAQGGIAVVLPGGRCDDADSVDAHVADTLTAGGGLCDPEAVRSIVADGYRGVRDLVDDGARFDEATPGRWALTREGGHSRRRIIHAGGDATGAEVQRALDHAARVLDIRHNHVAVRVLHDDAAVTGVLVLSEDGPGIVHAPAVILATGGLGHLYAATTNPEASTGDGIALALWAGVPVSDIEFVQFHPTMLFDGFTNGRRPLITEALRGEGARLVDAHGDPVTAGVHPLGDLAPRDVVAGAIDARLKATGDPCVYLDARHLAGIAHRFPTVTAACRQAGIDPARQPIPVVPGAHYSCGGVVTDVDGRTALPGLYAAGEVARTGMHGANRLASNSLLEGLVVGARAGRGAAEHAAAAGPTRAVAPERLVGETLDRRELQAAMSRDASVVRDAEGLMRLGDVLAKARARPLRSRADVEDAALTLTARAVSVAALQRAESRGCHHRADHPDTDPVQAVSGAVDLDEHGHLRLKMRADACC

SEQ ID NO: 138605 - DNA, 1509 bp, Neisseria meningitidis FAM18; identical to SEQ ID NO: 33319
  CDS (1)..(1509): transl_table=11

SEQ ID NO: 138606 - protein, 502 aa, Neisseria meningitidis FAM18; identical to SEQ ID NO: 33320

SEQ ID NO: 138607 - DNA, 1590 bp, Acidovorax sp. JS42; identical to SEQ ID NO: 33321
  CDS (1)..(1590): transl_table=11

SEQ ID NO: 138608 - protein, 529 aa, Acidovorax sp. JS42; identical to SEQ ID NO: 33322

SEQ ID NO: 138609 - DNA, 1677 bp, Nostoc punctiforme PCC 73102; identical to SEQ ID NO: 33323
  CDS (1)..(1677): transl_table=11

SEQ ID NO: 138610 - protein, 558 aa, Nostoc punctiforme PCC 73102; identical to SEQ ID NO: 33324

SEQ ID NO: 138611 - DNA, 1632 bp, Bifidobacterium longum DJO10A
  CDS (1)..(1632): transl_table=11
atgagcaacactgaaatcgtcgtcgtgggcgcaggcgtcgccggactgtccgcggcactggccgtggccggcaccggacacgacgtgaccttggtaaccaaggccggactggtggaatcgaacacctatcatgcgcagggcggcatcgccgcggccatcttctccgacgacgacccgaagctgcacgccgccgacaccatggccgcgggccacggcctgtgcgacccgaaggccgtggacatcctcacccgtgagggtgcggagcgcgtccgcgagttcgccgcggccggcgtccacttcgaccgcgacgcgcagggacacatgctgcgcggcctggaagcggctcattcgcgcgcccgcgtggtgcatgccgggggagacgccaccggcaaagtgctcgaactggacgtctccgccatggtgtgcaagaacccgcgcatccacattatcgagaacgccttcctcaaagatctcatcgtgcgggacggccacatcgccggcgtccgcctgctgatcgacgggcaggacaaggatctggccgccggccgggtgatcttggccaccggtggcgcgggtcgtatgtacccgtacaccaccaatccgccggtctccactgcggacggtctcgccgccgcatggcgtgcgggcgcccaggtcgccgatctggagttctaccagttccatcccaccgccatggccgtgggcgagcacttcctcgtctccgaagccgtgcgcggcgaaggcgcggtgctgctggacgaacacggccaccggtatatgaaggacatcgatccgcgcgccgaactcgcaccgcgcgacgtcgtggcccgcgagaacttccgcgtgatgcaggcgcaaggtggcaagcccgtgatgctcgacgtctcgccgatgacccgcgagaaccccgacctggccagcttcctggcccaccgattcccgaccatcgatgcctatacgcgttcgcttggcttcgactggagcaaggagccgatcccggtggcgcccgccgcgcactactacatgggaggcattcgcaccgatctggacgcccggacctccatccccggcctgtacgcggccggcgaatgcgctcgtaccggtgtcatgggctccaaccgccttgcctccaactcgctgctcgaaggacttgtctacggacgccgcgccggtcttgccgccgtcgcggacggtgacgacgcggtctgggcacccgaaccgttcctgaactccgccaccggtgccgtgttcgaccatgcgccgatcgcgctggccgctcctgccactacggctgctgctgacgataccgccgccgacaaggtctgggaccgtacccgcatccagaacaccatgtggcatggcgtcggcgtgctgcgcgacgaggccggactgaaaaccgccatcgccgaactcggccaaggcctcgccgccgcaaacgcccaggctgatgtaaacgccgatggtgctgcaagcagcgttgaggctttggagaaccgcaatatgctcaccgtaggctatgtggccgccatcgccgcgctcgcccgcaccgagtcgagaggcgcccacgcccgcaccgactacagcgagccagtcgacaactgggcccactccgtcgcctacatcaaggactga

SEQ ID NO: 138612 - protein, 543 aa, Bifidobacterium longum DJO10A
MSNTEIVVVGAGVAGLSAALAVAGTGHDVTLVTKAGLVESNTYHAQGGIAAAIFSDDDPKLHAADTMAAGHGLCDPKAVDILTREGAERVREFAAAGVHFDRDAQGHMLRGLEAAHSRARVVHAGGDATGKVLELDVSAMVCKNPRIHIIENAFLKDLIVRDGHIAGVRLLIDGQDKDLAAGRVILATGGAGRMYPYTTNPPVSTADGLAAAWRAGAQVADLEFYQFHPTAMAVGEHFLVSEAVRGEGAVLLDEHGHRYMKDIDPRAELAPRDVVARENFRVMQAQGGKPVMLDVSPMTRENPDLASFLAHRFPTIDAYTRSLGFDWSKEPIPVAPAAHYYMGGIRTDLDARTSIPGLYAAGECARTGVMGSNRLASNSLLEGLVYGRRAGLAAVADGDDAVWAPEPFLNSATGAVFDHAPIALAAPATTAAADDTAADKVWDRTRIQNTMWHGVGVLRDEAGLKTAIAELGQGLAAANAQADVNADGAASSVEALENRNMLTVGYVAAIAALARTESRGAHARTDYSEPVDNWAHSVAYIKD

SEQ ID NO: 138613 - DNA, 1680 bp, Crocosphaera watsonii WH 8501; identical to SEQ ID NO: 33327
  CDS (1)..(1680): transl_table=11

SEQ ID NO: 138614 - protein, 559 aa, Crocosphaera watsonii WH 8501; identical to SEQ ID NO: 33328

SEQ ID NO: 138615 - DNA, 1596 bp, Prosthecochloris aestuarii DSM 271; identical to SEQ ID NO: 33329
  CDS (1)..(1596): transl_table=11

SEQ ID NO: 138616 - protein, 531 aa, Prosthecochloris aestuarii DSM 271; identical to SEQ ID NO: 33330

SEQ ID NO: 138617 - DNA, 1587 bp, Kineococcus radiotolerans SRS30216
  CDS (1)..(1587): transl_table=11
gtgaacccccgggcccgggccgcggaggagctgcggaccgacgtgctggtcgtcggggccgggatcgcgggactgacggccgcgctcgaggccgcccgcaccgggcgcgtcgtcctggccaccaagaccgcgctcggcgacggcagcacccactacgcccagggcgggatcgccgcggcggtggacgccgccgacgtcgccgcccacgtcgccgacaccctcgccgccggggccggcctgtcctcccccgccgcggtgcgggcgttgtgcgcgggcgggccggccgcggtccgcgtcctcgccgaacgcggcgtggagttcgaccggggttccaccggcggctgggccctgggcctggaggccgcgcactcgacctcgcgcatcctgcacgccgggggcgaccggaccggggccgcgatctccgccgccctggccgcggccgtgcgccgcagcgacgtcaccgtccgcgaggaggcgttcctggccgggctgcgcaccgaggacggccgcgtcgtcggggccgacctgctggtgggcgacgaggccggggggcccgcgcacgtcctgcgggtcaccgccgacgccgtcgtgctcgccaccggcggcgcggggcagttgttcagccgcaccaccaaccccgcggtcgcgaccgccgacggcctcgccgcggcgttccgcgccggcgccgcggtcgccgacctggagttcttccagttccacccgacggtggccgcgctgccctcccccttcctcgtctccgaggccgtccgcggcgagggcgcggtgctgctcgacgcggccgggcaccggttcgccgaccgcgccgacccgcggggggagctcgccccgcgcgacgtcgtggcccgggccatcgccgcggccatggccgagcacggcggggcgcccgtggtcctcgacgccaccggggtctcggcccgcctcggccgccccttcgccgagcgcttccccggcatcgcccagctgtgcgccgaggccggtctcgaccccgagaccaccccgatccccgtgacccccgccgcccactactggatgggcgggatccgcaccgacgccgcggggcgcacgacggtgccgggcctctgggccgcgggcgaggtcgcctgctccggggtccacggcgcgaaccgcctcgcctcgaactccctgctggaggccctcgtcaccggcgggcaggtcgccgaggacgtccggcgcgggccgggagccgcgcggttccccgacgacgaggtcgtcgaggttcccgggcccgcgctgcccctggccgcccacgtcggccgccgcgacctgcaggcggccctgtgggagcacgccggcgtcgtccgcgacgcggcgggcctggccgtggcggcgaagctgctcaccccccaggaggacccggtcgagatcgcccccgacgacctcggcgtcccccgctccacccgcgaggacgccaacctcgtcctcgccgcccgcctgctcgtggccgcggccaccgcgcgcgaggagagcctcggtgcgcacttccgcagcgacgaccccaccaccccggcccaccccgtgcgccgttcgttccggaggaccgcgtga

SEQ ID NO: 138618 - protein, 528 aa, Kineococcus radiotolerans SRS30216
MNPRARAAEELRTDVLVVGAGIAGLTAALEAARTGRVVLATKTALGDGSTHYAQGGIAAAVDAADVAAHVADTLAAGAGLSSPAAVRALCAGGPAAVRVLAERGVEFDRGSTGGWALGLEAAHSTSRILHAGGDRTGAAISAALAAAVRRSDVTVREEAFLAGLRTEDGRVVGADLLVGDEAGGPAHVLRVTADAVVLATGGAGQLFSRTTNPAVATADGLAAAFRAGAAVADLEFFQFHPTVAALPSPFLVSEAVRGEGAVLLDAAGHRFADRADPRGELAPRDVVARAIAAAMAEHGGAPVVLDATGVSARLGRPFAERFPGIAQLCAEAGLDPETTPIPVTPAAHYWMGGIRTDAAGRTTVPGLWAAGEVACSGVHGANRLASNSLLEALVTGGQVAEDVRRGPGAARFPDDEVVEVPGPALPLAAHVGRRDLQAALWEHAGVVRDAAGLAVAAKLLTPQEDPVEIAPDDLGVPRSTREDANLVLAARLLVAAATAREESLGAHFRSDDPTTPAHPVRRSFRRTA

SEQ ID NO: 138619 - DNA, 1539 bp, Xylella fastidiosa Ann-1
  CDS (1)..(1539): transl_table=11
atggctgagatagtggactgttttgcggaccgccccatcatcgttggtagcgggcttgctggtctgatcgcagcactgaccatttctcctgaaccctcagtgcttgtcacgcgcagcgccttgggcgcagaaacatcaagcgcatgggctcagggaggaatgtcggtcagccttagccccgatgacaaccccagcctgcatcttgccgacaccttggcggctggcgatggtctgtgtgatgcagtagctgcagagagcatcatcttggaagcgcttgacgcttttcatgtcctacaacactttggcatccacttcgaccaagatagcaacggccatctggcgcttggactggaagcagcccattcccgtcgccgtatcgtgcatgttgggggcgatagatcgggcacagcgtttgtacaagcattgactgcctgtgttctcaacgatccctcaatcaccgtgcttgagggcctcgaagcacgacacattctgatagctgataacgtggtctgtggcttgctgcttgccaacccgacatccgagattgtgttgccctcctcaagaattcttctggcgacaggcggcattggtgggctttatgacgcgaccaccaacccggtgagcaactttggtcaaggcatcgcgatggctgcacgtgctggcgccgtactggctgatatggaattcgtacagttccatccgacggccctccattgccacaaccgccctctagcgctcgtcagcgaagctgtccgtggtgaaggtgcagtcctcattaacgaacgtggcgaacgctttatggcggatattcctggtgccgaacttgcagctcgtaacatcgttgcacaggcaatcagcgccgaaataactcgcggcggccaagtatttctcgatgccaggcaagcattgggagcacgcttcagcacccgctttccaaccatcaccgcactctgccacaaagtaggtattgaccctgtacacatgccgattccagtctgtcccgctgctcattaccacatgggcggtatcgcaaccgatcgccaaggccgcagcagtattcctggcttatgggttgcgggtgaagcagcgtctacaggcttacatggagcaaatcggcttgcgagcaattcactgcttgaggccgtcgtcatggggacacgtgcagcccgagatatcacatcccacaacacaccccaccccctcggaacaatccctatcacccctaaaaagcctgataccacacttatccggccgattgtctctcagtgccttggcgtacttcgccatgccgcggatatgcatcgtgctattgctgccctcttgccttttgtggaaggcgaagaagagtcttccgatcccgccatcgttgcattgctgatcgccatctttgcacatcttcgcaccgaatcacgcggtgcccatgcacgcaccgatttccctctcaaacatgacacaacacagcggcgcaacatgacacttgaggatgttcttgaaatcgcccactcccgtattgcacaacgcaaacaaaagatctcctga

SEQ ID NO: 138620 - protein, 512 aa, Xylella fastidiosa Ann-1
MAEIVDCFADRPIIVGSGLAGLIAALTISPEPSVLVTRSALGAETSSAWAQGGMSVSLSPDDNPSLHLADTLAAGDGLCDAVAAESIILEALDAFHVLQHFGIHFDQDSNGHLALGLEAAHSRRRIVHVGGDRSGTAFVQALTACVLNDPSITVLEGLEARHILIADNVVCGLLLANPTSEIVLPSSRILLATGGIGGLYDATTNPVSNFGQGIAMAARAGAVLADMEFVQFHPTALHCHNRPLALVSEAVRGEGAVLINERGERFMADIPGAELAARNIVAQAISAEITRGGQVFLDARQALGARFSTRFPTITALCHKVGIDPVHMPIPVCPAAHYHMGGIATDRQGRSSIPGLWVAGEAASTGLHGANRLASNSLLEAVVMGTRAARDITSHNTPHPLGTIPITPKKPDTTLIRPIVSQCLGVLRHAADMHRAIAALLPFVEGEEESSDPAIVALLIAIFAHLRTESRGAHARTDFPLKHDTTQRRNMTLEDVLEIAHSRIAQRKQKIS

SEQ ID NO: 138621 - DNA, 1689 bp, Prochlorococcus marinus str. MIT 9211; identical to SEQ ID NO: 33335
  CDS (1)..(1689): transl_table=11

SEQ ID NO: 138622 - protein, 562 aa, Prochlorococcus marinus str. MIT 9211; identical to SEQ ID NO: 33336

SEQ ID NO: 138623 - DNA, 1695 bp, Erythrobacter sp. NAP1; identical to SEQ ID NO: 33337
  CDS (1)..(1695): transl_table=11

SEQ ID NO: 138624 - protein, 564 aa, Erythrobacter sp. NAP1; identical to SEQ ID NO: 33338

SEQ ID NO: 138625 - DNA, 1614 bp, Pseudoalteromonas tunicata D2; identical to SEQ ID NO: 33343
  CDS (1)..(1614): transl_table=11

SEQ ID NO: 138626 - protein, 537 aa, Pseudoalteromonas tunicata D2; identical to SEQ ID NO: 33344

SEQ ID NO: 138627 - DNA, 1611 bp, Photobacterium sp. SKA34; identical to SEQ ID NO: 33345
  CDS (1)..(1611): transl_table=11

SEQ ID NO: 138628 - protein, 536 aa, Photobacterium sp. SKA34; identical to SEQ ID NO: 33346

SEQ ID NO: 138629 - DNA, 1671 bp, gamma proteobacterium HTCC2207
  CDS (1)..(1671): transl_table=11
atgaaaccaaccaatctatatgatgtgctgattattggcagtggtgcggcaggcttaaccgtcgccctccagctagacccaagtctgcgcgtcgcgcttatcagtaaagccagccttcaagggggtgcctcttggttagcccagggcggcatagcggccgttatcgacaaagatgacagcgctgaagcgcatattgccgacacacttgccgcaggtgcaggtctctgccacgaagacgccgtgcgctttgtagttgaaaatgggcccaaggcggtacactggttaatcgacagtggtgtcgactttaccaaggaagtggccgaggaaaatggagaggggaatggagaggggaatggagaggggaatagagagccaagctatcacctcactcaggaaggcggtcacagccatcgccgtattttgcatacagcagatgccactggcaaagaaatcaccggcaccttggtcgagcgcgctctggccgccgaaaatgtgcaaatctttgagcatcactgtgccgtcgacctcgttacgcaagcggataaaagctcgcgtaaaatacgctgcaccggcgcctatatcctcgatattaatagcggcgatgttgaactgctgcaggccaagagcgttgtcttagcatccggcggcgcgagcaaaacctacctttataccagcaacccagacggcgccagcggtgatggtatagctatggcttggcgtcgaggctgccgtgtcggcaacctcgaatttaaccagtttcaccctacctgtctttatcaccccaaggccaagtcattcctgattaccgaagcactgcgcggtgaaggagcgattcttaaactgcccgatggcacgccatttatgcagaattttcatacagatgccgagctggcaccaagggatgtagtggcccgagctattgaccacgagatgaaacgcctcggcagtgactgcctgtatttggatatcagccacaagccagctgaatttattatcgagcacttccctactgtttataagcgctgcctggaatttggtatcgacatcaccaccacaccgatcccaatagttccagccgcccactacacctgtggtggcatagtggtgaacaccaaagggcaaactgatctgcgcaatctatatgccattggcgaaagcgcttttaccgggctccatggtgcaaatcgcatggccagtaactcgctattagaatgcttggtttatgcccaggcagcagccactgaaatcaaccagctcaatgacaaaattccacagccagactttgttcgcccctgggatgaatcacaggttgagtactcggatgagaatgtggtgatttctcataactgggatgagttgcggcgctttatgtgggattacgtcggcattgtgcgcacagacaagcgccttcagcgggctcagcaccgcatccaactgctgcaaaaggaaatccaagagttttacagtaactataaagtgggtcgagatctgctggaactgcgcaatctcaccacagtcgctgacttgattattcgctgcgccctgcaacgcaaagagagtcgcggactgcactacacgctcgactatccgcaactggcaccgatcgccaaagataccattctggtgccgatcaactttgctgggcaggatgtgattatcaatctcgattag

SEQ ID NO: 138630 - protein, 556 aa, gamma proteobacterium HTCC2207
MKPTNLYDVLIIGSGAAGLTVALQLDPSLRVALISKASLQGGASWLAQGGIAAVIDKDDSAEAHIADTLAAGAGLCHEDAVRFVVENGPKAVHWLIDSGVDFTKEVAEENGEGNGEGNGEGNREPSYHLTQEGGHSHRRILHTADATGKEITGTLVERALAAENVQIFEHHCAVDLVTQADKSSRKIRCTGAYILDINSGDVELLQAKSVVLASGGASKTYLYTSNPDGASGDGIAMAWRRGCRVGNLEFNQFHPTCLYHPKAKSFLITEALRGEGAILKLPDGTPFMQNFHTDAELAPRDVVARAIDHEMKRLGSDCLYLDISHKPAEFIIEHFPTVYKRCLEFGIDITTTPIPIVPAAHYTCGGIVVNTKGQTDLRNLYAIGESAFTGLHGANRMASNSLLECLVYAQAAATEINQLNDKIPQPDFVRPWDESQVEYSDENVVISHNWDELRRFMWDYVGIVRTDKRLQRAQHRIQLLQKEIQEFYSNYKVGRDLLELRNLTTVADLIIRCALQRKESRGLHYTLDYPQLAPIAKDTILVPINFAGQDVIINLD

SEQ ID NO: 138631 - DNA, 1611 bp, delta proteobacterium MLMS-1; identical to SEQ ID NO: 33349
  CDS (1)..(1611): transl_table=11

SEQ ID NO: 138632 - protein, 536 aa, delta proteobacterium MLMS-1; identical to SEQ ID NO: 33350

SEQ ID NO: 138633 - DNA, 1578 bp, Oceanobacter sp. RED65; identical to SEQ ID NO: 33351
  CDS (1)..(1578): transl_table=11

SEQ ID NO: 138634 - protein, 525 aa, Oceanobacter sp. RED65; identical to SEQ ID NO: 33352

SEQ ID NO: 138635 - DNA, 1626 bp, Desulfitobacterium hafniense DCB-2; identical to SEQ ID NO: 33353
  CDS (1)..(1626): transl_table=11

SEQ ID NO: 138636 - protein, 541 aa, Desulfitobacterium hafniense DCB-2; identical to SEQ ID NO: 33354

SEQ ID NO: 138637 - DNA, 1686 bp, Synechococcus sp. RS9916
  CDS (1)..(1686): transl_table=11
atgagatcccacccctccactggcgagcccattcctccaggcccctgggatgtggtggtggtgggtgccggtgcggcagggctgatgacttgccttgaactgcctcaagggttgcgggtcctgctgctcaatcgcaacaccagccgtcgctcatccagccgatgggcccaggggggcatcgcctcggtgacgcgaccggacgacagcgccgccagtcatgccgccgacacactccaggcaggggctgggttgtgtgatggcaatgcagtacgcctgctggtggaccatgccccccaatgcgtcgagcgactgctccaggtcggcatggcgttcgatcgcaacagtgacggcagcctggcgaccacccttgaagcggcccacagccatcaccgggtgctgcatgtgcaggatcagacggggcgagccctggtcgatgtgttgcgggagcgcgtggagcaacgcgaaggcctgcttcacaggcgaggtgttcgcgtcagcaagctttgggtggaagacggccgctgctgcggcgtgcaggtgctagatgggcccttgctgcactggattcgggcgcgggctgtcgtgctggccaccggcggagggggccacctttacaccaacaccaccaatcccgcccaggcagccggtgagggcgtggcactggcctggcaggccggcgccgccattgaagacctggaattcgttcagttccaccccactgctctgcatcgacctggggctccctgtttcctgatatccgaggcggtgcgtggtgaaggtggtgtgctggtggatgccactggcaacagccccgtggccggccttccaggaggagatcttgccccccgggatcaggtgagtcgcgcgctggtgcgcagcatgcgtgccgccggcaccgaccatgtcgggcttgacctgcgcccgatccctcggagccaggcggagcgccgcttccccacgattcttgagcactgcagggaattcggtctgaatcccctcgaacaaccccttcctgtcgctccggcagcccactactggatgggtggagtcgccaccaatgcccatgccgccaccaatgtgcagggcctgtatgccgttggcgaagccgcctgcactggcgtgcatggcgccaaccgcttggccagcaattcactgatggaatgcctggtctatgccaggcaactgcgagacatcgacctgccgctgtggtcgcagagcgaccgccgcagcctggaccaattaacagccgcgcctccagcgcttcgcacgaacctggtcagcagccagaacgcaacagagctcaagcgggggatcaatcagctgcgcaagcaatgctgggcagtggccggtgtggaccgctccgtgcccgggatgcgagaggtgctcgcggcaacactccgggccatgccccggctcgagcaggaagaagcactttcattaatgaacagtcagcgcactgatcaacagttcctgctggaggaaccgagtcggcgtgacctcaacctgctgctggacctgaaccaccgccaacgcaccagtgcgctgctactggaggcctgcctgttccggaaggaaagccgcggcggccatttccgcagtgacgctccagtggcgttaccgcattggcaatgccactcacgccaacaaaaagggcggatgattcacacccgcccagtcaacccttaa

SEQ ID NO: 138638 - protein, 561 aa, Synechococcus sp. RS9916
MRSHPSTGEPIPPGPWDVVVVGAGAAGLMTCLELPQGLRVLLLNRNTSRRSSSRWAQGGIASVTRPDDSAASHAADTLQAGAGLCDGNAVRLLVDHAPQCVERLLQVGMAFDRNSDGSLATTLEAAHSHHRVLHVQDQTGRALVDVLRERVEQREGLLHRRGVRVSKLWVEDGRCCGVQVLDGPLLHWIRARAVVLATGGGGHLYTNTTNPAQAAGEGVALAWQAGAAIEDLEFVQFHPTALHRPGAPCFLISEAVRGEGGVLVDATGNSPVAGLPGGDLAPRDQVSRALVRSMRAAGTDHVGLDLRPIPRSQAERRFPTILEHCREFGLNPLEQPLPVAPAAHYWMGGVATNAHAATNVQGLYAVGEAACTGVHGANRLASNSLMECLVYARQLRDIDLPLWSQSDRRSLDQLTAAPPALRTNLVSSQNATELKRGINQLRKQCWAVAGVDRSVPGMREVLAATLRAMPRLEQEEALSLMNSQRTDQQFLLEEPSRRDLNLLLDLNHRQRTSALLLEACLFRKESRGGHFRSDAPVALPHWQCHSRQQKGRMIHTRPVNP

SEQ ID NO: 138639 - DNA, 1614 bp, Vibrio sp. Ex25
  CDS (1)..(1614): transl_table=11
atgaacacaaatcgtgaacatgagtgtgatgtgttagtggtagggagtggcgcggctggtttgtcgttggctttgcgcgttgctaaccactgtaaagtgatggtgctgagtaaagggccacgcagcgaaggggcgacctattatgcccagggtggtattgctgctgtatttgatgagtcagacaccattgagtcacacgttgaagatacacaaatcgccggcgatggtatttgtgacgaagatactgtgaggttcattgctgaacattcaaaagagtgcgtacagtggttgatcgacggtggtgtcccatttgatcgtgaagaggatgactctgacgatgagcctcgttaccacttaactcgtgaaggtggccatagccgtcgtcgtattcttcacgcggcagatgcaacaggtatggcgatgcaaacctctctgcaagataacgctcacaaccatccaaatattcatgttctcgaacgtcacaatgcgctggacttaatcaccgaagacaaaattggcggtgataaaaacaaagttatcggtgcttatatttggaaccgcaacgaagagcatgtcgaaaccgtgcgggccaaatttgtggttctcgctacaggtggcgcttcaaaagtttatcaatacacctctaacccagatgtttcgtctggtgatggtattgccattgcttggcgtgcagggtgccgtgtggcaaatatggagtttaaccagttccacccgacgtgtttatatcacccagaagcacgtaacttcttgttgactgaagcgttacgtggcgaaggtgcttacctgcgtcgtcccgatggttctcgctttatgccagatttcgatgagcgtaaagagcttgctccgcgtgacgtcgtggctcgtgctatcgacttcgaaatgaagcgtttgggtgccgactgtatgtacctcgacatcagtcacaaacctgcggactttattacgaaacacttcccaaccatttactcacgcttgatggacttgggcattgatatgaccaaagagccaatcccaatcgtacctgctgcgcactacacttgtggcggtgtcatggtggatagaaatggctgcaccgatcttaaaaacttgtatgcgattggcgaagtcagctatacagggctgcatggggctaaccgcatggcatcaaattcacttctcgaatgcgtggtttatgcttggtctgcggcgaaagatattctaaaacatcacactaacgtggagcttccttcacaggtgccatgttgggatgaaagtaaagtgaccaacagtgatgaagaagtgatcattcagcacaactggcacgagcttcgtctgtttatgtgggactacatgggcattgtacgaactgacaagcgtttagaacgcgccttgcgccgtatccaactgttgcaacaagaaacgcatgagtactacagcaatttccgtgtctcgaacaacttattagaactgcgtaaccttttacaggtagcagagctgatggttcgttgtgcgatgcagcgtaaagagagtcgaggtttgcactacacgcttgattatccgaaccaactggaaaacagcggaccaacgattttggttccagctaaacagctttaa

SEQ ID NO: 138640 - protein, 537 aa, Vibrio sp. Ex25
MNTNREHECDVLVVGSGAAGLSLALRVANHCKVMVLSKGPRSEGATYYAQGGIAAVFDESDTIESHVEDTQIAGDGICDEDTVRFIAEHSKECVQWLIDGGVPFDREEDDSDDEPRYHLTREGGHSRRRILHAADATGMAMQTSLQDNAHNHPNIHVLERHNALDLITEDKIGGDKNKVIGAYIWNRNEEHVETVRAKFVVLATGGASKVYQYTSNPDVSSGDGIAIAWRAGCRVANMEFNQFHPTCLYHPEARNFLLTEALRGEGAYLRRPDGSRFMPDFDERKELAPRDVVARAIDFEMKRLGADCMYLDISHKPADFITKHFPTIYSRLMDLGIDMTKEPIPIVPAAHYTCGGVMVDRNGCTDLKNLYAIGEVSYTGLHGANRMASNSLLECVVYAWSAAKDILKHHTNVELPSQVPCWDESKVTNSDEEVIIQHNWHELRLFMWDYMGIVRTDKRLERALRRIQLLQQETHEYYSNFRVSNNLLELRNLLQVAELMVRCAMQRKESRGLHYTLDYPNQLENSGPTILVPAKQL

SEQ ID NO: 138641 - DNA, 1611 bp, Alteromonadales bacterium TW-7; identical to SEQ ID NO: 33355
  CDS (1)..(1611): transl_table=11

SEQ ID NO: 138642 - protein, 536 aa, Alteromonadales bacterium TW-7; identical to SEQ ID NO: 33356

SEQ ID NO: 138643 - DNA, 1581 bp, marine gamma proteobacterium HTCC2143; identical to SEQ ID NO: 33357
  CDS (1)..(1581): transl_table=11

SEQ ID NO: 138644 - protein, 526 aa, marine gamma proteobacterium HTCC2143; identical to SEQ ID NO: 33358

SEQ ID NO: 138645 - DNA, 1659 bp, marine gamma proteobacterium HTCC2080; identical to SEQ ID NO: 33359
  CDS (1)..(1659): transl_table=11

SEQ ID NO: 138646 - protein, 552 aa, marine gamma proteobacterium HTCC2080; identical to SEQ ID NO: 33360

SEQ ID NO: 138647 - DNA, 1626 bp, Candidatus Desulfococcus oleovorans Hxd3; identical to SEQ ID NO: 33361
  CDS (1)..(1626): transl_table=11

SEQ ID NO: 138648 - protein, 541 aa, Candidatus Desulfococcus oleovorans Hxd3; identical to SEQ ID NO: 33362

SEQ ID NO: 138649 - DNA, 1773 bp, Pseudomonas putida GB-1; identical to SEQ ID NO: 33363
  CDS (1)..(1773): transl_table=11

SEQ ID NO: 138650 - protein, 590 aa, Pseudomonas putida GB-1; identical to SEQ ID NO: 33364

SEQ ID NO: 138651 - DNA, 1608 bp, Pseudomonas putida GB-1; identical to SEQ ID NO: 33365
  CDS (1)..(1608): transl_table=11

SEQ ID NO: 138652 - protein, 535 aa, Pseudomonas putida GB-1; identical to SEQ ID NO: 33366

SEQ ID NO: 138653 - DNA, 1626 bp, Marinobacter sp. ELB17; identical to SEQ ID NO: 33367
  CDS (1)..(1626): transl_table=11

SEQ ID NO: 138654 - protein, 541 aa, Marinobacter sp. ELB17; identical to SEQ ID NO: 33368

SEQ ID NO: 138655 - DNA, 1617 bp, Pseudomonas syringae pv
  CDS (1)..(1617): transl_table=11
atgagtcaacattttcagcatgacgtactggtaattggcagtggcgctgccggattgagcctggcactgacgcttcccggacacctgagcatcgcagtgctgagcaaaggcgatctggccaatggctcgacattctgggcccagggcggtgtggcagcagtactggatgacaccgataccgtgcagtctcatgttgaagacacgctgaatgccggcggcggcctttgcaacgaaggagcattgcgtttcaccgttgagcacagccgcgaggccattcagtggctgatcgatcagggcgtgcctttcatcggggcgatgacgcagatacacgacgaaagcggctttgaattccacctgacacgcgaaggcggccacagccacaggcggatcatccacgccgccgatgccacaggcgcagcgatctttcgtaccctgcttgaacaagcccgtaaacggccgaatatcgaactgcttgaacagcgcgccgccatcgacctgatcaccgaacgccgtctcgggctggaaggccagcgctgcctgggcgcttatgtactcaatcgcaacagcggcgaagtggacacctacggcgcgcgctttaccatcctcgcgtcaggtggcgctgccaaggtttatctgtacaccagcaaccccgacggtgcctgcggcgatggcatcgccatggcctggcgttccggttgccgggtggcgaatctggaattcaaccagtttcaccccacctgcctgtatcacccccaggccaagagttttctgatcaccgaagcacttcgcggcgaaggcgcctacctcaagttgcccagcggcgaacgctttatgccacggttcgacgaacgggcagaactggcccctcgcgatattgttgcccgtgcgatagaccacgaaatgaagcgactgggtatcgactgcgtttatctggacattagccacaaaccggaagcgttcatcaagacccactttccaaccgtctacgagcgctgcctggaattctccatcgacatcactcgtcagccgattccggtggtcccggcggcgcattacacctgtggtggtgtcatgatagacagcaagggccacaccgacgtgcctggcctgtacgccatcggcgagaccagcttcaccggcctgcacggtgccaaccgcatggccagcaactcactgctggagtgcttcgtatatgcccgctcggcagcggcagacatcgagcagcaactggccgacgtacagatgcccaccgaccttccggcctgggacgccagccaggtcactgattcggacgaagacgtgatcatcgcgcacaactgggatgaactgagacgattcatgtgggactacgtcggcattgtgcgtaccaacaagcgcctgcaacgcgctcagcaccgtgtacgtttgttgctggatgagatcgacgagttctacagcaactacaaggtcagccgtgacctgatcgagttgcgcaacctggcgcaggtggcggaactgatgatctgctcggccatgcagcgcaaggaaagccgtggcctgcattacacgctggactatcccgacatgttgccggaggcgctggacactattctggtaccgcccacttacgtcggctga

SEQ ID NO: 138656 - protein, 538 aa, Pseudomonas syringae pv
MSQHFQHDVLVIGSGAAGLSLALTLPGHLSIAVLSKGDLANGSTFWAQGGVAAVLDDTDTVQSHVEDTLNAGGGLCNEGALRFTVEHSREAIQWLIDQGVPFIGAMTQIHDESGFEFHLTREGGHSHRRIIHAADATGAAIFRTLLEQARKRPNIELLEQRAAIDLITERRLGLEGQRCLGAYVLNRNSGEVDTYGARFTILASGGAAKVYLYTSNPDGACGDGIAMAWRSGCRVANLEFNQFHPTCLYHPQAKSFLITEALRGEGAYLKLPSGERFMPRFDERAELAPRDIVARAIDHEMKRLGIDCVYLDISHKPEAFIKTHFPTVYERCLEFSIDITRQPIPVVPAAHYTCGGVMIDSKGHTDVPGLYAIGETSFTGLHGANRMASNSLLECFVYARSAAADIEQQLADVQMPTDLPAWDASQVTDSDEDVIIAHNWDELRRFMWDYVGIVRTNKRLQRAQHRVRLLLDEIDEFYSNYKVSRDLIELRNLAQVAELMICSAMQRKESRGLHYTLDYPDMLPEALDTILVPPTYVG

SEQ ID NO: 138657 - DNA, 1935 bp, Oryza sativa subsp
  CDS (1)..(1935)
atgtggcgcggctgcgtctcgcgtggcctcaggagcctctccaagggcaagggctcctcctcctccgcccccgtctccgccgccgctaggctcttctccaccgcctcggtagtcccctcgatcccccgacctcagttgatccgcgcgacttcgtcgtacacggtggtggatcactcgtatgacgcggtcgtggtgggagccggcggcgcggggctccgtgcggcgatcgggctctccgagcacgggttcaacacggcttgcatcaccaagctcttccccacgcggtcgcacaccgtcgcggcgcagggtggcataaatgctgctcttggaaacatgacggaagatgactggagatggcatatgtatgacactgtcaagggtagtgattggcttggtgaccaggattctattcagtatatgtgcagagaagcaccaaaagcagttatagaacttgaaaactatgggttgccattttcaagaactgaagatggaaagatataccaacgggcctttggaggccagagcttagattttgggaaaggtgggcaggcctatcgatgtgcatgtgctgctgacagaacaggacatgctatgttacacactctgtatggtcaagcaatgaagcataatactcagttctttgtagaatattttgcgctagaccttatcatggacagtgaaggcacctgtcagggggttattgctttgaacatggaggatggcactcttcaccgtttccgtgctacaaatacaattctggccacaggaggttatggcagagcctacttctcagcaacctcagctcacacatgcactggagatggcaacgctatggttgcacgtgctggtttaccacttcaggaccttgagtttgtgcagttccatcctacaggcatttatggtgctggatgccttatcactgaaggttcccgtggtgaaggtggtatccttaggaacagtgaaggcgagcgtttcatggaacgatatgctcctactgcaaaagatcttgcttctcgagatgttgtttcaagatctatgacaatggaaatcagagaaggccgtggtgttgggccattgaaggaccacatctatctgcatcttaaccatctgcctccagaagttcttaaggagaggcttcctggtatttctgaaactgctgctatttttgctggtgttgatgtcaccaaggagcccattcctgtcttgcctactgtgcactataatatgggtgggatcccaacaaattaccatggagaggtagtgactatgaagggtgacaatcctgattctgttgttcctggtttgatggctgcgggagaagcagcatgtgcatctgttcatggtgcaaatcgtctgggtgcaaattcacttcttgacatagttgtttttggcagagcttgtgcaaacagggtagctgaaaccgctaagccaggtgagaagcagaaacctcttcaaaaaagtgctggagaaaagaccatagcctggttagacaagctgagaaatgcaaatggatcattgccaacttccaagatccgtctaaacatgcaacgtgttatgcaaaataatgctgctgtcttccgtacgcaagaaacactcgaggaaggttgcaaattgattaccaaggcatgggaaagttatcatgatgtgaagatcagtgaccggagtctcatatggaattcagatttgatagagaccattgagttggaaaatctcttgataaatgcatgcataaccatgcactcagcagaggctcggaaggaaagcagaggagctcatgctcgtgaagatttcacgaaaagagatgatgagcaatggatgaagcactcgctggggtactgggagaatgagaaggttcgcttggcatacaggccagtccacatgaacacattggacagtgaagttgagtcgttcccacccaaggcgcgtgtttattag

SEQ ID NO: 138658 - protein, 644 aa, Oryza sativa subsp
MWRGCVSRGLRSLSKGKGSSSSAPVSAAARLFSTASVVPSIPRPQLIRATSSYTVVDHSYDAVVVGAGGAGLRAAIGLSEHGFNTACITKLFPTRSHTVAAQGGINAALGNMTEDDWRWHMYDTVKGSDWLGDQDSIQYMCREAPKAVIELENYGLPFSRTEDGKIYQRAFGGQSLDFGKGGQAYRCACAADRTGHAMLHTLYGQAMKHNTQFFVEYFALDLIMDSEGTCQGVIALNMEDGTLHRFRATNTILATGGYGRAYFSATSAHTCTGDGNAMVARAGLPLQDLEFVQFHPTGIYGAGCLITEGSRGEGGILRNSEGERFMERYAPTAKDLASRDVVSRSMTMEIREGRGVGPLKDHIYLHLNHLPPEVLKERLPGISETAAIFAGVDVTKEPIPVLPTVHYNMGGIPTNYHGEVVTMKGDNPDSVVPGLMAAGEAACASVHGANRLGANSLLDIVVFGRACANRVAETAKPGEKQKPLQKSAGEKTIAWLDKLRNANGSLPTSKIRLNMQRVMQNNAAVFRTQETLEEGCKLITKAWESYHDVKISDRSLIWNSDLIETIELENLLINACITMHSAEARKESRGAHAREDFTKRDDEQWMKHSLGYWENEKVRLAYRPVHMNTLDSEVESFPPKARVY

SEQ ID NO: 138659 - DNA, 1605 bp, Magnetospirillum gryphiswaldense; identical to SEQ ID NO: 33371
  CDS (1)..(1605): transl_table=11

SEQ ID NO: 138660 - protein, 534 aa, Magnetospirillum gryphiswaldense; identical to SEQ ID NO: 33372

SEQ ID NO: 138661 - DNA, 1623 bp, Shigella boydii
  CDS (1)..(1623): transl_table=11
atgaatactctccctgaacattcatgtgacgtgttgattattggtagcggagcagccggactttcactggcgctacgcctggctgaccagcatcaggtcatcgttctaagtaaaggcccggtaacggaaggttcaacattttatgcccagggcggtattgccgccgtgtttgatgaaactgacagcattgactcgcatgtggaagacacattgattgccggggctggtatttgcgatcgccatgcagttgaatttgtcgccagcaatgctcgttcctgtgtgcaatggttaattgaccagggggttttgtttgatacccacgttcaaccgaatggcgaagaaagctaccatctgacccgtgaaggtggacatagtcaccgtcgtattcttcatgccgccgacgccaccggtagagaagtacaatccacgctggtgagcaaggcgcagaaccatccgaatattcgtgtgctggagcgcagcaacgcagttgatctgattgtctctgacaaaattggcctgccgggcacgcgacgggttgtaggcgcgtgggtatggaaccgaaataaagaaacggtggaaacctgccacgcaaaagcagtggtactggcaaccggcggtgcgtcgaaggtgtatcagtacaccaccaatccggatatttcttctggcgatggcattgatatggcgtggcgcgcgggctgtcaggttgccaatctcgaatttaatcagttccaccctaccgcactgtatcacccacaggcacgcaatttcctgttaacggaagcactgcgcggcgaaggcgcttatctcaagcgcccggatggcacgcgttttatgcccgattttgatgagcgcggcgaactggccccgcgcgatattgtcgcccgcgccattgaccatgaaatgaaacgcctcggcgcagattgtatgttcctcgacatcagccataagcccgccgattttattcgccagcatttcccgatgatttatgaaaaattgctcgggctggggattgatctcacacaagaaccggtaccgattgtgcctgctgcacactatacctgcggtggtgtaatggttgatgatcatgggcgtacggacgtcgagggcttgtatgccattggcgaggtgagttataccggcttacacggcgctaaccgcatggcctcgaattcattgctggagtgtctggtctatggctggtcggcggcagaagatatcaccagacgtatgcctgatgcccacggcgtcagtacgttaccaccgtgggatgaaagccgcgttgagaaccctgacgaacgggtagtaattcagcataactggcacgagctacggctgtttatgtgggattacgtcggcattgtgcgcacaacaaaacgtcttgagcgcgccctgcggcgtatcaatatgttgcaacaggaaatagacgaatattacgcccacttccgcgtgtcgaataatttgctggagctgcgtaatctggtgcaggttgcggaattgattgttcgctgtgccatgatgcgcaaggagagtcgtggcctgcatttcacactggattatccggaactgctcacccattccggtccgtcgatcctttcccccggcaatcattacataaacagataa

SEQ ID NO: 138662 - protein, 540 aa, Shigella boydii
MNTLPEHSCDVLIIGSGAAGLSLALRLADQHQVIVLSKGPVTEGSTFYAQGGIAAVFDETDSIDSHVEDTLIAGAGICDRHAVEFVASNARSCVQWLIDQGVLFDTHVQPNGEESYHLTREGGHSHRRILHAADATGREVQSTLVSKAQNHPNIRVLERSNAVDLIVSDKIGLPGTRRVVGAWVWNRNKETVETCHAKAVVLATGGASKVYQYTTNPDISSGDGIDMAWRAGCQVANLEFNQFHPTALYHPQARNFLLTEALRGEGAYLKRPDGTRFMPDFDERGELAPRDIVARAIDHEMKRLGADCMFLDISHKPADFIRQHFPMIYEKLLGLGIDLTQEPVPIVPAAHYTCGGVMVDDHGRTDVEGLYAIGEVSYTGLHGANRMASNSLLECLVYGWSAAEDITRRMPDAHGVSTLPPWDESRVENPDERVVIQHNWHELRLFMWDYVGIVRTTKRLERALRRINMLQQEIDEYYAHFRVSNNLLELRNLVQVAELIVRCAMMRKESRGLHFTLDYPELLTHSGPSILSPGNHYINR

SEQ ID NO: 138663 - DNA, 1623 bp, Shigella dysenteriae; identical to SEQ ID NO: 33373
  CDS (1)..(1623): transl_table=11

SEQ ID NO: 138664 - protein, 540 aa, Shigella dysenteriae; identical to SEQ ID NO: 33374

SEQ ID NO: 138665 - DNA, 1623 bp, Shigella boydii
  CDS (1)..(1623): transl_table=11
atgaatactctccctgaacattcatgtgacgtgttgattatcggtagcggcgcaaccgggctttcactggcgctacgcctggctgaccagcatcaggtcatcgttctaagtaaaggcccggtaacggaaggttcaacattttatgcccagggcggtattgccgccgtgtttgatgaaactgacagcattgactcgcatgaggaagacacattgattgccggggctggtatttgcgatcgccatgcagttgaatttgtcgccagcaatgcacgatcctgtgtgcaatggctaatcgaccagggggggttatttgatacccacattcagccgaatggcgaacaaagttaccatctgacccgtgaaggtggacatagtcaccgtcgtattcttcatgccgcctatgccaccggtaaagaagtagaaaccacgctggtgagcaaggcgctgaaccatccgaatattcgcgtgctggagcgcagcaacgcggttgatctgattatttctgacaaaattggcctgccgggcacgcgacgggttgttggcgcgtgggtatggaaccgaaataaagaaacggtggaaacctgccacgcaaaagcggtggtgctggcaaccggcggtgcgtcgaaggtttatcagtacaccaccaatccggatatttcttctggcgatgggattgctatggcgtggcgcgcgggctgccgggttgccaatctcgaatttaatcagttccaccctaccgcgctgtatcacccacaggcacgcaatttcctgttaacggaagcactgcgcggcgaaggcgcttatctcaagcgcccggatggcacgcggtttatgcccgattttgatgagcgcggcgaactggccccgcgcgatattgtcgcccgcgccattgaccatgaaatgaaacgcctcggcgcggattgtatgttcctcgatatcagccataagcccgctgattttattcgccagcatttcccgatgatttatgaaaaattgctcgggctggggattgatctcacacaagaaccggtaccgattgtgcctgctgcacactatacctgcggtggtgtaatggttgatgatcatgggcgtacggacgtcgagggcttgtatgccattggcgaggtgagttataccggcttacacggcgctaaccgcatggcctcgaattcattgctggagtgtctggtctatggctggtcggcggcagaagatatcaccagacgtatgcctgatgcccacggcgtcagtacgttaccaccgtgggatgaaagccgcgttgagaaccctgacgaacgggtagtaattcagcataactggcacgagctacggctgtttatgtgggattacgtcggcattgtgcgcacaaaaaaacgtcttgagcgcgccctgcggcgtatcaatatgttgcaacaggaaatagacgaatattacgcccacttccgcgtgtcgaataatttgctggagctgcgtaatctggtacaggttgccgagttgattgttcgctgtgcgatgatgcgcaaggagagtcgggggttgcatttcacgctggattatccagaactgctcacccattccggtccgtcgatcctttctcccggcaatcattacataaacagataa

SEQ ID NO: 138666 - protein, 540 aa, Shigella boydii
MNTLPEHSCDVLIIGSGATGLSLALRLADQHQVIVLSKGPVTEGSTFYAQGGIAAVFDETDSIDSHEEDTLIAGAGICDRHAVEFVASNARSCVQWLIDQGGLFDTHIQPNGEQSYHLTREGGHSHRRILHAAYATGKEVETTLVSKALNHPNIRVLERSNAVDLIISDKIGLPGTRRVVGAWVWNRNKETVETCHAKAVVLATGGASKVYQYTTNPDISSGDGIAMAWRAGCRVANLEFNQFHPTALYHPQARNFLLTEALRGEGAYLKRPDGTRFMPDFDERGELAPRDIVARAIDHEMKRLGADCMFLDISHKPADFIRQHFPMIYEKLLGLGIDLTQEPVPIVPAAHYTCGGVMVDDHGRTDVEGLYAIGEVSYTGLHGANRMASNSLLECLVYGWSAAEDITRRMPDAHGVSTLPPWDESRVENPDERVVIQHNWHELRLFMWDYVGIVRTKKRLERALRRINMLQQEIDEYYAHFRVSNNLLELRNLVQVAELIVRCAMMRKESRGLHFTLDYPELLTHSGPSILSPGNHYINR

SEQ ID NO: 138667 - DNA, 1638 bp, Methanobacterium thermoformicicum
  CDS (1)..(1638): transl_table=11
atggaaagcgagcttgacgaatgtgatgttctcataataggctcaggtggagccggctgcagggcagcaattgaggtttctgaacacaaactgacaccaataatagtttcaaagggtttatcattcaaatcaggatgcacaggaatggctgagggcggatacaacgccgcattcgcatgtgttgatccagaggacagtcccgatgttcactttgaggatacaatgaggggtgggggattcatcaacgaccccagacttgtccgtatacttgtggacgaggcccctgacaggctgagggaccttgaagaatatggcgcactctttgaccgccaggagtcaggcctcctggatcagaggcccttcggaggccagacctacagggagacatgctaccatggggacaggacaggccatgagatgatcacggccctcaaggaggaggttataaggagggacatagagaccatcgatgaggtgatgataacctcactccttgttgaggatggcagcgtccttggcgccatgggcgtatccatcatgaattcagagcccgtggccttcagggcctcatccaccatactggcatcaggaggggcaggccacatataccctgtgacctccaacaccatgcagaagggtggtgatggctttgcaatcgcctggaaggcgggggctgacctcatagacatggaacaggtccagttccaccccacaggcatggtctaccctgagtcacggaggggggtccttgtgacggaggccgtgaagggtgagggcggcatactcctcaacagtgagggtgaacggttcatgggccgctatgacccccgcggggaacttgcaacaagggacgtggttgcaagggccatctacaccgagataatggagggtcggggaaccgagaacggcggcgtctacctcgatgtgagccacctcctgatgaggtatagaggagaacttgagaccatgctactccagttcctggatgtgggcgtggatataaggtccgagcaatggaggttgcccacagcacaccacttcatggggggtgtaaggatagatgagtggggcacgaccaatctcaagaacctctacgcagcaggtgaggtttcaggaggcgtacatggtgccaacaggctcggaggaaatgccctggccgatacccaggtattcggaaggagggcgggcatatcggctgcaaaaaacgccatgagttcatccaggagacatgtcaggtcactcattgaggaggaggaacagaggataaaggacatggtccgcgatggatccataaggccggctgagataagggatgaactccacgaggcgatgtggagtgatgttgcaattgtgaggagccggaggtcacttgaatctgccatgtccaggatttccacgctgatggataaactgggagaccttgatgtccctgaaacaggaggatttaacagcaacctcctggaggcccttgaacttgagaacatgctcataacagcctcactggtgacccgctcagcccttataagggaggagagcaggggatcccactaccgggaggatttcccggaaacacgcccggaatggaaaaggagcatattactaaacaggaagatggagcctcagttcatagggagatga

SEQ ID NO: 138668 - protein, 545 aa, Methanobacterium thermoformicicum
MESELDECDVLIIGSGGAGCRAAIEVSEHKLTPIIVSKGLSFKSGCTGMAEGGYNAAFACVDPEDSPDVHFEDTMRGGGFINDPRLVRILVDEAPDRLRDLEEYGALFDRQESGLLDQRPFGGQTYRETCYHGDRTGHEMITALKEEVIRRDIETIDEVMITSLLVEDGSVLGAMGVSIMNSEPVAFRASSTILASGGAGHIYPVTSNTMQKGGDGFAIAWKAGADLIDMEQVQFHPTGMVYPESRRGVLVTEAVKGEGGILLNSEGERFMGRYDPRGELATRDVVARAIYTEIMEGRGTENGGVYLDVSHLLMRYRGELETMLLQFLDVGVDIRSEQWRLPTAHHFMGGVRIDEWGTTNLKNLYAAGEVSGGVHGANRLGGNALADTQVFGRRAGISAAKNAMSSSRRHVRSLIEEEEQRIKDMVRDGSIRPAEIRDELHEAMWSDVAIVRSRRSLESAMSRISTLMDKLGDLDVPETGGFNSNLLEALELENMLITASLVTRSALIREESRGSHYREDFPETRPEWKRSILLNRKMEPQFIGR

SEQ ID NO: 138669 - DNA, 1701 bp, Acidianus ambivalens
  CDS (1)..(1701): transl_table=11
atggaaaaactttcttatgacgcaatagtcataggcggcggactggctggtttaatggccgctcatgagattgccgtttctggatataaagttgcagtaatatcgaaagtctttcctacaaggtctcactcatcatcagcagaaggaggaatagctgcatatattgagggaaattctgaccctaacgataatccagattatatgacttatgacactataaaaggaggagattttttagttgacccagatgcagcagaattactatctcaaaaatctggagaaatagtaagaataatggaaagctggggcactttatttaatagacaacctgatggcagagtcgccgtaagatattttggaggtcaaacttatccaaggaccagattcgtaggagataaactggaaatggcgttacttcataccttattccagagggtttctggtttagatatagacttttacaacgagtggtttgctttagacctcattagagacgacaagagagttgtaggagtagtagcaatggaaatgaaatctatgacgccagtattctttaaagctagagcaatagtcatggccactggaggtatgggaatgctttacgctcactctactaatgcatatataaacaccggcgacggatatgcaatggctttaagggcaggagcggcattaaaagatccagaattcgttcaattccatcccactgctctttatccatcggatatactaattagcgaagcggctagaggagaaggagcaatactaattaataacaaaggagaaaggttcatggcaagatatgcaccaagaaaattggacttagcccctagagatataacttctagggcaataataactgagatcagagaaggtagaggttttcctggcggttacgtaggcttagatttaaggcatttaggagaagattacattaaagaaagattagccttagcttatgaggctgcaaagaactttgcaggagttgatgcaacgcaagaacctattccggtaaggcctgcacaacactattatatgggcggaatagacgttgatattaccggccaaaatccggatttagtaggattatttgctgcaggcgaagctgcctgcgtttcagttcacggtgcaaatagattaggttctaactctttacttgaaacactagtttttgggagagaaacaggcagagcagtagctaaattcttatctgaacataaagaggaagatagtaacagcctagataaagaagctgagaaagttgtagatgatgcttacaaatttgtaaagagcgagagtggggttcactttggtgaaattctcaataagctcaggaacgttatgtgggaaaaggtaggtatatttagagacgaagatggaattaaggatgctttatctcaaattattgaattgaggaagatgacttcatctatgtatgttctggataaaagcaccacctataatactgaattcttcaatgctttagaacttaggaatatgctagatttagcaatagtaatagcaagaactgcacttgagaggaaagagtctagaggtgctcattataggactgactatcctgaaagagatgatacaaactggttaaagcacaccatagcttatctaaaaggagaaactgtagaaattacttacaagcccgttaggattactagatggaaacctgagcccagggtgtattaa

SEQ ID NO: 138670 - protein, 566 aa, Acidianus ambivalens
MEKLSYDAIVIGGGLAGLMAAHEIAVSGYKVAVISKVFPTRSHSSSAEGGIAAYIEGNSDPNDNPDYMTYDTIKGGDFLVDPDAAELLSQKSGEIVRIMESWGTLFNRQPDGRVAVRYFGGQTYPRTRFVGDKLEMALLHTLFQRVSGLDIDFYNEWFALDLIRDDKRVVGVVAMEMKSMTPVFFKARAIVMATGGMGMLYAHSTNAYINTGDGYAMALRAGAALKDPEFVQFHPTALYPSDILISEAARGEGAILINNKGERFMARYAPRKLDLAPRDITSRAIITEIREGRGFPGGYVGLDLRHLGEDYIKERLALAYEAAKNFAGVDATQEPIPVRPAQHYYMGGIDVDITGQNPDLVGLFAAGEAACVSVHGANRLGSNSLLETLVFGRETGRAVAKFLSEHKEEDSNSLDKEAEKVVDDAYKFVKSESGVHFGEILNKLRNVMWEKVGIFRDEDGIKDALSQIIELRKMTSSMYVLDKSTTYNTEFFNALELRNMLDLAIVIARTALERKESRGAHYRTDYPERDDTNWLKHTIAYLKGETVEITYKPVRITRWKPEPRVY

SEQ ID NO: 138671 - DNA, 1701 bp, Sulfolobus acidocaldarius
  CDS (1)..(1701): transl_table=11
atggaaaagctaagttatgacgccgtgattataggagctggtctagccggtctaatggctgcacatgagatatctaaggctggctattctgctgcagtaatatctaaagtatttcctactagatctcattcagctgccgcagaaggaggtatagcagcctacgtaaatggtaactcagatcctaatgatagccccgactatatggcatatgatacaataaagggaggcgattatttagtagatcaggatgctgctgaactgctagcttataaatcaggtgaaattgtagagttgctagaaaagtggggagcattatttaacagacagccagatggaaggatagccttaagatacttcggtggtcagacctacccaagaactagattcgttggagacaaaacaggtatggcattacttcatactttatacgagagaacctcaggatctggaaaagtagacttctattttgaatggtttgcttgggagttaattagagatgagagtagggtaagaggagtagtagcttttgacatgagaaacatggtaccattcttctttaaggctaaggcagttgtcatagccgctggaggtatgggaatgctgtatagacacaccacaaatagctatatcggaacaggtgacggttatgcaatggctctaagagctagagtagcactgaaggatcctgagtttgtccaattccatcccacagcgttatatccatctgatatactaataagtgaggcagctagaggtgaaggtgcggttttaaagaacgctaaaggagaaagatttatgactaggtatgctccaaagaagttagacttagcaccaagagatatagtttcaagagctataataactgagattaaggaaggacgcggttttccaggtggatatgtagggttagatatatcgcatttaggtgaagagtacattaaagaaagattagccttagcttatgaggcagcaaagacattctctggagttgatgcaactaaagagttgattcccataagaccagctcatcattactatatgggaggaatagatgttgatattacaggtaagaacccagatgtaatagggttatttgcagccggagaagcagcctgtgtatccgtacacggagctaatagactggggtctaattctcttctagaaacattagtttttggaagagagacaggaaatgaagtagttaaattcttacagtcctttacagagccctcatcagatatagacaaagaggctgaaaaggctgaacaaagtgcatatgatattatgaagaaagaatctggtgttcatttcggtgatatattagaaaaattgagagattacatgtgggagttcgtaggaatatacagggacgaaaatgggttaaagaacgctgtctcagaaatcctaaagttaagggaacaaatgaagaatatgtacgtattggacaaaagtaaagtttacaatacagagttttataacgccctagaacttaagaatatgattgacctaggtttggtaatcgcaagtactgccttaaacaggaaggaatcaagaggagcccattacagaacagactatccaaagagagatgaccaaaactggctcaaacacactatagcatatctatcaggaaacactgtagaaataacttataagccagttaaaatgaccaaatggaagcctgaagaaagggtgtattaa

SEQ ID NO: 138672 - protein, 566 aa, Sulfolobus acidocaldarius
MEKLSYDAVIIGAGLAGLMAAHEISKAGYSAAVISKVFPTRSHSAAAEGGIAAYVNGNSDPNDSPDYMAYDTIKGGDYLVDQDAAELLAYKSGEIVELLEKWGALFNRQPDGRIALRYFGGQTYPRTRFVGDKTGMALLHTLYERTSGSGKVDFYFEWFAWELIRDESRVRGVVAFDMRNMVPFFFKAKAVVIAAGGMGMLYRHTTNSYIGTGDGYAMALRARVALKDPEFVQFHPTALYPSDILISEAARGEGAVLKNAKGERFMTRYAPKKLDLAPRDIVSRAIITEIKEGRGFPGGYVGLDISHLGEEYIKERLALAYEAAKTFSGVDATKELIPIRPAHHYYMGGIDVDITGKNPDVIGLFAAGEAACVSVHGANRLGSNSLLETLVFGRETGNEVVKFLQSFTEPSSDIDKEAEKAEQSAYDIMKKESGVHFGDILEKLRDYMWEFVGIYRDENGLKNAVSEILKLREQMKNMYVLDKSKVYNTEFYNALELKNMIDLGLVIASTALNRKESRGAHYRTDYPKRDDQNWLKHTIAYLSGNTVEITYKPVKMTKWKPEERVY

SEQ ID NO: 138673 - DNA, 1608 bp, Candidatus Kuenenia stuttgartiensis
  CDS (1)..(1608): transl_table=11
atgaaaaaacgtacagttccgaaacgatacctcatttctttcgacacccgcacgctttctcacatctttaccgatatacttgtggtagggagcggtgtcgccggcctaagcgccgccatccaggcgtcaaatcatagctccgtactcattattacaaaagataaaatcgacgagaataataccacctatgcgcaaggcggcgttgccgtggtgttgtctccaggagataatatctcaaaacacaaaaaagataccttaacggcagggcagggtttatgcaacgccgcggttgttagcaagattatttccgaaggcccgaagcgggtacaggaaatgatcgaatggggagcggaatttgacaaggaaaacgaccatttaatctttacacaggaaggtggacacggttttccccgaataatacgcgcccttggcgattcaacgggaagagaggtggagaacactctcatacaccgtataaagaaaaacaaaaacatcaaggtattcgaatatacatacgcaattgaccttattacggacgacaatgtctgccatggcatagcggcgtggcaccctaaaaagggaaccacgttaatatgggcaaaacagaccattttagcaactgggggatgtggtcaggtttaccgggaaacgaccaaccccggcgtcgccaccggggatgggctggcaatggcatatcgcgccggcgctgcccttcaggacatggagtttgtccagtttcaccccactacattatatatagccggtgcggtgcgttttcttattaccgagacggtaaggggcgaaggcggcatactgctaaataagaacggcgaccggtttatgccaaaatatcatgaaaaagccgagcttgcacccagggacgtagtaagccaaagcattttgaaagaaatgcgggaaacaggcaatacacatgtatatctggacattcgccatatccccaggaaaagactttttacacgtttcccgaaaattaaagaaatttgtgaatctttcggcattgatatctccaaagacctgattccggtgcgcccaagcgctcattacatgatcggtggaataaaggtaaatcgtttttcaatgaccaccgtgaagcacctctatgcatgcggagaggcggcatgtacgggcatgcatggcgctaaccgtttgggaagcaactccctgctggaagggctggtaatgggaaacattgccgggatagaagcctgcaaatcggcacaaggcattaagacaaatctcactccattatcaatgaatgaaaagccgggagcctccaagataagctggcttgaccttgaagacattgggaattcccttaaaagtcttatgtggaggaatgtgggaattgagcgcaacgaaaagcgcctgcttcaggcggaagaaatgatagacatgtggtgtaaatatgtaatggataaggaattttcaaacccggaaggctgggaattacagaacatgctgcttgttgcaagtcttattgtgtcatcggcatacaaacgcagggaatcacgcggcgttcatcaccgtaccgattatccgcaaaccgacgatattcactggaaaaaacaccttgttttgatgaaatag

SEQ ID NO: 138674 - protein, 535 aa, Candidatus Kuenenia stuttgartiensis
MKKRTVPKRYLISFDTRTLSHIFTDILVVGSGVAGLSAAIQASNHSSVLIITKDKIDENNTTYAQGGVAVVLSPGDNISKHKKDTLTAGQGLCNAAVVSKIISEGPKRVQEMIEWGAEFDKENDHLIFTQEGGHGFPRIIRALGDSTGREVENTLIHRIKKNKNIKVFEYTYAIDLITDDNVCHGIAAWHPKKGTTLIWAKQTILATGGCGQVYRETTNPGVATGDGLAMAYRAGAALQDMEFVQFHPTTLYIAGAVRFLITETVRGEGGILLNKNGDRFMPKYHEKAELAPRDVVSQSILKEMRETGNTHVYLDIRHIPRKRLFTRFPKIKEICESFGIDISKDLIPVRPSAHYMIGGIKVNRFSMTTVKHLYACGEAACTGMHGANRLGSNSLLEGLVMGNIAGIEACKSAQGIKTNLTPLSMNEKPGASKISWLDLEDIGNSLKSLMWRNVGIERNEKRLLQAEEMIDMWCKYVMDKEFSNPEGWELQNMLLVASLIVSSAYKRRESRGVHHRTDYPQTDDIHWKKHLVLMK

SEQ ID NO: 138675 - DNA, 1944 bp, Aspergillus oryzae; identical to SEQ ID NO: 33381
  CDS (1)..(1944)

SEQ ID NO: 138676 - protein, 647 aa, Aspergillus oryzae; identical to SEQ ID NO: 33382

SEQ ID NO: 138677 - DNA, 1614 bp, Shewanella violacea
  CDS (1)..(1614): transl_table=11
atgaaacaagtagttgaacaccaatctgatgttttggttatcggcagcggcgctgcaggtttgacattagcactgcatctagctgaaaaacatgaagttattttgctctcaaaagggcctctgagtgaaggttctacctattatgctcaggggggtatcgcttctgtcttcgatgcagatgacacgatcgagtcccatgttgccgataccttgatcgctggggccggactttgtgatgaggccgtggttaaatttaccgccgaaaatgctaagggcatcatggagtggttaatcgagtgcggtgtggctttcgataaagaagagaccagtgacggtgacacggctaatgccccctatcatttaactcgtgaaggcggacatagccataggcgcatactgcatgctgccgatgccacgggtaaagaggttcaggtcacgctacaggacagagccaagtctcatcccaacatccgggttttagagcgttacaatgccatagatctcatcacttccaataaattaaacttatcctgtaaccgagtcctaggggcttatgtttggaatagggatagtgaacaggttgagaccattaaggctaaatttgtcgccttagcaactggtggtagctctaaagtctatcaatatacttcgaacccagatattgcttccggtgatggtattgccatggcctggcgctccggttgcaaagttgccaacatggaattcaatcaattccaccctacttgtctctatcatgccgatgccagaaactttcttctcacagaagctttacgcggtgaaggtgcctatcttagacgccctgatggcacacgcttcatgccagaattcgacgaacgtgccgagctggcaccaagagacatagtcgcacgagccatagattttgagatgaagaggctaggttcagattgtgtttacttagacatcactcataaaccggcagagtttatcattaagcactttccgaccatccataagcgttgcttagaatttggtatcgatatcaccacggacccaatcccggtggtaccagcagcccattacacctgtggtggtgtgatgacagacctgaacgggcagacagatctcaaaggcttatatgccatcggcgaagtcgcctacacaggcctacacggtgctaaccgtctcgccagtaactccttactcgagtgtctcgtcttcgccagggccgccggtgaaaatattggtgggcaactgcataatattcctatgcctggagtattgcctccatgggatgagagtaaggtatcgaactcagatgaagaagttgtcatcgcccacaactggcatgaactgcgcctgttcatgtgggattatgtaggtattgttcgctcagataaacggcttgagagggcccttcgtcgctgcgccatgctgcaacaagagatccaagaatattacagtaatttcagagtgagcaataatctactggaactgagaaatctagtgcaggtggcagagcttatcatacgctgcgccatggatagaaaagagagcataggtctgcattacaatatagatcatccagaaccatcagataaccccactcccacaatacttaaacctgatagctaa

SEQ ID NO: 138678 - protein, 537 aa, Shewanella violacea
MKQVVEHQSDVLVIGSGAAGLTLALHLAEKHEVILLSKGPLSEGSTYYAQGGIASVFDADDTIESHVADTLIAGAGLCDEAVVKFTAENAKGIMEWLIECGVAFDKEETSDGDTANAPYHLTREGGHSHRRILHAADATGKEVQVTLQDRAKSHPNIRVLERYNAIDLITSNKLNLSCNRVLGAYVWNRDSEQVETIKAKFVALATGGSSKVYQYTSNPDIASGDGIAMAWRSGCKVANMEFNQFHPTCLYHADARNFLLTEALRGEGAYLRRPDGTRFMPEFDERAELAPRDIVARAIDFEMKRLGSDCVYLDITHKPAEFIIKHFPTIHKRCLEFGIDITTDPIPVVPAAHYTCGGVMTDLNGQTDLKGLYAIGEVAYTGLHGANRLASNSLLECLVFARAAGENIGGQLHNIPMPGVLPPWDESKVSNSDEEVVIAHNWHELRLFMWDYVGIVRSDKRLERALRRCAMLQQEIQEYYSNFRVSNNLLELRNLVQVAELIIRCAMDRKESIGLHYNIDHPEPSDNPTPTILKPDS

SEQ ID NO: 138679 - DNA, 1596 bp, uncultured bacterium 580
  CDS (1)..(1596): transl_table=11
atgaagaaaacgaattttgacgtattaatcattggcagtggtctagctggcctatccaccgccttgaagttagctgatcataagcgcattggtattgtttgtaaaacagaattaactgaaagttcaagtcactgggcacaaggtggagtcgctgcagcaatatcgcccgaagatcctatttcatcacatattaatgatactaagaatgctggcgctggactatgtgatgaagatatcactgaattcgtagctagcaatagtgaaaaggcgctggattggctgatgaatcttggggttaattttacaaaaaataaacaaaataacgatttacacctcactcgagaaggtgggcactcgcagatgagaattgcacatgttgctgatactacaggcaaagcaattcaggaacatctaattaaaaggattttatctcatcctaatattactgtcctagaacaccatatcgccgtcgatatcatcacatcagaaaaaatgaagattgatatcgagaaaaatacttgtctcggcgcatatattctaaataataaaaataatcacgtagaaacattcacatcaaaccatattgtcttagcaaccggaggtgcaagtaaagtatatctctacaccacgaacccagacgtcagcacaggtgatggcattgccatgggttggcgggcaggatgcaaagtagccaacatggaatttgttcaatttcatcctacctgcttgtttgatgaaaaagatagatcttttcttatttctgaaaccttacggggtgaaggcgcaaaactagtgcttccaaatggcgaaacattcatgggaaaatatgatgatagaggtgatttagcccctcgagatattgtggcccaagcaattgattatgaaatgaaacaaaaagggttggtatgtgtgtatctagatattagtcataaatctgcagactttatccaaaaaaggtttccaatgatttttgaacgttgtctagaccgtggtattgatataacaaaagatcgtatacccgtcgttccagcagcccattacacttgtggtggactcatgactgatcgtgcaagtaaaacaaatgttaatcaactttatgccatcggtgaagtctcctttaccgggctgcacggtgcaaatcgtctagcaagtaattccttattagaatgtttggtgttttcttcaaccgccgcatcatctattttaaatgatgactttacacataattataagctcccaaaatgggatgagagtcgagtgacggatgctgatgaagaagttttgattacacatacttggaacgaattaagaaggtttatgtggaattatgttgggattgtaagaaccaataaacgattatctagagcacttcatcggattaatatgttgagggatgaggtcggtgaattttacaagaattttaagatctcctctaacctcattgaattaagaaacttattgcaagtcgctgaattaattgtcctttcgtcaatagaaaggagggaaagtcgaggcttgcacttcagtaaagatttcccgaaacctgctaaaatagcgaaaaatacgattctaaaaccgcaagattacaaagattaa

SEQ ID NO: 138680 - protein, 531 aa, uncultured bacterium 580
MKKTNFDVLIIGSGLAGLSTALKLADHKRIGIVCKTELTESSSHWAQGGVAAAISPEDPISSHINDTKNAGAGLCDEDITEFVASNSEKALDWLMNLGVNFTKNKQNNDLHLTREGGHSQMRIAHVADTTGKAIQEHLIKRILSHPNITVLEHHIAVDIITSEKMKIDIEKNTCLGAYILNNKNNHVETFTSNHIVLATGGASKVYLYTTNPDVSTGDGIAMGWRAGCKVANMEFVQFHPTCLFDEKDRSFLISETLRGEGAKLVLPNGETFMGKYDDRGDLAPRDIVAQAIDYEMKQKGLVCVYLDISHKSADFIQKRFPMIFERCLDRGIDITKDRIPVVPAAHYTCGGLMTDRASKTNVNQLYAIGEVSFTGLHGANRLASNSLLECLVFSSTAASSILNDDFTHNYKLPKWDESRVTDADEEVLITHTWNELRRFMWNYVGIVRTNKRLSRALHRINMLRDEVGEFYKNFKISSNLIELRNLLQVAELIVLSSIERRESRGLHFSKDFPKPAKIAKNTILKPQDYKD

SEQ ID NO: 138681 - DNA, 1560 bp, uncultured bacterium 578
  CDS (1)..(1560): transl_table=11
atgccaaataaaaaccaatttgacgtacttataataggctcaggagcagcgggcttaatgagcgcaattcaactcacagataagttgtctattgcagtaattgctaaggataaaatcttagaaggctcttcttactatgcacagggcggaatatctgcagtattggatccagaggataattttgaatctcatatttcagacacaattaatacaggttttaacttaggtaacgaagatagaataagatttatggtagagcaatctccaatagcaatttcagatcttgaaaatactggggttaatttttcacttaaagggaaaaattatgatctgactacagaaggagggcatagttccaaaagggttgctcatgttgatgacaaaactggccaatctattcaagttaatctattaactcaagctaaacaaagaacaaacattacactctttgaacaacatctggctgtagatttactaataaatgaaggggaatgtaacggggcttttatttttgataaaaaaacaaaacaagtgactccatttattgctaataaaaccatcctagctactggaggagcatccaaatcatacctatacacttcaaatccagatacctctacaggggacggaattgctatggcttatagagcgggatgtgaaattgttaatatggaatttacacaatttcatcccacttgtctttttcaccctcatgcaaagtcattcttaatctccgaaacacttagaggagaaggcgcgaaactccttctccctaatggcaaagaatttatgcataactatgatgaaagacttgagctcgcatctcgagatattgtcgcaagagctattgatcatgaaatgaaggtacatggctttgaatgtgtttaccttgatatctcatttaaagattcggattggatttcaaatcgctttccaactatcactgaacgctgtaaagagttaggtattgatatttgcagtgaagctataccagttgtacctgcggcacactatacctgtggaggtgttaatacagatattgatgctcagagcaatattaataatctttatgcagttggcgaggttgctcacacgggcgttcatggtgctaacagaatggctagcaattcattacttgaatgcattgtctttgcaacaagttgtgctaaacatattaacgaaagtactcttgataactccctttcacataaatataattgggacgcttctagggtagagccatcaagagaaaaagttgttatcactcaattgtggcatgaagtgaggagaattatgtggaattttgttggcattgttagaagtgatagtcgacttaagtcagcccattttaaaattgaacaaattagcaaagaggtaaatgaatattacagtctttatacagtgacttacgacatgatagaactaagaaacttagttcaaacatccaaaattattgtagaatctgctctttctagaaaagaaagtagagggctgcactttaaccaagattatcctaatttgcttgatgaaactcataatactgtaatcattaaatcatga

SEQ ID NO: 138682 - protein, 519 aa, uncultured bacterium 578
MPNKNQFDVLIIGSGAAGLMSAIQLTDKLSIAVIAKDKILEGSSYYAQGGISAVLDPEDNFESHISDTINTGFNLGNEDRIRFMVEQSPIAISDLENTGVNFSLKGKNYDLTTEGGHSSKRVAHVDDKTGQSIQVNLLTQAKQRTNITLFEQHLAVDLLINEGECNGAFIFDKKTKQVTPFIANKTILATGGASKSYLYTSNPDTSTGDGIAMAYRAGCEIVNMEFTQFHPTCLFHPHAKSFLISETLRGEGAKLLLPNGKEFMHNYDERLELASRDIVARAIDHEMKVHGFECVYLDISFKDSDWISNRFPTITERCKELGIDICSEAIPVVPAAHYTCGGVNTDIDAQSNINNLYAVGEVAHTGVHGANRMASNSLLECIVFATSCAKHINESTLDNSLSHKYNWDASRVEPSREKVVITQLWHEVRRIMWNFVGIVRSDSRLKSAHFKIEQISKEVNEYYSLYTVTYDMIELRNLVQTSKIIVESALSRKESRGLHFNQDYPNLLDETHNTVIIKS

SEQ ID NO: 138683 - DNA, 1749 bp, Thermoproteus tenax
  CDS (1)..(1749): transl_table=11
atggagattttaaggcacgatctgctgatcataggctcaggtattgcgggcctcagagctgctctacaggcggcgtatgtcggaggcaatctcgatatagcgatcataagcaaggtccaagtgatgaggtcccactccgtctctgccgagggcggtatgtcggccgtcctgtatcccgataagactggggacagcctagagcttcacgcctacgataccataaagggcgccgactttctagcagaccaggatgccgttgagctgttagttcaatcggccccctctgaggtcagattccttgagcggatcggagtgccttggagccgtctgcccgatggacggatgtaccaaagagccttcggagggatgtcgataccccgaactacatttgcggccgacaaaactggattttttatcatgtcaaccttatatcaaaatatattaagatttagtaatattaaacaatatcatgagcattttgtaacaaaattaataattgaaaataatgaatttaagggcgctacagctatagatctgaagaccggggagctcaggctctttttggcaaaggccgccataatagcaactgggggggcgggcagactgtataggttcactacgacggcccactcgactactggggagatgttggggtatgccctaagagcgggcctggcgctaaaagacatggagttcgtccagtggcatccgaccgctctagttcccagcggtatactcgtgagcgaggcagccagaggcgaggggggctacctcgtcaacaaggagggcgagaggttcatgaagcggtacgcgccgcagaagatggagctggcgccccgggatatagtgtcgagagctatattgacagagatagccgagggacgcggctttgtgcacgaagagagcggcatgggctacgtcgggcttgatctaagacatttgggcgaggacgtgttaaatcaaaagataccgttcataagagagctggcccacaagtacgttggaatagatccccttactgagcttatacccgttagaccggccgtccactatactatgggaggcataaacgctgatacatatgggcgtgcgctgacggcggacggccagtgggttagaggcctctgggtagcgggcgaggccgcggctataagcgtccacggcgcgaacagactcggctccaactcgctcagcgaatgctcggtctggggaagactgaccggcgaggccgcggctaagtacgccctggagaagccctcgcctgctcttgacggacattacaaggaggtggctcaatctgaggagtccagaatattcgacaggctgctccatacggagacagggggcatatcggtctatgagttgaaagggcgtctccaagacaccatggagcagcacttcgggcccttcagacacgaatcggtcatgaaggagggtatcccgaagttgcttaagatcaaagaggatatagccaaagtcaggattgaggacagaagcagagtctataaccagaaccttaaagatgcgttggagctcgatggtatgatcgaggtagcgttggccatagcctatggagcgttgtcaagacaagagtcaaggggggcccattatcgtttggactatcctaaacgcgatgatgccaactggcttaagcacaccatcgcatatctagatggcggccagataaggctgacgtatgcgcctgtgagaataaccaaatggactaagttggaggaaaggaagtattaa

SEQ ID NO: 138684 - protein, 582 aa, Thermoproteus tenax
MEILRHDLLIIGSGIAGLRAALQAAYVGGNLDIAIISKVQVMRSHSVSAEGGMSAVLYPDKTGDSLELHAYDTIKGADFLADQDAVELLVQSAPSEVRFLERIGVPWSRLPDGRMYQRAFGGMSIPRTTFAADKTGFFIMSTLYQNILRFSNIKQYHEHFVTKLIIENNEFKGATAIDLKTGELRLFLAKAAIIATGGAGRLYRFTTTAHSTTGEMLGYALRAGLALKDMEFVQWHPTALVPSGILVSEAARGEGGYLVNKEGERFMKRYAPQKMELAPRDIVSRAILTEIAEGRGFVHEESGMGYVGLDLRHLGEDVLNQKIPFIRELAHKYVGIDPLTELIPVRPAVHYTMGGINADTYGRALTADGQWVRGLWVAGEAAAISVHGANRLGSNSLSECSVWGRLTGEAAAKYALEKPSPALDGHYKEVAQSEESRIFDRLLHTETGGISVYELKGRLQDTMEQHFGPFRHESVMKEGIPKLLKIKEDIAKVRIEDRSRVYNQNLKDALELDGMIEVALAIAYGALSRQESRGAHYRLDYPKRDDANWLKHTIAYLDGGQIRLTYAPVRITKWTKLEERKY

SEQ ID NO: 138685 - DNA, 1878 bp, Corynebacterium glutamicum
  CDS (1)..(1878): transl_table=11
atgaacctggtctccccactgaaccgacgcaagttccgtgtcctcgtcgttggcaccggcctgtccggtggtgctgcagcagcagccctcggcgaactcggatacgacgtcaaggcgttcacctaccacgacgcacctcgccgtgcgcactccattgctgcacagggtggcgttaactccgcccgcggcaagaaggtagacaacgacggcgcataccgccacgtcaaggacaccgtcaagggcggcgactaccgtggtcgcgagtccgactgctggcgtctcgccgtcgagtccgtccgcgtcatcgaccacatgaacgccatcggtgcaccattcgcccgcgaatacggtggcgccttggcaacccgttccttcggtggtgtgcaggtctcccgtacctactacacccgtggacaaaccggacagcagctgcagctctccaccgcatccgcactacagcgccagatccacctcggctccgtagaaatcttcacccataacgaaatggttgacgtcattgtcaccgaacgtaacggtgaaaagcgctgcgaaggcctgatcatgcgcaacctgatcaccggcgagctcaccgcacacaccggccatgccgttatcctggcaaccggtggctacggcaacgtgtaccacatgtccaccctggccaagaactccaacgcctcggccatcatgcgtgcatacgaagccggcgcatacttcgcgtccccatcgttcatccagttccacccaaccggcctgcctgtgaactccacctggcagtccaagaccattctgatgtccgagtcgctgcgtaacgacggccgcatctggtcccctaaggaaccgaacgataaccgcgatccaaacaccatccctgaggatgagcgcgactacttcctggagcgccgctacccagcattcggtaacctcgtcccacgtgacgttgcttcccgtgcgatctcccagcagatcaatgctggtctcggtgttggacctctgaacaacgctgcatacctggacttccgcgacgccaccgagcgcctcggacaggacaccatccgcgagcgttactccaacctcttcaccatgtacgaagaggcaattggcgaggacccatactccagcccaatgcgtattgcaccgacctgccacttcaccatgggtggcctctggactgacttcaacgaaatgacgtcactcccaggtctgttctgcgcaggcgaagcatcctggacctaccacggtgcaaaccgtctgggcgcaaactccctgctctccgcttccgtcgatggctggttcaccctgccattcaccatccctaactacctcggcccattgcttggctccgagcgtctgtcagaggatgcaccagaagcacaggcagcgattgcgcgtgcacaggctcgcattgaccgcctcatgggcaaccgcccagagtgggtcggtgacaacgttcacggacctgagtactaccaccgccagcttggcgatatcctgtacttctcctgtggcgtttcccgaaacgtagaagacctccaggatggcatcaacaagatccgtgccctccgcgatgacttctggaagaacatgcgcatcaccggcagcaccgatgagatgaaccaggttctcgaatacgcagcacgcgtagccgactacatcgacctcggcgaactcatgtgtgtcgacgccctcgaccgcgacgagtcctgtggcgctcacttccgcgacgaccacctctccgaagatggcgaagcagaacgtgacgacgaaaactggtgcttcgtctccgcatgggaaccaggcgagaacggaaccttcgtccgccacgcagaaccactgttcttcgaatccgtcccactgcagacaaggaactacaagtaa

SEQ ID NO: 138686 - protein, 625 aa, Corynebacterium glutamicum
MNLVSPLNRRKFRVLVVGTGLSGGAAAAALGELGYDVKAFTYHDAPRRAHSIAAQGGVNSARGKKVDNDGAYRHVKDTVKGGDYRGRESDCWRLAVESVRVIDHMNAIGAPFAREYGGALATRSFGGVQVSRTYYTRGQTGQQLQLSTASALQRQIHLGSVEIFTHNEMVDVIVTERNGEKRCEGLIMRNLITGELTAHTGHAVILATGGYGNVYHMSTLAKNSNASAIMRAYEAGAYFASPSFIQFHPTGLPVNSTWQSKTILMSESLRNDGRIWSPKEPNDNRDPNTIPEDERDYFLERRYPAFGNLVPRDVASRAISQQINAGLGVGPLNNAAYLDFRDATERLGQDTIRERYSNLFTMYEEAIGEDPYSSPMRIAPTCHFTMGGLWTDFNEMTSLPGLFCAGEASWTYHGANRLGANSLLSASVDGWFTLPFTIPNYLGPLLGSERLSEDAPEAQAAIARAQARIDRLMGNRPEWVGDNVHGPEYYHRQLGDILYFSCGVSRNVEDLQDGINKIRALRDDFWKNMRITGSTDEMNQVLEYAARVADYIDLGELMCVDALDRDESCGAHFRDDHLSEDGEAERDDENWCFVSAWEPGENGTFVRHAEPLFFESVPLQTRNYK

SEQ ID NO: 138687 - DNA, 1542 bp, Rhizobium loti
  CDS (1)..(1542): transl_table=11
atgacggcggacattcatcacattggcggagcgccggtcatcatcggggccggtatcgccgggctcatgacggcgcttcacctggcgccgcaaccagtcgttctgctctccagaagcccactcgggacggaggcctcgagcaccctcgcgcagggcggcctcgcagcgagtcttggggaggacgacagccccgacctgcacctcgccgatacgcttgctgccggcgatgggctttgcgacgaacaaatggccaggcgggtggtagaggccgcacctcaagccgtcgagaaccttattcgtcttggtgctcctttcgaccggtcgctggacgggaggctgcagctgggcctggaagcggcgcattcgcgtcgccgcatcgtgcacgccgccggcgacgcaaccggccgcgagttgtttcgggcgctactcggcgtggcgcggcgaacccgttcgatcacgatcatggaaggcatgacagcgcttcgcttggttgtcgcggaagggagcattgtaggggtggtggctgccctgcacggcggcgtgttcgcattgcccacacgccgcgtggtgctggccaccggtgggatgggcggcctgttttgcgacacaaccaatccgctctccacattcgggcatggcctggcgctggccgcctgcgcgggcgcggaactagccgatctcgaattcgtgcaattccacccaacggccctcgacattgcgcgccggccaatgccgcttgtcagcgaagcagtgcgtggcgaaggcgcggtgctgatcgatgagcacggccatcgcttcctggcagatacgcccggggcagaactcgcatcgcgcgatgtggtcgcgcgcgcgatctcggatcagctcgcagccgggcatggcgtctatctcgatgcccgacattgtctcgggcagaaattcgcaagacgctttccggcaatcgacgctatttgcaagcatgccggcatcgatccggcggtggaacccattcccgtgcggcccgctgctcactatcacatgggcggcgtggccgttgacgccgatgggcgaacttccgttagcggcctgtgggcctgtggcgaagtcgcatgcacgggactgcatggcgccaaccggcttgccagcaactcgctgaccgaagcggttgcaaccgccgcctgggtggctgaaagcgtcgcggctaccgctgcgggttggcagtggcctaggcttcccgcaactgttcccattcggcccgacccttcacctattcgcccgattgtgtccaatgcgcttggcattgttcggaatgggaaatcactgcgcgacacggtcgcgacactgctgccgatatctgtttgcgagacggccgcggccgatccggccctggtggcattgttgatggcgatcgccgcgcttcggcgcgaggagagccgcggctcccactatcgatccgatttccctggccgcgatgccgccgccctcccctcacgactgacgctctgcacagcttttgagaatgccgtcacgctcagatggcaagcatccgaacggagcctttga

SEQ ID NO: 138688 - protein, 513 aa, Rhizobium loti
MTADIHHIGGAPVIIGAGIAGLMTALHLAPQPVVLLSRSPLGTEASSTLAQGGLAASLGEDDSPDLHLADTLAAGDGLCDEQMARRVVEAAPQAVENLIRLGAPFDRSLDGRLQLGLEAAHSRRRIVHAAGDATGRELFRALLGVARRTRSITIMEGMTALRLVVAEGSIVGVVAALHGGVFALPTRRVVLATGGMGGLFCDTTNPLSTFGHGLALAACAGAELADLEFVQFHPTALDIARRPMPLVSEAVRGEGAVLIDEHGHRFLADTPGAELASRDVVARAISDQLAAGHGVYLDARHCLGQKFARRFPAIDAICKHAGIDPAVEPIPVRPAAHYHMGGVAVDADGRTSVSGLWACGEVACTGLHGANRLASNSLTEAVATAAWVAESVAATAAGWQWPRLPATVPIRPDPSPIRPIVSNALGIVRNGKSLRDTVATLLPISVCETAAADPALVALLMAIAALRREESRGSHYRSDFPGRDAAALPSRLTLCTAFENAVTLRWQASERSL

SEQ ID NO: 138689 - DNA, 1905 bp, Arabidopsis thaliana; identical to SEQ ID NO: 33387
  CDS (1)..(1905)

SEQ ID NO: 138690 - protein, 634 aa, Arabidopsis thaliana; identical to SEQ ID NO: 33388

SEQ ID NO: 138691 - DNA, 1899 bp, Arabidopsis thaliana; identical to SEQ ID NO: 33389
  CDS (1)..(1899)

SEQ ID NO: 138692 - protein, 632 aa, Arabidopsis thaliana; identical to SEQ ID NO: 33390

SEQ ID NO: 138693 - DNA, 1761 bp, Bacillus subtilis
  CDS (1)..(1761): transl_table=11
atgagtcaatcaagcattatcgtagtcggcgggggtcttgccggcctcatggcgacaattaaagcagcggaatcaggaatggcggttaaattgttttccatcgttcctgtcaaacgttctcattcagtttgtgcgcaaggcggcataaacggagcggtcaatacaaaaggggaaggtgactctccgtgggaacattttgatgacacggtatacgggggagactttcttgccaaccagccgccgctcaaggcgatgtgtgaagcggcgccttcgatcatccacttattagaccggatggccgtcatgtttaaccggacgcctgaaggcctgcttgatttccgccgattcgggggtacacagcaccacagaactgcttatgctggtgcgacgacgggacagcagctgctttacgcactggacgagcaagtgcgcagatacgaagttgcgggtctggtcacaaaatacgaaggctgggaattccttggcgctgttttagatgatgacagaacctgccgcggaattgttgcacaaaacctgacaaacatgcaaattgaatccttccgttcagacgctgtcattatggcgacgggcggaccgggaatcatctttggaaaatcaacgaactccatgattaatacaggatctgctgcgtcaatcgtttatcagcagggagcgtattatgcaaacggagaattcattcaaatccacccgacagccataccgggcgatgacaaactaagactgatgagtgaatcagcgcgtggtgaaggcgggcgcgtgtggacatataaagacggcaaaccatggtatttcctggaggaaaaatatccggcatacggaaacctggtgccgcgtgatattgcgacacgcgaaatatttgatgtgtgtgtgaaccagaagctcggtattaacggtgaaaacatggtatatctcgatctgtctcataaagatccgaaagagcttgatattaagcttggcggcatcattgagatttatgagaaattcatgggagacgacccgcgtaagcttccaatgaaaatcttcccggcggtccattattctatgggcggtttatgggtggattacgatcaaatgacaaatatccctggactgtttgcggctggggaatgtgattattctatgcacggcggcaaccgcttggagcgaacatccctgctgtctgcgatttacggaggcatggtggccggtccgaatgcggtgaaatatgtaaacggcttagaatcttcagcggaagacatgtcttcatctttattcgacgctcacgttaagaaagaagaagaaaaatgggctgatattatgattatggacggaaccgaaaatgcctatgttcttcacaaagagctcggtgagtggatgacggcaaacgtaacggttgtccgccataatgacaagcttttgaaaacggatgacaaaattcaggagttaatggagcgcttcaaaaagatcaacatcaatgacacgacaaaatggagcaaccagggagcgatgttcacacgccagttctcgaacatgcttcagcttgcgagggtgattacccttggcgcatacaaccgtaatgaaagccggggcgcccattataaaccggattatcctgaacgtaatgatgatgaatggctcaaaacaacaatggctaaacatgtaagcccgtatgaagcgccggaatttgagtatcaggatgtcgatgtatcactgataacgcctcggaaacgggattactcgaagaagaaggtggcgaaataa

SEQ ID NO: 138694 - protein, 586 aa, Bacillus subtilis
MSQSSIIVVGGGLAGLMATIKAAESGMAVKLFSIVPVKRSHSVCAQGGINGAVNTKGEGDSPWEHFDDTVYGGDFLANQPPLKAMCEAAPSIIHLLDRMAVMFNRTPEGLLDFRRFGGTQHHRTAYAGATTGQQLLYALDEQVRRYEVAGLVTKYEGWEFLGAVLDDDRTCRGIVAQNLTNMQIESFRSDAVIMATGGPGIIFGKSTNSMINTGSAASIVYQQGAYYANGEFIQIHPTAIPGDDKLRLMSESARGEGGRVWTYKDGKPWYFLEEKYPAYGNLVPRDIATREIFDVCVNQKLGINGENMVYLDLSHKDPKELDIKLGGIIEIYEKFMGDDPRKLPMKIFPAVHYSMGGLWVDYDQMTNIPGLFAAGECDYSMHGGNRLERTSLLSAIYGGMVAGPNAVKYVNGLESSAEDMSSSLFDAHVKKEEEKWADIMIMDGTENAYVLHKELGEWMTANVTVVRHNDKLLKTDDKIQELMERFKKININDTTKWSNQGAMFTRQFSNMLQLARVITLGAYNRNESRGAHYKPDYPERNDDEWLKTTMAKHVSPYEAPEFEYQDVDVSLITPRKRDYSKKKVAK

SEQ ID NO: 138695 - DNA, 1986 bp, Drosophila melanogaster; identical to SEQ ID NO: 33391
  CDS (1)..(1986)

SEQ ID NO: 138696 - protein, 661 aa, Drosophila melanogaster; identical to SEQ ID NO: 33392

SEQ ID NO: 138697 - DNA, 1893 bp, Oryza sativa subsp; identical to SEQ ID NO: 33439
  CDS (1)..(1893)

SEQ ID NO: 138698 - protein, 630 aa, Oryza sativa subsp; identical to SEQ ID NO: 33440

SEQ ID NO: 138699 - DNA, 1767 bp, Salmonella typhimurium; identical to SEQ ID NO: 33395
  CDS (1)..(1767): transl_table=11

SEQ ID NO: 138700 - protein, 588 aa, Salmonella typhimurium; identical to SEQ ID NO: 33396

SEQ ID NO: 138701 - DNA, 1926 bp, Schizosaccharomyces pombe; identical to SEQ ID NO: 33397
  CDS (1)..(1926)

SEQ ID NO: 138702 - protein, 641 aa, Schizosaccharomyces pombe; identical to SEQ ID NO: 33398

SEQ ID NO: 138703 - DNA, 1923 bp, Saccharomyces cerevisiae; identical to SEQ ID NO: 33399
  CDS (1)..(1923)

SEQ ID NO: 138704 - protein, 640 aa, Saccharomyces cerevisiae; identical to SEQ ID NO: 33400

SEQ ID NO: 138705 - DNA, 1905 bp, Saccharomyces cerevisiae; identical to SEQ ID NO: 33401
  CDS (1)..(1905)

SEQ ID NO: 138706 - protein, 634 aa, Saccharomyces cerevisiae; identical to SEQ ID NO: 33402

SEQ ID NO: 138707 - DNA, 1797 bp, Proteus vulgaris; identical to SEQ ID NO: 33403
  CDS (1)..(1797): transl_table=11
  misc_feature (810)..(810): n is a, g, c or t

SEQ ID NO: 138708 - protein, 598 aa, Proteus vulgaris; identical to SEQ ID NO: 33404

SEQ ID NO: 138709 - DNA, 1971 bp, Wolinella succinogenes
  CDS (1)..(1971): transl_table=11
atgaaagtacaatactgcgattcgctggttattggaggcgggttagctggtcttagagccgctgtcgccactcaacaaaaaggcttgagcaccatcgtgcttagtttgattcctgtcaagcgatcccactccgctgccgctcaagggggtatgcaagccagccttggaaactccaagatgagtgatggagacaatgaagatcttcactttatggacaccgtcaaaggaagtgactggggctgtgaccaaaaagtcgctcgaatgtttgtcaacactgcgcccaaggctatcagagagttagccgcctggggggttccctggacccgtattcacaagggtgatcgaatggcgatcatcaatgcccaaaagaccactatcaccgaagaggattttagacatggtctcatccactctcgagattttgggggcactaaaaaatggagaacctgctataccgccgatgctacgggtcacaccatgctctttgcggttgccaatgagtgcttgaaactcggcgtctctatccaagatcgaaaagaggctattgcccttattcatcaagatggcaagtgctatggtgcggtcgtaagagaccttgtcacgggcgatatcattgcttatgtagccaaaggaaccctcattgctacagggggctatggacgaatctacaaaaacaccactaacgcagtggtttgcgagggcacaggaacggctatcgctctagagacaggaatcgctcagcttggaaatatggaagcggttcaattccaccccacccctcttttcccttcagggattctattgaccgagggttgtcgaggggatggaggtattctccgagatgtggatggacaccgattcatgcctgattatgagcctgagaaaaaagagctcgctagccgtgacgttgtctctagacgaatgattgagcacatccgaaaaggcaagggcgtacaatcaccctatggacagcacctttggcttgacatctccatcttgggtcgaaaacatatcgaaaccaacctccgagatgttcaagagatctgcgaatacttcgctggaattgatcctgcggagaagtgggcgcctgttcttcctatgcaacactactctatgggtggaatccgaactgactacagaggcgaagcgaaacttaaaggtctattctctgcgggtgaagccgcttgctgggatatgcacggcttcaaccgactaggcggaaactccgtcagcgaagccgtcgtagcgggtatgatcgtaggagagtatttcgcagaacattgcgccaacactcaagtggatcttgaaactaagactttagagaagtttgtgaaaggccaagaagcctacatgaaaagcctcgtggagagcaaaggcaccgaggatgtattcaagattaaaaatcgcatgaaagatgtaatggatgacaacgtgggaatcttccgcgatggtccgcacctagaaaaagcggtcaaagagcttgaagaactctacaaaaaatccaaaaatgtaggaatcaaaaacaagcgactccacgccaaccctgagctcgaagaggcttaccgtgtgcctatgatgctcaaagtcgctctttgcgttgccaaaggcgctctagatcgaacagagagccgaggagctcacaatcgtgaggattaccccaagcgagacgatattaactggctcaaccgaactcttgcctcttggcctaaccctgagcagactctccctactctagagtatgaagctcttgatgttaatgagatggagattgctcctggatatcgaggatatggagccaaagggaactacatcgagaatcctttaagcgtgaaacgacaagaggagatcgacaagattcagagcgaattggaagcagctggcaaagatcgacatgctattcaagaagctctcatgccttatgagctacccgctaaatacaaagccagaaacgaacgcctaggagacaaataa

SEQ ID NO: 138710 - protein, 656 aa, Wolinella succinogenes
MKVQYCDSLVIGGGLAGLRAAVATQQKGLSTIVLSLIPVKRSHSAAAQGGMQASLGNSKMSDGDNEDLHFMDTVKGSDWGCDQKVARMFVNTAPKAIRELAAWGVPWTRIHKGDRMAIINAQKTTITEEDFRHGLIHSRDFGGTKKWRTCYTADATGHTMLFAVANECLKLGVSIQDRKEAIALIHQDGKCYGAVVRDLVTGDIIAYVAKGTLIATGGYGRIYKNTTNAVVCEGTGTAIALETGIAQLGNMEAVQFHPTPLFPSGILLTEGCRGDGGILRDVDGHRFMPDYEPEKKELASRDVVSRRMIEHIRKGKGVQSPYGQHLWLDISILGRKHIETNLRDVQEICEYFAGIDPAEKWAPVLPMQHYSMGGIRTDYRGEAKLKGLFSAGEAACWDMHGFNRLGGNSVSEAVVAGMIVGEYFAEHCANTQVDLETKTLEKFVKGQEAYMKSLVESKGTEDVFKIKNRMKDVMDDNVGIFRDGPHLEKAVKELEELYKKSKNVGIKNKRLHANPELEEAYRVPMMLKVALCVAKGALDRTESRGAHNREDYPKRDDINWLNRTLASWPNPEQTLPTLEYEALDVNEMEIAPGYRGYGAKGNYIENPLSVKRQEEIDKIQSELEAAGKDRHAIQEALMPYELPAKYKARNERLGDK

SEQ ID NO: 138711 - DNA, 1602 bp, Ralstonia solanacearum; identical to SEQ ID NO: 33405
  CDS (1)..(1602): transl_table=11

SEQ ID NO: 138712 - protein, 533 aa, Ralstonia solanacearum; identical to SEQ ID NO: 33406

SEQ ID NO: 138713 - DNA, 1569 bp, Agrobacterium tumefaciens; identical to SEQ ID NO: 33407
  CDS (1)..(1569): transl_table=11

SEQ ID NO: 138714 - protein, 522 aa, Agrobacterium tumefaciens; identical to SEQ ID NO: 33408

SEQ ID NO: 138715 - DNA, 1737 bp, Anabaena sp; identical to SEQ ID NO: 33409
  CDS (1)..(1737): transl_table=11

SEQ ID NO: 138716 - protein, 578 aa, Anabaena sp; identical to SEQ ID NO: 33410

SEQ ID NO: 138717 - DNA, 1533 bp, Aquifex aeolicus; identical to SEQ ID NO: 33411
  CDS (1)..(1533): transl_table=11

SEQ ID NO: 138718 - protein, 510 aa, Aquifex aeolicus; identical to SEQ ID NO: 33412

SEQ ID NO: 138719 - DNA, 1596 bp, Bacillus subtilis; identical to SEQ ID NO: 33413
  CDS (1)..(1596): transl_table=11

SEQ ID NO: 138720 - protein, 531 aa, Bacillus subtilis; identical to SEQ ID NO: 33414

SEQ ID NO: 138721 - DNA, 1623 bp, Escherichia coli O157; identical to SEQ ID NO: 33415
  CDS (1)..(1623): transl_table=11
  misc_feature (624)..(624): s is g or c

SEQ ID NO: 138722 - protein, 540 aa, Escherichia coli O157; identical to SEQ ID NO: 33416

SEQ ID NO: 138723 - DNA, 1530 bp, Halobacterium salinarium; identical to SEQ ID NO: 33419
  CDS (1)..(1530): transl_table=11

SEQ ID NO: 138724 - protein, 509 aa, Halobacterium salinarium; identical to SEQ ID NO: 33420

SEQ ID NO: 138725 - DNA, 1584 bp, Mycobacterium bovis
  CDS (1)..(1584): transl_table=11
atggccggtcccgcttggcgggatgcggccgatgttgtcgtgatcggcacgggcgttgccgggctggcggcggcattggccgccgatcgcgccgggcgcagcgtcgtggtgctcagcaaggctgcccagacgcacgtgaccgcgacacactacgcgcaaggcggtatcgcggtggtgctgccggacaacgacgactcggtcgacgctcacgtcgcggacaccttggccgcaggcgcgggcctatgcgatcccgatgcggtgtactcgatcgtcgccgacggctaccgagcggttaccgatttggtcggagctggggcacggttggatgaatcggtcccgggccgttgggcgttgacgcgcgaaggcgggcactcgcggcgacgcatcgtgcacgcgggtggcgacgcgaccggcgccgaggttcagcgggcgctccaggatgccgccgggatgctcgatatccgcaccggccacgtggcgttgcgagtgctgcacgacggtaccgcggtgaccgggctattagtggtcagaccggacggatgcggcattatcagcgctccgtcggtgatcctggccaccggcgggctcgggcacctgtacagcgcgaccaccaatccggcgggctccaccggcgacggcatcgccctgggattgtgggcgggcgtcgcggtcagcgatctcgagttcatccagttccaccccacgatgctttttgccggacgcgccgggggtcggcggccgctgatcaccgaggccatccgcggcgagggtgcgatcttggtggacaggcaaggcaattcgataacggcaggcgtgcatccgatgggtgatttggcgccgcgcgacgtcgtcgccgccgccatcgacgcgcggctgaaggccaccggcgatccgtgcgtctacctcgacgcccgcggcatcgagggcttcgcgtcccggttcccgacagtcacggcatcctgccgggctgccggcattgaccccgtccggcaaccgatcccggttgttcccggtgcgcactacagctgcggcggcatagtgaccgatgtgtacggccagaccgagctgctcgggttgtacgccgctggcgaggtggcccgcaccgggttgcacggcgccaaccgcctggcctccaacagcttgctagagggtttggtggtgggcggccgcgccggaaaggccgccgccgcccacgccgcggcggccgggcgttcgcgtgcgacctcgtcagcgacctggcccgaaccgatcagctacaccgcactggaccgcggcgacctgcaacgggcgatgagccgggacgcgtcgatgtaccgcgccgccgccgggctgcaccggctgtgcgacagcctatccggagcacaggttcgcgacgtggcttgtcgccgcgatttcgaggacgtggcgctcacgctggtcgcgcagagcgtgaccgccgccgccttggcccgcaccgaaagccgtggctgccatcatcgcgcggagtacccgtgcaccgtgccggagcaggcacgcagcatcgtggtccggggagccgacgacgcaaatgcggtgtgtgtccaggcgctagtggcggtgtgctga

SEQ ID NO: 138726 - protein, 527 aa, Mycobacterium bovis
MAGPAWRDAADVVVIGTGVAGLAAALAADRAGRSVVVLSKAAQTHVTATHYAQGGIAVVLPDNDDSVDAHVADTLAAGAGLCDPDAVYSIVADGYRAVTDLVGAGARLDESVPGRWALTREGGHSRRRIVHAGGDATGAEVQRALQDAAGMLDIRTGHVALRVLHDGTAVTGLLVVRPDGCGIISAPSVILATGGLGHLYSATTNPAGSTGDGIALGLWAGVAVSDLEFIQFHPTMLFAGRAGGRRPLITEAIRGEGAILVDRQGNSITAGVHPMGDLAPRDVVAAAIDARLKATGDPCVYLDARGIEGFASRFPTVTASCRAAGIDPVRQPIPVVPGAHYSCGGIVTDVYGQTELLGLYAAGEVARTGLHGANRLASNSLLEGLVVGGRAGKAAAAHAAAAGRSRATSSATWPEPISYTALDRGDLQRAMSRDASMYRAAAGLHRLCDSLSGAQVRDVACRRDFEDVALTLVAQSVTAAALARTESRGCHHRAEYPCTVPEQARSIVVRGADDANAVCVQALVAVC

SEQ ID NO: 138727 - DNA, 1584 bp, Mycobacterium leprae; identical to SEQ ID NO: 33107
  CDS (4)..(1584): transl_table=11

SEQ ID NO: 138728 - protein, 526 aa, Mycobacterium leprae; identical to SEQ ID NO: 33422

SEQ ID NO: 138729 - DNA, 1509 bp, Neisseria meningitidis serogroup A
  CDS (1)..(1509): transl_table=11
atgcaaaccgattgcgacgtattgattgccggaaacgggctggcggcactgacgctcgccctgtcgctgcctgaatcgttccgcatcgtcattttgtgcaaaaaccggctggacgacaccgccagccgtcatgcgcaaggcgggattgcggcggcgtggtcgggagaggacgacatcgaaaaacacgttgccgatactttggaagcgggcgcaggtttgtgcaacgaagccgccgtccgcaccatcctgtcgcagggcaaaccggcaatcgaatggctgctggcgcagggcgtggcgttcgaccggagtcatgacggcctgcacctgacgcgcgaaggcgggcacacctgccgccgaatcgcccacgtcgccgactacacgggcgaagccgtcatgcagagcctgattgtccaaatacgccgtcgcccgaacatccgcgtttacgagcggcagatggcgttggacatccaaaccgaatcaggtgcggcgtgcggactgaccgtcctcgaccgccgaacgcaagaaacctacaacatccgtgccagccataccgtactcgcaggcggtggcctcgggcagatttacgccgccaccaccacgccgcccgaatgcacgggcgacgccatcgccatggcgatacgtgcaggctgcgcagtcgaaaacctcgaatttatccaattccaccccacaggcttggcaaggtcgtctgaaaacggccgcaccttcctgatttccgaagccgtgcgcggcgaaggcggcatcctgaccaaccaagcgggcgaacgatttatgccgcattacgaccgccgcgccgaactcgcaccgcgcgacatcgttgcccgcgccatcgcagccgaaatcgccaaacaaacgcaagacttcgtctcgctcgacatcagccatcaacccgcagcgttcgtccgccggcatttcccatccatccatcgacactgtttatcccaatgcggcctagacatcacgcgccaagccatccccgtccgccccgtgcaacactacacctgcggcggcatccaaaccgacccctgcggcagaacctccctgccgcagctctacgccttgggcgaaaccgcctgcactgggctgcacggagccaaccgccttgccagcaactccctgctcgaatgcgtcgtgaccgcaaggctctgcgcccaagccatcgcagacggacaagcattccaagccgaaccattccaaaggccgtctgaaagcctctccgccgaagcaggcatcttttcagacgaccttcaaaacacattcagccgccccgtcctgcaaacgttcaaccaacgccatctaggcatcctacgcaacgataccggcctgcgccgcgccatcgcccaactgcagctttggaagcaaaaccaagccgaaccgcacaccgcgtccgaatacgaaaaccgcaacctgctcgaatgcagcctcgccgtcgcccaagccgcatacaggcggagacagaacatcggcgcgcattttaatagtgattgttaa

SEQ ID NO: 138730 - protein, 502 aa, Neisseria meningitidis serogroup A
MQTDCDVLIAGNGLAALTLALSLPESFRIVILCKNRLDDTASRHAQGGIAAAWSGEDDIEKHVADTLEAGAGLCNEAAVRTILSQGKPAIEWLLAQGVAFDRSHDGLHLTREGGHTCRRIAHVADYTGEAVMQSLIVQIRRRPNIRVYERQMALDIQTESGAACGLTVLDRRTQETYNIRASHTVLAGGGLGQIYAATTTPPECTGDAIAMAIRAGCAVENLEFIQFHPTGLARSSENGRTFLISEAVRGEGGILTNQAGERFMPHYDRRAELAPRDIVARAIAAEIAKQTQDFVSLDISHQPAAFVRRHFPSIHRHCLSQCGLDITRQAIPVRPVQHYTCGGIQTDPCGRTSLPQLYALGETACTGLHGANRLASNSLLECVVTARLCAQAIADGQAFQAEPFQRPSESLSAEAGIFSDDLQNTFSRPVLQTFNQRHLGILRNDTGLRRAIAQLQLWKQNQAEPHTASEYENRNLLECSLAVAQAAYRRRQNIGAHFNSDC

SEQ ID NO: 138731 - DNA, 1509 bp, Neisseria meningitidis serogroup B
  CDS (1)..(1509): transl_table=11
atgcaaaccgattgcgacgtattgattgccggaaacgggctggcggcactgacgctcgccctgtcgctgcctgaatcgttccgcatcgttattttgtgcaaaaaccggctggacgacaccgccagccgtcatgcgcaaggcgggattgcggcggcgtggtcgggagaggacgacatcgaaaaacacgttgccgatactttggaagcgggcgcgggtttgtgtgatgaagccgccgtccgcgccatcctgtcgcagggcaaaccggcaatcgaatggctgctggcgcagggcgtggcgttcgaccggaatcataacggcctgcacctgacgcgtgaaggcgggcatacctgccgacgaatcgcccacgtcgccgactacacgggcgaagccgtcatgcagagcctgattgcccaaatacgccgccgcccgaacatccgcgtttgcgagcggcagatggcgttggacattcaaaccgaatcaggcgcggcgtgcggactgaccgtcctcgactgccgaacacaagaaacctaccgcatccgcgcccgccataccgtactcgcaggcggcggcttgggacagatttacgccgccaccaccacgccgcccgaatgcacgggcgacgccatcgccatggcgatacgcgcaggctgcgcagttggaaacctcgaatttatccaattccaccccacaggcttggcaagaccgtctgaaaacggacgcaccttcctcatttccgaagccgtgcgcggcgaaggcggcatcctgaccaaccaagcgggcgaacgatttatgccgcattacgaccgccgcgccgaactcgcaccgcgcgacatcgttgcccgcgccatcgcagccgaaatcgccaaacaaacgcaagacttcgtctcgctcgacatcagccatcaacccgcagcgttcgtccgccggcatttcccatccatccatcgacactgtttatcccaatgcggcctagacatcacgcgccaagccatccccgtccgccccgtgcaacactacacctgcggcggcatccaaaccgacccctgcggcagaacctccctgccgcagctctacgccttgggcgaaaccgcctgcactgggctgcacggagccaaccgccttgccagcaactccctgctcgaatgcgtcgtgaccgcaaggctctgcgcccaagccatcgcagacggacaagcattccaagccgaaccattccaaaggccgtctgaaagcctctccgccgaagcaggcatcttttcagacgaccttcaaaacacattcagccgccccgtcctgcaaacgttcaaccaacgccatctaggcatcctacgcaacgataccggcctgcgccgcgccatcgcccaactgcagctttggaagcaaaaccaagccgaaccgcacaccgcgtccgaatacgaaaaccgcaacctgctcgaatgcagcctcgccgtcgcccaagccgcatacaggcggagacagaacatcggcgcgcattttaatagtgattgttaa

SEQ ID NO: 138732 - protein, 502 aa, Neisseria meningitidis serogroup B
MQTDCDVLIAGNGLAALTLALSLPESFRIVILCKNRLDDTASRHAQGGIAAAWSGEDDIEKHVADTLEAGAGLCDEAAVRAILSQGKPAIEWLLAQGVAFDRNHNGLHLTREGGHTCRRIAHVADYTGEAVMQSLIAQIRRRPNIRVCERQMALDIQTESGAACGLTVLDCRTQETYRIRARHTVLAGGGLGQIYAATTTPPECTGDAIAMAIRAGCAVGNLEFIQFHPTGLARPSENGRTFLISEAVRGEGGILTNQAGERFMPHYDRRAELAPRDIVARAIAAEIAKQTQDFVSLDISHQPAAFVRRHFPSIHRHCLSQCGLDITRQAIPVRPVQHYTCGGIQTDPCGRTSLPQLYALGETACTGLHGANRLASNSLLECVVTARLCAQAIADGQAFQAEPFQRPSESLSAEAGIFSDDLQNTFSRPVLQTFNQRHLGILRNDTGLRRAIAQLQLWKQNQAEPHTASEYENRNLLECSLAVAQAAYRRRQNIGAHFNSDC

SEQ ID NO: 138733 - DNA, 1617 bp, Pseudomonas aeruginosa; identical to SEQ ID NO: 33423
  CDS (1)..(1617): transl_table=11

SEQ ID NO: 138734 - protein, 538 aa, Pseudomonas aeruginosa; identical to SEQ ID NO: 33424

SEQ ID NO: 138735 - DNA, 1599 bp, Rhizobium meliloti; identical to SEQ ID NO: 33427
  CDS (1)..(1599): transl_table=11

SEQ ID NO: 138736 - protein, 532 aa, Rhizobium meliloti; identical to SEQ ID NO: 33428

SEQ ID NO: 138737 - DNA, 1623 bp, Salmonella typhimurium; identical to SEQ ID NO: 33431
  CDS (1)..(1623): transl_table=11

SEQ ID NO: 138738 - protein, 540 aa, Salmonella typhimurium; identical to SEQ ID NO: 33432

SEQ ID NO: 138739 - DNA, 1743 bp, Streptomyces coelicolor; identical to SEQ ID NO: 33433
  CDS (1)..(1743): transl_table=11

SEQ ID NO: 138740 - protein, 580 aa, Streptomyces coelicolor; identical to SEQ ID NO: 33434

SEQ ID NO: 138741 - DNA, 1419 bp, Sulfolobus tokodaii
  CDS (1)..(1419): transl_table=11
atgatctatataattggttcaggtattgctggtttatctgctggtgttgcgttaagaagggctggaaagaaagttactttaataagtaaaagaattgatggtggttctactcccatagctaagggtggtgttgcagcttctgttggaagcgatgatagtccagagctacatgctcaagacactattagggttggtgatggattgtgcgatgtaaagactgttaattatgttacatctgaggctaagaatgttatagagacttttgagagttggggttttgagtttgaggaggatttaaggttagaaggaggtcatacaaagaggagagttttgcataggactgatgagacgggaagagagatattcaactttttattaaagcttgctagggaggaaggaattcccataattgaggatagacttgttgagataagggttaaagacgggaaggttactggttttgttacggaaaagaggggtttggttgaagatgttgataaacttgttttagctactggtggttattcttatctttatgaatactcttctactcaatctactaatattggggatggtatggctattgcttttaaggctgggactatacttgctgatatggagtttgtacaatttcatcctactgttacaagtttagacggagaagttttcttactaacagaaactttaaggggtgagggagcacaaatcattaatgagaatggagaaaggtttttatttaattatgataagagaggagaattagcacctagggatattctttctagggctatttatattgaaatgttaaagggacataaggtttttattgatttgagtaaaattgaggattttgaaagaaagttccctgttgttgctaagtatttagctaggcatggtcataattacaaagttaagattcctatatttcctgcagctcattttgttgatggaggtattagggttaatattagaggggaaagtaatattgtaaatctttatgctattggcgaggttagtgattctggtttacatggtgctaataggttagctagtaattctcttttagaaggtttggtttttggcattaatttgccaagatatgttgatagtagttgggagggaatatctactgatgacggtattgttcattctgttaggatatctggtaataagactctgtctcttaaagagataaggaggatcaattgggaaaatgttggtataataaggaatgaggagaaattggttaaggctataaatacttattctagttctacgcaaaatgaggctattatatcttatttgaccgcattagctgctgaaataagaaaggagagtaggggtaatcattttagggaggattatccttataaggatcctaattgggaaaaaaggatttattttaagttagttgtttag

SEQ ID NO: 138742 - protein, 472 aa, Sulfolobus tokodaii
MIYIIGSGIAGLSAGVALRRAGKKVTLISKRIDGGSTPIAKGGVAASVGSDDSPELHAQDTIRVGDGLCDVKTVNYVTSEAKNVIETFESWGFEFEEDLRLEGGHTKRRVLHRTDETGREIFNFLLKLAREEGIPIIEDRLVEIRVKDGKVTGFVTEKRGLVEDVDKLVLATGGYSYLYEYSSTQSTNIGDGMAIAFKAGTILADMEFVQFHPTVTSLDGEVFLLTETLRGEGAQIINENGERFLFNYDKRGELAPRDILSRAIYIEMLKGHKVFIDLSKIEDFERKFPVVAKYLARHGHNYKVKIPIFPAAHFVDGGIRVNIRGESNIVNLYAIGEVSDSGLHGANRLASNSLLEGLVFGINLPRYVDSSWEGISTDDGIVHSVRISGNKTLSLKEIRRINWENVGIIRNEEKLVKAINTYSSSTQNEAIISYLTALAAEIRKESRGNHFREDYPYKDPNWEKRIYFKLVV

SEQ ID NO: 138743 - DNA, 1662 bp, Synechocystis sp
  CDS (1)..(1662): transl_table=11
atgggggcaaatcagttcgatgtggtggtggtgggctccggagcggcaggcctttatgcctgtctttgtttgcctggtcattaccgtgtggctctggttaccaaggcggaactgaaaacgggggccagtgattgggcccagggagggattgcggccgctattgccccgacggattctccccaatctcactacgaagataccttagctgctggagcgggtttatgtgatggggaagcggtggatttcctagtgaatcatgccccccaggcgatcgccgagttggtgcagttcggtgttagttttgatcgccatgggcagcatctggctttaacgttggaggcggcccattcccaaccgagggtactccatgcggcggacactacggggcgggccattgtttcgacgttgatgggacaggtgcaagctcggcccaatgtggaaattttttcccaggcgatcgccctgtctttaaatattgagccaacaacgggccattgtcggggcattcaggtttttgtcaatcaaaccattgaaactttccactcccgagcggtgttattggccaccgggggcggcggtcaagtgtttgcccaaactaccaatcccaaagttagtactggtgacggcattgccctcgcttggcgatcgggggcccaggtgcgggatttagaattctttcaatttcatcccaccgctttaactaaaccgggtgtgccccattttttgatcagtgaagcagtgcggggggaaggggcccatctgctcgatcgccaggggaaaagatttgcttttgattaccatcccaggggagaactagctcccagggacgtggttagtcgggcaattttccaacatttagccaatacagaaaaagatcccacccaagccactgtttttttggatctgagtcccattgagccggagcgcatccaaaggcgttttcccaatattattcgccgttgtttgcactggggggtggacatttttcgtgaaccaattcccgttgccccagcggcccattattggatggggggcattaccacagatattaattgtcaaaccactattccaggcttgtatgcgttgggggaaaccgccagcactggggtccatggagccaatcgcctggccagtaattctctgctggaatgcattgtttttgctagtcaattaagaaatttgagcttaccgccccttgcctccagtgactccaacgttaatcaatcgataaaggaaattcgactagacaccaccaatgacctagccctcctaaaccattggcgcagtgaattacctcgcttgatgtggcaaaccgccggcatttgtcgccaagctgaaactctccaaatggcgatcgccaaattggaacaatggcaagaacaatggcagcagctcagcagcagtaagcttttagctcacctaccagaggatcaaaaaattagcctaagtggcccagggctgaatgaatttatgcagttgtgggccgaaacccataatctgctggatatagcacaattaattttgactagtgccctctttcgggaggaaagccgggggggacattatcggttagattgtcctgataccaaaagagaatggcaaagccacactgtcattgaaggaacgagggtttttctccaacccagccagagtcaagactaa

SEQ ID NO: 138744 - protein, 553 aa, Synechocystis sp
MGANQFDVVVVGSGAAGLYACLCLPGHYRVALVTKAELKTGASDWAQGGIAAAIAPTDSPQSHYEDTLAAGAGLCDGEAVDFLVNHAPQAIAELVQFGVSFDRHGQHLALTLEAAHSQPRVLHAADTTGRAIVSTLMGQVQARPNVEIFSQAIALSLNIEPTTGHCRGIQVFVNQTIETFHSRAVLLATGGGGQVFAQTTNPKVSTGDGIALAWRSGAQVRDLEFFQFHPTALTKPGVPHFLISEAVRGEGAHLLDRQGKRFAFDYHPRGELAPRDVVSRAIFQHLANTEKDPTQATVFLDLSPIEPERIQRRFPNIIRRCLHWGVDIFREPIPVAPAAHYWMGGITTDINCQTTIPGLYALGETASTGVHGANRLASNSLLECIVFASQLRNLSLPPLASSDSNVNQSIKEIRLDTTNDLALLNHWRSELPRLMWQTAGICRQAETLQMAIAKLEQWQEQWQQLSSSKLLAHLPEDQKISLSGPGLNEFMQLWAETHNLLDIAQLILTSALFREESRGGHYRLDCPDTKREWQSHTVIEGTRVFLQPSQSQD

SEQ ID NO: 138745 - DNA, 1608 bp, Vibrio cholerae
  CDS (1)..(1608): transl_table=11
atgaatgcagaccgagagcatcaatgtgatgtattagtcataggaagtggcgcagcaggcttatcgcttgctttacaggtcgctcaatacggaaaagtgattgtattaagcaaagggccgcgcagtgaaggcgcgactttttatgcacaaggcggtattgcagcagtctttgatgaatcggacagtattgaatcgcatgtgcaagacaccttaattgcaggtgctgggatttgtgatgaacaaaccgtgcgctttattgccgagcatgccaaagagtgcgtgcagtggctgattgatggcggtgtaccttttgacaaagaagaggacagcgataacgaccacccacgctaccacttgacccgcgaaggcggtcacagccatcgccgtattttgcatgctgctgatgccacagggatggcgatgcagacgtccttgcaagataacgcccacaaccatcccaacattacggtacttgaaagacacaatgcgctggatttgatcactgaagataaaatcggcggtgatgccaacaaagtcgttggcgcctatgtatggaatcgtaatgcggaacacgtagaaacgattcgcgccaaatttgtggtgttggcgactggcggggcatctaaggtgtatcagtacacctctaaccctgatgtttcttctggtgatggcattgccatggcctggcgtgcgggctgccgtgtggccaacctagagttcaaccagttccacccaacctgtttataccatccagaagcacgtaacttcctacttaccgaagcgctgcgtggtgaaggcgcttatttgcgccgcccagatggcagccgctttatgccggatttcgatgagcgagctgaactggctccgcgtgatatcgtggcacgtgcgatcgactttgaaatgaagcgtttaggtgcggactgtatgtatctcgacatcagccataagcctgctgactttatcgaaaaacacttccccaccatttattcacgcttgatggatttgggcattgatatgaccaaagaaccgatccccatcgttcctgcggcgcactatacgtgtggtggcgtgatggtgaatccgcaaggtcaaacggatcttaagcagttgtatgcgattggcgaagtgagctacaccggcttacacggcgcaaaccgtatggcctcaaactctcttctagaatgcgtggtatacgcatggtcagcgtcacaagacatcattgctcagttgcccaacgcaagcatgccagagtcactcccagcttgggatgaaagccaagtcacctgttctgatgaggaagtggttttgcagcataactggcacgaactgcgcctctttatgtgggactacatgggaatcgtgcgcaccaacaagcgtttggaacgagcaatgcgccgcatccagctactgcaacaggaaacccacgagtattacagcaacttccgtgtgtcaaacaacctccttgagatgcgtaacttactgcaagtggctgaattgatggtacgttgcgcgatgcaacgcaaagaaagtcgcggcttacactacacgttggactacccagatcaactggcagagagtggcccgacaatccttgtgccggaaaaataa

SEQ ID NO: 138746 - protein, 535 aa, Vibrio cholerae
MNADREHQCDVLVIGSGAAGLSLALQVAQYGKVIVLSKGPRSEGATFYAQGGIAAVFDESDSIESHVQDTLIAGAGICDEQTVRFIAEHAKECVQWLIDGGVPFDKEEDSDNDHPRYHLTREGGHSHRRILHAADATGMAMQTSLQDNAHNHPNITVLERHNALDLITEDKIGGDANKVVGAYVWNRNAEHVETIRAKFVVLATGGASKVYQYTSNPDVSSGDGIAMAWRAGCRVANLEFNQFHPTCLYHPEARNFLLTEALRGEGAYLRRPDGSRFMPDFDERAELAPRDIVARAIDFEMKRLGADCMYLDISHKPADFIEKHFPTIYSRLMDLGIDMTKEPIPIVPAAHYTCGGVMVNPQGQTDLKQLYAIGEVSYTGLHGANRMASNSLLECVVYAWSASQDIIAQLPNASMPESLPAWDESQVTCSDEEVVLQHNWHELRLFMWDYMGIVRTNKRLERAMRRIQLLQQETHEYYSNFRVSNNLLEMRNLLQVAELMVRCAMQRKESRGLHYTLDYPDQLAESGPTILVPEK

SEQ ID NO: 138747 - DNA, 1539 bp, Xylella fastidiosa
  CDS (1)..(1539): transl_table=11
atggctgagatagtggactgttttgcagaccgccccatcatcgttggtagcgggcttgctggtctgatcgcagcactgaccatgtctcctgaaccctcagtgcttgtcacgcgcagcgccttgggcgcagaaacatcaagcgcatgggctcagggaggaatgtcggtcagccttagccccgatgacaatcccagcctgcatcttgccgacaccttggcggctggcgatggtctgtgtgatgcagtcgctgcagagagcatcatcttggaagcgcttgacgcttttcatgtcctacaacactttggcatccacttcgaccaagatagcaacggccatctggcgcttggactggaagcagcccattcccgtcgccgtatcgtgcatgttggtggcgatagatcgggtacagcgattgtacaagcattgactgcctgtgttctcaacgatccctcaatcacggtgcttgagggcctcgaagcacgacacattctgatggcggataacgtggtctgtggcttgctgcttgccaacccgacatccgagattgtgttgccctcctcaagaattcttctggcaacaggcggcattggtgggctttatgacgcgaccaccaacccggtgagcaactttggtcaaggcatcgcgatggctgcacgtgctggggccgtactggctgatatggaattcgtacagttccatccgacggccctccattgccacaaccgcccgctggcgctcgtcagtgaagctgtccgtggtgaaggtgcagtcctcattaacgaacgtggcgaacgctttatggcggatattcctggtgccgaacttgcagctcgtaacatcgttgcacaggcaatcagcgccgaaataacccgcggcggccaagtatttctcgatgctaggcaagcattgggagcacgcttcagcacccgctttccaaccatcaccgcactctgccacaaagtaggtattgaccctgtacacatgccgattccagtctgtcccgctgctcattaccacatgggtggtatcgcaatcgatcaccaaggccgcagcagcattcctggcttatgggttgcgggtgaagcagcgtctacaggcttacatggagcaaatcggcttgcgagcaattcactgcttgaagccgtcgtcatggggacacgtgcagcccgagatatcacattccacaacacacctcaccctctcggaacaatccctatcacccctaaaaagcctgataccacactgatccgaccgattgtctctcagtgccttggcgtacttcgccatgccgcagatatgcatcgtgctattgctgccctcttgccttttgtggaaggcgaagaagagtcttccgatcctgccatcgttgcgttgctgatcgccatctttgcatatcttcgcaccgaatcacgcggtgcccatgcacgcaccgatttccctctcaaacatgacacaacacagcggcgccacatgacacttgaggatgttcttgaaatcgcccactcctgtgttgcacaacgcaaagaaaagatctcctga

SEQ ID NO: 138748 - protein, 512 aa, Xylella fastidiosa
MAEIVDCFADRPIIVGSGLAGLIAALTMSPEPSVLVTRSALGAETSSAWAQGGMSVSLSPDDNPSLHLADTLAAGDGLCDAVAAESIILEALDAFHVLQHFGIHFDQDSNGHLALGLEAAHSRRRIVHVGGDRSGTAIVQALTACVLNDPSITVLEGLEARHILMADNVVCGLLLANPTSEIVLPSSRILLATGGIGGLYDATTNPVSNFGQGIAMAARAGAVLADMEFVQFHPTALHCHNRPLALVSEAVRGEGAVLINERGERFMADIPGAELAARNIVAQAISAEITRGGQVFLDARQALGARFSTRFPTITALCHKVGIDPVHMPIPVCPAAHYHMGGIAIDHQGRSSIPGLWVAGEAASTGLHGANRLASNSLLEAVVMGTRAARDITFHNTPHPLGTIPITPKKPDTTLIRPIVSQCLGVLRHAADMHRAIAALLPFVEGEEESSDPAIVALLIAIFAYLRTESRGAHARTDFPLKHDTTQRRHMTLEDVLEIAHSCVAQRKEKIS

SEQ ID NO: 138749 - DNA, 1539 bp, Xylella fastidiosa
  CDS (1)..(1539): transl_table=11
atggctaagatagtggactgttttgcagaccgccccatcatcgttggtagcgggcttgctggtctgatcgcagcactgaccatttctcctgaaccctcagtgcttgtcacgcgcagcgccttgggcgcagaaacatcaagcgcatgggctcagggaggaatgtcggtcagccttagcccagatgacaaccccagcctgcatcttgccgacaccttggcggctggcgatggtctgtgtgatgcagtcgctgcagagagcatcatcttggaagcgcttgacgcttttcatgtcctacaacactttggcatccacttcgaccaagatagcaacggccatctggcgcttggactggaagcagcccattcccgtcgccgtatcgtgcatgttgggggcgatagatcgggtacagcgattgtccaagcattgactgcgtgtgttctcaacgatccctcaatcaccgtgcttgagggcctcgaagcacgacacattctgatggctgataacgtggtctgtggcttgctgcttgccaacccgacatccgagattgtgttgccttcgtcaagaattcttctagcaacaggcggcattggcgggctttatgatgcgactaccaacccagtgaacaactttggtcaaggtatcgcgatggctgcacgtgctggcgccgtgctggctgatatggaattcgtacagttccatccgacggccctccattgccacaaccgcccgctggcgctcgtcagtgaagctgtccgtggtgaaggtgcagtcctcattaacgaacgtggcgaacgctttatggcggatattcctggtgccgaacttgcagctcgtaacatcgttgcacaggcaatcagcgccgaaataacccgcggcggccaagtatttctcgatgccaggcaagcattgggagcacgcttcagcacccgctttccaaccatcaccgcactctgccacaaagtaggtattgaccctgtacacatgccgattccagtctgtcccgctgctcattaccacatgggcggtatcgcaaccgatcgccaaggccgcagcagcattcctggcttatgggttgcgggtgaagcagcgtctacaggcttacatggagcaaatcggcttgcgagcaattcactgcttgaggccgtcgtcatggggacacgtgcagcccgagatatcacatcccacaacacaccccaccccctcggaacaatccctatcacccctaaaaagcctgataccacactgatccggccgattgtctctcagtgccttggcgtacttcgccatgccgcggatatgcatcgtgctattgctgccctcttgccttttgtggaaggcgaagaagaatcttcagatcccgccatcgttgcattgctgatcgccatctttgcacatcttcgcaccgaatcacgcggtgcccatgcacgcaccgatttccctctcaaacatgacacaacacagcggcgcaacatgacacttgaggatgttcttgaaatcgcccactcccgtattgcacaacgcaaagaaaagatctcctga

SEQ ID NO: 138750 - protein, 512 aa, Xylella fastidiosa
MAKIVDCFADRPIIVGSGLAGLIAALTISPEPSVLVTRSALGAETSSAWAQGGMSVSLSPDDNPSLHLADTLAAGDGLCDAVAAESIILEALDAFHVLQHFGIHFDQDSNGHLALGLEAAHSRRRIVHVGGDRSGTAIVQALTACVLNDPSITVLEGLEARHILMADNVVCGLLLANPTSEIVLPSSRILLATGGIGGLYDATTNPVNNFGQGIAMAARAGAVLADMEFVQFHPTALHCHNRPLALVSEAVRGEGAVLINERGERFMADIPGAELAARNIVAQAISAEITRGGQVFLDARQALGARFSTRFPTITALCHKVGIDPVHMPIPVCPAAHYHMGGIATDRQGRSSIPGLWVAGEAASTGLHGANRLASNSLLEAVVMGTRAARDITSHNTPHPLGTIPITPKKPDTTLIRPIVSQCLGVLRHAADMHRAIAALLPFVEGEEESSDPAIVALLIAIFAHLRTESRGAHARTDFPLKHDTTQRRNMTLEDVLEIAHSRIAQRKEKIS

SEQ ID NO: 138751 - DNA, 1602 bp, Yersinia pestis
  CDS (1)..(1602): transl_table=11
atgcaatcatcatctgaacacattagcgatgtattgatcatcgggagtggcgctgctggcttgtctttagctctccgcctcgcgccacattgtaaagttaccgttctgagcaaagggcctcttaatgagggagccactttttatgctcagggaggtattgccgctgttttcgacgaaactgacagtatcagttcacatgtagatgacaccttaatcgccggtgccgggctttgtgacaaagaagccgttgaatttattgccagcaatgcccgctcttgtgtgcagtggctcattgatcaaggcgttctttttgatacagagaccagtgctaacggtgaagagcgctatcaccttacccgtgaaggtggtcatagccaccgccgtattctgcatacagcggatgctaccggtaaagaagtagaaactaccttagtgggtaaagcaagcaatcaccctaatatttcagtgaaagaacgctgcaatgctgtcgatcttatcacatcaaacaaaattggtttggcgggtaccaaacgcgtagtgggtgcttatgtctggaaccgtgagttagagaaagttgagactttccgcgccaaagccgtggttttggcgacaggcggcgcggctaaagtttatcaatacaccactaacccagatatttcgtctggtgatggtattgccatggcgtggcgtgccgggtgccgggtcgctaatttggaatttaaccaatttcatccaacctgtctcttccacccgcaagcacgtaattttttactgacagaagccttacgtggtgaaggtgcctaccttaaacgccctgatggcagccgtttcatgcttgattttgatccacgcggtgaacttgcgccacgtgatatcgttgcccgagccatcgaccatgaaatgaagcgcctcggtgctgattgcatgtatctggatatcagccataaacctactgatttcgtgatgcaacatttcccaatgatctatgaaaaactgctgtcattgggtatcgatctaactaaagaagctattccgattgtccccgcagctcattacacctgtggtggcgtaatggttgatcaacatgggcgtaccgatttagatgggttatatgcgattggtgaagtgagctacaccggcttacacggtgccaaccgcatggcctccaattccctgctcgaatgcctggtctatggctggtcagcagcagaagacattctgacacggctgccgacggccaaactggccaagcatctgccagattgggatgaaagccgcgttgataattctgacgaacgggttgtcattcagcataactggcatgagttgcgtttatttatgtgggattacgtcggcattgtccgtaccacaaaacgcttagagcgggctttacggcgcattaacacgttgcagcaagagattgatgaatattatgccaatttccgtatctccaataacctgctggagttacggaatctggtacaagtcgcggagttaatcgtgcgctgtgcgatggaacgtaaagagagccgtgggttgcactatacgcttgattaccctgatcaaatagaaaacccacagccaaccattctgcatccataa

SEQ ID NO: 138752 - protein, 533 aa, Yersinia pestis; identical to SEQ ID NO: 33436

SEQ ID NO: 138753 - DNA, 1905 bp, Glycine max; identical to SEQ ID NO: 33441
  CDS (1)..(1905)

SEQ ID NO: 138754 - protein, 634 aa, Glycine max; identical to SEQ ID NO: 33442

SEQ ID NO: 138755 - DNA, 1884 bp, Brassica napus; identical to SEQ ID NO: 33443
  CDS (1)..(1884)

SEQ ID NO: 138756 - protein, 627 aa, Brassica napus; identical to SEQ ID NO: 33444

SEQ ID NO: 138757 - DNA, 1881 bp, Brassica napus; identical to SEQ ID NO: 33445
  CDS (1)..(1881)

SEQ ID NO: 138758 - protein, 626 aa, Brassica napus; identical to SEQ ID NO: 33446

SEQ ID NO: 138759 - DNA, 1860 bp, Zea mays
  CDS (1)..(1860)
atgtggcgcagctgcgtctcgcgaggcctctccagggccaaggcctccgcctccaggctcctctccacggcgtcgtcgtcctacacggtggtcgaccacacctacgacgcggtggtggtgggggccggcggcgcggggctccgggcggcgatcggcctctccgagcacggcttcaacaccgcgtgcatcaccaagctcttccccacgcgctcgcacaccgtcgcggctcagggaggcataaatgctgcacttggaaacatgagtgaagatgactggaggtggcatatgtatgacactgttaagggaagcgattggctgggtgaccaggattctattcagtatatgtgcagagaggcaccaaaagctgttatagagcttgagaactatggactaccattttcaagaactgaagagggaaagatataccaacgtgcctttggagggcagagcttagattttggcaaaggtggacaagcctaccgttgtgcctgcgctgctgacagaacaggacatgctatgctgcacacactatatggtcaagcaatgaagcacaacactcaattttttgtggaatactttgctttggaccttctcatggacaatgaaggaaaatgtcagggaatcattgccttaaacatggaggatggaactcttcaccgtttccgtgcttctaatacaattctagccacaggaggttatggcagggcatatttctcagcaacctcagcacacacttgtactggagatggcaatgctatggttgcacgtgctggtttacctctccaggatcttgagtttgtacaattccatcctacaggcatttatggtgctggatgcctgattactgaaggttcccgtggtgaaggtggtatccttagaaatagtgaaggtgaacggttcatggaacgatatgctcctactgcaaaagatcttgcttctcgtgatgttgtttcaagatcaatgacaatggaaattagagaaggacgtggtgtagggccattgaaggatcacatttatttgcatctgaaccatctgccacctgaggttctcaaggaaaggcttcctggtatttctgaaactgctgctatttttgctggtgttgatgtcaccaaggagcccattccagttttgcctactgtgcactacaatatgggcggtattccaacaaactaccatggggaggtagtggatatcaagggtgataatccagatgctgttgttcctggtctaatggctgctggtgaagcagcctgtgcatctgttcatggtgcgaataggctaggcgcaaattcgcttcttgacatagttgtttttggcagagcttgtgcaaacagggtagcagatatttctaaaccaggtgagaagcagaaacctctggaaaaagatgctggagaaaagaccatagcctggttggacaagctgaggaatgcgaatgggtcattgccaacttccaagatccgtctcaacatgcagcgtgttatgcaaaataatgctgctgtattccgtacacaagaaacacttgaagaaggttgtgagctgattagcaaaacatgggaaagtttccatgatgtgaagctcagtgaccagagtctcatttggaactctgacctgatagagacccttgagctggaaaatcttttgataaatgcatgcataaccatgtattcggcagaggctcggaaggaaagcagaggagctcatgctcgtgaggatttcacgacaagagatgacgagaagtggatgaagcactcactggggtactgggaaaacgagaaggttcgattggcatacaggccagtgcacatgaacacattagacgatgaagtagagtccttcccgccgaaagcccgtgtctattga

SEQ ID NO: 138760 - protein, 619 aa, Zea mays; identical to SEQ ID NO: 33092

SEQ ID NO: 138761 - DNA, 25 bp, Artificial sequence
  primer
atgaatactctccctgaacattcat

SEQ ID NO: 138762 - DNA, 26 bp, Artificial sequence
  primer
ttatctgtttatgtaatgattgccgg

SEQ ID NO: 138763 - protein, 685 aa, Artificial sequence
  consensus sequence
  Variant (2)..(5): Xaa in position 2 to 5 is any amino acid
  Variant (7)..(7): Xaa in position 7 is any amino acid
  Variant (9)..(9): Xaa in position 9 is any amino acid
  Variant (13)..(14): Xaa in position 13 to 14 is any amino acid
  Variant (16)..(37): Xaa in position 16 to 37 is any amino acid
  Variant (38)..(43): Xaa in position 38 to 43 is any or no amino acid
  Variant (48)..(52): Xaa in position 48 to 52 is any amino acid
  Variant (53)..(60): Xaa in position 53 to 60 is any or no amino acid
  Variant (62)..(64): Xaa in position 62 to 64 is any amino acid
  Variant (65)..(65): Xaa in position 65 is any or no amino acid
  Variant (67)..(68): Xaa in position 67 to 68 is any amino acid
  Variant (71)..(73): Xaa in position 71 to 73 is any amino acid
  Variant (75)..(76): Xaa in position 75 to 76 is any amino acid
  Variant (78)..(95): Xaa in position 78 to 95 is any amino acid
  Variant (96)..(96): Xaa in position 96 is any or no amino acid
  Variant (98)..(100): Xaa in position 98 to 100 is any amino acid
  Variant (101)..(102): Xaa in position 101 to 102 is any or no amino acid
  Variant (104)..(105): Xaa in position 104 to 105 is any amino acid
  Variant (107)..(125): Xaa in position 107 to 125 is any amino acid
  Variant (126)..(152): Xaa in position 126 to 152 is any or no amino acid
  Variant (154)..(154): Xaa in position 154 is any amino acid
  Variant (157)..(161): Xaa in position 157 to 161 is any amino acid
  Variant (162)..(162): Xaa in position 162 is any or no amino acid
  Variant (164)..(188): Xaa in position 164 to 188 is any amino acid
  Variant (189)..(205): Xaa in position 189 to 205 is any or no amino acid
  Variant (207)..(218): Xaa in position 207 to 218 is any amino acid
  Variant (219)..(230): Xaa in position 219 to 230 is any or no amino acid
  Variant (233)..(233): Xaa in position 233 is any amino acid
  Variant (236)..(239): Xaa in position 236 to 239 is any amino acid
  Variant (241)..(244): Xaa in position 241 to 244 is any amino acid
  Variant (246)..(250): Xaa in position 246 to 250 is any amino acid
  Variant (251)..(251): Xaa in position 251 is any or no amino acid
  Variant (255)..(255): Xaa in position 255 is any amino acid
  Variant (257)..(257): Xaa in position 257 is any amino acid
  Variant (259)..(259): Xaa in position 259 is any amino acid
  Variant (263)..(268): Xaa in position 263 to 268 is any amino acid
  Variant (269)..(269): Xaa in position 269 is any or no amino acid
  Variant (272)..(272): Xaa in position 272 is any amino acid
  Variant (278)..(283): Xaa in position 278 to 283 is any amino acid
  Variant (284)..(296): Xaa in position 284 to 296 is any or no amino acid
  Variant (298)..(299): Xaa in position 298 to 299 is any amino acid
  Variant (301)..(302): Xaa in position 301 to 302 is any amino acid
  Variant (306)..(306): Xaa in position 306 is any amino acid
  Variant (307)..(307): Xaa in position 307 is any or no amino acid
  Variant (309)..(309): Xaa in position 309 is any amino acid
  Variant (310)..(310): Xaa in position 310 is any or no amino acid
  Variant (312)..(315): Xaa in position 312 to 315 is any amino acid
  Variant (316)..(328): Xaa in position 316 to 328 is any or no amino acid
  Variant (330)..(330): Xaa in position 330 is any amino acid
  Variant (331)..(331): Xaa in position 331 is any or no amino acid
  Variant (334)..(335): Xaa in position 334 to 335 is any amino acid
  Variant (336)..(367): Xaa in position 336 to 367 is any or no amino acid
  Variant (370)..(370): Xaa in position 370 is any amino acid
  Variant (373)..(373): Xaa in position 373 is any amino acid
  Variant (375)..(375): Xaa in position 375 is any amino acid
  Variant (377)..(388): Xaa in position 377 to 388 is any amino acid
  Variant (389)..(399): Xaa in position 389 to 399 is any or no amino acid
  Variant (402)..(411): Xaa in position 402 to 411 is any amino acid
  Variant (412)..(420): Xaa in position 412 to 420 is any or no amino acid
  Variant (422)..(430): Xaa in position 422 to 430 is any amino acid
  Variant (431)..(431): Xaa in position 431 is any or no amino acid
  Variant (433)..(433): Xaa in position 433 is any amino acid
  Variant (435)..(438): Xaa in position 435 to 438 is any amino acid
  Variant (439)..(439): Xaa in position 439 is any or no amino acid
  Variant (443)..(443): Xaa in position 443 is any amino acid
  Variant (445)..(446): Xaa in position 445 to 446 is any amino acid
  Variant (449)..(450): Xaa in position 449 to 450 is any amino acid
  Variant (453)..(458): Xaa in position 453 to 458 is any amino acid
  Variant (460)..(465): Xaa in position 460 to 465 is any amino acid
  Variant (466)..(476): Xaa in position 466 to 476 is any or no amino acid
  Variant (478)..(478): Xaa in position 478 is any amino acid
  Variant (480)..(480): Xaa in position 480 is any amino acid
  Variant (483)..(487): Xaa in position 483 to 487 is any amino acid
  Variant (488)..(488): Xaa in position 488 is any or no amino acid
  Variant (495)..(495): Xaa in position 495 is any amino acid
  Variant (502)..(503): Xaa in position 502 to 503 is any amino acid
  Variant (505)..(540): Xaa in position 505 to 540 is any amino acid
  Variant (541)..(594): Xaa in position 541 to 594 is any or no amino acid
  Variant (596)..(599): Xaa in position 596 to 599 is any amino acid
  Variant (601)..(602): Xaa in position 601 to 602 is any amino acid
  Variant (604)..(606): Xaa in position 604 to 606 is any amino acid
  Variant (607)..(607): Xaa in position 607 is any or no amino acid
  Variant (609)..(621): Xaa in position 609 to 621 is any amino acid
  Variant (622)..(655): Xaa in position 622 to 655 is any or no amino acid
  Variant (657)..(657): Xaa in position 657 is any amino acid
  Variant (658)..(658): Xaa in position 658 is any or no amino acid
  Variant (660)..(662): Xaa in position 660 to 662 is any amino acid
  Variant (663)..(663): Xaa in position 663 is any or no amino acid
  Variant (665)..(670): Xaa in position 665 to 670 is any amino acid
  Variant (672)..(673): Xaa in position 672 to 673 is any amino acid
  Variant (675)..(675): Xaa in position 675 is any amino acid
  Variant (680)..(680): Xaa in position 680 is any amino acid
  Variant (682)..(684): Xaa in position 682 to 684 is any amino acid
DXXXXGXGXAGLXXAXXXXXXXXXXXXXXXXXXXXXXXXXXXXAQGGXXXXXXXXXXXXXDXXXXHXXDTXXXGXXLXXXXXXXXXXXXXXXXXXXLXXXXXGXXFXXXXXXXXXXXXXXXXXXXXXXXXXXXXXXXXXXXXXXXXXXXXXXDXTGXXXXXXLXXXXXXXXXXXXXXXXXXXXXXXXXXXXXXXXXXXXXXXXXXGXXXXXXXXXXXXXXXXXXXXXXXXLAXGGXXXXYXXXXNXXXXXXGDGXAXAXRAGXXXXXXXEFXQFHPTXXXXXXXXXXXXXXXXXXXLXXEXXRGEXXGXXLXXXXXXXXXXXXXXXXXGXXFMXXXXXXXXXXXXXXXXXXXXXXXXXXXXXXXXXXLAXRDXVXRXXXXXXXXXXXXXXXXXXXXXXXLDXXXXXXXXXXXXXXXXXXXPXXXXXXXXXXGXDXXXXXIPVXPXXHYXXGGXXXXXXGXXXXXXXXXXXXXXXXXLXAXGEXXXXXXHGANRLXSNSLLEXXVXXXXXXXXXXXXXXXXXXXXXXXXXXXXXXXXXXXXXXXXXXXXXXXXXXXXXXXXXXXXXXXXXXXXXXXXXXXXXXXXXXXXXXXXXXMXXXXGXXRXXXXLXXXXXXXXXXXXXXXXXXXXXXXXXXXXXXXXXXXXXXXXXXXXXXXEXXNXXXXAXXXXXXAXXRXESRGXHXXXD

SEQ ID NO: 138764 - protein, 16 aa, Artificial sequence
  protein pattern
  Variant (3)..(3): Xaa in position 3 is Ala or Gly
  Variant (6)..(6): Xaa in position 6 is Leu or Met
  Variant (7)..(7): Xaa in position 7 is Ala or Gly
  Variant (8)..(8): Xaa in position 8 is Ala, Gly or Ser
  Variant (13)..(13): Xaa in position 13 is Asp, Glu or Ser
  Variant (14)..(15): Xaa in position 14 to 15 is any amino acid
HGXNRXXXNSLLXXXV

SEQ ID NO: 138765 - protein, 22 aa, Artificial sequence
  protein pattern
  Variant (2)..(2): Xaa in position 2 is any amino acid
  Variant (3)..(3): Xaa in position 3 is any or no amino acid
  Variant (5)..(7): Xaa in position 5 to 7 is any or no amino acid
  Variant (9)..(12): Xaa in position 9 to 12 is any amino acid
  Variant (13)..(13): Xaa in position 13 is Asp or Asn
  Variant (14)..(14): Xaa in position 14 is any amino acid
  Variant (16)..(16): Xaa in position 16 is Phe or Met
  Variant (17)..(17): Xaa in position 17 is any amino acid
AXXAXXXGXXXXXXEXXQFHPT

SEQ ID NO: 138766 - protein, 19 aa, Artificial sequence
  protein pattern
  Variant (2)..(3): Xaa in position 2 to 3 is any amino acid
  Variant (4)..(6): Xaa in position 4 to 6 is any or no amino acid
  Variant (8)..(8): Xaa in position 8 is Gly, Ser or Thr
  Variant (11)..(11): Xaa in position 11 is any amino acid
  Variant (12)..(12): Xaa in position 12 is Ala, Gly or Ser
  Variant (13)..(14): Xaa in position 13 to 14 is any amino acid
  Variant (15)..(15): Xaa in position 15 is Phe or Tyr
  Variant (16)..(18): Xaa in position 16 to 18 is any amino acid
  Variant (19)..(19): Xaa in position 19 is Cys, Ser or Thr
AXXXXXAXGGXXXXXXXXX

SEQ ID NO: 138767 - protein, 9 aa, Artificial sequence
  protein pattern
  Variant (3)..(3): Xaa in position 3 is Pro, Ser or Thr
  Variant (6)..(6): Xaa in position 6 is any amino acid
  Variant (8)..(8): Xaa in position 8 is Ala, Ser or Thr
LAXRDXVXR

SEQ ID NO: 138768 - protein, 13 aa, Artificial sequence
  protein pattern
  Variant (2)..(2): Xaa in position 2 is Ile, Leu or Val
  Variant (3)..(3): Xaa in position 3 is Ser or Thr
  Variant (5)..(5): Xaa in position 5 is Ala or Gly
  Variant (6)..(6): Xaa in position 6 is any amino acid
  Variant (11)..(11): Xaa in position 11 is Ala or Gly
  Variant (12)..(12): Xaa in position 12 is any amino acid
LXXEXXRGEGXXL

SEQ ID NO: 138769 - protein, 15 aa, Artificial sequence
  protein pattern
  Variant (2)..(3): Xaa in position 2 to 3 is any amino acid
  Variant (4)..(4): Xaa in position 4 is Ile or Val
  Variant (5)..(5): Xaa in position 5 is Ile, Leu, Met or Val
  Variant (7)..(7): Xaa in position 7 is Ala, Gly, Ser or Thr
  Variant (9)..(9): Xaa in position 9 is any amino acid
  Variant (12)..(14): Xaa in position 12 to 14 is any amino acid
  Variant (15)..(15): Xaa in position 15 is Ala, Cys, Gly, Ser or Thr
DXXXXGXGXAGXXXX

SEQ ID NO: 138770 - DNA, 1506 bp, Escherichia coli
  CDS (1)..(1506): transl_table=11
atggaagcattacttcagcttaaaggcatcgataaagccttcccgggcgtaaaagccctctcgggcgcagcgttaaatgtctatccgggccgcgtgatggcgctggtgggcgaaaacggcgcgggtaaatccaccatgatgaaagtgcttactggcatctatactcgcgatgccggtacgcttttatggctggggaaagaaacgacatttaccgggccaaaatcttcccaggaagccgggattgggattatccatcaggaactgaacctgatcccgcagttgaccattgccgaaaacattttcctcggtcgtgagtttgttaatcgctttggcaaaattgactggaaaaccatgtatgccgaagcggataaattgctggctaaacttaacctgcgctttaaaagcgacaagctggtgggcgatctttccatcggtgaccagcaaatggttgaaatcgccaaagtgctgagctttgagtcgaaagtcatcattatggatgaaccgaccgatgcgctgaccgataccgaaaccgaatccctgttccgcgtcatccgcgagctgaaatcgcaaggccgcggtattgtctatatctcccaccgcatgaaagaaatcttcgagatttgcgatgacgttaccgtttttcgtgatgggcaatttattgctgagcgcgaagtggcatcactgaccgaagattcgctgattgagatgatggtgggtcgcaagctggaagatcaatatccgcacctggacaaagcgccgggagatatccgcctgaaagtcgataatctctgcggacctggcgttaacgatgtctcttttactttacgcaaaggcgaaattcttggcgtctctggtttgatgggcgcaggtcgtaccgaactgatgaaagtgctctacggcgcactaccgcgcaccagcggttacgtcaccctggatgggcatgaagtcgttacccgttcaccgcaggatggcctggcaaacggcattgtgtatatctccgaagaccgtaaacgtgacggtttagtgttgggcatgtcagtaaaagagaacatgtcgctgacagcgctgcgctacttcagccgcgctggcggcagtttgaagcatgccgatgaacagcaggctgtgagtgatttcattcgtctgtttaatgtgaaaactccgtcgatggaacaggcaattggtctgctttccggtggcaatcagcaaaaagtggcgattgcccgcggtctgatgacacgccccaaagtgttgatccttgatgaacctacccgtggcgtagatgtcggcgcgaaaaaagagatctatcaactgattaaccagttcaaagccgatggcttgagcatcattctggtgtcatcggagatgccagaagtattaggcatgagcgatcgcatcatcgtcatgcatgaagggcatctcagcggggaatttactcgtgagcaggccacccaggaagtgttaatggctgccgctgtgggcaagcttaatcgcgtgaatcaggagtaa

SEQ ID NO: 138771 - protein, 501 aa, Escherichia coli
MEALLQLKGIDKAFPGVKALSGAALNVYPGRVMALVGENGAGKSTMMKVLTGIYTRDAGTLLWLGKETTFTGPKSSQEAGIGIIHQELNLIPQLTIAENIFLGREFVNRFGKIDWKTMYAEADKLLAKLNLRFKSDKLVGDLSIGDQQMVEIAKVLSFESKVIIMDEPTDALTDTETESLFRVIRELKSQGRGIVYISHRMKEIFEICDDVTVFRDGQFIAEREVASLTEDSLIEMMVGRKLEDQYPHLDKAPGDIRLKVDNLCGPGVNDVSFTLRKGEILGVSGLMGAGRTELMKVLYGALPRTSGYVTLDGHEVVTRSPQDGLANGIVYISEDRKRDGLVLGMSVKENMSLTALRYFSRAGGSLKHADEQQAVSDFIRLFNVKTPSMEQAIGLLSGGNQQKVAIARGLMTRPKVLILDEPTRGVDVGAKKEIYQLINQFKADGLSIILVSSEMPEVLGMSDRIIVMHEGHLSGEFTREQATQEVLMAAAVGKLNRVNQE

SEQ ID NO: 138772 - DNA, 1566 bp, Agrobacterium tumefaciens str. C58
  CDS (1)..(1566): transl_table=11
atgtcgcagggcgcatcgacaattcggggcgatttttcgcctgaggagatggcgcgtgcggagcgttcggtccttctgcgtctcgagaacatcagcaaggaatttccaggcgtaaaagcgctgtcgaacgttcatttcgatctgcgcagcggcgaagtgcatgccgtctgcggcgagaatggcgcgggaaaatcgacactgatgaagatcatcagcggtgtctaccagccgagtgaaggaacgatcctgcacaaaggcgagaaggtgcaatatgcatcgccgctgcaatccgaagcggccggcatcgccatcatccatcaggaactcaaccttgttccgcatctttccgttgccgagaacatttatctggcgcgtgagccgcgccggggttttctcgtggaccgcaagaaactgcgactcgatgccaaacgctgtctcgaccggctgggggtcgatatcaaccccgaccagctggtccgcagtctttccgtcgcgcaatgtcagatggtggaaatcgccaaggcgctctctcttgatgccgaagtgctgatcatggacgagccgacctcctcgctgaccgagcaggaaacccggcttctgttcaaggttatccgcgatctcaaggcctccggcgtcggtatcgtttatatttcccatcgtctcgatgagatggccgagatcgtcgatcgcgtgacgatcctgcgcgacggacgttatatctcaaccgacgatttcgcctcgatcactgttgatgacattgtcacgcgtatggtcgggcgttcgctggaagacaaattccccgaacgcacctcgcgcccgacggatgatattctcttttccgtcgaagggctgacgcgcaatggcgtgttcagtgacgtcagtttttcactgcggcgtggcgaaatcttaggttttgccggacttatgggcgcgggacgaacggaagttgcgcgggcaatcttcggggccgatccgctcgatgcgggtaagatcgttttcaacgggcgcgaactttcgatcggctcgccgcaggacgctatcgaggaaggcattgcctatctctcggaagatcgcaaaagcgatggcctcgccatcaagatgtcggtggcggccaatacgacgctcgccaatctcggcgaggtttccaaccgtttcgggctgatcgatttcaagaagcatgacgatgtggcgaagcgttacgtcgatctgctgaatatccgcactccctcgatcgatcagaccgtgcggctgctttcgggtggcaaccagcagaaaatcatcatcggcaaatggctgttccggcagtcgcgcgtgctgttcttcgacgagccgacgcgcggcatcgatgttggcgcgaagtttgcgatctacaagatcatggacgaactggccgcgcagggcatcggcgtcattctcatcagttcggaactgccggaaattctgggactgacggatcgtattgcggtgttccatcagggccgtatcaccggcgtgctcgaaaccgccaagaccaatcaagaagaaatcatgcggtatgcgtccggttacggccgggccgcgcagtga

SEQ ID NO: 138773 - protein, 521 aa, Agrobacterium tumefaciens str. C58
MSQGASTIRGDFSPEEMARAERSVLLRLENISKEFPGVKALSNVHFDLRSGEVHAVCGENGAGKSTLMKIISGVYQPSEGTILHKGEKVQYASPLQSEAAGIAIIHQELNLVPHLSVAENIYLAREPRRGFLVDRKKLRLDAKRCLDRLGVDINPDQLVRSLSVAQCQMVEIAKALSLDAEVLIMDEPTSSLTEQETRLLFKVIRDLKASGVGIVYISHRLDEMAEIVDRVTILRDGRYISTDDFASITVDDIVTRMVGRSLEDKFPERTSRPTDDILFSVEGLTRNGVFSDVSFSLRRGEILGFAGLMGAGRTEVARAIFGADPLDAGKIVFNGRELSIGSPQDAIEEGIAYLSEDRKSDGLAIKMSVAANTTLANLGEVSNRFGLIDFKKHDDVAKRYVDLLNIRTPSIDQTVRLLSGGNQQKIIIGKWLFRQSRVLFFDEPTRGIDVGAKFAIYKIMDELAAQGIGVILISSELPEILGLTDRIAVFHQGRITGVLETAKTNQEEIMRYASGYGRAAQ

SEQ ID NO: 138774 - DNA, 1539 bp, Brucella melitensis 16M
  CDS (1)..(1539): transl_table=11
ttgatgtccgaatatcttttggaaatgcgaaacatcggtaaagagttcaacggcgtcaaggcgctggatggcatttacctgaaagtgcgcgcgggagaatgtgtcgggctgtgcggtgaaaacggggcgggcaagtacaccctgatgaaagtgctgtcgggtgtttatccccatggcacatggactggtgaaattttctgggaaggcaaagaacttaaagccagtggcattcgcgataccgaagctgcgggtattgtcatcatccatcaggaactgatgatggtgccacacctgtcggtcgcggagaatatcttccttggttgcgagccaaccacaggcggtttcattgattatgaccagatgaatgcacgggcagccgaactgctcgctcggctcaagataaacgatatcaatgtcgcattgccggtttatcattactcaggcggcaagcagcagttgatcgagattgcaaaggcaatcaacaaaaatgccaagcttctgatccttgacgagccaacctcggccctgaccgcttcagaaacccgggttctcatcgacctgatcaaggacttcaaaaagcagggcatggcttgcgtttacatctctcacaaactcgatgaagtggcggaaatctccgacacggtaacggttattcgtgatggcgcgcatatcgcgacacgtccgatgtccgaactgacaacgcccgatatcatcacgatgatggtcgggcgtgagatgaagaacctcttcccgcgtgaaccccatgacattggcgaggtgatgtttgaagcccgcaatataagttgctgggatgtgaccaatcctgaccgcaaggtggtcgacgatgtttcgtttgcgctaaggcgcggtgagattttgggcattgcgggccttgtgggtgccgggcgtacagaactcgtatcgagcttgtttggtgtctggccgggcgcctgtcaggggcaggtttttctggaaggcaaggaaatcaaaatccgcacgccgcgcgatgcggtgcgccaaggcatttgcatggtgccggaagatcgcaaacgcgatggcatcctgccgatcatgccagttggccacaatatgacgatctccgtgcttgatcgcttttcgctacgaggcctcatcgataaagacgcggaactcgtggcgatccagcgtgagattttgagactcaaggtcaagaccgccgatccgatgcttgccattgcctcgctatctggcggcaatcagcagaaggccgtgctttcaaagatgatgctgcctgatccgaaagtgctcattcttgatgagcccacacgcggcgtcgatgtcggcgcgaaatatgaaatttacaagctgatattcgcgctcgccaggcagggcgtatcgattttgatggtttcgtcggaaatgccggaagtccttgggatcagtgatcgtgttctcgtcattggcgagggcaaattgcgcggcgatttcccgaatgaaaatcttacacaggagaaggttcttgccgctgcaattggcaagcctgcaaccaacgcggcctag

SEQ ID NO: 138775 - protein, 512 aa, Brucella melitensis 16M
MMSEYLLEMRNIGKEFNGVKALDGIYLKVRAGECVGLCGENGAGKYTLMKVLSGVYPHGTWTGEIFWEGKELKASGIRDTEAAGIVIIHQELMMVPHLSVAENIFLGCEPTTGGFIDYDQMNARAAELLARLKINDINVALPVYHYSGGKQQLIEIAKAINKNAKLLILDEPTSALTASETRVLIDLIKDFKKQGMACVYISHKLDEVAEISDTVTVIRDGAHIATRPMSELTTPDIITMMVGREMKNLFPREPHDIGEVMFEARNISCWDVTNPDRKVVDDVSFALRRGEILGIAGLVGAGRTELVSSLFGVWPGACQGQVFLEGKEIKIRTPRDAVRQGICMVPEDRKRDGILPIMPVGHNMTISVLDRFSLRGLIDKDAELVAIQREILRLKVKTADPMLAIASLSGGNQQKAVLSKMMLPDPKVLILDEPTRGVDVGAKYEIYKLIFALARQGVSILMVSSEMPEVLGISDRVLVIGEGKLRGDFPNENLTQEKVLAAAIGKPATNAA

SEQ ID NO: 138776 - DNA, 1536 bp, Symbiobacterium thermophilum IAM 14863
  CDS (1)..(1536): transl_table=11
atggaaccgctcgttcggatggatcacatcaccaagacgtttccgggggtcagggccctcagcgacatcaccttcgacatccgtcccggcgaggtgcacgtgctgctgggggaaaacggcgccggcaagtcgacgctcatgaagatcctgagcggcgcttacgaacccaccagcgggaccatcaccgtcgatggccgcgcgtacccgcggctcaccccggcgctctcggccaagctgggcatcagcatcatctatcaggaactgagcgtgatcaacgagctcagcatcgaggagaacatcttcgtcggccgcctgccggtgcggaaggtgatgggcgtcccggtcgtcgactacgcgttcatgcggcagcggacccaggagctgctggacatcctggacctgcgccggtcgccggagacgctcgtcggggatctgagcatctcggagaagcagatggtggagatcgccaaggctgtggcgttcaacgccagggtcatcatcatggacgagccgacctcgtcgctgaccgacgccgaggtggagaagctctttgcgatcatccgccggctgaagggcgagggaaagggcatcgtctacatctcccacaagctgaaggagatcctcgccatcggcgaccggatcaccgtcctgaaggacgggacctacgtggggacgcgggacgtgcaggacgtcaccatggacggcctggtgacgatgatggtgggccgggagctgaaggacaagtaccaggccaacaccgacgtccaccggaccggaaaggtcatcttcgaggtccggaacctgacccgccgggacgggcgcgtgcaggacgtctccttcgccctccgggagggcgaggtgctgggattcgcagggctggtcggcgccggacggagtgagaccatgtgcgccatctacggcaccgaccccatccgctcgggcgagatctggctgcacggcgaacgaatggagatccgctcgccctacgacgccttgaagaaaggcatcggtctggtcaccgaaaaccgccgcgagacgggcttcttcccgaatttcagcatccggcggaacgtggccatcgcccggcagctgaagctcgcccgctggggcggcctgtgggggctcgtgaacgagcgggacgagcagaagacggccgagaaggcgcgggccgacatgcagatcaagtgcgcctcgctggagcagaacatcaccgagctctcgggcggcaaccagcagaaggtgatcctcggcaagtggctggcggcgggcgtgaaagtcttgatcttcgacgagcccacccggggcattgacgtgggcaccaaggcggagatctacaagctgatgcggtcgctggccgaaagcggcatcggggtcatcgtcgtctcgtcggagctgccggaactcttgtcggtgtgcgaccgcattatcgtcatgagcgagggccggatcagcgcggagttcacggccgcggaagcgaccgaggaaaagattgtgaaggcggccaccgtcggcgccggagcgagtggagggaactga

SEQ ID NO: 138777 - protein, 511 aa, Symbiobacterium thermophilum IAM 14863
MEPLVRMDHITKTFPGVRALSDITFDIRPGEVHVLLGENGAGKSTLMKILSGAYEPTSGTITVDGRAYPRLTPALSAKLGISIIYQELSVINELSIEENIFVGRLPVRKVMGVPVVDYAFMRQRTQELLDILDLRRSPETLVGDLSISEKQMVEIAKAVAFNARVIIMDEPTSSLTDAEVEKLFAIIRRLKGEGKGIVYISHKLKEILAIGDRITVLKDGTYVGTRDVQDVTMDGLVTMMVGRELKDKYQANTDVHRTGKVIFEVRNLTRRDGRVQDVSFALREGEVLGFAGLVGAGRSETMCAIYGTDPIRSGEIWLHGERMEIRSPYDALKKGIGLVTENRRETGFFPNFSIRRNVAIARQLKLARWGGLWGLVNERDEQKTAEKARADMQIKCASLEQNITELSGGNQQKVILGKWLAAGVKVLIFDEPTRGIDVGTKAEIYKLMRSLAESGIGVIVVSSELPELLSVCDRIIVMSEGRISAEFTAAEATEEKIVKAATVGAGASGGN

SEQ ID NO: 138778 - DNA, 1569 bp, Bacillus licheniformis ATCC 14580
  CDS (1)..(1569): transl_table=11
atgtccgattgcattttagagatgagaggcatcacgaaggagtttcccggcgtcaaagcgctcgacaatgtccaccttcgcgttaaagcgggcgaaatccatgccctctgcggggaaaacggggcgggcaagtcgactttgatgaaggtgctgagcggcgtctatccgtacggtgcgtatacgggcgacattttatataaaggggaagtatgccaattcaaaaatattaagcaaagcgaggaagcggggatcgtcatcatccaccaggagctggcgctcgtcccccagctttccattgcggaaaatctttttttgggcaatgaacaggccagccgcggcgtcatcaattggcgaaagacaaagctggaaacgctcgaattaatgaaaaaagtcgggcttcaagaatctccggatacgcttgtttcccaaatcggcgtcggaaagcagcagcttgttgaaatcgccaaagctttggcaaaaaaagtgcagctcttgattttggatgaaccgacggcggctttaaatgaagctgacagcgagaatctgctgcagctcttgctcgaactgaaaaaacagggaatctcttcgattatgatttcccataaattaaatgaagttacgaaagtcgcagattcgattaccgtgctccgggacggacagacgatcgaaacgcttgatgttcaaagcgggcaattgactgaaaaccggatcatcagaggcatggtcggcagggagctgcaaaaccgctaccctgacagaagcgccgagatcggcgacgtcatctttgaagtgaaggattggacagttcaccatcctcttcaacaggaccgcaaagtggtaaacatggcggcgttttccgtgaaaagaggcgagatcgcaggaattgccggactgatgggctccggaaggacggagctggcgatgagcatttttggaagatcatatgggaaaaacatttccggcacaatcgaaaaagacgggcgggagctttacatcaaccaccctgaagatgccattaaaaacggcatcgtctatgtgacggaggacaggaaaggaaacggtttgattctgaaggacagcattaaagaaaacattacgctgtcgaaactggataaggtgtcgagccgattggtgatggacgagcggcgcgaacaacatgaagcggaggattttcgccggaaattaaacatcaagacgcccgatatcagccagcggaccggaaatttaagcggaggcaaccagcagaaggtcatgctgagcaagtggattttcgcggagcctgacgttttaatcctggatgaaccgacgcgcggcatcgatgtcggcgccaaatacgaaatctacggcgtcatcaatcagcttgccgaagcgggtaaagcggttatcatgatctcttcggagcttcccgagctgctggggatgtgcgacagaatctatacgatgtgtgagggggaaatcaccgccgaattttccaaagaagaagccgatcaggagaagctgatgaaatatatgaccatccgcatgaagagagggggagaagcgtatgcagacaccggtgcaaacggataa

SEQ ID NO: 138779 - protein, 522 aa, Bacillus licheniformis ATCC 14580
MSDCILEMRGITKEFPGVKALDNVHLRVKAGEIHALCGENGAGKSTLMKVLSGVYPYGAYTGDILYKGEVCQFKNIKQSEEAGIVIIHQELALVPQLSIAENLFLGNEQASRGVINWRKTKLETLELMKKVGLQESPDTLVSQIGVGKQQLVEIAKALAKKVQLLILDEPTAALNEADSENLLQLLLELKKQGISSIMISHKLNEVTKVADSITVLRDGQTIETLDVQSGQLTENRIIRGMVGRELQNRYPDRSAEIGDVIFEVKDWTVHHPLQQDRKVVNMAAFSVKRGEIAGIAGLMGSGRTELAMSIFGRSYGKNISGTIEKDGRELYINHPEDAIKNGIVYVTEDRKGNGLILKDSIKENITLSKLDKVSSRLVMDERREQHEAEDFRRKLNIKTPDISQRTGNLSGGNQQKVMLSKWIFAEPDVLILDEPTRGIDVGAKYEIYGVINQLAEAGKAVIMISSELPELLGMCDRIYTMCEGEITAEFSKEEADQEKLMKYMTIRMKRGGEAYADTGANG

SEQ ID NO: 138780 - DNA, 1494 bp, Haemophilus somnus 2336
  CDS (1)..(1494): transl_table=11
atgcaagtggaaaccttgctcaaaattaccggtgtagataaatcttttccgggtgttaaagcacttagtaatgcttgtttatctgtttatgcgggacgagcaatggcacttatgggagaaaatggtgcaggtaaatcaacgttaatgaaggttttaaccggaatttatagcaaagatagcggttctattgaatatttaggagatgttgtcaattttaaaggacctaaggattctgaaacggcaggaattagtattattcaccaagaactgaatttagttgcaaatttaaccgttgctgaaaatatttttttggggcgtgaatttacaacctcttggggtgcaattgattggaagaaaatgtacagagaggctgataaattattagcacatttgggtgtgtcatttcgcagtgatcagctttgttcggaattgtctattggtgaacaacaaatggttgagatagcaaaagcgttgagctttaaatcaaaagtgatcattatggatgagccgacagatgccttgacagatacggaaacggaaacgctttttaacgttattcgtgaattaaaagaacaacattgtggcattgtatatatttctcatcggatcaaagaaatttttgaaatttgcgatgatgtaacagtattacgtgatggacagtttattggtgaaagtgcggtgcaagatctcacggaagagcgtttaatcgagatgatggttggccaccgtttagaggagcaatatccgcatgttgaacaagatcgtggttctgttcgtttggaagtaaatcagcttttcggtagcggaatatgtgatgtgagctttaaactatatagtggtgagattttaggtgtgtcaggcttaatgggtgccggtagaactgaattgatgaaagtgctatatggtgctttgcctaaagaagaaggtgaagtgcggttaaataataaagtcatttctaatgattctcctcaagacggtttaagaaacggtattgtatatatttctgaagatcgtaaaggcgacggactaattttgggtatgtctgtaaaagaaaatatgtctttgaccgccttggatcatttgtcaaaagccggaaaaattaatcatcaagcagaaaaaatggtggtagatgattttattgagttgttcaatattaaaaccccaaaccgtgaacagcaaataggcttgctttctggcggcaaccagcaaaaagtggcagttgctaaagggctaatgactcgtcctgatgtacttattttagatgaaccgaccagaggcgttgatgttggtgcgaaaaaagaaatctatcaattgattaataaatttaaacaagagggattaagtattattttggtttcatctgaaatgccggaagtacttgggatgagtgatcggattttagttatgcacgaaggtcgtattagtgctgaatttagtcgtgaagaggcaacacaaggaaaattacttgccgcagcactcgggaaacataattaa

SEQ ID NO: 138781 - protein, 497 aa, Haemophilus somnus 2336
MQVETLLKITGVDKSFPGVKALSNACLSVYAGRAMALMGENGAGKSTLMKVLTGIYSKDSGSIEYLGDVVNFKGPKDSETAGISIIHQELNLVANLTVAENIFLGREFTTSWGAIDWKKMYREADKLLAHLGVSFRSDQLCSELSIGEQQMVEIAKALSFKSKVIIMDEPTDALTDTETETLFNVIRELKEQHCGIVYISHRIKEIFEICDDVTVLRDGQFIGESAVQDLTEERLIEMMVGHRLEEQYPHVEQDRGSVRLEVNQLFGSGICDVSFKLYSGEILGVSGLMGAGRTELMKVLYGALPKEEGEVRLNNKVISNDSPQDGLRNGIVYISEDRKGDGLILGMSVKENMSLTALDHLSKAGKINHQAEKMVVDDFIELFNIKTPNREQQIGLLSGGNQQKVAVAKGLMTRPDVLILDEPTRGVDVGAKKEIYQLINKFKQEGLSIILVSSEMPEVLGMSDRILVMHEGRISAEFSREEATQGKLLAAALGKHN

SEQ ID NO: 138782 - DNA, 1482 bp, Actinobacillus pleuropneumoniae serovar 1 str. 4074
  CDS (1)..(1482): transl_table=11
atgaaaaccttgttgaaaatcagtggaattgataaagcctttccgggcgtgcaagcgttaaaaaatgcctgcctgaacgtgtatgcgggtagagcaatggcgttaatgggcgagaacggtgcgggcaaatccaccctgatgaaaattctgaccggtatttatcagcgtgatgccggtacgattgaataccttggtaaagcggtcagctttgccaatccgaaagcctctcaagaagccggtttaagcattattcatcaagaactaaatattttaggtaacttgtcgattgcggaaaatatcttcctcgggcgtgaatttaccaatgcttggggcggtattgattggcgcaaaatgtatgaagaatccgaccgcttgttggcgcgtctcggggtgaaacattccagtcgccaagcggcaaacgaattatcgatcggcgaattacaaatggtggaaattgccaaagccttaagttttgaatcacaggtgattgtgatggacgaaccgaccgatgcgctgaccgataccgaaaccgaagcgttattcagcgtgattcgagaactcaaagcagaagggcgaggtattgtttatatctcccaccgtttaaaagagatcttccaaatttgtgatgatgtgaccgtattgcgtgacggtcaatttatcggcgaaagtacggtggcggatttaaccgaagatcgcttaattgagatgatggttgggcgtaagttagaagatcaatatccgcatattgataacccgattggtgaagtttgtctgtcggtgaaaaacttatcgggtagcggtgtgaataacgtttcgtttgaattgcataaaggcgaaattttaggtgtgtccggtttgatgggcgcagggcgtaccgagctgatgaaggtactgtacggcgcattaccgaaaactgccggcgaagtgcgattagacggcaaaacgattgataaccgctccagccaagacggcttaaataacggcattgtgtatatttcggaagaccgtaaaggtgacggcttaattttaggtatgtcggtcaaagaaaatatgtcgttgaccgctttggaatatctatcgaattggggacgcatcaaccacgaaaaagagaatatgaccgtggtggattttattgatctgtttaatatcaaaaccccaagcccggataagattatcggcgaattatccggcggtaatcagcaaaaagtggcgattgccaaaggcttaatgacccgcccgaacgtgttgatcttagatgagccgactcgaggtgtggacgttggggcgaaaaaagaaatctatcaactgattaataaattcaaagccgaaggtttgagcattattttagtctcaagtgatatgccggaagtattagggatgtccgatcgcataattgtgatgagagaaggtactattcgtggcgagttttctcgcacggaagccacccaagaaaaattactagcggcagcaatcggcaaatag

SEQ ID NO: 138783 - protein, 493 aa, Actinobacillus pleuropneumoniae serovar 1 str. 4074
MKTLLKISGIDKAFPGVQALKNACLNVYAGRAMALMGENGAGKSTLMKILTGIYQRDAGTIEYLGKAVSFANPKASQEAGLSIIHQELNILGNLSIAENIFLGREFTNAWGGIDWRKMYEESDRLLARLGVKHSSRQAANELSIGELQMVEIAKALSFESQVIVMDEPTDALTDTETEALFSVIRELKAEGRGIVYISHRLKEIFQICDDVTVLRDGQFIGESTVADLTEDRLIEMMVGRKLEDQYPHIDNPIGEVCLSVKNLSGSGVNNVSFELHKGEILGVSGLMGAGRTELMKVLYGALPKTAGEVRLDGKTIDNRSSQDGLNNGIVYISEDRKGDGLILGMSVKENMSLTALEYLSNWGRINHEKENMTVVDFIDLFNIKTPSPDKIIGELSGGNQQKVAIAKGLMTRPNVLILDEPTRGVDVGAKKEIYQLINKFKAEGLSIILVSSDMPEVLGMSDRIIVMREGTIRGEFSRTEATQEKLLAAAIGK

SEQ ID NO: 138784 - DNA, 1482 bp, Haemophilus influenzae R2866
  CDS (1)..(1482): transl_table=11
atggaaactttactcaaaattagtggtgttgataaatcatttccaggtgtgaaagccttgaataatgcctgtttatctgtttacgctggacgcgtaatggcattgatgggggaaaatggggcgggtaaatcgactttaatgaaggtgcttactggtatttattctaaagacgcaggcacaattgagtatcttaatcgatcagttaatttcaatggacctaaagcctcacaggaagctggcattagtattattcaccaagaactgaatttggtcggtaatctcacgattgcagaaaacattttccttggtcgtgaatttaaaacctcgtggggagcgattaactggcagaaaatgcaccaagaagcagacaagctacttgcgcgtttgggggtaactcacagcagtaaacagctttgcgctgaactttctattggtgagcaacaaatggtggagatagccaaagccttaagttttgaatccaaagttatcattatggatgaaccaaccgatgcactcacagatacggagaccgaagccctattcaatgtgattcgtgaactcaaagcagaaaatcgtggcattgtttatatctctcatcgtttaaaagaaattttccaaatttgtgatgatgtgacggttttacgcgatggtcaatttatcggtgaacgcattgtggcagagattacagaagatgatttaattgaaatgatggttggtcgtcgtcttgatgaacaatatccgcatttatcacaagaaaaaggcgaatgtgtattggatgtgaaaaatgtgagcggaagcggcattgatgatgtttccttcaaattgcatgccggtgaaattgttggtgtctcgggcttaatgggcgcgggtagaacggaactcggcaagctactttacggtgctttgccaaaaacggctggaaaagtgcggttaaaaaatcaagagattgagaatctcagtccgcaagatggtttggataatggtattgtatatatttctgaagatcgtaaaggtgatggcttggttttaggaatgtcagtaaaagaaaatatgtcgctcacatcgctcgatcatttttctaacagaggcaatattcgtcatcaagcagaaaaaatggcagtagatgactttattctgatgtttaacattaaaacacctaatcgtgatcaacaagtaggtttgctatctggtggaaatcaacaaaaagtggcaattgctcgtggattaatgactcgcccaaatgtgttgattttagatgaaccaactcgtggcgtagatgttggcgcgaagaaagaaatttatcagttgattaacgaatttaagaaagagggcttgagtattttaatgatctcatctgatatgccagaagtgcttggtatgagcgatcgagtgttggtaatgcgtgaaggtaaaattagtgcagaattttctcgtgaagaggcaacacaagaaaagttattagcagcagctattggtaaataa

SEQ ID NO: 138785 - protein, 493 aa, Haemophilus influenzae R2866
METLLKISGVDKSFPGVKALNNACLSVYAGRVMALMGENGAGKSTLMKVLTGIYSKDAGTIEYLNRSVNFNGPKASQEAGISIIHQELNLVGNLTIAENIFLGREFKTSWGAINWQKMHQEADKLLARLGVTHSSKQLCAELSIGEQQMVEIAKALSFESKVIIMDEPTDALTDTETEALFNVIRELKAENRGIVYISHRLKEIFQICDDVTVLRDGQFIGERIVAEITEDDLIEMMVGRRLDEQYPHLSQEKGECVLDVKNVSGSGIDDVSFKLHAGEIVGVSGLMGAGRTELGKLLYGALPKTAGKVRLKNQEIENLSPQDGLDNGIVYISEDRKGDGLVLGMSVKENMSLTSLDHFSNRGNIRHQAEKMAVDDFILMFNIKTPNRDQQVGLLSGGNQQKVAIARGLMTRPNVLILDEPTRGVDVGAKKEIYQLINEFKKEGLSILMISSDMPEVLGMSDRVLVMREGKISAEFSREEATQEKLLAAAIGK

SEQ ID NO: 138786 - DNA, 1491 bp, Bacillus anthracis str. A2012
  CDS (1)..(1491): transl_table=11
atgggaatgcgtattgaaatgaaaaatatttcaaaggcgttcaatggcaatcctgttttgaagaatgcacagtttatgattgaaacaggagaagtccatgcattgatgggggaaaatggagcgggtaaatcaacgctcatgaagattttaacaggtgtatacaaaagagatggtggaacgatcacgattgatggacaagaacgaacttttaaaaatgcgaaagaagctgaagaatacggtattgcatttatacatcaagaattgaacatattaccgaatttaacagtagctgaaaatatgtttctcggtaaagagttaatgtatggaaagacaggtattttacgtacgcgtcaaatgaacgcgattgcgcagcagcaactagcagagttaggattacatgtaaaaggcgctatgttggcaggagagttatcggttggacaacagcaaattatcgaaattgcgaaagcactaatgacaaacgcgagcgttattattatggatgaacctacagctgcattaacagatcgtgaaattgaaacgttgtttaccgtcattaataaattacgtaaagaaggcgtttcgttcgtttatatctcacaccgaatggaagaaatcttttcaatatgcgatgccattacgattttacgtgatggggaatacgtcggaaagagatccattccggaaacatcgtttgatgaggtagtgagtatgatggtggggcgcagcattggtgaacgttacccagaacgaaatagtcaaattggcgatgttatttttgaaatgcgtaatggaacgaaaaaagggaagtttgaaaatgtttcgtttcaagttagaaaaggtgaaatccttggtgtagctggcttgatgggagctggccgcacagatattatgaaagcaatatttggatacgaacctttagattctggccaaatttttataaatgggcaagaagtaaagattgatagcccgatagatgcgattagacaaagaatcgcattcattacagaggatagaaagtctgaaggattagtgctagatttctcaattcgagaaaatttagccttaccgaatttagaaagtctttcaaagggaagcgtcttaagtaacgaactagaacaacagtttacagcggacatgatgaaacttcttaatgtgaaagcatctagtggagagcaagctgtgaaatctctttctggtggaaatcagcaaaaggttgttattgcaaaatggttaggtattcacccgcaattactcattttagatgagccaacaaggggtgttgatgttggagcgaaaaaagaaatttactctattatgaataagcttaccgaagaaggagatgccgttattatggtatcatctgaacttccagaagttttagggatgagtgatcgcgttcttgttattcatgaaggaaaagtcggcggcattttagagaaagatgaggcatcgcaagagtctattatggcactagctacagggggagagtaa

SEQ ID NO: 138787 - protein, 496 aa, Bacillus anthracis str. A2012
MGMRIEMKNISKAFNGNPVLKNAQFMIETGEVHALMGENGAGKSTLMKILTGVYKRDGGTITIDGQERTFKNAKEAEEYGIAFIHQELNILPNLTVAENMFLGKELMYGKTGILRTRQMNAIAQQQLAELGLHVKGAMLAGELSVGQQQIIEIAKALMTNASVIIMDEPTAALTDREIETLFTVINKLRKEGVSFVYISHRMEEIFSICDAITILRDGEYVGKRSIPETSFDEVVSMMVGRSIGERYPERNSQIGDVIFEMRNGTKKGKFENVSFQVRKGEILGVAGLMGAGRTDIMKAIFGYEPLDSGQIFINGQEVKIDSPIDAIRQRIAFITEDRKSEGLVLDFSIRENLALPNLESLSKGSVLSNELEQQFTADMMKLLNVKASSGEQAVKSLSGGNQQKVVIAKWLGIHPQLLILDEPTRGVDVGAKKEIYSIMNKLTEEGDAVIMVSSELPEVLGMSDRVLVIHEGKVGGILEKDEASQESIMALATGGE

SEQ ID NO: 138788 - DNA, 1902 bp, Burkholderia vietnamiensis G4
  CDS (1)..(1902): transl_table=11
atgggtcgtctacgcgctcaacgaggagaccgtgctcggcgcggtgcgcgcgaccgaacagctgcacatcccggccgcggacgtgatcggcgtcggcatcaacggtgcgggcgaggcgttcgccgagttccagaagaaggagccgaccggcttctacgggacgatcgcggtcagctcgacgaaccacggcaaggacagcacgcagaacctcgtcgactggatccgcaacggcaagatgccgccggccgacacgcagacgagcggcaagctgatgacgcgcgcgaactggcaggccgtgcgcgccgagctgggcatctgagcgtgcggggcgacgacgcgatgacgatgcagacgatcacggccgtgcccggcaacggcgccgcggccacgcccggcgccgcgacgccgctcgccggcggcgcgctgctcgcgctcgacggcatcacggtgacgttcccgggcgtgcgcgcgctcgacggcgtgtcgctggcggtgcgcgcgggcgaggtgcacgggctgatgggcgagaacggcgccggcaagtcgacgctgctgaaggtgctgtccggcgtgaaccagccgcaggccggcacgttgacgctgaacggcaccgagcagcgcttcgcgtcgacgcgcgcggcgctcgaggccggcatcgcgatcatctatcaggaactgcacctggtgccggagctgacggtcgcggaaaacctgatgctcggccaactgccgagccggctcggcgtggtcgacgaacgcgcgctcgccgtgcgcgcgctcgacgcgctggagcggctcggcgagcacatcgatcccgacatcccggtgaagtacctgtcgatcggccagcgccagatgatcgagatcggcaaggcgctgatgcgcgacgcgcgcgtgatcgcattcgacgaaccgaccagctcgctgtcggcgcgcgagacgacgcagctgttccgcatcatccgctcgctgcgcgaacagggccgcgcgatcatctacgtgacgcaccggatggaggaggtcgacgcgctgtgcgatcgcgtgacggtgttccgcgacggccggcggatcgagacgttcgagtcggtcgccgatctcgaccgcgaccggctgatcggctgcatggtcggccgctcgatcgaggacgtctacggctaccggccgcgcgcggccggcgacgtgatgatcgaggcgaaggccttgaccggccccggcctgtccgagccggtgtcgttcgccgcgcggcgcggcgagatcgtcggcttcttcgggctggtcggcgcaggccgctcggagctgatgaagctgctgtacggcgccgtgcgtccgaccggcgggcacgtcgagctgggcggcgcgcgcgtcgcgttcaggagcccgcgcgacgcggtgcgcgccggtatcgcgctgtgtccggaggaccgcaagcacgagggcatcgtcgcgatcgcgtcggtggccgacaacctgaacatcagcgcgcgccgccacttcagcccggcgcgcatgctgctcgacgggcggcgcgagcgcgagctcgcgcagaagtacatcgagcggctcgcgatcaagacgcgcgacggcgacacgccgatcggcgcgctgtcgggcggcaaccagcagaaggtcgtgctcgcgcgctggctggccgagcgcatcgacgtgttcctgatggacgagccgacgcgcggcatcgacgtcggcgcgcgcgccgaaatctacaacctgttttacgaactcgcggaagcgggccgcaccgtgatcatcgtgtcgagcgatctcgccgaagtgatcggcgtggcggaccgcatcatcgtgatgaaggaagggcgcatcgcgggcgaggtcgcgaaggcgcaggcgacgcccgacacgctgatcaagctcgcgctgccgcgctag

SEQ ID NO: 138789 - protein, 633 aa, Burkholderia vietnamiensis G4
MGRLRAQRGDRARRGARDRTAAHPGRGRDRRRHQRCGRGVRRVPEEGADRLLRDDRGQLDEPRQGQHAEPRRLDPQRQDAAGRHADERQADDARELAGRARRAGHLSVRGDDAMTMQTITAVPGNGAAATPGAATPLAGGALLALDGITVTFPGVRALDGVSLAVRAGEVHGLMGENGAGKSTLLKVLSGVNQPQAGTLTLNGTEQRFASTRAALEAGIAIIYQELHLVPELTVAENLMLGQLPSRLGVVDERALAVRALDALERLGEHIDPDIPVKYLSIGQRQMIEIGKALMRDARVIAFDEPTSSLSARETTQLFRIIRSLREQGRAIIYVTHRMEEVDALCDRVTVFRDGRRIETFESVADLDRDRLIGCMVGRSIEDVYGYRPRAAGDVMIEAKALTGPGLSEPVSFAARRGEIVGFFGLVGAGRSELMKLLYGAVRPTGGHVELGGARVAFRSPRDAVRAGIALCPEDRKHEGIVAIASVADNLNISARRHFSPARMLLDGRRERELAQKYIERLAIKTRDGDTPIGALSGGNQQKVVLARWLAERIDVFLMDEPTRGIDVGARAEIYNLFYELAEAGRTVIIVSSDLAEVIGVADRIIVMKEGRIAGEVAKAQATPDTLIKLALPR

SEQ ID NO: 138790 - DNA, 1479 bp, Exiguobacterium sibiricum 255-15
  CDS (1)..(1479): transl_table=11
atgcaaattgagatgacaggtatcacaaaagcgtttggtcccgttcccgtcttgaagggagtcgacttcaccctcgcgaccggtgagattcatgccttaatgggagaaaacggtgccggaaaatcgactttgatgaaaattctgaccggcgttcataaagccgatcaaggaacgattctcgtcgacggcgtcgaacagcaatataaaaatccgaaactggcggaagaagcggggattgccttcattcaccaggaactgaacattctgccggatttaacggtcacggaaaatctgtttctcggacgggaactgaagtcccgcttcggtgtcctgaaacaggcggaaatgaaacggctcgctgaacgggagctggcggaactgaacgtcttcatggacgttaatcagctcgcccggacgttatcagtcggacaacagcagatgatcgaaatcgccaaagcgttgatgacggacgcgaaggtcatcatcatggatgagccgacggccgctttgacggaacgcgaaatccgcgctctgttcagtgtcgcgacagctttacgcgagcagggagtctcgatcgtttatatctcgcaccggatggaagaaattttcgaactgtgtgaccggatcacggtcttacgggacggggtttccgtttcgacgcaccggattgccgacacttcgtttgaacagatcgtccgtgaaatggtcggacgtgagatgggggaacggtatccggagcggcaagtgacgctcggtcagacggtcctcgaagtgaccggggcgaccggaaaacggttcgaagacgtgtcgttctctgtccgggctggggaaatcgtcggcttttccggcttaatgggcgcaggacggacagaagtcatgcgcggcttgttcgggatcgaccggatgaaagccggaacgatcagcttgaacggtaaaaccattaaaatcaaatcaccgcatgatgcaatcaaacaaggactcggtttcctgacggaggaccgcaaaggcgaaggcttgttcctcgacttttcactccgggaaaacatctcgcttccgacaatccggtcgttatcgaagtccggtgtcatctccgatcagtcggagcggcaattcgcggaaggctatctgaagtcgttatccgtccgccacagctcgatggaccaaccggcaaaatccttgtccggcggaaaccagcagaaggtcgttctcgcaaaatggctcggcacgaagccggatgtcctgattctcgacgagccgacacgcggtgtcgacgtcggggcgaaaaaagagatttatatgattatggacgaactcgccgcaacgggtgtcgcgatcatcatgatcagctcggatctgccggaaattctcggcatgagtgaccgcgtctatgtaatgcgcgaaggacagatgagcggcatgctcaaccaagaagaggcaacgcaagagagtatcatgacgcttgcgacaggaggacaatga

SEQ ID NO: 138791 - protein, 492 aa, Exiguobacterium sibiricum 255-15
MQIEMTGITKAFGPVPVLKGVDFTLATGEIHALMGENGAGKSTLMKILTGVHKADQGTILVDGVEQQYKNPKLAEEAGIAFIHQELNILPDLTVTENLFLGRELKSRFGVLKQAEMKRLAERELAELNVFMDVNQLARTLSVGQQQMIEIAKALMTDAKVIIMDEPTAALTEREIRALFSVATALREQGVSIVYISHRMEEIFELCDRITVLRDGVSVSTHRIADTSFEQIVREMVGREMGERYPERQVTLGQTVLEVTGATGKRFEDVSFSVRAGEIVGFSGLMGAGRTEVMRGLFGIDRMKAGTISLNGKTIKIKSPHDAIKQGLGFLTEDRKGEGLFLDFSLRENISLPTIRSLSKSGVISDQSERQFAEGYLKSLSVRHSSMDQPAKSLSGGNQQKVVLAKWLGTKPDVLILDEPTRGVDVGAKKEIYMIMDELAATGVAIIMISSDLPEILGMSDRVYVMREGQMSGMLNQEEATQESIMTLATGGQ

SEQ ID NO: 138792 - DNA, 1506 bp, Photobacterium sp. SKA34
  CDS (1)..(1506): transl_table=11
atgactcaggccattctacaattgaatgatatcgagaaagcgtttcccggtgtgaaagcgttagatagagctagtctttctgtgtatgcaggtcgtgtaatggctctaatgggcgagaacggagcaggtaaatcaaccttaatgaaggtgcttactgggatttaccaaatggatgcaggaagtattcattatcaaggtcagccagctgcatttaatggcccacgtgattcacaagaagctggcattagtattattcaccaagagttaaacctgatccctgagttaaccattgccgaaaacatttatcttgggcgtgaattcacgggcatgatgggacgaattcactgggaaaaaatgtatgatgaggctgataaactgttaaaacgccttaatgttaaacactcctcaaaaacgttactgggtgacttaagccttggcgaacaacaaatggttgagattgccaaagcactatcgtttgaatctaaagtcatcattatggatgagccgacagacgcccttactgacaaagaaacagcatcgttattcaacgtcattaatgaacttcgtgagcaaggttgcggcattgtttacatctctcaccgcttaaaagaaatttttgaaatttgtgacgatattactgtattgcgtgatggaaagttcattggtgaatgccaagttaaagagaccaatgaagatggactgatcgagatgatggtggggcgtaagttggaagaacagtacccacgtattgccgtaaaacatggcgaaacttgccttgatgtatctggactcacgggttcgggtgttcatgatgttagtttttctctaaaacgcggtgaaatccttggtgtatcaggactaatgggcgcagggcgtactgaattggtgaaattgatttacggtgcgctaccagccgaaagcggtgtgattatgctgaatcgccaagttattaagcctgtcacacctcaagacggtttaaataacggtattgcctatatctctgaagatcgaaaaggcgatggccttgttctgggcttatctgtaaaagaaaatatgtctctttgtgctttggataaactcacaaaaggtgtgcaaattcagcataaagaggaagtggttgctgttgatgacttcattaaaattttcaatatcaagacgccaacacacaaccaaatcatcggtaacttatccggtggtaaccagcagaaagttgctatcgcaaaagggctaatgacccagcctaaagttctcattcttgatgaaccaacacgtggtgtcgatgttggtgctaagaaagaaatctatcaactcatcaataaatttaaaagtgaaggtatgagtatcattttagtctcttctgagatgcctgaagtgcttggtatgagcgatcgtatcctcgttatgcatgaaggtcggattactggtgaattcgatgcaaaagaggctgatcaagaaaaactactcgcgtgtgccgttggcaaaaatatgaatgaggaagcagcatga

SEQ ID NO: 138793 - protein, 501 aa, Photobacterium sp. SKA34
MTQAILQLNDIEKAFPGVKALDRASLSVYAGRVMALMGENGAGKSTLMKVLTGIYQMDAGSIHYQGQPAAFNGPRDSQEAGISIIHQELNLIPELTIAENIYLGREFTGMMGRIHWEKMYDEADKLLKRLNVKHSSKTLLGDLSLGEQQMVEIAKALSFESKVIIMDEPTDALTDKETASLFNVINELREQGCGIVYISHRLKEIFEICDDITVLRDGKFIGECQVKETNEDGLIEMMVGRKLEEQYPRIAVKHGETCLDVSGLTGSGVHDVSFSLKRGEILGVSGLMGAGRTELVKLIYGALPAESGVIMLNRQVIKPVTPQDGLNNGIAYISEDRKGDGLVLGLSVKENMSLCALDKLTKGVQIQHKEEVVAVDDFIKIFNIKTPTHNQIIGNLSGGNQQKVAIAKGLMTQPKVLILDEPTRGVDVGAKKEIYQLINKFKSEGMSIILVSSEMPEVLGMSDRILVMHEGRITGEFDAKEADQEKLLACAVGKNMNEEAA

SEQ ID NO: 138794 - DNA, 1506 bp, Vibrio sp. Ex25
  CDS (1)..(1506): transl_table=11
atgactcaagccattctacaactgagcgacattgagaaagcgttcccgggcgtaaaagcactggacaaagcgagcctgaatgtttacccaggccgtgtcatggcgctcatgggagaaaatggagcaggcaagtcaacattgatgaaggtgctgacgggcatctatcacatggatgcgggtagcatccaatatcaaggccaacctgccgcgtttaaaggtccgcgtgactcacaggaagcgggcatcagcatcattcaccaagaattgaacttgatccctgaactaacgattgctgaaaacatctatctaggtcgtgaatttaccggcacgatggggcgtattcagtggggcaagatgtatgaagaagcagacaagttgcttcaacgccttaacgtaaagcactcatcgaaaacgttgcttggtgatttgagcctaggtgaacagcaaatggtggagatcgcgaaagcgctttcgtttgaatcgaaagtcatcattatggatgagccaactgacgcgctgaccgataccgagacggagtcactatttaaagtgatcaacgagcttcgagtgcagggctgcggcatcgtttacatctcacaccgtcttaaagaaatctttgaaatctgtgacgacattacggtgcttcgtgacggtaaatttatcggtgaatgcaaagtagcagacactgatgaagacggcctgattgaaatgatggttggtcgtaagttagaagagcaatacccacgtattgatgtgcggcatggcgaaacttgccttgaagtgattggcctgacaggctctggcgttcacgatgtgagcttcacgctgaaacgcggtgaaattttgggtatttctggtttgatgggggcaggccgtaccgaactgatgaaagtgatttacggcgcgttgccaagtgagcatggtgttatcaacctcgataacaaaaccattaacccggttagcccacaagatggcttagcaaatggcatcgcttatatctctgaagaccgcaaaggcgatggcttggtgttaggtctctcggttaaggagaatatgtcactttgttcgctcaatcagttgactaaaggcttccaaatccaacatagcgatgaagtgattgccgtggaagattttatcaagctatttaatatcaaaacccctacgcgcgaccaaatcattggtaacttatccggcggtaaccagcaaaaagtggcgatcgcgaaagggttaatgaccaaacctaaagttctgattctcgatgagccaacacgtggcgtcgatgtcggtgcgaaaaaagaaatttatcaactcatcaacaagttcaaagccgaaggcatgagcatcatcttggtgtcttccgagatgccagaagtgctcggtatgagtgaccgcattctggttatgcatgaaggtcgtattactggcgaattcgatgcgaaagacgccgatcaagaaaaattactcgcctgtgccgtaggcaaaaagatcaatgaggaagcagcatga

SEQ ID NO: 138795 - protein, 501 aa, Vibrio sp. Ex25
MTQAILQLSDIEKAFPGVKALDKASLNVYPGRVMALMGENGAGKSTLMKVLTGIYHMDAGSIQYQGQPAAFKGPRDSQEAGISIIHQELNLIPELTIAENIYLGREFTGTMGRIQWGKMYEEADKLLQRLNVKHSSKTLLGDLSLGEQQMVEIAKALSFESKVIIMDEPTDALTDTETESLFKVINELRVQGCGIVYISHRLKEIFEICDDITVLRDGKFIGECKVADTDEDGLIEMMVGRKLEEQYPRIDVRHGETCLEVIGLTGSGVHDVSFTLKRGEILGISGLMGAGRTELMKVIYGALPSEHGVINLDNKTINPVSPQDGLANGIAYISEDRKGDGLVLGLSVKENMSLCSLNQLTKGFQIQHSDEVIAVEDFIKLFNIKTPTRDQIIGNLSGGNQQKVAIAKGLMTKPKVLILDEPTRGVDVGAKKEIYQLINKFKAEGMSIILVSSEMPEVLGMSDRILVMHEGRITGEFDAKDADQEKLLACAVGKKINEEAA

SEQ ID NO: 138796 - DNA, 1494 bp, Photobacterium profundum
  CDS (1)..(1494): transl_table=11
atgaaccaagttttattagaaatgcgtggtattaccaaaacatttcccggcgtaaaagcactcgataatgtgcaattaacgttaaaaaaaggtcgagtaatggctttaatgggagaaaatggtgcgggtaaatccaccctaatgaaagtgctgtttggtatttatcaacgcgactgcggcacgattcgttatcaaggagaacaggttaattacagtggtgctaaagaagcactagaagctggggtttcaatgatccaccaagagctatcccctattcttcaccgcagtattgctgaaaatatttggttagggcgtgaaccacttaagggtccattacgccttatcgaccacgcaaaaatgtaccgtgatacgactgaactcttaaaaaaattagatttgcacctcgacccacgtacgccaatgagcgaactcaccgtcgcgacaatgcaaatgatcgagatatctaaagcgatttcctacaattcaaaaattattattatggatgaacccacctctgctttaaccggtaaagaagtggaccatctgtttgaaatcatagaaaaattaaagaaacaaggcgtatccattgtttacattagccataaaatggatgaaatcttccgcatctgtgacgatataacagtatttcgtgatgggtgttacatcggcgaacgtgaagcacaaaataccaatcacgatgaacttgttcagatgatggtgggtcgtgatttaggcgatgtattcccgcctcctactgcaaaacctggaaaagtacgtcttgaagtaaaaaacctgagcgttgaaggtgtatttgacaacattagcttcaagctgcatgaaggtgaaattttaggtattgcagggcttgtcggcgctggacgcaccgagcttatcgaaaccttatttggggtaagaaagcacgatgtaggtgaaatctggattaacggcgaaaacgtcgaaatcaaaacgcctcaagatgcaatcagtcataaaatggcctttttaaccgaagatcgacgccaatcgggtctttatttgatgcttgatatcttcgctaatacctctattgctcatcttgatgcttaccgcaataaagtcgtgaacgtgcttgatgtacgttcgatgcaaaaagattgcgctagccagtgcaccaaattaaaagtcaaaacaccgggtatggcagaaaaaattgataacctcagcggcggtaatcaacaaaaggttcttcttgcacgttggatgctaaccaaaccagacatcctctttttagacgaaccaacgcgcggtattgatatcggtgcgaagtctgaaatttataaactaatgcgattactcacaggtatgggcaaaagcttagtcatgatctcgtctgaactgcctgaagtgataggaatgagcgaccgaatactggtcatgcatggaggcaagctgaagggtgaacttgacggtaaagatgcctctcagcaacaagtaatgtcaatggctttcaattaa

SEQ ID NO: 138797 - protein, 497 aa, Photobacterium profundum
MNQVLLEMRGITKTFPGVKALDNVQLTLKKGRVMALMGENGAGKSTLMKVLFGIYQRDCGTIRYQGEQVNYSGAKEALEAGVSMIHQELSPILHRSIAENIWLGREPLKGPLRLIDHAKMYRDTTELLKKLDLHLDPRTPMSELTVATMQMIEISKAISYNSKIIIMDEPTSALTGKEVDHLFEIIEKLKKQGVSIVYISHKMDEIFRICDDITVFRDGCYIGEREAQNTNHDELVQMMVGRDLGDVFPPPTAKPGKVRLEVKNLSVEGVFDNISFKLHEGEILGIAGLVGAGRTELIETLFGVRKHDVGEIWINGENVEIKTPQDAISHKMAFLTEDRRQSGLYLMLDIFANTSIAHLDAYRNKVVNVLDVRSMQKDCASQCTKLKVKTPGMAEKIDNLSGGNQQKVLLARWMLTKPDILFLDEPTRGIDIGAKSEIYKLMRLLTGMGKSLVMISSELPEVIGMSDRILVMHGGKLKGELDGKDASQQQVMSMAFN

SEQ ID NO: 138798 - DNA, 1497 bp, Pasteurella multocida
  CDS (1)..(1497): transl_table=11
atgcaacacgaaaccttactccacatccaaggaattgataagtcttttcccggtgtcaaagcgctcagtaatgcttgcttatccgtttatgcaggacgtgccatggcattaatgggggaaaatggtgcgggtaaatcgaccttaatgaaagtgctcaccggcatttacagcaaagacgcaggcacaattgaatatttaggtaaacaagtcaccttcaaaggaccaaaagagtcgcaagaagccggcatcagcatcattcaccaagagttgaatttagttggcaacctaacaatcgcagaaaatattttcttaggccgtgaatttgtgacgccttggggaagtattgattggaaaaaaatgcaccaagaagcggacaaattacttaaacgtttaggtgttagccatagtagccatcaattgtgttccgaattatcaattggtgaacaacaaatggttgaaattgccaaagcactcagctttgaatctaaagtcattattatggatgaacccaccgatgcgctaaccgatacggaaacagccgctttatttaaggtgattcgggaactcaaagccgaaaaacgtggcattgtctatatctcgcatcgtatcaaagagatttttgaaatttgcgatgatgtgacggtattacgtgatggtgagtttattggtgaaaaagccgtcaatgtattagatgaagatcagctgattgaaatgatggttggacgccgtttagatgaacaatatccacatttagataaacctcgtggcgaattattacttgaagtcgaaaatctcagtggcagtggtgtacatgatgtcagtttcacattacatcgaggagaaattctaggggtttctggtctgatgggagcgggacgaacagagcttatgaaagtgttatatggcgcgctaccccgttcaagtggcaaagtgcggttagctcagcaagaaattcacaatacttgcccacaagatggcttaaatcatggcattgtgtacatttccgaagatcgcaaaggtgatggcttaattttaggcatgtcagtgaaagaaaatatgtcactcaccgctttagcctatttttctaaatctattcaaattgatcacaaagcagaacaattggcagtgggtgacttcatcaccatgtttaatatcaaaacaccaagccaagagcagcaaattgggctcttatctggcggtaatcagcaaaaagtggcgattgctaaaggcttaatgacacgtcccaacgtgttgattttagatgagccaacacgtggcgtggatgtgggggcgaaaaaagaaatttatcaactcattaatgaattcaaaaaagagggcttaagtatcattttagtgtcctctgaaatgccagaagtgcttggcatgagtgatcgtattttggtcatgcatgaagggcgaattagtgcagaattccaacgtggtgaagccacgcaagaaaaattattagccgcagccattggcaaaagtgcgctctaa

SEQ ID NO: 138799 - protein, 498 aa, Pasteurella multocida
MQHETLLHIQGIDKSFPGVKALSNACLSVYAGRAMALMGENGAGKSTLMKVLTGIYSKDAGTIEYLGKQVTFKGPKESQEAGISIIHQELNLVGNLTIAENIFLGREFVTPWGSIDWKKMHQEADKLLKRLGVSHSSHQLCSELSIGEQQMVEIAKALSFESKVIIMDEPTDALTDTETAALFKVIRELKAEKRGIVYISHRIKEIFEICDDVTVLRDGEFIGEKAVNVLDEDQLIEMMVGRRLDEQYPHLDKPRGELLLEVENLSGSGVHDVSFTLHRGEILGVSGLMGAGRTELMKVLYGALPRSSGKVRLAQQEIHNTCPQDGLNHGIVYISEDRKGDGLILGMSVKENMSLTALAYFSKSIQIDHKAEQLAVGDFITMFNIKTPSQEQQIGLLSGGNQQKVAIAKGLMTRPNVLILDEPTRGVDVGAKKEIYQLINEFKKEGLSIILVSSEMPEVLGMSDRILVMHEGRISAEFQRGEATQEKLLAAAIGKSAL

SEQ ID NO: 138800 - DNA, 1572 bp, Thermotoga maritima
  CDS (1)..(1572): transl_table=11
atgatgctcaacacagaaaaagaaagggaagtattgctggaagccagaaatattaccaaaacttttccgggagtaatcgctgtcaataatgtaactcttcaaatatataaaggggaagtttgcgctctggttggagaaaacggagctggcaaatccactctcatgaagattttggccggggtatatccggattacgagggacagatctttctggaaggaaaagaggttcgattcaggaatccaagagaagcccaggagaatggaatcgccttaattcctcaagaactagatcttgtacctaatcttagttcagctgaaaatatctttctctccagagaaccggtcaacgagtttggtgtgattgaataccagaaaatgtttgaacaagcttcaaaattattttcaaagctaggagttaatatcgatccaaaaacaaaagtggaagatctgagcactagtcaacaacaaatggtagctattgctaaagcactttcacttgacgccaaaataatcatcatggacgaaccaacctctgccataggtaaacgtgaaactgaacaactgttcaatattataagatctttaaaaaatgaaggaaaatctgtgatttacatttctcatcgattagaggaaatattcgaaatagctgacagggttgttgtgatgagagatggtagaaaggtaggagagggtcccatagaagaatttgatcatgataaacttgttagattaatggtaggaagaagtatagatcagttttttataaaagaacgtgcgacaataacagacgaaattttcagagtggaaggtattaaactgtggagtttggacagaaagaaacttttagttgatgatgtgagtttttacgtcaggaagggagaagtattgggaatatatggattagtcggcgctggaagaacagaacttttggaggctatattcggcgcccatccaggtcgtacagaaggaaaggtattcattggaggaaaagaaataaaaattcactctcctagggacgctgtaaagaatgggataggattagtcccagaggatagaaaaactgcaggactgattcttcaaatgtctgttttgcataatataaccctcccttcagtggtaatgaaacttatcgttagaaaatttggattaatagatagtcaactcgaaaaagaaatcgttcgttcgtttatagaaaaattaaacattaaaactccttcaccctatcaaatcgtggagaacctcagtggaggaaaccagcaaaaagtagttctggcaaaatggcttgcaataaaaccaaaggtacttctcttagatgaacctaccagaggaattgatgtaaacgcaaagagtgagatttacaaactcataagtgaaatggctgtttcaggaatgggtgtagttatggtttcctctgaacttccagagatacttgccatgtccgacagaattcttgttatgtctgaggggcggaaaacagctgagtttctcagagaagaagtcaccgaggaagatcttctgaaagcagcaatccccagaagtgtgaaggtagaaacaacacaaagggaggagtga

SEQ ID NO: 138801 - protein, 523 aa, Thermotoga maritima
MMLNTEKEREVLLEARNITKTFPGVIAVNNVTLQIYKGEVCALVGENGAGKSTLMKILAGVYPDYEGQIFLEGKEVRFRNPREAQENGIALIPQELDLVPNLSSAENIFLSREPVNEFGVIEYQKMFEQASKLFSKLGVNIDPKTKVEDLSTSQQQMVAIAKALSLDAKIIIMDEPTSAIGKRETEQLFNIIRSLKNEGKSVIYISHRLEEIFEIADRVVVMRDGRKVGEGPIEEFDHDKLVRLMVGRSIDQFFIKERATITDEIFRVEGIKLWSLDRKKLLVDDVSFYVRKGEVLGIYGLVGAGRTELLEAIFGAHPGRTEGKVFIGGKEIKIHSPRDAVKNGIGLVPEDRKTAGLILQMSVLHNITLPSVVMKLIVRKFGLIDSQLEKEIVRSFIEKLNIKTPSPYQIVENLSGGNQQKVVLAKWLAIKPKVLLLDEPTRGIDVNAKSEIYKLISEMAVSGMGVVMVSSELPEILAMSDRILVMSEGRKTAEFLREEVTEEDLLKAAIPRSVKVETTQREE

SEQ ID NO: 138802 - DNA, 1485 bp, Bacillus anthracis
  CDS (1)..(1485): transl_table=11
atgcgtattgaaatgaaaaatatttcaaaggcgttcaatggcaatcctgttttgaagaatgcacagtttatgattgaaacaggagaagtccatgcattgatgggggaaaatggagcgggtaaatcaacgctcatgaagattttaacaggtgtatacaaaagagatggtggaacgatcacgattgatggacaagaacgaacttttaaaaatgcgaaagaagctgaagaatacggtattgcatttatacatcaagaattgaacatattaccgaatttaacagtagctgaaaatatgtttctcggtaaagagttaatgtatggaaagacaggtattttacgtacgcgtcaaatgaacgcgattgcgcagcagcaactagcagagttaggattacatgtaaaaggcgctatgttggcaggagagttatcggttggacaacagcaaattatcgaaattgcgaaagcactaatgacaaacgcgagcgttattattatggatgaacctacagctgcattaacagatcgtgaaattgaaacgttgtttaccgtcattaataaattacgtaaagaaggcgtttcgttcgtttatatctcacaccgaatggaagaaatcttttcaatatgcgatgccattacgattttacgtgatggggaatacgtcggaaagagatccattccggaaacatcgtttgatgaggtagtgagtatgatggtggggcgcagcattggtgaacgttacccagaacgaaatagtcaaattggcgatgttatttttgaaatgcgtaatggaacgaaaaaagggaagtttgaaaatgtttcgtttcaagttagaaaaggtgaaatccttggtgtagctggcttgatgggagctggccgcacagatattatgaaagcaatatttggatacgaacctttagattctggccaaatttttataaatgggcaagaagtaaagattgatagtccgatagatgcgattagacaaagaatcgcattcattacagaggatagaaagtctgaaggattagtgctagatttctcaattcgagaaaatttagccttaccgaatttagaaagtctttcaaagggaagcgtcttaagtaacgaactagaacaacagtttacagcggacatgatgaaacttcttaatgtgaaagcatctagtggagagcaagctgtgaaatctctttctggtggaaatcagcaaaaggttgttattgcaaaatggttaggtattcacccgcaattactcattttagatgagccaacaaggggtgttgatgttggagcgaaaaaagaaatttactctattatgaataagcttaccgaagaaggagatgccgttattatggtatcatctgaacttccagaagttttagggatgagtgatcgcgttcttgttattcatgaaggaaaagtcggcggcattttagagaaagatgaggcatcgcaagagtctattatggcactagctacagggggagagtaa

SEQ ID NO: 138803 - protein, 494 aa, Bacillus anthracis
MRIEMKNISKAFNGNPVLKNAQFMIETGEVHALMGENGAGKSTLMKILTGVYKRDGGTITIDGQERTFKNAKEAEEYGIAFIHQELNILPNLTVAENMFLGKELMYGKTGILRTRQMNAIAQQQLAELGLHVKGAMLAGELSVGQQQIIEIAKALMTNASVIIMDEPTAALTDREIETLFTVINKLRKEGVSFVYISHRMEEIFSICDAITILRDGEYVGKRSIPETSFDEVVSMMVGRSIGERYPERNSQIGDVIFEMRNGTKKGKFENVSFQVRKGEILGVAGLMGAGRTDIMKAIFGYEPLDSGQIFINGQEVKIDSPIDAIRQRIAFITEDRKSEGLVLDFSIRENLALPNLESLSKGSVLSNELEQQFTADMMKLLNVKASSGEQAVKSLSGGNQQKVVIAKWLGIHPQLLILDEPTRGVDVGAKKEIYSIMNKLTEEGDAVIMVSSELPEVLGMSDRVLVIHEGKVGGILEKDEASQESIMALATGGE

SEQ ID NO: 138804 - DNA, 1491 bp, Bacillus cereus
  CDS (1)..(1491): transl_table=11
atgggaatgcatattgaaatgaaaaacatttcaaaggcgttcaatggcaatcctgttttgaagaatgcacagtttatgattgaaacaggagaagtccatgcattgatgggggaaaatggagcgggtaaatcaacgctcatgaagattttaacaggtgtatacaaaaaagatggtgggacaatcaagattgatgggcaagagcgcacctttaaaaatgcgaaagaagctgaagagtacggcatcgcatttatacatcaagaactaaacatattgccgaatttaacagtagctgaaaatatgtttctcggtaaagagttaatgtatgggaaaacaggtattttacgcactcgacaaatgaacgcgattgcgcagcagcaactagcagagctagggctgcatgtaagaggcgctatgttagcagaggaattatcggttggacaacagcaaattatcgaaattgcgaaagcattaatgacaaacgcgagcgttattattatggatgaacctactgcggcactgacggatcgtgaaatcgaaacgctctttacagtaatcaataagttacgtaaagaaggtgtttcattcgtgtacatttcgcatcgtatggaagagattttctcaatatgtgatgctattacgattttgcgtgatggagaatacgtgggaaagagattaattccagaaacatcatttgatgaagtagtgagtatgatggtggggcgcagcattggtgaacgttacccagagcgaaatagtcaaattggtgatgtcatttttgaaatgcgtaatggaacgaagaaagggaaatttgaaaatgtttcgtttcaagtgaggaaaggtgaaatccttggtgtagctggtttgatgggggctggtcgcactgatattatgaaagcgatatttggttatgaacctttagactctggacaaatttttataaatggacaagaagtaaagattgatagtccaatagatgcaattagacaaagaattgctttcattacagaagatagaaagtctgaaggattagtgttagatttttcaattcgagaaaatttagctttaccgaatttagaaaatctttcaaagggaagtgttctaagcaatgagctagaacaacagtttacagaggatatgatgaagcttcttaatgtgaaagcatctagcggggagcaggcagtgaaatctctttctggtggaaatcagcaaaagattgtaatcgcaaaatggctaggcattcatccacaattactcattttagatgagccaacaagaggtgttgatgttggagcgaaaaaagaaatttactctattatgaataagcttacagagcaaggcgatgccgttattatggtatcatctgagcttccggaagttttagggatgagtgatcgagttcttgttattcatgaaggaaaagtcggcggaattttagggaaagatgaggcatcacaagagtctattatggcactagctacagggggagagtaa

SEQ ID NO: 138805 - protein, 496 aa, Bacillus cereus
MGMHIEMKNISKAFNGNPVLKNAQFMIETGEVHALMGENGAGKSTLMKILTGVYKKDGGTIKIDGQERTFKNAKEAEEYGIAFIHQELNILPNLTVAENMFLGKELMYGKTGILRTRQMNAIAQQQLAELGLHVRGAMLAEELSVGQQQIIEIAKALMTNASVIIMDEPTAALTDREIETLFTVINKLRKEGVSFVYISHRMEEIFSICDAITILRDGEYVGKRLIPETSFDEVVSMMVGRSIGERYPERNSQIGDVIFEMRNGTKKGKFENVSFQVRKGEILGVAGLMGAGRTDIMKAIFGYEPLDSGQIFINGQEVKIDSPIDAIRQRIAFITEDRKSEGLVLDFSIRENLALPNLENLSKGSVLSNELEQQFTEDMMKLLNVKASSGEQAVKSLSGGNQQKIVIAKWLGIHPQLLILDEPTRGVDVGAKKEIYSIMNKLTEQGDAVIMVSSELPEVLGMSDRVLVIHEGKVGGILGKDEASQESIMALATGGE

SEQ ID NO: 138806 - DNA, 1485 bp, Bacillus cereus
  CDS (1)..(1485): transl_table=11
atgcgtattgaaatgaaaaatatttcaaaggcgttcaatggcaatcctgttttgaaaaatgcacagtttatgattgaaacaggagaagtccatgcattgatgggggaaaatggagcgggtaaatcaacgctcatgaagattttaacaggtgtatacaaaagagatggtggaacgatcacgattgatggacaagaacgaacttttaaaaatgcgaaagaagctgaagagtacggtattgcatttatacatcaagaattgaacatattaccgaatttaacagtagctgaaaatatgtttctcggtaaagagttaatgtatggaaagacaggtattttacgtacgcgtcaaatgaacgcgattgcgcagcagcaactagcggagttaggattacatgtaaaaggcgctatgttggcaggagagttatcggttggacaacagcaaattatcgaaattgcaaaagccctaatgacaaacgcgagcgttattattatggatgaacctacagctgcattaacagatcgtgaaattgaaacgttgtttaccgtcattaataaattacgtaaagaaggcgtttcgttcgtttatatctcacaccgaatggaagaaatcttttcaatatgcgatgccattacgattttacgtgatggggaatacgtcggaaagagatccattccagaaacatcgtttgatgaggtagtgagtatgatggtggggcgcagcattggtgaacgttacccagaacgaaatagtcaaattagcgatgttatttttgaaatgcgtaatggaacgaaaaaagggaagtttgaaaatgtttcgtttcaagtgagaaaaggtgaaatccttggtgtagctggcttgatgggagctggccgcacagatattatgaaatcgatatttggatacgaacctttagattctggccaaatttttataaatgggcaagaagtaaagattgatagtccgatagatgcgattagacaaagaatagcattcattacagaggatagaaaatctgaagggttagtgctagatttctcaattcgagaaaatttagctttaccgaatttagaaagtctttcaaagggaagcgtcttaagtaacgaactagaacaacagtttacagcggacatgatgaaacttcttaatgtgaaagcatctagtggagagcaagctgtgaaatctctttctggtggaaatcagcaaaaggttgttattgccaaatggttaggtatccacccacagttactcattttagatgagccaacaaggggtgttgatgttggagcgaaaaaagaaatttactctattatgaataagcttaccgaagaaggagatgccgttattatggtatcatctgagcttccagaagttttaggaatgagtgatcgcgttcttgttattcatgaaggaaaagtcggcggcattttagagaaagatgaggcatcacaagagtctattatggcactagctacagggggagagtaa

SEQ ID NO: 138807 - protein, 494 aa, Bacillus cereus
MRIEMKNISKAFNGNPVLKNAQFMIETGEVHALMGENGAGKSTLMKILTGVYKRDGGTITIDGQERTFKNAKEAEEYGIAFIHQELNILPNLTVAENMFLGKELMYGKTGILRTRQMNAIAQQQLAELGLHVKGAMLAGELSVGQQQIIEIAKALMTNASVIIMDEPTAALTDREIETLFTVINKLRKEGVSFVYISHRMEEIFSICDAITILRDGEYVGKRSIPETSFDEVVSMMVGRSIGERYPERNSQISDVIFEMRNGTKKGKFENVSFQVRKGEILGVAGLMGAGRTDIMKSIFGYEPLDSGQIFINGQEVKIDSPIDAIRQRIAFITEDRKSEGLVLDFSIRENLALPNLESLSKGSVLSNELEQQFTADMMKLLNVKASSGEQAVKSLSGGNQQKVVIAKWLGIHPQLLILDEPTRGVDVGAKKEIYSIMNKLTEEGDAVIMVSSELPEVLGMSDRVLVIHEGKVGGILEKDEASQESIMALATGGE

SEQ ID NO: 138808 - DNA, 1482 bp, Bacillus licheniformis
  CDS (1)..(1482): transl_table=11
atgcatattaaaatgaaggacatttttaaagcctttggccaaaaccaggtgctgtccggcgtttccttcgagcttcaagaaggtgaagtccacgctttaatgggagaaaacggcgccggaaagtcgacactcatgaatctgttgactggacttcacaagctggacagcggaacgatcgagatcgacggaaaagaaacgtatttttcagatccaaaggaagccgaacagaacggaatcgcctttatccatcaggagctgaacatttggcctgaaatgaccgttttggaaaatctgtttatcggcagagagctttcttccaaacttggatttttaaacaacaagaaaatgaaagcgctagcaaaagagcagcttgaaaggctcggtgtctcaatttctcttgaaaaagaagccggagactgttccgtcggccagcagcaaatgatcgaaatcgcaaaagcccttatgacagacgcgaaagtgatcatcatggatgaaccgacggcagcgttgacagaaagagaaattgaaaaactgttcggcgtcattagagcattaaagaaaaacggcgtctccatcgtctatatatcccaccgcatggaagaaatcttcacgatttgcgacaggatcacggtgatgcgcgatggaaaaacggtggacacgaaacggattcccgacaccgactttcatgaagtggtgaaaaagatggtcggacgggagctgaccgaacgctatcctgaaagacagccaaatccgggacgcgtcgtcctcgaagtcaagcaggcatccaaaaaaggagtcttccaaaatatcagcttttccgtccgctccggcgaaatcgtcgggatttcaggactgatgggtgccgggcgcaccgagctgatgagagcggttttcgggctcgatccgcttgactcgggagacattttcatcgaaggcaaaaaagcggcgctcaaaaaaccgagcgatgccgttcaaaagggaatcggctttattaccgagaaccgcaaggatgaaggacttgtgctcgacacgtccatcagagaaaatatcgcccttccgaatctcgccagcttttcgccgaaaggatggattgacaaaaaaagcgagcaggaatttgtcgatcttctgatcaagcggctgacgatcaaaacggaatcgccggaaacccacgcgcgaaacctttcaggaggaaaccagcaaaaagtggtcattgccaaatggatcggcatcggccctaaagtgctgattttggatgagccgaccagaggcgtcgatgtcggcgcgaaaagggagatttatcagctgatgaacgagctgacagaccgcggcgtcgcgatcgtcatggtctcttcagagctccccgagattctcgggatgagcgaccgcgtccttgtaatccatgaaggaacgctaagcggagagctatcaagaaatgatgccacgcaagaacgaattatgacactcgctacaggaggacggtaa

SEQ ID NO: 138809 - protein, 493 aa, Bacillus licheniformis
MHIKMKDIFKAFGQNQVLSGVSFELQEGEVHALMGENGAGKSTLMNLLTGLHKLDSGTIEIDGKETYFSDPKEAEQNGIAFIHQELNIWPEMTVLENLFIGRELSSKLGFLNNKKMKALAKEQLERLGVSISLEKEAGDCSVGQQQMIEIAKALMTDAKVIIMDEPTAALTEREIEKLFGVIRALKKNGVSIVYISHRMEEIFTICDRITVMRDGKTVDTKRIPDTDFHEVVKKMVGRELTERYPERQPNPGRVVLEVKQASKKGVFQNISFSVRSGEIVGISGLMGAGRTELMRAVFGLDPLDSGDIFIEGKKAALKKPSDAVQKGIGFITENRKDEGLVLDTSIRENIALPNLASFSPKGWIDKKSEQEFVDLLIKRLTIKTESPETHARNLSGGNQQKVVIAKWIGIGPKVLILDEPTRGVDVGAKREIYQLMNELTDRGVAIVMVSSELPEILGMSDRVLVIHEGTLSGELSRNDATQERIMTLATGGR

SEQ ID NO: 138810 - DNA, 1482 bp, Bacillus subtilis
  CDS (1)..(1482): transl_table=11
atgcagattgaaatgaaagacattcataaaacattcggaaaaaatcaggtgctgtcaggcgtttcctttcagctcatgcctggcgaggttcacgcattaatgggagaaaacggcgccggcaagtccacgcttatgaacattttgacaggcctgcacaaagcagataaaggtcaaatcagcataaacggaaacgaaacgtatttttccaatccgaaagaagcggaacagcatggaatagcctttatccatcaggaattgaatatctggccggaaatgaccgttcttgagaatctatttatcggtaaagagatatcctccaagctgggcgttttacaaacaagaaaaatgaaagcgctagcaaaagagcaatttgacaaactttccgtctctctttctcttgatcaagaagccggcgaatgttccgtcggacagcagcaaatgatcgaaattgcaaaagcgcttatgacaaatgccgaggtaatcattatggatgaaccgaccgcagcgttgactgaacgtgaaatcagcaagctctttgaggtcattacagcgttaaaaaagaacggcgtctccattgtctatatttcgcatcgcatggaagaaatttttgcgatttgcgacagaattaccatcatgcgtgacggaaaaacggtagatacaacaaacatctcagaaactgattttgatgaagtcgtcaaaaaaatggtcggacgggagctgactgaacgatatccaaaacgcactccttctctcggtgacaaagtattcgaggtgaaaaatgcttccgtaaaagggagttttgaggacgtcagcttttatgtgcgttccggtgagatcgtcggtgtttcaggattaatgggagccggccggacagaaatgatgagagcgctgttcggcgttgacaggctggacacgggtgagatatggatcgctgggaaaaaaacggctattaagaacccgcaggaagccgtgaaaaaaggtctcggctttattacagagaatcgcaaggatgaagggctcctgctcgacacctcgatccgcgaaaatattgccctgcccaatctgtccagcttctcaccaaagggtctcattgatcataagcgggaggctgaatttgtcgatctgttaatcaagcgcctcactatcaaaacagcatcaccggaaacgcacgcacgccatttatcaggaggaaaccagcaaaaagtggtgatagccaagtggatcggcatcggaccgaaagtgcttatcttggatgagccaaccagaggtgtggatgttggcgccaaacgagagatttatacgctgatgaatgagctgaccgaacgcggtgtcgctatcatcatggtgtcatcagagcttcctgaaattctgggaatgagcgatcggattatcgttgtccatgaaggcagaatcagcggcgaaatccatgcgcgagaagcaacacaagaacgaattatgacacttgccacgggagggcggtaa

SEQ ID NO: 138811 - protein, 493 aa, Bacillus subtilis
MQIEMKDIHKTFGKNQVLSGVSFQLMPGEVHALMGENGAGKSTLMNILTGLHKADKGQISINGNETYFSNPKEAEQHGIAFIHQELNIWPEMTVLENLFIGKEISSKLGVLQTRKMKALAKEQFDKLSVSLSLDQEAGECSVGQQQMIEIAKALMTNAEVIIMDEPTAALTEREISKLFEVITALKKNGVSIVYISHRMEEIFAICDRITIMRDGKTVDTTNISETDFDEVVKKMVGRELTERYPKRTPSLGDKVFEVKNASVKGSFEDVSFYVRSGEIVGVSGLMGAGRTEMMRALFGVDRLDTGEIWIAGKKTAIKNPQEAVKKGLGFITENRKDEGLLLDTSIRENIALPNLSSFSPKGLIDHKREAEFVDLLIKRLTIKTASPETHARHLSGGNQQKVVIAKWIGIGPKVLILDEPTRGVDVGAKREIYTLMNELTERGVAIIMVSSELPEILGMSDRIIVVHEGRISGEIHAREATQERIMTLATGGR

SEQ ID NO: 138812 - DNA, 1509 bp, Chromobacterium violaceum
  CDS (1)..(1509): transl_table=11
atgcaagtgaccatgcgcggcatcagcaaggctttcgggccggtcaaggtgctggagaacgtggagttcacgctgcgcggcggcgagatccacgcgctgatgggcgagaacggcgccggcaagtccacgctgatgaagatactcagcggcgtgcaccgcgccgacgccggcgagatcctgctggacggccgcaaggccgaactgaggagcaccgaggcggcggaagcggccggcatcgccatcatccaccaggaattgaacctgattccgcagctgtcggtgatggagaacctgtttctcggccgcgagccgtcccgcttcggcatcatcgactacgcggcgatgcggcgcgaggcgcgggcgcagctggaggcgctgggcgccggcggcatcgatccggacgccgaggccggcagcctgtccatcggccagcagcagatggtggagatcgccaaggcgctggcgctgaacgcccgcgtgctgatcatggacgagccgacggcggcgctcaccgagcgcgagatcgaccggctgttcgagctgatggcccagctgagggaaaacggcgcggccatcgtctacgtctcgcaccggatggaagagatcttccgcgtctgcgaccgcatcagcgtgctgcgcgatggctgcttcgtcggcgagcgcgaaatcgcccgcaccgatttcgacgaagtggtgcggatgatggtggggcgcgagatcggcgaccgctatccgaagcgcgaggccgcgccgggcgaggtgaggctgaaggtggagaacctggccgacgagaacatgatcgccggcatcggcttcgaggtgcgcgccggcgaggtgctgggcatcgccgggctgatgggctcgggacgcagcgacatcctgaagacgctgttcggcgccaagcgccgcaccgccggccgcgtcgagctggacggtaaggaattgaaagtggccgcgccgggcgacgccatcgccgccggcctgggcttcgtgcccgaagaccgcaaaagcaaggggctggtgctgggcatgtcgctgcgcgaaaacgcgaccctggtgcatctggaccagtacgcccggctgggcgtggtcagcgccgccgaggaaaagcgggcggtggacggcttgatcgctcagctgcgcatccgcgcccgcgacgccgagctcgacgtcaagtcgctgtccggcggcaaccagcagaaagtggtgttcgccaaatggctggcgaatccgcccaaggtgctgctgctggacgagccgacgcgcggcgtcgacgtcggcggcaaggccgagatctaccacatcgtcaaccagctggccgccgccggcaccgccatcgtgatggtgtcgtccgagctgccggaagtgctggcgctgagcaaccgcatcctggtgctgcacgaaggccgccaggccggcatcttcgacgccgccggctgcagccaggaaaccctgatggccgccgcgaccggcggcgccgttcactccgaaaccaggaagcaagcatga

SEQ ID NO: 138813 - protein, 502 aa, Chromobacterium violaceum
MQVTMRGISKAFGPVKVLENVEFTLRGGEIHALMGENGAGKSTLMKILSGVHRADAGEILLDGRKAELRSTEAAEAAGIAIIHQELNLIPQLSVMENLFLGREPSRFGIIDYAAMRREARAQLEALGAGGIDPDAEAGSLSIGQQQMVEIAKALALNARVLIMDEPTAALTEREIDRLFELMAQLRENGAAIVYVSHRMEEIFRVCDRISVLRDGCFVGEREIARTDFDEVVRMMVGREIGDRYPKREAAPGEVRLKVENLADENMIAGIGFEVRAGEVLGIAGLMGSGRSDILKTLFGAKRRTAGRVELDGKELKVAAPGDAIAAGLGFVPEDRKSKGLVLGMSLRENATLVHLDQYARLGVVSAAEEKRAVDGLIAQLRIRARDAELDVKSLSGGNQQKVVFAKWLANPPKVLLLDEPTRGVDVGGKAEIYHIVNQLAAAGTAIVMVSSELPEVLALSNRILVLHEGRQAGIFDAAGCSQETLMAAATGGAVHSETRKQA

SEQ ID NO: 138814 - DNA, 1506 bp, Clostridium perfringens
  CDS (1)..(1506): transl_table=11
atgggtgaaagaacaccaatgctaaaaatggtaggtgtatcaaaatcctttccaggagtcaaagctttagataatgttagtttaatggcttatggtggagaagttactgctttaatgggagaaaatggagcagggaaatcaactttaatgaaaatactaagtggagtatataaaaaagatgaaggtaagatattcattgaaggaagggaagtagaagtaaagggaattaaatcagcagaagaagctggtataacaataattcaccaagaacttagtgttttaaataacttaactgtttcagaaaatatatttttaggtaatgaaaaacatagtaaatttacaggaagaataaataaaaaattattagatgaaagaagtaaaatgttcttagaacaaattggttgtgatatagatccaaatagattagttagtactcttaatgtaggtgaaaagcaaatgatagaaatagcaaaagctttaactaagaatgctagaataattattatggacgaacctactacagccttaactgatgtagagactgaaaacctttttaaagtaatagagaatttaagaaaaaagggaatagcaataatatacatatcacatagaatggaagaaatatttaaaatatgtcatagagtagaagtattaagagatggtaaatatgcaggaagtgcagaaataaaagacatagataatgataagcttatagcaatgatggttggaagaaccatagaggatcaatttccatacagagatgttaaaaaaggagatttagctttagaagttaaaaatcttagctgtaaggaaggagttaaaggagcttcatttactcttagaaagggagaaatattaggaattgcaggtcttatgggatcaggcagaacagagcttgcaaaaacaatatttggagaatataaaaaaacaagtggtgaaatttctttaaatggaagtcctattaatataaattgcataagtgatgccataaataatggtatatgttatctttcagaggatagaaaaaaagagggatgtattttaggaatgtctgttggagaaaatatgaccttatgtaacttaaagaaatatgaaaataagtttaaatctcttgataaaaaagaagaagcaaaggatatagagtactatattaagaagataaacataaaaactccaaataaggaacaatttattaagaatttaagtggaggtaatcaacagaaggttatacttgctaaatggcttatgctatctccagaagtattaataattgacgagccaactagaggaatagacgtaggtgcaaagaaagaaatttatgaacttttaaatgaacttaaagctagtggaaaagccataataatgatttcttcagacttaccagaggttttaggaattagtgatagaattatggttatgagtgaaggaagaatctctggggaattaaatagagatgaagcaaaccaagaaagtataatgaaattagccgttggaataaacaattag

SEQ ID NO: 138815 - protein, 501 aa, Clostridium perfringens
MGERTPMLKMVGVSKSFPGVKALDNVSLMAYGGEVTALMGENGAGKSTLMKILSGVYKKDEGKIFIEGREVEVKGIKSAEEAGITIIHQELSVLNNLTVSENIFLGNEKHSKFTGRINKKLLDERSKMFLEQIGCDIDPNRLVSTLNVGEKQMIEIAKALTKNARIIIMDEPTTALTDVETENLFKVIENLRKKGIAIIYISHRMEEIFKICHRVEVLRDGKYAGSAEIKDIDNDKLIAMMVGRTIEDQFPYRDVKKGDLALEVKNLSCKEGVKGASFTLRKGEILGIAGLMGSGRTELAKTIFGEYKKTSGEISLNGSPININCISDAINNGICYLSEDRKKEGCILGMSVGENMTLCNLKKYENKFKSLDKKEEAKDIEYYIKKINIKTPNKEQFIKNLSGGNQQKVILAKWLMLSPEVLIIDEPTRGIDVGAKKEIYELLNELKASGKAIIMISSDLPEVLGISDRIMVMSEGRISGELNRDEANQESIMKLAVGINN

SEQ ID NO: 138816 - DNA, 1506 bp, Clostridium perfringens
  CDS (1)..(1506): transl_table=11
atgggtgaaagaacaccaatgctaaaaatggtaggtgtatcaaaatcctttccaggagtcaaagctttagataatgttagcttaatggcttatggtggagaagttactgctttaatgggagaaaatggagcagggaaatcaactttaatgaaaatactaagtggagtatataaaaaagatgaaggtaagatattcattgaaggaagggaagtagaagtaaagggaattaaatcagcagaagaagctggtataacaataattcaccaagaacttagtgttttaaataacttaactatttcagaaaatatatttttaggtaatgaaaaacatagtaaatttacaggaagaataaataaaaaattattagatgaaagaagcaaaatgttcttagaacaaattggttgtgatatagatccaaatagattagttagtactcttaatgtaggtgaaaagcaaatgatagaaatagcaaaagccttaactaagaatgcgagaataattattatggacgagcctactacagccttaactgatgtagagactgaaaacctttttaaagtaatagagaatttaagaaaaaagggaatagcaataatatacatatcacatagaatggaagaaatatttaaaatatgtcatagagtagaagtattaagagatggtaaatatgcaggaagtgcagaaataaaagacatagataatgataagcttatagcaatgatggttggaagaaccatagaggatcaatttccatacagagatgttaaaaaaggagatttagctttagaagttaaaaatcttagctgtaaggaaggagttaaaggagcttcatttactctgagaaagggagaaatattaggaattgcaggtcttatgggatcaggcagaacagagcttgcaaaaacaatatttggagaatataaaagaacaagtggtgaaatttctttaaatggaagtcctattaatataaattgcataagtgacgcaataaataatggtatatgttatctttcagaggatagaaaaaaagaaggctgtattttaggaatgtctgttggagaaaatatgaccttatgtaacttaaagaaatatgagaataagtttaaatctcttgataaaaaagaagaagcaaaggatatagagtactatattaagaagataaacataaaaactccaaataaggagcagtttattaagaatttaagtggaggtaatcaacagaaggttatacttgctaaatggcttatgctatctccagaagtattaataattgacgagccaactagaggaatagacgtaggtgcaaagaaagaaatttatgaacttttaaatgaacttaaagctagtggaaaagccataataatgatttcttcagacttaccagaggttttaggaattagtgatagaattatggttatgagtgaaggaagaatctctggagaattaaatagagatgaagcaaatcaagaaagtataatgaaattagccgttggaataaacaattag

SEQ ID NO: 138817 - protein, 501 aa, Clostridium perfringens
MGERTPMLKMVGVSKSFPGVKALDNVSLMAYGGEVTALMGENGAGKSTLMKILSGVYKKDEGKIFIEGREVEVKGIKSAEEAGITIIHQELSVLNNLTISENIFLGNEKHSKFTGRINKKLLDERSKMFLEQIGCDIDPNRLVSTLNVGEKQMIEIAKALTKNARIIIMDEPTTALTDVETENLFKVIENLRKKGIAIIYISHRMEEIFKICHRVEVLRDGKYAGSAEIKDIDNDKLIAMMVGRTIEDQFPYRDVKKGDLALEVKNLSCKEGVKGASFTLRKGEILGIAGLMGSGRTELAKTIFGEYKRTSGEISLNGSPININCISDAINNGICYLSEDRKKEGCILGMSVGENMTLCNLKKYENKFKSLDKKEEAKDIEYYIKKINIKTPNKEQFIKNLSGGNQQKVILAKWLMLSPEVLIIDEPTRGIDVGAKKEIYELLNELKASGKAIIMISSDLPEVLGISDRIMVMSEGRISGELNRDEANQESIMKLAVGINN

SEQ ID NO: 138818 - DNA, 1518 bp, Clostridium tetani
  CDS (1)..(1518): transl_table=11
atgaaaaaagaaaatttagaagagaagccctttttacaaatgaaaggaatttccaagtttttttctggtgtacaagctctagacaatgtagaacttaaagtatatagaggagaagtactagctctattaggagagaatggagcaggtaaatctacattgatgaaaatattaagcggtgtatatacaaaagatgaaggagatatttttatagatgaaaagaaagtagatataaaggggataaaagaagcagaagaattgggaatatctataatacatcaagaattaagtctgctttcaaatttaaaaatatatgaaaatatatttttaggtagcgaaaaatataaaggaatttttaataaacttgataaggattacatgaggtcagagagtgaaaaactgctatcaactataggatttacagcagatgtagatattttagctaaggatataaatataggtgaaatgcaaatgatagaaattattaaggctatttctaagaaatctaaattgataataatggatgaacctactactgctttaactgaagtagaaacagaaaggttatttaaagttataaataaattaaagtcagaaggaatttgtataatatatatatcccatagattagatgaaatctttcaaatatgtgatagagtaaacgtattaagagatggtaaatatgtaggagaggttaaagtaaaagatacaacaaaagatgatttaataactatgatggttggaagaaagctagaagaacaatttccatataaaaaggttaaaaagggagatgcattattagcagtaaataatttatcctacaaaaataaggtgaaaaatatttcttttgaagtaagggcaggagaaatattaggattggcgggacttatgggatctggaagaacagaattagctaagactatatttggagagtataaaaaaagtagtggtgatatatatataaatgataaaaaaattaatataacttcccctaaagaagctatagagaatggcatagcttatttatcagaagatagaaaaaaagaagggcttattttaaatatgtctgtaggtaataatataagtctttgtaacttaaagaaatatgaaaatagtataaaaaagataaataaagaaaaagaatcaaaagaaatagatgattacataaaaaaattatccgtaaaaacaccttcggctaatcagataattaaaaacttaagtggaggtaatcaacaaaaggctattatagcaaaatggattatgatttccccaaatattttaataatagacgaacctacaagaggaatagatgtaggtgctaaaaaagaaatatatgaagttttaaatgaaatcaaaagtttaggtaaagccataattatgatatcttctgatatgcctgaagtattgggaataagtgatagaatattagttatgagtgaaggaaatttgtcaggagaattatcaagagaagaagctacacaggaaaagattatgaaatatgcagtagctttttctaattaa

SEQ ID NO: 138819 - protein, 505 aa, Clostridium tetani
MKKENLEEKPFLQMKGISKFFSGVQALDNVELKVYRGEVLALLGENGAGKSTLMKILSGVYTKDEGDIFIDEKKVDIKGIKEAEELGISIIHQELSLLSNLKIYENIFLGSEKYKGIFNKLDKDYMRSESEKLLSTIGFTADVDILAKDINIGEMQMIEIIKAISKKSKLIIMDEPTTALTEVETERLFKVINKLKSEGICIIYISHRLDEIFQICDRVNVLRDGKYVGEVKVKDTTKDDLITMMVGRKLEEQFPYKKVKKGDALLAVNNLSYKNKVKNISFEVRAGEILGLAGLMGSGRTELAKTIFGEYKKSSGDIYINDKKINITSPKEAIENGIAYLSEDRKKEGLILNMSVGNNISLCNLKKYENSIKKINKEKESKEIDDYIKKLSVKTPSANQIIKNLSGGNQQKAIIAKWIMISPNILIIDEPTRGIDVGAKKEIYEVLNEIKSLGKAIIMISSDMPEVLGISDRILVMSEGNLSGELSREEATQEKIMKYAVAFSN

SEQ ID NO: 138820 - DNA, 1482 bp, Haemophilus influenzae
  CDS (1)..(1482): transl_table=11
atggaaactttactcaaaattagtggtgttgataagtcatttccaggtgtgaaagccttgaataatgcctgtttatctgtttacgctggacgcgtaatggcattgatgggggaaaatggggcgggtaaatcgactttgatgaaggtgcttactggtatttattctaaagatgcaggcacaattgagtatcttaatcgatcagttaatttcaatggacctaaagcctcacaggaagctggcattagtattattcaccaagaactgaatttggtcggtaatctcacgattgcagaaaacattttccttggtcgtgaatttaaaacctcgtggggagcgattaactggcagaaaatgcaccaagaagcagacaagctacttgcgcgtttgggggtaactcacagcagtaaacagctttgcgctgaactttctattggtgagcaacaaatggtggagatagccaaagccttaagttttgaatccaaagttatcattatggatgaaccaaccgatgcgctcacagatacggagaccgaagccctattcaatgtgattcgtgaactcaaagcagaaaatcgtggcattgtttatatctctcatcgtttaaaagaaattttccaaatttgtgatgatgtgacggttttacgcgatggtcaatttatcggtgaacgcattgtggcagaaattacagaagatgatttaattgaaatgatggttggtcgtcgtcttgatgaacaatatccgcatttatcacaagaaaaaggcgaatgtgtattggatgtgaaaaatgtgagcggaagcggtattgatgatgtttccttcaaattgcatgccggtgaaattgttggtgtctcgggcttaatgggtgcgggtagaacggaactcggcaagctactttacggtgctttgccaaaaacggcgggaaaagtgcggttaaaaaatcaagagattgagaatctcagtccgcaagatggtttggataatggtattgtatatatttctgaagatcgtaaaggtgatggcttggttttaggaatgtcagtaaaagaaaatatgtcgctcacatcgctcgatcatttttcacaaaaaggcagtattcgtcatcaagcggaaaaaatgacagtagatgactttattctgatgtttaacattaaaacacctaatcgtgatcaacaagtaggtttgctatctggtggaaatcaacaaaaagtggcaattgctcgtggattaatgactcgcccaaatgtgttgattttagatgaaccaactcgtggcgtagatgttggcgcgaagaaagaaatttatcagttgattaacgaatttaagaaagagggcttgagtattttaatgatctcatctgatatgccagaagtgcttggtatgagcgatagagtgttggtaatgcgtgaaggtaaaattagtgcagaattttctcgcaaagacgcaactcaagaaaaattattagcagcagctattggtaaataa

SEQ ID NO: 138821 - protein, 493 aa, Haemophilus influenzae
METLLKISGVDKSFPGVKALNNACLSVYAGRVMALMGENGAGKSTLMKVLTGIYSKDAGTIEYLNRSVNFNGPKASQEAGISIIHQELNLVGNLTIAENIFLGREFKTSWGAINWQKMHQEADKLLARLGVTHSSKQLCAELSIGEQQMVEIAKALSFESKVIIMDEPTDALTDTETEALFNVIRELKAENRGIVYISHRLKEIFQICDDVTVLRDGQFIGERIVAEITEDDLIEMMVGRRLDEQYPHLSQEKGECVLDVKNVSGSGIDDVSFKLHAGEIVGVSGLMGAGRTELGKLLYGALPKTAGKVRLKNQEIENLSPQDGLDNGIVYISEDRKGDGLVLGMSVKENMSLTSLDHFSQKGSIRHQAEKMTVDDFILMFNIKTPNRDQQVGLLSGGNQQKVAIARGLMTRPNVLILDEPTRGVDVGAKKEIYQLINEFKKEGLSILMISSDMPEVLGMSDRVLVMREGKISAEFSRKDATQEKLLAAAIGK

SEQ ID NO: 138822 - DNA, 1515 bp, Photobacterium profundum
  CDS (1)..(1515): transl_table=11
atgaaccagccaattttagaacttaaaggcattgaaaaagcattccctggtgtaaaagcgctagataatgcttgtttgaatgtttacccaggcaaggtaatggctttaatgggtgaaaatggtgccggtaagtcgacgcttatgaagtccttaactggaatctatgcgatggatgcaggtgaaattcgctaccaagggaaagccgttaacttcgatggccctcgccactctcaagaagctggcatcagtattattcaccaagaactgaacctgatccctgaattaaccattgctgagaatatctttcttggtcgtgaaaaaaccaatgcatttggtggcattaaatgggcagaaatgttccgtgaagccgatgatctacttaagcgcttaaacgtaaaacaccactcccgccaattattgggagagttaagccttggtgagcagcaaatggttgagattgcgaaagccttatctttcaaatctcaagtcatcattatggatgagccaaccgatgcactgacagatactgaaactgagtcgttgtttaaagtgattaatgagttgcgtgctgaaggttgcggtattgtgtatatctcgcaccgcctaaaagaaatcttcgaaatctgcgacgacattaccgtattacgagacggaaaattcattggtgaacgtgctgtagccgataccgatgaagacggcttgatcgaaatgatggtaggccgtcgcttagatgagcaataccctcgtattgatgtgcgccacggtgaaacctgccttgaagtaacaaacctgactggtgcaggtgtcaataatgtcagcttcaaactggatcgcggtgagatcttaggtgtatcaggcttaatgggtgcgggtcgtagcgaattaatgaaagtgatttacggtgccctaaagcgtgaatcaggcgatatcaaacttaacggcaaaaccattaacccagtaaccccacaagatggcttagcgaacgggattgcgtatatatcggaagaccgcaaaggtgatgggctggtacttgggttatcagtgaaagagaacatgtcgctatgttcactagaacagctttctaaaggtgttcagctaaaacattacgaagaagtgaccgcggtggaagatttcatccgcttattcaacatcaaaaccccaacgcgtgatcaaatcattggcaacctctctggcggtaaccaacagaaagtcgctatcgccaaagggttaatgacccgtcccaaagtcctgattttggatgagccaacccgtggtgtcgatgtaggggcaaagaaagagatttatcaactcatcaaccaatttaaagcggaaggcatgagcatcatcttagtttcttctgaaatgccagaagtactgggaatgagtgaccgcatcatagtgatgcacgaaggccgtattagcggtgaatttatggcagccgatgccaatcaagaaaaattactggcctgtgcggtaggtaaaaccaccgagcagaacaacgaggtagcagcatga

SEQ ID NO: 138823 - protein, 504 aa, Photobacterium profundum
MNQPILELKGIEKAFPGVKALDNACLNVYPGKVMALMGENGAGKSTLMKSLTGIYAMDAGEIRYQGKAVNFDGPRHSQEAGISIIHQELNLIPELTIAENIFLGREKTNAFGGIKWAEMFREADDLLKRLNVKHHSRQLLGELSLGEQQMVEIAKALSFKSQVIIMDEPTDALTDTETESLFKVINELRAEGCGIVYISHRLKEIFEICDDITVLRDGKFIGERAVADTDEDGLIEMMVGRRLDEQYPRIDVRHGETCLEVTNLTGAGVNNVSFKLDRGEILGVSGLMGAGRSELMKVIYGALKRESGDIKLNGKTINPVTPQDGLANGIAYISEDRKGDGLVLGLSVKENMSLCSLEQLSKGVQLKHYEEVTAVEDFIRLFNIKTPTRDQIIGNLSGGNQQKVAIAKGLMTRPKVLILDEPTRGVDVGAKKEIYQLINQFKAEGMSIILVSSEMPEVLGMSDRIIVMHEGRISGEFMAADANQEKLLACAVGKTTEQNNEVAA

SEQ ID NO: 138824 - DNA, 1536 bp, Rhodopirellula baltica
  CDS (1)..(1536): transl_table=11
atgattgtctccgatgacgtggtgtttgaggccaaacagatttcgaagctgtttccaggcgtgaaagcgttggacggcgttgacctgacgttgcgagcggggaggctcaccacgttgctcggcgagaatggcgctggcaaatcaacgttgatgaaaatattggcgggagtgcaaccgcccgacgaaggcgagttgttggtgcagggtgaaccggttcatttcaccagcccacgcgacgcgcaggatcacggcatcgcgatgatccatcaagaactgagtttggtgcccgatctgaccgtcgccgaaaacattttccttggccgtgagccgctgcgtttcgaaacgctgattgactacaccgaactgaaccgtcaagcaaacgaatggttgaaacgtttggaactcgacgtgtcgccaacgacgcccgtccggcgactgcgagtcggtcaacaacagttggttgagattgctcgcgcgttggctggcaacgttcgaatcctgatcatggatgagcccacctccgcaatcaccgaacgcgagacggaggttctgttccgatgcattgcggatctaaagaaacagggtgtcgcgatcgtctatatcactcaccgcttggaagaactcgaacagattgctgacgacattgtcgtgatgcgtgatggttgcttgatcggcacggccgagtttggtgagctcagccacgacgcaatggttcgaatgatggttggacgagatgtgaaaatcctttccaagcagtcttcctccaacaatcagccggttcttcgtgccgaagggatctcgctcagccatccaacacggcccggcgactacctcgtgcacgaagttgacatgcacgtttgcaaaggcgaagtgctgggcatctttggattgatgggggccggtcgcacggaattgctggagtgtttgttcggactgcacccgacggcgtcgaccgggcaggtgagcatgcacgatcgaagtgttcgattgagaaaccccgccgatgcaatttctcatggtttggcgttggtccccgaggaccgaaagcaggatggtttggtgttgtcgatgtccgtcggtgaaaacgcgagcctggcgagcctcaaacacgctgaacggtttggcttcatcgatcgtgggcgggaacgcgagcacactcggcgtttcgtggaacgttttcgcgtgaagacaccgtcgctgcgtgaaaagatcatcaacttgagtggtggcaaccagcagaaagtgatcttggcgaaatggttggcgactgggcctgccgtgctgatgctcgacgagcccactcgcgggatcgatatccatgccaagaacgagatctattcgctcatcaatgaactgaccgctgacggattggcggtgatcatggtttcatcggaattgcccgaggtgatggcggtttccgatcggattttggtgatgtgcgaagggcgtgcaacccaatcgttcgaccgttctgaggccacggaggaaaatattctgcaagcggctttaccgagaaggaactcgattccatgttag

SEQ ID NO: 138825 - protein, 511 aa, Rhodopirellula baltica
MIVSDDVVFEAKQISKLFPGVKALDGVDLTLRAGRLTTLLGENGAGKSTLMKILAGVQPPDEGELLVQGEPVHFTSPRDAQDHGIAMIHQELSLVPDLTVAENIFLGREPLRFETLIDYTELNRQANEWLKRLELDVSPTTPVRRLRVGQQQLVEIARALAGNVRILIMDEPTSAITERETEVLFRCIADLKKQGVAIVYITHRLEELEQIADDIVVMRDGCLIGTAEFGELSHDAMVRMMVGRDVKILSKQSSSNNQPVLRAEGISLSHPTRPGDYLVHEVDMHVCKGEVLGIFGLMGAGRTELLECLFGLHPTASTGQVSMHDRSVRLRNPADAISHGLALVPEDRKQDGLVLSMSVGENASLASLKHAERFGFIDRGREREHTRRFVERFRVKTPSLREKIINLSGGNQQKVILAKWLATGPAVLMLDEPTRGIDIHAKNEIYSLINELTADGLAVIMVSSELPEVMAVSDRILVMCEGRATQSFDRSEATEENILQAALPRRNSIPC

SEQ ID NO: 138826 - DNA, 1506 bp, Salmonella typhimurium
  CDS (1)..(1506): transl_table=11
atggacgcattactgcaactcaaagggatcgataaagcgttccccggcgtgaaggctctctccggcgccgcgttaaacgtttatcctggccgcgttatggcgctggtgggggaaaacggcgccggaaaatccaccatgatgaaagtattaaccggcatctatacgcgagatgcgggatcgttgttatggctgggtaaagagaccacctttaatgggcctaaatcgtctcaggaagccgggatcggcattattcatcaggaactgaacctgatcccgcagttgaccattgcggaaaacatcttcctgggccgtgagtttgtgaatcgctttggcaaaatcgactggaaaaagatgtatgccgaagccgaccacctcttagccaaactcaatctgcgttttaagagcgataagctggtgggcgaactctctatcggcgatcagcaaatggtggaaatcgccaaagtgctgagcttcgaatccaaagtcatcattatggatgaaccgaccgatgcgctgaccgacactgaaaccgactctctgttccgcgttatccgcgaattaaaatcgcaggggcgcggcattgtctatatctcccaccgtatgaaagagatcttcgaaatttgcgatgacgtgacggtcttccgcgatgggcaatttatcgccgagcgtgaagtggccacgttgaccgaagattctcttatcgaaatgatggtgggacgtaagctggaagatcagtacccgcatctggataacgcgccgggtgagattcgcctcaaggtcgataatctgtgcggaccgggcgtgaatgatgtctcttttgtgctgcgaaaaggcgagattcttggcatctccggcctgatgggcgccggtcgcaccgagctgatgaaagtattgtacggcgcgatgccgcgaaccagcggttatgtgacgctcgatggacacgaagtggtgacgcgctctccgcaggacgggctggccaatggcatcgtttatatctctgaagaccgtaagcgcgatggactggtgctcggcatgtcagttaaagagaatatgtcgctgacggcgctggactatttcagccgcgctggcggaagcctgaaacacaaagatgagcagcaggcggtgggggattttatccgtctgttcaacgtcaagacgccttcaatggaacaggcgataggcctgctttccggtggtaatcagcaaaaagtggcgattgcccgcgggttgatgacgcgcccgaaagtgctcattctcgacgagccgacccgcggcgtggacgtcggcgccaagaaagagatttaccagcttatcaaccagtttaaggccgacggcctgagcatcattctggtctcatctgagatgccagaagtattaggcatgagcgatcgcatcatcgtcatgcatgaagggcatctcagcggtgaatttactcgcgagcaggccacccaggaagtgttaatggctgccgcagtgggcaagcttaatcgcgtgaatcaggagtaa

SEQ ID NO: 138827 - protein, 501 aa, Salmonella typhimurium
MDALLQLKGIDKAFPGVKALSGAALNVYPGRVMALVGENGAGKSTMMKVLTGIYTRDAGSLLWLGKETTFNGPKSSQEAGIGIIHQELNLIPQLTIAENIFLGREFVNRFGKIDWKKMYAEADHLLAKLNLRFKSDKLVGELSIGDQQMVEIAKVLSFESKVIIMDEPTDALTDTETDSLFRVIRELKSQGRGIVYISHRMKEIFEICDDVTVFRDGQFIAEREVATLTEDSLIEMMVGRKLEDQYPHLDNAPGEIRLKVDNLCGPGVNDVSFVLRKGEILGISGLMGAGRTELMKVLYGAMPRTSGYVTLDGHEVVTRSPQDGLANGIVYISEDRKRDGLVLGMSVKENMSLTALDYFSRAGGSLKHKDEQQAVGDFIRLFNVKTPSMEQAIGLLSGGNQQKVAIARGLMTRPKVLILDEPTRGVDVGAKKEIYQLINQFKADGLSIILVSSEMPEVLGMSDRIIVMHEGHLSGEFTREQATQEVLMAAAVGKLNRVNQE

SEQ ID NO: 138828 - DNA, 1503 bp, Vibrio cholerae
  CDS (1)..(1503): transl_table=11
atgactcaagcaattttagccctgagccaaattgaaaaagcgttccctggcgtgaaagccttggacaaagcgagcctgaatgtctatccggggcgggtaatggcgttaatgggtgaaaacggtgctggcaaatcaaccttgatgaaagttctgaccggcatttatagcaaagatgcgggcagcattgagtatcaaggccaacctgtcagttttaaaggcccacgagattcgcagctggcgggcatcagcattattcaccaagagctcaacctgatcccgcagctgacgattgcggaaaatattttccttggccgtgagatgacttcgccattcggacgcattctgtgggatgaaatgcatcgtaaagcggatcaactgctcgcacgtttgaatgtgaaacacagtgctaaaaccttgctcggagagctgagcttgggtgagcagcagatggtggaaattgccaaagcgctgtcgtttgaatcgaaagttatcatcatggatgaaccgaccgatgcgctgaccgataccgaaaccgaatctctgtttaatgtcattaatgaactgcgcgaacaaggctgcggcattgtgtatatctcacaccgtttgaaagaaatttttgagatttgtgacgacatcacagtgctgcgtgacggcaaatttattggcgagtgccgcgtgtgcgataccaatgaagatggcctgattgagatgatggttggccgtaaactggaagagcagtacccacgtattgccgcgcagcagggtgacatcagccttgaggtgattggcctaactggctcgggtgtgcacgatgtcagctttacgcttaaaaaaggcgagattcttggtgtctctggcctgatgggggctgggcgcactgaactgatgaaggtgatttatggcgcgctcccttcggagcgtggcgtgattaacctcaacgggcgcacggttaaccctgtcagtccgcaagatggtttggccaatggcatcgcctatatttctgaagatcgtaaaggcgatggcttggtactcggtctttcggtgaaagagaacatgtcactttgcgcgctcgatcaactgagcaaaggtgtgcaaattcgtcatgccgatgaagtgattgctgtggatgactttattcgtctgttcaacatcaaaaccccaagtcgtgagcaaatcattggcaacctttctgggggcaatcagcagaaagtggcgatcgctaaaggactgatgaccaaacccaaagtactgattttggacgaaccgactcgcggtgttgacgttggcgccaaaaaagagatttaccaactgatcaaccaattcaaagctgaaggcatgagcatcattttagtctcctcagaaatgcccgaagtgctgggcatgagtgaccgcattctggtgatgcatgaagggcggattagcggcgagtttatggcgagcgaagccgatcaagagaaattaatggcgtgtgcggtagggcgtaaccctgctcacgcagcatga

SEQ ID NO: 138829 - protein, 500 aa, Vibrio cholerae
MTQAILALSQIEKAFPGVKALDKASLNVYPGRVMALMGENGAGKSTLMKVLTGIYSKDAGSIEYQGQPVSFKGPRDSQLAGISIIHQELNLIPQLTIAENIFLGREMTSPFGRILWDEMHRKADQLLARLNVKHSAKTLLGELSLGEQQMVEIAKALSFESKVIIMDEPTDALTDTETESLFNVINELREQGCGIVYISHRLKEIFEICDDITVLRDGKFIGECRVCDTNEDGLIEMMVGRKLEEQYPRIAAQQGDISLEVIGLTGSGVHDVSFTLKKGEILGVSGLMGAGRTELMKVIYGALPSERGVINLNGRTVNPVSPQDGLANGIAYISEDRKGDGLVLGLSVKENMSLCALDQLSKGVQIRHADEVIAVDDFIRLFNIKTPSREQIIGNLSGGNQQKVAIAKGLMTKPKVLILDEPTRGVDVGAKKEIYQLINQFKAEGMSIILVSSEMPEVLGMSDRILVMHEGRISGEFMASEADQEKLMACAVGRNPAHAA

SEQ ID NO: 138830 - DNA, 1506 bp, Vibrio parahaemolyticus
  CDS (1)..(1506): transl_table=11
atgactcaagccattctacaactgagcgaaatcgaaaaagcgttcccaggtgtaaaggcgctagataaagcgagcctgaatgtatacccaggtcgtgttatggcgctcatgggcgaaaatggggcaggcaagtcaactttgatgaaagtgctgaccggtatttaccatatggatgcgggtagcattcagtatcaggggcaacctgctgcgtttaaaggtccgcgagattctcaagaagcgggtatcagcattattcaccaagagttgaacttaatccctgaactgacaatcgctgagaacatttttctcggtcgtgaatttaccggttctatggggcgcattcagtggagcaaaatgtacgcggaagcggacagacttctacaacgtttgaacgtgaaacacagctcgaaaaccttgcttggtgatctaagtttgggtgagcaacaaatggtagaaattgccaaagcgctctcgtttgaatcgaaagtcatcatcatggatgaaccaaccgatgcgcttactgatacagaaaccgaatctctgttcaaagtgattaatgagcttcgtgagcaaggctgcggcattgtatatatctcacaccgcctgaaagaaatctttgaaatctgtgacgacattaccgtgcttcgtgacggtaaatttatcggtgaatgccgagtagcagacacggatgaagacggcttaatcgaaatgatggttggccgtaaattagaggagcaatacccacgtattgatgtgaagcacggcgagacatgccttgaagtggttggcttgacgggctctggcgttcacgatgtgagcttcacgcttaaacgcggtgagattttgggtatctctggtttgatgggcgcaggccgtaccgagttaatgaaagtgatttacggcgcgctaccaagcgagcatggcgttatcaatctcgataacaaaaccattaatccggttagcccgcaagatggcttggcaaatggcatcgcttacatctcggaagaccgcaaaggggatggtctggttctgggtttatccgtgaaagagaacatgtctctgtgtgcattggataagctaaccaaaggcgtacaaatccagcacggcgaagaagtcatcgcagtggaagatttcatcaagttattcaacattaaaacaccaactcgcgaccaaattattggcaacctttctggtggtaaccaacagaaagtggcgattgcgaaagggttaatgaccaaacctaaagttctgattttggatgaaccaacgcgtggtgttgacgttggtgctaagaaagaaatctaccaactcatcaacaaatttaaagccgacggcatgagcatcatcttggtttcttctgagatgccagaagtgctaggcatgagcgatcgcattcttgtgatgcatgaaggtcgcataactggcgaatttgatgcgaaagacgccgaccaagaaaaattactcgcctgtgccgtaggcaaaaagatcaatgaggaagcagcatga

SEQ ID NO: 138831 - protein, 501 aa, Vibrio parahaemolyticus
MTQAILQLSEIEKAFPGVKALDKASLNVYPGRVMALMGENGAGKSTLMKVLTGIYHMDAGSIQYQGQPAAFKGPRDSQEAGISIIHQELNLIPELTIAENIFLGREFTGSMGRIQWSKMYAEADRLLQRLNVKHSSKTLLGDLSLGEQQMVEIAKALSFESKVIIMDEPTDALTDTETESLFKVINELREQGCGIVYISHRLKEIFEICDDITVLRDGKFIGECRVADTDEDGLIEMMVGRKLEEQYPRIDVKHGETCLEVVGLTGSGVHDVSFTLKRGEILGISGLMGAGRTELMKVIYGALPSEHGVINLDNKTINPVSPQDGLANGIAYISEDRKGDGLVLGLSVKENMSLCALDKLTKGVQIQHGEEVIAVEDFIKLFNIKTPTRDQIIGNLSGGNQQKVAIAKGLMTKPKVLILDEPTRGVDVGAKKEIYQLINKFKADGMSIILVSSEMPEVLGMSDRILVMHEGRITGEFDAKDADQEKLLACAVGKKINEEAA

SEQ ID NO: 138832 - DNA, 1506 bp, Vibrio vulnificus
  CDS (1)..(1506): transl_table=11
atgaaccaagcgattttacagctcagtgaaattgaaaaagcatttcctggcgtgaaggcgttagataaggcctcgctcaatgtctacccaggaagagtgatggctttaatgggagaaaatggagcaggaaaatccaccttgatgaaagtgcttaccggtatctattcacgagacgcaggtgagatagtttatcaaggtcaatcagcgcagttcaaagggccaagagattcacaacaagctggtatcagcattattcaccaagaactaaaccttattcgtgaactgaccatcgcagagaacatttttcttggtcgagagattacctcggcgtttgggcgtattgattggccccaaatgtacgcggaagcggacaaactgctcgcgcgcttgaaagtgaagcacagctcaaagacgttacttggtcagttaagtctgggtgagcagcagatggtggaaatcgctaaagcgctctcttttgagtccaaagtcatcatcatggatgaaccaacagacgccttgacggacaccgaaacagaggcgctgttttcggttattcgagagctgagagagcaggggtgtggcattgtttacatctcccaccgtttgaaagagatcttcgaaatttgtgatgacatcacggtgttgcgcgatggcaaatttatcggtcagtgcgaagtcgtgcaaacagacgaagatggcttaattgagatgatggttgggcgcaagcttgaagagcaatacccaagaattgacgtggtgcacggtcaaacctgtttagaagtgattggtctgacggggtctggcgtacacgatgtcagttttaccttaaaacgaggtgaaattttgggtatttcaggtctgatgggcgcaggtcgaacagagctgatgaaagtgatttatggtgctttgccgagtgagagaggcgtgatcaatcttgataatcgcaccattaatccgataagcccacaagatggtttggcaaatggcattgcttacatttcagaagaccgcaaaggcgacggcctcgtccttggcctttcggtgaaagaaaacatgtcactttgtgcgcttgataagctaagcaaaggtgtgcaaatccaacatcaagatgaagtggttgctgtggatgactttatccaacttttcaacatcaaaacgccatctcgcgagcaaattattggcaatctttctggcggaaaccagcaaaaagtggccattgcaaaagggttgatgaccaaaccgaaagttttgatcctagacgaaccgactcggggtgtagacgtcggcgcgaagaaagaaatttaccagttaatcaacaaattcaaagccgaagggatgagcatcattctggtctcatctgaaatgccagaagtgctcggcatgagcgatcgcatcttagtgatgcatgaaggtcgcattactggtgagtttgaagcaaaacacgccgatcaggaaaaactgatggcctgtgccgtcggcaaaaaagtatctgaggaagcagcatga

SEQ ID NO: 138833 - protein, 501 aa, Vibrio vulnificus
MNQAILQLSEIEKAFPGVKALDKASLNVYPGRVMALMGENGAGKSTLMKVLTGIYSRDAGEIVYQGQSAQFKGPRDSQQAGISIIHQELNLIRELTIAENIFLGREITSAFGRIDWPQMYAEADKLLARLKVKHSSKTLLGQLSLGEQQMVEIAKALSFESKVIIMDEPTDALTDTETEALFSVIRELREQGCGIVYISHRLKEIFEICDDITVLRDGKFIGQCEVVQTDEDGLIEMMVGRKLEEQYPRIDVVHGQTCLEVIGLTGSGVHDVSFTLKRGEILGISGLMGAGRTELMKVIYGALPSERGVINLDNRTINPISPQDGLANGIAYISEDRKGDGLVLGLSVKENMSLCALDKLSKGVQIQHQDEVVAVDDFIQLFNIKTPSREQIIGNLSGGNQQKVAIAKGLMTKPKVLILDEPTRGVDVGAKKEIYQLINKFKAEGMSIILVSSEMPEVLGMSDRILVMHEGRITGEFEAKHADQEKLMACAVGKKVSEEAA

SEQ ID NO: 138834 - DNA, 1518 bp, Agrobacterium tumefaciens
  CDS (1)..(1518): transl_table=11
atggcgcgtgcggagcgttcggtccttctgcgtctcgagaacatcagcaaggaatttccaggcgtaaaagcgctgtcgaacgttcatttcgatctgcgcagcggcgaagtgcatgccgtctgcggcgagaatggcgcgggaaaatcgacactgatgaagatcatcagcggtgtctaccagccgagtgaaggaacgatcctgcacaaaggcgagaaggtgcaatatgcatcgccgctgcaatccgaagcggccggcatcgccatcatccatcaggaactcaaccttgttccgcatctttccgttgccgagaacatttatctggcgcgtgagccgcgccggggttttctcgtggaccgcaagaaactgcgactcgatgccaaacgctgtctcgaccggctgggggtcgatatcaaccccgaccagctggtccgcagtctttccgtcgcgcaatgtcagatggtggaaatcgccaaggcgctctctcttgatgccgaagtgctgatcatggacgagccgacctcctcgctgaccgagcaggaaacccggcttctgttcaaggttatccgcgatctcaaggcctccggcgtcggtatcgtttatatttcccatcgtctcgatgagatggccgagatcgtcgatcgcgtgacgatcctgcgcgacggacgttatatctcaaccgacgatttcgcctcgatcactgttgatgacattgtcacgcgtatggtcgggcgttcgctggaagacaaattccccgaacgcacctcgcgcccgacggatgatattctcttttccgtcgaagggctgacgcgcaatggcgtgttcagtgacgtcagtttttcactgcggcgtggcgaaatcttaggttttgccggacttatgggcgcgggacgaacggaagttgcgcgggcaatcttcggggccgatccgctcgatgcgggtaagatcgttttcaacgggcgcgaactttcgatcggctcgccgcaggacgctatcgaggaaggcattgcctatctctcggaagatcgcaaaagcgatggcctcgccatcaagatgtcggtggcggccaatacgacgctcgccaatctcggcgaggtttccaaccgtttcgggctgatcgatttcaagaagcatgacgatgtggcgaagcgttacgtcgatctgctgaatatccgcactccctcgatcgatcagaccgtgcggctgctttcgggtggcaaccagcagaaaatcatcatcggcaaatggctgttccggcagtcgcgcgtgctgttcttcgacgagccgacgcgcggcatcgatgttggcgcgaagtttgcgatctacaagatcatggacgaactggccgcgcagggcatcggcgtcattctcatcagttcggaactgccggaaattctgggactgacggatcgtattgcggtgttccatcagggccgtatcaccggcgtgctcgaaaccgccaagaccaatcaagaagaaatcatgcggtatgcgtccggttacggccgggccgcgcagtga

SEQ ID NO: 138835 - protein, 505 aa, Agrobacterium tumefaciens
MARAERSVLLRLENISKEFPGVKALSNVHFDLRSGEVHAVCGENGAGKSTLMKIISGVYQPSEGTILHKGEKVQYASPLQSEAAGIAIIHQELNLVPHLSVAENIYLAREPRRGFLVDRKKLRLDAKRCLDRLGVDINPDQLVRSLSVAQCQMVEIAKALSLDAEVLIMDEPTSSLTEQETRLLFKVIRDLKASGVGIVYISHRLDEMAEIVDRVTILRDGRYISTDDFASITVDDIVTRMVGRSLEDKFPERTSRPTDDILFSVEGLTRNGVFSDVSFSLRRGEILGFAGLMGAGRTEVARAIFGADPLDAGKIVFNGRELSIGSPQDAIEEGIAYLSEDRKSDGLAIKMSVAANTTLANLGEVSNRFGLIDFKKHDDVAKRYVDLLNIRTPSIDQTVRLLSGGNQQKIIIGKWLFRQSRVLFFDEPTRGIDVGAKFAIYKIMDELAAQGIGVILISSELPEILGLTDRIAVFHQGRITGVLETAKTNQEEIMRYASGYGRAAQ

SEQ ID NO: 138836 - DNA, 1569 bp, Bacillus halodurans
  CDS (1)..(1569): transl_table=11
atgggtgaacattttttattagaaatggtagacatcacaaaggaattccccggcgtgaaggcgctcgatcgggttcaattaaaagtgagaaaaggctccgtccatgcattaatgggggaaaatggcgctgggaaatcaacgttaatgaaaatcttaatcggcatgtacaaaccgaacgagggaaaaattatttttgatggtgaggaagtgacgtttaacagtattaacgacgctctcgataaagggatatcgatgatccatcaagagttaagtccaattccagagatgacagtagcagaaaatatatttttaggcagagagcctacctttggaaagagtgggctcgtagacaataaaaaactaatagaaatgacacggaatttgttagaaagtttagagataaacatcgatccaagaaaaaagatgggcgagcttagcatagccaatacgcaaatgattgaaatcgcgaaagccatatcttttcattcaaagcttgtcattatggatgagccgacatctgccatcacagaaaaggaagtagcacagcttttcaaaatgattgaatcattgaaaaagaaaggtgttggcattatatacattactcataaaatgagcgaactggatgaaattgctgatgacatttctgtttttcgtgatggcaagtacattggtacggatacagcgaaaaacttaacgagagatgacttgattaaaatgatggtcggtcgcgaattgaaccaaattttcgataaacctgaaccgaagcttggcgaagtgatcctttccgtaaaaagcctaacaaaacaagactactttgaagacgttagctttgaagtccggaaaggagaaattgttggatttgcaggcttaatgggttcaggaagaaccgaagtgcttgagacgatcttcggcgtcaaggaagccgaatcaggggaaatttttgtaaacgggcaaaaagctagaataaagagcccgcaggatgctgtgaagaacaatatgggttttttaacggaggaccgcaagttgacaggtttatttcttcccttgtcggttagggagaacatgatcactgtcaatatcgataaatacattaacatgggttggcttaatggaaaacgagtgaaaaaagattgcgagcaacaaaaacaaaagctctacatcaaaactccgtccattgaacagatcgttgaaaatctgagcgggggtaatcaacagaaagtcttgcttgctagatggcttttaaaaaacccagatattttgtttctcgatgaaccgactcgaggaatcgatgtaggggcaaaatcagaattttacaatttaatctttgaattagcgagtcaagggaaagcaatcgttgttgtatcatcagagatggcagaaattcttgggttgtgtgatcgaattttggttatgcatgaagggaaggttaccggggagctcacacgggaggaagcgaaccaggagaagattatgcaatatgcgacaggccaagcaaaaatggcgaaaaagcttcacgttcataacaatttcgaacaaacggttacagccaataagatagagatcggttga

SEQ ID NO: 138837 - protein, 522 aa, Bacillus halodurans
MGEHFLLEMVDITKEFPGVKALDRVQLKVRKGSVHALMGENGAGKSTLMKILIGMYKPNEGKIIFDGEEVTFNSINDALDKGISMIHQELSPIPEMTVAENIFLGREPTFGKSGLVDNKKLIEMTRNLLESLEINIDPRKKMGELSIANTQMIEIAKAISFHSKLVIMDEPTSAITEKEVAQLFKMIESLKKKGVGIIYITHKMSELDEIADDISVFRDGKYIGTDTAKNLTRDDLIKMMVGRELNQIFDKPEPKLGEVILSVKSLTKQDYFEDVSFEVRKGEIVGFAGLMGSGRTEVLETIFGVKEAESGEIFVNGQKARIKSPQDAVKNNMGFLTEDRKLTGLFLPLSVRENMITVNIDKYINMGWLNGKRVKKDCEQQKQKLYIKTPSIEQIVENLSGGNQQKVLLARWLLKNPDILFLDEPTRGIDVGAKSEFYNLIFELASQGKAIVVVSSEMAEILGLCDRILVMHEGKVTGELTREEANQEKIMQYATGQAKMAKKLHVHNNFEQTVTANKIEIG

SEQ ID NO: 138838 - DNA, 1548 bp, Pseudomonas fluorescens
  CDS (1)..(1548): transl_table=11
atgaacgcttgtgcttctgcttcgagcctgcactccctgagcccggccgtggcgccccaggagccctacctgctggaagtgctgaatgtcagcaagggctttcccggggtggtggccctggccaacgtgcaactgcgggtacgccccggcacggtcctggcgctgatgggcgagaacggtgccggcaagtcgaccctgatgaagatcatcgcgggcatctatcagcccgactccggcgaactgcgcctcaagggccggcctgtgaccttcgccacgccgctggcggcgctgcaggcggggatcgccatgatccaccaggaactcaacctgatgccgcacatgagcatcgccgagaacatctggatcggccgcgagcaacagaaccgcctgggcctgatcgaccatcgggaaatgcaccgctgcaccgccgccttgctggcgcgcctgcgcatcgaactggaccccgaggagcaggtgggcaacctgagcatcgccgagcgccagatggtggagatcgccaaggcggtgtcctacgactccgacgtgctgatcatggacgaaccgacctcggccatcaccgacaaggaggtggcgcacctgttctcgatcattgccgacctcaaggcccagggtaagggcatcgtctatatcacccacaagatgaacgaagtgttcgccatcgccgatgaggtggcggtgtttcgcgatggcgcctacatcggcctgcaacgggccgacagcctggacggcgacagcctgatctcgatgatggtggggcgcgagctgagccagttgtttcccctgcgcgagaagcctatcggcgagctgctgctcaaggtccgcgacttgcgcctggacggggtgttcaagggcgtgtcgttcgatctgcatgccggggagatcctcggcattgccgggctgatgggctcggggcggaccaatgtcgccgaaaccctgttcggcatcaccccaagcgatggcggcgagattgtcctcgacggccagcccctgcgcatcggcgacccgcaccgggcgatcgagaagggccttgccctgctgaccgaggatcgcaagctcagtggcttgttcccctgcctgtcggtcctggaaaacatggaagtggcggtactgccgcactacgccggcggcggttttgtccagcagaaggccttgcgcgccttgtgcgaggacatgtgcaggaagctgcgggtcaagaccccgtccctggagcaatgcatcgacaccctgtccgggggcaatcagcagaaggccctgctggcgcgctggctgatgacccagccgcggatcctgattctcgacgagccgacccggggcattgacgtgggggccaaggctgagatctaccgcctgatcgccagtctggccggtgagggcatggcggtgatcatgatttcctcggaactgcccgaggtgctgggcatgagcgaccgggtcatggtcatgcacgaagggcaactgatgggcaccctggaccgcaacgaggcgacccaggaacgggtcatgcaactggcttcgggcctgaactag

SEQ ID NO: 138839 - protein, 515 aa, Pseudomonas fluorescens
MNACASASSLHSLSPAVAPQEPYLLEVLNVSKGFPGVVALANVQLRVRPGTVLALMGENGAGKSTLMKIIAGIYQPDSGELRLKGRPVTFATPLAALQAGIAMIHQELNLMPHMSIAENIWIGREQQNRLGLIDHREMHRCTAALLARLRIELDPEEQVGNLSIAERQMVEIAKAVSYDSDVLIMDEPTSAITDKEVAHLFSIIADLKAQGKGIVYITHKMNEVFAIADEVAVFRDGAYIGLQRADSLDGDSLISMMVGRELSQLFPLREKPIGELLLKVRDLRLDGVFKGVSFDLHAGEILGIAGLMGSGRTNVAETLFGITPSDGGEIVLDGQPLRIGDPHRAIEKGLALLTEDRKLSGLFPCLSVLENMEVAVLPHYAGGGFVQQKALRALCEDMCRKLRVKTPSLEQCIDTLSGGNQQKALLARWLMTQPRILILDEPTRGIDVGAKAEIYRLIASLAGEGMAVIMISSELPEVLGMSDRVMVMHEGQLMGTLDRNEATQERVMQLASGLN

SEQ ID NO: 138840 - DNA, 1515 bp, Geobacillus kaustophilus
  CDS (1)..(1515): transl_table=11
atgcaatcatatgttttggaaatgaagggaattacaaaagagtttccaggggttcgggcgttggataacgtgactttttctgtccgtaagggagaaattcatgccctttgtggtgaaaatggtgcagggaagtctaccttgatgaaagtcttaagtggggtttatccatatggatcatatgatggaaagatctacatcgagggaaaagaagtccgatttagaaatattaaagagtctcaagaagcaggaattgcgattatttatcaagaactagctgtagtcgaggaaatgacggttgcggagaacttgtttctcggtcatgaactaatgcgaggtaaatatattgattggaatcgtttatattctgaggcacagaaatggttgcagaaaattgggttggacattgacccagagacaaaggttcgcaatttaacggtgggcaaacagcagttaattgaaattgctaaagcactctcaaaaaatgctaaaattattattttagacgaaccgacagcagcattaaccgatagtgatgttgccaccttaaaaaatattttgtgcgatcttcgttctcaaggagtaacttgcatttatatctcccatagactgaatgaagttatggaattggcagatacggtaaccgttttgcgtgatggccaaacaatcagcaccgatcgtatcgaactgctgacagaagagcagattattgcaaaaatggttggaagggaattaaatgaattatatccgtatgaaccaaggaatgttgggaaagaaattctcaaagttgaccactattctgtcattgatgaacaaacgggaagggaagtaattcacgatgtttcattttcattaaaagcaggggaaatcctcggaatctcaggattgatgggttcagggaggaccgaattgtttaccagcctattcggcgcctatcatggcaagaaaaaaggaacagtttggattgatgggaaacaagttgatattcgtcgtcctgcagaggcgattcagtacggaatggcgtatgtatctgaagaccgaaaaaagtatggtctcgttttagagatggatattattaagaattccactcttgtcgctttgaaaaaagtcacaaaatggaacgttattgatcatgcgttagaagtgaagcaggcagaagaaataacgaaaagaatgaaattaaaagctcctactttagaagcgaaagtatcccaactaagcggtggaaaccagcaaaaagtcgttttaagcaaatggcttttaaatagcccgaaaatattgattttggatgaaccgactcgcggaatcgatgtcggggcaaagtacgaaatttacaaaattattaacgagttagctagtcagggagtgggaattgttttaatttcatctgagttgccagaagtcatgggaatgtcggatcgcattttagtcatgtccgagggaagaataaccggggagtttcagcgtcatgaggccacccaagagaaaattatgacttgtgcaacgggaggaaaatga

SEQ ID NO: 138841 - protein, 504 aa, Geobacillus kaustophilus
MQSYVLEMKGITKEFPGVRALDNVTFSVRKGEIHALCGENGAGKSTLMKVLSGVYPYGSYDGKIYIEGKEVRFRNIKESQEAGIAIIYQELAVVEEMTVAENLFLGHELMRGKYIDWNRLYSEAQKWLQKIGLDIDPETKVRNLTVGKQQLIEIAKALSKNAKIIILDEPTAALTDSDVATLKNILCDLRSQGVTCIYISHRLNEVMELADTVTVLRDGQTISTDRIELLTEEQIIAKMVGRELNELYPYEPRNVGKEILKVDHYSVIDEQTGREVIHDVSFSLKAGEILGISGLMGSGRTELFTSLFGAYHGKKKGTVWIDGKQVDIRRPAEAIQYGMAYVSEDRKKYGLVLEMDIIKNSTLVALKKVTKWNVIDHALEVKQAEEITKRMKLKAPTLEAKVSQLSGGNQQKVVLSKWLLNSPKILILDEPTRGIDVGAKYEIYKIINELASQGVGIVLISSELPEVMGMSDRILVMSEGRITGEFQRHEATQEKIMTCATGGK

SEQ ID NO: 138842 - DNA, 1524 bp, Photobacterium profundum
  CDS (1)..(1524): transl_table=11
atggtccctttattaaagatgacaaatatcgttaagtgttttggaacggtcaaagcacttgatggtgtcaatattcagctgcaacaaggtgagatcctctcgttgtgtggtgaaaatggttctggtaaatcaacgttaatgaaagtgttgtgcggtatttatccacacggcgactttgaaggggagatagtgtttgatgggcaagttgttgaggtaaaaacgattgcagagaccgaagcgttaggcattgcgattattcatcaagaattgaccctagtgaaagagctgtcggttttagagaacctgtttttaggtgctgaaattgagacatttggtgtgcttgattttgatcgcatgcacgcagaagccgtgaaattattaaagaaagtgaagcttgatgtaccacccgatacgcgggtgggagatctaggtgtcggacaacaacagcttattgaaatagcgaaggcactttcaaaaaatgcccgattactggtacttgatgaaccgacggcccccttgaccgaatctgaaaccgacatcttgctagagcttgttaatgacctgagggaagagggcgttagctgtatctatatttctcataaactcaacgaagtgaaagctatctctgatcagatctgcgttattcgtgatgggcagcatatcggcacccgtgatgctaagtcgatgacgacggatgacattattaccatgatggttggacgtgagatgaagcaactttttcctcgagaagaacacgatattggcgacattgtacttgaggtgaaaaatatcagcgcttggagtaaagccaatagtcatattcgtaaagtggatgatgtcagtttcgtgttacgaaaaggcgaaattcttggtgtgtcgggcttggttggggctgggcgcaccgaattaatggaatgcttgttcggttgttatcaagggcggtattctggtgaggtgtatttacagggacaaaaactgacattgcagagttgccatgacgcattggatgcggggattgccatggtaccagaagatcgaaagcgtcacggcattatcccaattatgtcagtaggagagaacattactctggcgagtttaacggcgtttacacaatctggtgttctgaatgacgtaaaagaggcgtctgcaatcagtgaatctataaaagcgttaaccgttaaaacaccgaatgccgatctcgcgattaaacacctttctgggggaaaccagcaaaaagcaattcttgcgcgtttcttgttggtgaatccaacggtattgattttagatgaaccgacccgagggatagatgttggcgcaaaatatgaaatttataaattaatgtttcagctcgtcaagcaagggatcagtgtgatcatggtgtcttctgagttacctgaggttctagggatcagtgatcgagtgcttgtgatgcatgaaggaaagataaaaggtgatttgattaacgacaacttgtcgcaagagcaaatcatggactgtgcgctatcggaaaaggtgacagcataa

SEQ ID NO: 138843 - protein, 507 aa, Photobacterium profundum
MVPLLKMTNIVKCFGTVKALDGVNIQLQQGEILSLCGENGSGKSTLMKVLCGIYPHGDFEGEIVFDGQVVEVKTIAETEALGIAIIHQELTLVKELSVLENLFLGAEIETFGVLDFDRMHAEAVKLLKKVKLDVPPDTRVGDLGVGQQQLIEIAKALSKNARLLVLDEPTAPLTESETDILLELVNDLREEGVSCIYISHKLNEVKAISDQICVIRDGQHIGTRDAKSMTTDDIITMMVGREMKQLFPREEHDIGDIVLEVKNISAWSKANSHIRKVDDVSFVLRKGEILGVSGLVGAGRTELMECLFGCYQGRYSGEVYLQGQKLTLQSCHDALDAGIAMVPEDRKRHGIIPIMSVGENITLASLTAFTQSGVLNDVKEASAISESIKALTVKTPNADLAIKHLSGGNQQKAILARFLLVNPTVLILDEPTRGIDVGAKYEIYKLMFQLVKQGISVIMVSSELPEVLGISDRVLVMHEGKIKGDLINDNLSQEQIMDCALSEKVTA

SEQ ID NO: 138844 - DNA, 1518 bp, Thermoanaerobacter ethanolicus
  CDS (1)..(1518): transl_table=11
atgagcgagtatattcttgaaatgagaaacataacaaaggaatttcctggagttaaagcattggataatgtaaatttcaaagttaaaagaggggaaattcacgcgttagtaggagaaaatggagcgggaaagtctaccttgatgaagatattaagtggtgtttatccttatggaacttataaaggagacataatcatagatggtgaagtgaagcaatttcgaaatattaaagatagtgaaaaaagtggtatagcgattatttatcaggagctcactctggtaaagtatatgacagtaggcgaaaacatatttttaggtgaagagcctgtaaaaggcggaataattgattggatgaaagtttactctgagacttatagacttttgaaagagttgcagattaatgtaaacccctatacaaaagttatgaatttaggaattgggcatcaacaaatggtagaaatagcgaaggctctttcaaaaaaagcgaggattttaatattagatgagcctacttctgcattgacagaaagcgaaacagaacatcttctcaatattttgaaagatttgaagaaaaatggtgtaacttgtatatacatttctcacaagcttaatgaagtatttgaaattgcagattcaatcactgtattaagagatggcaaaacgataatgacggacaaaaaagaaaatttcacagaaaacaaggtaatttctttaatggtagggcgtgagcttacacagagattcccaagagctaagcatacgccaggggaagtggttttcgaggttaaaaattacacagtttatgaccatgaaataccgggcaagaaaattattgacaatgtaagctttaaagccaggagaggcgagatattaggtattgcaggacttatgggagcagggaggacagaacttgctgctagtatatttggtgcatttaaaggtagaaaagaaggggaaatatatttaaatggcaaaaaaattgaaataaacactcccagcgatgcgataaaacatggaattgcctatctttcagaggataggaaaaggtttggccttgtgactttgatggatgtacaagaaaatatagcacttcctaactatgacagactatcaaaatttagtattataaataacaatgcaaaaattaaacatgcagaaaagtatgtaaaagagttaaaaataaaaacaccaaccataagacaaagggttgctaatttaagtggaggaaaccagcaaaaagtggttattgcaaagtggcttatgtcagacccaaaagttttgatactggacgaaccaactagaggaatagatgtgggagctaagtttgaaatatataatctaatgaataaattggttgatatgggcgtgtgtgtaataatgatatcttcagaactgcctgaaatattgggaatgagtgatagaatactggtaattcatgaaggaaaaatcaatggagaatttccaatagaagaagcagaccaagaaaaaatcatgtactgtgcaactggaggtaagtaa

SEQ ID NO: 138845 - protein, 505 aa, Thermoanaerobacter ethanolicus
MSEYILEMRNITKEFPGVKALDNVNFKVKRGEIHALVGENGAGKSTLMKILSGVYPYGTYKGDIIIDGEVKQFRNIKDSEKSGIAIIYQELTLVKYMTVGENIFLGEEPVKGGIIDWMKVYSETYRLLKELQINVNPYTKVMNLGIGHQQMVEIAKALSKKARILILDEPTSALTESETEHLLNILKDLKKNGVTCIYISHKLNEVFEIADSITVLRDGKTIMTDKKENFTENKVISLMVGRELTQRFPRAKHTPGEVVFEVKNYTVYDHEIPGKKIIDNVSFKARRGEILGIAGLMGAGRTELAASIFGAFKGRKEGEIYLNGKKIEINTPSDAIKHGIAYLSEDRKRFGLVTLMDVQENIALPNYDRLSKFSIINNNAKIKHAEKYVKELKIKTPTIRQRVANLSGGNQQKVVIAKWLMSDPKVLILDEPTRGIDVGAKFEIYNLMNKLVDMGVCVIMISSELPEILGMSDRILVIHEGKINGEFPIEEADQEKIMYCATGGK

SEQ ID NO: 138846 - DNA, 24 bp, Artificial sequence
  primer
atggaagcattacttcagcttaaa

SEQ ID NO: 138847 - DNA, 24 bp, Artificial sequence
  primer
ttactcctgattcacgcgattaag

SEQ ID NO: 138848 - protein, 520 aa, Artificial sequence
  consensus sequence
  Variant (2)..(2): Xaa in position 2 is any amino acid
  Variant (4)..(4): Xaa in position 4 is any amino acid
  Variant (6)..(6): Xaa in position 6 is any amino acid
  Variant (9)..(10): Xaa in position 9 to 10 is any amino acid
  Variant (12)..(20): Xaa in position 12 to 20 is any amino acid
  Variant (22)..(24): Xaa in position 22 to 24 is any amino acid
  Variant (27)..(27): Xaa in position 27 is any amino acid
  Variant (40)..(40): Xaa in position 40 is any amino acid
  Variant (42)..(42): Xaa in position 42 is any amino acid
  Variant (44)..(44): Xaa in position 44 is any amino acid
  Variant (46)..(49): Xaa in position 46 to 49 is any amino acid
  Variant (50)..(51): Xaa in position 50 to 51 is any or no amino acid
  Variant (53)..(53): Xaa in position 53 is any amino acid
  Variant (55)..(57): Xaa in position 55 to 57 is any amino acid
  Variant (59)..(72): Xaa in position 59 to 72 is any amino acid
  Variant (75)..(76): Xaa in position 75 to 76 is any amino acid
  Variant (82)..(86): Xaa in position 82 to 86 is any amino acid
  Variant (88)..(90): Xaa in position 88 to 90 is any amino acid
  Variant (93)..(93): Xaa in position 93 is any amino acid
  Variant (97)..(97): Xaa in position 97 is any amino acid
  Variant (99)..(117): Xaa in position 99 to 117 is any amino acid
  Variant (118)..(121): Xaa in position 118 to 121 is any or no amino acid
  Variant (123)..(124): Xaa in position 123 to 124 is any amino acid
  Variant (126)..(137): Xaa in position 126 to 137 is any amino acid
  Variant (138)..(138): Xaa in position 138 is any or no amino acid
  Variant (140)..(141): Xaa in position 140 to 141 is any amino acid
  Variant (143)..(144): Xaa in position 143 to 144 is any amino acid
  Variant (146)..(147): Xaa in position 146 to 147 is any amino acid
  Variant (154)..(160): Xaa in position 154 to 160 is any amino acid
  Variant (167)..(167): Xaa in position 167 is any amino acid
  Variant (171)..(172): Xaa in position 171 to 172 is any amino acid
  Variant (174)..(176): Xaa in position 174 to 176 is any amino acid
  Variant (179)..(180): Xaa in position 179 to 180 is any amino acid
  Variant (182)..(183): Xaa in position 182 to 183 is any amino acid
  Variant (185)..(187): Xaa in position 185 to 187 is any amino acid
  Variant (189)..(192): Xaa in position 189 to 192 is any amino acid
  Variant (197)..(199): Xaa in position 197 to 199 is any amino acid
  Variant (201)..(203): Xaa in position 201 to 203 is any amino acid
  Variant (205)..(205): Xaa in position 205 is any amino acid
  Variant (207)..(209): Xaa in position 207 to 209 is any amino acid
  Variant (211)..(211): Xaa in position 211 is any amino acid
  Variant (215)..(227): Xaa in position 215 to 227 is any amino acid
  Variant (228)..(229): Xaa in position 228 to 229 is any or no amino acid
  Variant (231)..(235): Xaa in position 231 to 235 is any amino acid
  Variant (240)..(244): Xaa in position 240 to 244 is any amino acid
  Variant (245)..(245): Xaa in position 245 is any or no amino acid
  Variant (247)..(252): Xaa in position 247 to 252 is any amino acid
  Variant (253)..(254): Xaa in position 253 to 254 is any or no amino acid
  Variant (256)..(260): Xaa in position 256 to 260 is any amino acid
  Variant (262)..(271): Xaa in position 262 to 271 is any amino acid
  Variant (272)..(279): Xaa in position 272 to 279 is any or no amino acid
  Variant (283)..(286): Xaa in position 283 to 286 is any amino acid
  Variant (290)..(290): Xaa in position 290 is any amino acid
  Variant (292)..(293): Xaa in position 292 to 293 is any amino acid
  Variant (298)..(298): Xaa in position 298 is any amino acid
  Variant (303)..(308): Xaa in position 303 to 308 is any amino acid
  Variant (310)..(315): Xaa in position 310 to 315 is any amino acid
  Variant (316)..(317): Xaa in position 316 to 317 is any or no amino acid
  Variant (319)..(331): Xaa in position 319 to 331 is any amino acid
  Variant (333)..(333): Xaa in position 333 is any amino acid
  Variant (335)..(338): Xaa in position 335 to 338 is any amino acid
  Variant (340)..(344): Xaa in position 340 to 344 is any amino acid
  Variant (349)..(350): Xaa in position 349 to 350 is any amino acid
  Variant (353)..(356): Xaa in position 353 to 356 is any amino acid
  Variant (358)..(360): Xaa in position 358 to 360 is any amino acid
  Variant (362)..(363): Xaa in position 362 to 363 is any amino acid
  Variant (365)..(366): Xaa in position 365 to 366 is any amino acid
  Variant (367)..(367): Xaa in position 367 is any or no amino acid
  Variant (369)..(381): Xaa in position 369 to 381 is any amino acid
  Variant (382)..(384): Xaa in position 382 to 384 is any or no amino acid
  Variant (386)..(398): Xaa in position 386 to 398 is any amino acid
  Variant (400)..(409): Xaa in position 400 to 409 is any amino acid
  Variant (419)..(420): Xaa in position 419 to 420 is any amino acid
  Variant (422)..(423): Xaa in position 422 to 423 is any amino acid
  Variant (425)..(427): Xaa in position 425 to 427 is any amino acid
  Variant (429)..(430): Xaa in position 429 to 430 is any amino acid
  Variant (432)..(432): Xaa in position 432 is any amino acid
  Variant (440)..(440): Xaa in position 440 is any amino acid
  Variant (446)..(446): Xaa in position 446 is any amino acid
  Variant (450)..(458): Xaa in position 450 to 458 is any amino acid
  Variant (460)..(465): Xaa in position 460 to 465 is any amino acid
  Variant (468)..(469): Xaa in position 468 to 469 is any amino acid
  Variant (472)..(472): Xaa in position 472 is any amino acid
  Variant (475)..(475): Xaa in position 475 is any amino acid
  Variant (479)..(480): Xaa in position 479 to 480 is any amino acid
  Variant (482)..(483): Xaa in position 482 to 483 is any amino acid
  Variant (486)..(495): Xaa in position 486 to 495 is any amino acid
  Variant (497)..(497): Xaa in position 497 is any amino acid
  Variant (500)..(504): Xaa in position 500 to 504 is any amino acid
  Variant (505)..(517): Xaa in position 505 to 517 is any or no amino acid
  Variant (519)..(519): Xaa in position 519 is any amino acid
IXKXFXGVXXLXXXXXXXXXGXXXALXGENGAGKSTLMKXLXGXYXXXXXXGXIXXXGXXXXXXXXXXXXXXGIXXIHQELXXXXXLXXXENXFLGXEXXXXXXXXXXXXXXXXXXXXXXXLXXLXXXXXXXXXXXXXLXXGXXQXXEIAKALXXXXXXXIMDEPTXALTXXEXXXLFXXIXXLXXXGXXXXYISHXXXEXXXIXDXXXVXRDGXXXXXXXXXXXXXXXDXXXXXMVGRXXXXXXPXXXXXXXXGXXXXXVXXXXXXXXXXXXXXXXXXVSFXXXXGEIXGXXGLMGXGRTEXXXXXXGXXXXXXXXGXXXXXXXXXXXXXPXDXXXXGXXXXXEDRKXXGLXXXXSXXXNXXLXXXLXXXXXXXXXXXXXXXXEXXXXXXXXXXXXXKXXXXXXXXXXLSGGNQQKVXXAXXLXXXPXXLXLDEPTRGXDVGAKXEIYXXXXXXXXXGXXXXXXSSXXPEXLGXSDRXXVXXEGXXXXXXXXXXAXQEXXXXXXXXXXXXXXXXXXAXG

SEQ ID NO: 138849 - protein, 61 aa, Artificial sequence
  protein pattern
  Variant (9)..(20): Xaa in position 9 to 20 is any amino acid
  Variant (21)..(21): Xaa in position 21 is any or no amino acid
  Variant (23)..(23): Xaa in position 23 is any amino acid
  Variant (24)..(24): Xaa in position 24 is any or no amino acid
  Variant (31)..(31): Xaa in position 31 is Ile or Val
  Variant (33)..(33): Xaa in position 33 is Ile or Val
  Variant (34)..(34): Xaa in position 34 is any amino acid
  Variant (35)..(35): Xaa in position 35 is Ala, Gly or Thr
  Variant (36)..(36): Xaa in position 36 is Lys or Arg
  Variant (37)..(37): Xaa in position 37 is any amino acid
  Variant (39)..(39): Xaa in position 39 is Phe or Ile
  Variant (41)..(41): Xaa in position 41 is any amino acid
  Variant (42)..(42): Xaa in position 42 is Ile, Leu or Val
  Variant (43)..(43): Xaa in position 43 is Phe, Ile, Leu, Met or Val
  Variant (44)..(45): Xaa in position 44 to 45 is any amino acid
  Variant (46)..(46): Xaa in position 46 is Phe, Leu or Met
  Variant (47)..(49): Xaa in position 47 to 49 is any amino acid
  Variant (51)..(51): Xaa in position 51 is any amino acid
  Variant (52)..(52): Xaa in position 52 is Ala, Cys, Gly, Ser or Thr
  Variant (53)..(54): Xaa in position 53 to 54 is Ile, Leu or Val
  Variant (55)..(55): Xaa in position 55 is Ile, Leu, Met or Val
  Variant (56)..(56): Xaa in position 56 is Ile or Val
  Variant (59)..(59): Xaa in position 59 is Asp or Glu
  Variant (60)..(60): Xaa in position 60 is Leu or Met
  Variant (61)..(61): Xaa in position 61 is Ala or Pro
SGGNQQKVXXXXXXXXXXXXXLXXDEPTRGXDXXXXXEXYXXXXXXXXXGXXXXXXSSXXX

SEQ ID NO: 138850 - protein, 58 aa, Artificial sequence
  protein pattern
  Variant (2)..(2): Xaa in position 2 is Ile, Leu or Met
  Variant (3)..(3): Xaa in position 3 is Ile or Val
  Variant (4)..(4): Xaa in position 4 is Ala or Glu
  Variant (6)..(6): Xaa in position 6 is Ala or Gly
  Variant (7)..(7): Xaa in position 7 is Lys or Arg
  Variant (8)..(8): Xaa in position 8 is Ala or Val
  Variant (10)..(15): Xaa in position 10 to 15 is any amino acid
  Variant (16)..(16): Xaa in position 16 is any or no amino acid
  Variant (18)..(18): Xaa in position 18 is any amino acid
  Variant (19)..(19): Xaa in position 19 is any or no amino acid
  Variant (24)..(24): Xaa in position 24 is Ala, Asp, Ser or Thr
  Variant (25)..(25): Xaa in position 25 is Ala or Ser
  Variant (26)..(26): Xaa in position 26 is Ile or Leu
  Variant (27)..(27): Xaa in position 27 is Gly, Asn, Ser or Thr
  Variant (28)..(29): Xaa in position 28 to 29 is any amino acid
  Variant (30)..(30): Xaa in position 30 is Asp or Glu
  Variant (31)..(33): Xaa in position 31 to 33 is any amino acid
  Variant (35)..(40): Xaa in position 35 to 40 is any amino acid
  Variant (42)..(42): Xaa in position 42 is Lys or Arg
  Variant (43)..(46): Xaa in position 43 to 46 is any amino acid
  Variant (47)..(47): Xaa in position 47 is Ala, Gly, Ser or Thr
  Variant (48)..(48): Xaa in position 48 is any amino acid
  Variant (49)..(49): Xaa in position 49 is Ile or Val
  Variant (50)..(50): Xaa in position 50 is any amino acid
  Variant (51)..(51): Xaa in position 51 is Ile or Val
  Variant (52)..(52): Xaa in position 52 is Ser or Thr
  Variant (54)..(54): Xaa in position 54 is Lys or Arg
  Variant (55)..(55): Xaa in position 55 is Ile, Leu or Met
  Variant (56)..(56): Xaa in position 56 is any amino acid
  Variant (58)..(58): Xaa in position 58 is Ile, Leu, Met or Val
QXXXIXXXLXXXXXXXIXXDEPTXXXXXXXXXXLXXXXXXLXXXXXXXXXXXHXXXEX

SEQ ID NO: 138851 - protein, 30 aa, Artificial sequence
  protein pattern
  Variant (2)..(4): Xaa in position 2 to 4 is any amino acid
  Variant (5)..(5): Xaa in position 5 is any or no amino acid
  Variant (7)..(8): Xaa in position 7 to 8 is any or no amino acid
  Variant (14)..(14): Xaa in position 14 is Ala, Asn, Ser or Thr
  Variant (15)..(15): Xaa in position 15 is Ile, Leu, Pro or Val
  Variant (16)..(18): Xaa in position 16 to 18 is any amino acid
  Variant (19)..(19): Xaa in position 19 is Leu or Met
  Variant (20)..(20): Xaa in position 20 is any amino acid
  Variant (21)..(21): Xaa in position 21 is Ile or Val
  Variant (22)..(22): Xaa in position 22 is any amino acid
  Variant (25)..(25): Xaa in position 25 is Ile, Leu or Met
  Variant (26)..(26): Xaa in position 26 is Phe, Trp or Tyr
  Variant (27)..(27): Xaa in position 27 is Ile or Leu
  Variant (28)..(28): Xaa in position 28 is Ala or Gly
  Variant (29)..(29): Xaa in position 29 is any amino acid
AXXXXIXXIHQELXXXXXXXXXENXXXXXE

SEQ ID NO: 138852 - protein, 33 aa, Artificial sequence
  protein pattern
  Variant (2)..(4): Xaa in position 2 to 4 is any or no amino acid
  Variant (7)..(7): Xaa in position 7 is any amino acid
  Variant (8)..(8): Xaa in position 8 is Ala, Leu or Val
  Variant (9)..(10): Xaa in position 9 to 10 is any amino acid
  Variant (14)..(14): Xaa in position 14 is Leu or Val
  Variant (16)..(16): Xaa in position 16 is Phe, Ile, Leu or Val
  Variant (17)..(17): Xaa in position 17 is any amino acid
  Variant (20)..(20): Xaa in position 20 is Met or Val
  Variant (22)..(22): Xaa in position 22 is Ala or Ser
  Variant (25)..(25): Xaa in position 25 is Ser or Thr
  Variant (26)..(26): Xaa in position 26 is Asp, Glu or Asn
  Variant (27)..(27): Xaa in position 27 is Ile, Leu, Met or Val
  Variant (28)..(30): Xaa in position 28 to 30 is any amino acid
  Variant (31)..(31): Xaa in position 31 is Ile or Leu
  Variant (32)..(32): Xaa in position 32 is Phe or Tyr
VXXXSFXXXXGEIXGXXGLXGXGRXXXXXXXXG

SEQ ID NO: 138853 - protein, 30 aa, Artificial sequence
  protein pattern
  Variant (2)..(2): Xaa in position 2 is any amino acid
  Variant (3)..(3): Xaa in position 3 is Asp, Glu or Arg
  Variant (4)..(4): Xaa in position 4 is Ala or Gly
  Variant (5)..(5): Xaa in position 5 is Ile, Leu or Val
  Variant (6)..(8): Xaa in position 6 to 8 is any amino acid
  Variant (9)..(9): Xaa in position 9 is Ile, Leu or Met
  Variant (10)..(10): Xaa in position 10 is Ala, Cys, Gly or Val
  Variant (11)..(12): Xaa in position 11 to 12 is any amino acid
  Variant (13)..(13): Xaa in position 13 is Pro, Ser or Thr
  Variant (17)..(17): Xaa in position 17 is Lys or Arg
  Variant (18)..(19): Xaa in position 18 to 19 is any amino acid
  Variant (21)..(21): Xaa in position 21 is Ile or Leu
  Variant (22)..(25): Xaa in position 22 to 25 is any amino acid
  Variant (26)..(26): Xaa in position 26 is Asp, Pro or Ser
  Variant (27)..(27): Xaa in position 27 is Ile, Leu or Val
  Variant (28)..(29): Xaa in position 28 to 29 is any amino acid
PXXXXXXXXXXXXEDRXXXGXXXXXXXXXN

SEQ ID NO: 138854 - protein, 29 aa, Artificial sequence
  protein pattern
  Variant (2)..(2): Xaa in position 2 is any amino acid
  Variant (5)..(5): Xaa in position 5 is Ile, Leu or Met
  Variant (6)..(6): Xaa in position 6 is Cys, Ser or Thr
  Variant (9)..(9): Xaa in position 9 is Ile or Val
  Variant (10)..(10): Xaa in position 10 is any amino acid
  Variant (11)..(11): Xaa in position 11 is Thr or Val
  Variant (12)..(12): Xaa in position 12 is Phe, Ile, Met or Val
  Variant (13)..(13): Xaa in position 13 is any amino acid
  Variant (14)..(14): Xaa in position 14 is Glu or Gln
  Variant (16)..(16): Xaa in position 16 is any amino acid
  Variant (17)..(17): Xaa in position 17 is Ile, Leu, Met or Val
  Variant (18)..(18): Xaa in position 18 is any amino acid
  Variant (19)..(19): Xaa in position 19 is Ala or Gly
  Variant (20)..(20): Xaa in position 20 is any amino acid
  Variant (21)..(21): Xaa in position 21 is Phe, Ile or Leu
  Variant (22)..(26): Xaa in position 22 to 26 is any amino acid
  Variant (27)..(27): Xaa in position 27 is Asp, Asn, Ser or Thr
  Variant (29)..(29): Xaa in position 29 is Glu or Gly
EXLGXXDRXXXXXXGXXXXXXXXXXXXQX

SEQ ID NO: 138855 - protein, 21 aa, Artificial sequence
  protein pattern
  Variant (2)..(7): Xaa in position 2 to 7 is any amino acid
  Variant (8)..(9): Xaa in position 8 to 9 is any or no amino acid
  Variant (11)..(11): Xaa in position 11 is any or no amino acid
  Variant (14)..(14): Xaa in position 14 is His or Arg
  Variant (15)..(15): Xaa in position 15 is any amino acid
  Variant (16)..(16): Xaa in position 16 is Ile, Leu or Met
  Variant (17)..(17): Xaa in position 17 is any amino acid
  Variant (18)..(18): Xaa in position 18 is Asp, Glu, Asn or Gln
  Variant (19)..(19): Xaa in position 19 is any amino acid
  Variant (20)..(20): Xaa in position 20 is Phe or Tyr
  Variant (21)..(21): Xaa in position 21 is Asp, Pro or Gln
TXXXXXXXXMXVGXXXXXXXX

SEQ ID NO: 138856 - protein, 19 aa, Artificial sequence
  protein pattern
  Variant (2)..(2): Xaa in position 2 is Ala, Cys, Ser or Val
  Variant (3)..(3): Xaa in position 3 is Asp or His
  Variant (4)..(4): Xaa in position 4 is any amino acid
  Variant (5)..(5): Xaa in position 5 is Ile or Val
  Variant (6)..(6): Xaa in position 6 is any amino acid
  Variant (7)..(7): Xaa in position 7 is Ile or Val
  Variant (8)..(8): Xaa in position 8 is Phe, Ile, Leu or Met
  Variant (12)..(13): Xaa in position 12 to 13 is any amino acid
  Variant (14)..(18): Xaa in position 14 to 18 is any or no amino acid
IXXXXXXXRDGXXXXXXXI

SEQ ID NO: 138857 - DNA, 1005 bp, Escherichia coli; identical to SEQ ID NO: 47972
  CDS (1)..(1005): transl_table=11

SEQ ID NO: 138858 - protein, 334 aa, Escherichia coli; identical to SEQ ID NO: 47973

SEQ ID NO: 138859 - DNA, 1542 bp, Arabidopsis thaliana; identical to SEQ ID NO: 47568
  CDS (249)..(1328)
  misc_feature (1069)..(1069): m is a or c

SEQ ID NO: 138860 - protein, 359 aa, Arabidopsis thaliana; identical to SEQ ID NO: 47569
  misc_feature (274)..(274): The Xaa at location 274 stands for Gln, or Pro.

SEQ ID NO: 138861 - DNA, 1507 bp, Glycine max; identical to SEQ ID NO: 47570
  CDS (107)..(1282)

SEQ ID NO: 138862 - protein, 391 aa, Glycine max; identical to SEQ ID NO: 47571

SEQ ID NO: 138863 - DNA, 1711 bp, Triticum aestivum; identical to SEQ ID NO: 47572
  CDS (102)..(1349)

SEQ ID NO: 138864 - protein, 415 aa, Triticum aestivum; identical to SEQ ID NO: 47573

SEQ ID NO: 138865 - DNA, 1776 bp, Zea mays subsp. mays; identical to SEQ ID NO: 47574
  CDS (216)..(1466)

SEQ ID NO: 138866 - protein, 416 aa, Zea mays subsp. mays; identical to SEQ ID NO: 47575

SEQ ID NO: 138867 - DNA, 1128 bp, Methanocaldococcus jannaschii DSM 2661; identical to SEQ ID NO: 47578
  CDS (1)..(1128): transl_table=11

SEQ ID NO: 138868 - protein, 375 aa, Methanocaldococcus jannaschii DSM 2661; identical to SEQ ID NO: 47579

SEQ ID NO: 138869 - DNA, 1149 bp, Methanothermobacter thermautotrophicus str. Delta H; identical to SEQ ID NO: 47580
  CDS (1)..(1149): transl_table=11

SEQ ID NO: 138870 - protein, 382 aa, Methanothermobacter thermautotrophicus str. Delta H; identical to SEQ ID NO: 47581

SEQ ID NO: 138871 - DNA, 1092 bp, Sulfolobus tokodaii str. 7; identical to SEQ ID NO: 47586
  CDS (1)..(1092): transl_table=11

SEQ ID NO: 138872 - protein, 363 aa, Sulfolobus tokodaii str. 7; identical to SEQ ID NO: 47587

SEQ ID NO: 138873 - DNA, 1041 bp, Bacillus subtilis subsp. subtilis str. 168; identical to SEQ ID NO: 47590
  CDS (1)..(1041): transl_table=11

SEQ ID NO: 138874 - protein, 346 aa, Bacillus subtilis subsp. subtilis str. 168; identical to SEQ ID NO: 47591

SEQ ID NO: 138875 - DNA, 1080 bp, Arabidopsis thaliana; identical to SEQ ID NO: 47592
  CDS (1)..(1080)

SEQ ID NO: 138876 - protein, 359 aa, Arabidopsis thaliana; identical to SEQ ID NO: 47593

SEQ ID NO: 138877 - DNA, 1074 bp, Corynebacterium glutamicum ATCC 13032; identical to SEQ ID NO: 47594
  CDS (1)..(1074): transl_table=11

SEQ ID NO: 138878 - protein, 357 aa, Corynebacterium glutamicum ATCC 13032; identical to SEQ ID NO: 47595

SEQ ID NO: 138879 - DNA, 1116 bp, Prochlorococcus marinus str. MIT 9313; identical to SEQ ID NO: 47600
  CDS (1)..(1116): transl_table=11

SEQ ID NO: 138880 - protein, 371 aa, Prochlorococcus marinus str. MIT 9313; identical to SEQ ID NO: 47601

SEQ ID NO: 138881 - DNA, 2703 bp, Magnaporthe grisea 70-15; identical to SEQ ID NO: 47604
  CDS (1)..(2703)

SEQ ID NO: 138882 - protein, 900 aa, Magnaporthe grisea 70-15; identical to SEQ ID NO: 47605

SEQ ID NO: 138883 - DNA, 1227 bp, Gibberella zeae PH-1; identical to SEQ ID NO: 47606
  CDS (1)..(1227)

SEQ ID NO: 138884 - protein, 408 aa, Gibberella zeae PH-1; identical to SEQ ID NO: 47607

SEQ ID NO: 138885 - DNA, 2571 bp, Kluyveromyces lactis NRRL Y-1140; identical to SEQ ID NO: 47610
  CDS (1)..(2571)

SEQ ID NO: 138886 - protein, 856 aa, Kluyveromyces lactis NRRL Y-1140; identical to SEQ ID NO: 47611

SEQ ID NO: 138887 - DNA, 2550 bp, Debaryomyces hansenii CBS767; identical to SEQ ID NO: 47612
  CDS (1)..(2550)

SEQ ID NO: 138888 - protein, 849 aa, Debaryomyces hansenii CBS767; identical to SEQ ID NO: 47613

SEQ ID NO: 138889 - DNA, 2703 bp, Aspergillus nidulans FGSC A4; identical to SEQ ID NO: 47616
  CDS (1)..(2703)

SEQ ID NO: 138890 - protein, 900 aa, Aspergillus nidulans FGSC A4; identical to SEQ ID NO: 47617

SEQ ID NO: 138891 - DNA, 2574 bp, Candida albicans SC5314; identical to SEQ ID NO: 47618
  CDS (1)..(2574): transl_table=12

SEQ ID NO: 138892 - protein, 857 aa, Candida albicans SC5314; identical to SEQ ID NO: 47619

SEQ ID NO: 138893 - DNA, 2727 bp, Ustilago maydis 521; identical to SEQ ID NO: 47620
  CDS (1)..(2727)

SEQ ID NO: 138894 - protein, 908 aa, Ustilago maydis 521; identical to SEQ ID NO: 47621

SEQ ID NO: 138895 - DNA, 2775 bp, Cryptococcus neoformans var. neoformans B-3501A; identical to SEQ ID NO: 47622
  CDS (1)..(2775)

SEQ ID NO: 138896 - protein, 924 aa, Cryptococcus neoformans var. neoformans B-3501A; identical to SEQ ID NO: 47623

SEQ ID NO: 138897 - DNA, 1080 bp, Prochlorococcus marinus str. NATL1A; identical to SEQ ID NO: 47628
  CDS (1)..(1080): transl_table=11

SEQ ID NO: 138898 - protein, 359 aa, Prochlorococcus marinus str. NATL1A; identical to SEQ ID NO: 47629

SEQ ID NO: 138899 - DNA, 1041 bp, Clostridium thermocellum ATCC 27405; identical to SEQ ID NO: 47630
  CDS (1)..(1041): transl_table=11

SEQ ID NO: 138900 - protein, 346 aa, Clostridium thermocellum ATCC 27405; identical to SEQ ID NO: 47631

SEQ ID NO: 138901 - DNA, 1035 bp, Clostridium difficile 630; identical to SEQ ID NO: 47634
  CDS (1)..(1035): transl_table=11

SEQ ID NO: 138902 - protein, 344 aa, Clostridium difficile 630; identical to SEQ ID NO: 47635

SEQ ID NO: 138903 - DNA, 1038 bp, Herminiimonas arsenicoxydans; identical to SEQ ID NO: 47638
  CDS (1)..(1038): transl_table=11

SEQ ID NO: 138904 - protein, 345 aa, Herminiimonas arsenicoxydans; identical to SEQ ID NO: 47639

SEQ ID NO: 138905 - DNA, 975 bp, Bradyrhizobium sp. ORS278; identical to SEQ ID NO: 47648
  CDS (1)..(975): transl_table=11

SEQ ID NO: 138906 - protein, 324 aa, Bradyrhizobium sp. ORS278; identical to SEQ ID NO: 47649

SEQ ID NO: 138907 - DNA, 1035 bp, Staphylococcus aureus subsp. aureus MSSA476
  CDS (1)..(1035): transl_table=11
atgatgattaaagtaggtatcgttggcggtagcggttatggcgcaattgaattaattcgattgttacaaacacatcctcatgtaacgattgcacacatctactcacattcaaaagtagatgaaccgttgaaattaacatttccacatttacaacatattatgcaacatttcgaagcacttacagtggacaataatgactgtgatgtaattttctttgcgacaccagcacccgtaagtaaaacatgtatccctcccttagtagaaaaaggtattcatgttatcgatttatctggcgcatttagaattaagaatcgtgaaatatatgaagcatattacaaagaaactgctgcagcacaagatgatttgaatcatgctatttacagcatttcagaatggcaatcgtttgataacaatggaacgaagctcatttctaatcctggctgtttccctacagcaacattattagcattacatccacttattagcgaaaaaatagtagatttgtcatctattattattgatgctaagaccggcgtgtcaggtgctggtcgttcattatcacaacgtgttcatttttcagaaatgaatgaaaatctaagcgcttatgcaatcggaaaccataaacacaaaccggaaatcgagcaatatttatctatcattgcgggtcaagatgtatcagtcatatttacaccacatctcgtaccaatgacacgaggtattttatcaacaatatatgtcaaattatcatctgaatatacgactgaatcattacataaattaatgacctcttattatgctaatcagccatttgtcagaattagagatattgggacttttccaaccacaaaagaagtactcggtagtaactactgcgatatcggcatctatgtagatgaaacaacgcaaacagcaattttagtatcagtgattgataaccttgtcaaaggcgcaagtgggcaagccattcaaaatttaaatatattatatgattttgaagtgacgactggcctaaatcaatcaccagtttatccataa

SEQ ID NO: 138908 - protein, 344 aa, Staphylococcus aureus subsp. aureus MSSA476
MMIKVGIVGGSGYGAIELIRLLQTHPHVTIAHIYSHSKVDEPLKLTFPHLQHIMQHFEALTVDNNDCDVIFFATPAPVSKTCIPPLVEKGIHVIDLSGAFRIKNREIYEAYYKETAAAQDDLNHAIYSISEWQSFDNNGTKLISNPGCFPTATLLALHPLISEKIVDLSSIIIDAKTGVSGAGRSLSQRVHFSEMNENLSAYAIGNHKHKPEIEQYLSIIAGQDVSVIFTPHLVPMTRGILSTIYVKLSSEYTTESLHKLMTSYYANQPFVRIRDIGTFPTTKEVLGSNYCDIGIYVDETTQTAILVSVIDNLVKGASGQAIQNLNILYDFEVTTGLNQSPVYP

SEQ ID NO: 138909 - DNA, 1125 bp, Propionibacterium acnes KPA171202; identical to SEQ ID NO: 47666
  CDS (1)..(1125): transl_table=11

SEQ ID NO: 138910 - protein, 374 aa, Propionibacterium acnes KPA171202; identical to SEQ ID NO: 47667

SEQ ID NO: 138911 - DNA, 1041 bp, Desulfotalea psychrophila LSv54; identical to SEQ ID NO: 47668
  CDS (1)..(1041): transl_table=11

SEQ ID NO: 138912 - protein, 346 aa, Desulfotalea psychrophila LSv54; identical to SEQ ID NO: 47669

SEQ ID NO: 138913 - DNA, 1047 bp, Symbiobacterium thermophilum IAM 14863; identical to SEQ ID NO: 47670
  CDS (1)..(1047): transl_table=11

SEQ ID NO: 138914 - protein, 348 aa, Symbiobacterium thermophilum IAM 14863; identical to SEQ ID NO: 47671

SEQ ID NO: 138915 - DNA, 1011 bp, Mannheimia succiniciproducens MBEL55E; identical to SEQ ID NO: 47674
  CDS (1)..(1011): transl_table=11

SEQ ID NO: 138916 - protein, 336 aa, Mannheimia succiniciproducens MBEL55E; identical to SEQ ID NO: 47675

SEQ ID NO: 138917 - DNA, 1047 bp, Methylococcus capsulatus str. Bath; identical to SEQ ID NO: 47680
  CDS (1)..(1047): transl_table=11

SEQ ID NO: 138918 - protein, 348 aa, Methylococcus capsulatus str. Bath; identical to SEQ ID NO: 47681

SEQ ID NO: 138919 - DNA, 1026 bp, Dehalococcoides ethenogenes 195; identical to SEQ ID NO: 47684
  CDS (1)..(1026): transl_table=11

SEQ ID NO: 138920 - protein, 341 aa, Dehalococcoides ethenogenes 195; identical to SEQ ID NO: 47685

SEQ ID NO: 138921 - DNA, 969 bp, Bacteroides fragilis NCTC 9343; identical to SEQ ID NO: 47686
  CDS (1)..(969): transl_table=11

SEQ ID NO: 138922 - protein, 322 aa, Bacteroides fragilis NCTC 9343; identical to SEQ ID NO: 47687

SEQ ID NO: 138923 - DNA, 1068 bp, Psychrobacter arcticus 273-4; identical to SEQ ID NO: 47692
  CDS (1)..(1068): transl_table=11

SEQ ID NO: 138924 - protein, 355 aa, Psychrobacter arcticus 273-4; identical to SEQ ID NO: 47693

SEQ ID NO: 138925 - DNA, 1056 bp, Colwellia psychrerythraea 34H; identical to SEQ ID NO: 47694
  CDS (1)..(1056): transl_table=11

SEQ ID NO: 138926 - protein, 351 aa, Colwellia psychrerythraea 34H; identical to SEQ ID NO: 47695

SEQ ID NO: 138927 - DNA, 1035 bp, Pseudomonas syringae pv. phaseolicola 1448A; identical to SEQ ID NO: 47696
  CDS (1)..(1035): transl_table=11

SEQ ID NO: 138928 - protein, 344 aa, Pseudomonas syringae pv. phaseolicola 1448A; identical to SEQ ID NO: 47697

SEQ ID NO: 138929 - DNA, 1029 bp, Thermobifida fusca YX; identical to SEQ ID NO: 47700
  CDS (1)..(1029): transl_table=11

SEQ ID NO: 138930 - protein, 342 aa, Thermobifida fusca YX; identical to SEQ ID NO: 47701

SEQ ID NO: 138931 - DNA, 1026 bp, Dehalococcoides sp. CBDB1; identical to SEQ ID NO: 47712
  CDS (1)..(1026): transl_table=11

SEQ ID NO: 138932 - protein, 341 aa, Dehalococcoides sp. CBDB1; identical to SEQ ID NO: 47713

SEQ ID NO: 138933 - DNA, 1029 bp, Thiobacillus denitrificans ATCC 25259; identical to SEQ ID NO: 47714
  CDS (1)..(1029): transl_table=11

SEQ ID NO: 138934 - protein, 342 aa, Thiobacillus denitrificans ATCC 25259; identical to SEQ ID NO: 47715

SEQ ID NO: 138935 - DNA, 1059 bp, Anabaena variabilis ATCC 29413; identical to SEQ ID NO: 47718
  CDS (1)..(1059): transl_table=11

SEQ ID NO: 138936 - protein, 352 aa, Anabaena variabilis ATCC 29413; identical to SEQ ID NO: 47719

SEQ ID NO: 138937 - DNA, 1014 bp, Carboxydothermus hydrogenoformans Z-2901; identical to SEQ ID NO: 47724
  CDS (1)..(1014): transl_table=11

SEQ ID NO: 138938 - protein, 337 aa, Carboxydothermus hydrogenoformans Z-2901; identical to SEQ ID NO: 47725

SEQ ID NO: 138939 - DNA, 1041 bp, Geobacter metallireducens GS-15; identical to SEQ ID NO: 47732
  CDS (1)..(1041): transl_table=11

SEQ ID NO: 138940 - protein, 346 aa, Geobacter metallireducens GS-15; identical to SEQ ID NO: 47733

SEQ ID NO: 138941 - DNA, 1074 bp, Desulfovibrio desulfuricans G20; identical to SEQ ID NO: 47734
  CDS (1)..(1074): transl_table=11

SEQ ID NO: 138942 - protein, 357 aa, Desulfovibrio desulfuricans G20; identical to SEQ ID NO: 47735

SEQ ID NO: 138943 - DNA, 1059 bp, Rhodospirillum rubrum ATCC 11170; identical to SEQ ID NO: 47738
  CDS (1)..(1059): transl_table=11

SEQ ID NO: 138944 - protein, 352 aa, Rhodospirillum rubrum ATCC 11170; identical to SEQ ID NO: 47739

SEQ ID NO: 138945 - DNA, 1041 bp, Moorella thermoacetica ATCC 39073; identical to SEQ ID NO: 47740
  CDS (1)..(1041): transl_table=11

SEQ ID NO: 138946 - protein, 346 aa, Moorella thermoacetica ATCC 39073; identical to SEQ ID NO: 47741

SEQ ID NO: 138947 - DNA, 1089 bp, Syntrophus aciditrophicus SB; identical to SEQ ID NO: 123203
  CDS (1)..(1089): transl_table=11

SEQ ID NO: 138948 - protein, 362 aa, Syntrophus aciditrophicus SB; identical to SEQ ID NO: 123204

SEQ ID NO: 138949 - DNA, 930 bp, Novosphingobium aromaticivorans DSM 12444; identical to SEQ ID NO: 47746
  CDS (1)..(930): transl_table=11

SEQ ID NO: 138950 - protein, 309 aa, Novosphingobium aromaticivorans DSM 12444; identical to SEQ ID NO: 47747

SEQ ID NO: 138951 - DNA, 1041 bp, Ehrlichia chaffeensis str. Arkansas; identical to SEQ ID NO: 47748
  CDS (1)..(1041): transl_table=11

SEQ ID NO: 138952 - protein, 346 aa, Ehrlichia chaffeensis str. Arkansas; identical to SEQ ID NO: 47749

SEQ ID NO: 138953 - DNA, 1041 bp, Saccharophagus degradans 2-40; identical to SEQ ID NO: 47752
  CDS (1)..(1041): transl_table=11

SEQ ID NO: 138954 - protein, 346 aa, Saccharophagus degradans 2-40; identical to SEQ ID NO: 47753

SEQ ID NO: 138955 - DNA, 1053 bp, Methylobacillus flagellatus KT; identical to SEQ ID NO: 47754
  CDS (1)..(1053): transl_table=11

SEQ ID NO: 138956 - protein, 350 aa, Methylobacillus flagellatus KT; identical to SEQ ID NO: 47755

SEQ ID NO: 138957 - DNA, 1023 bp, Methanococcoides burtonii DSM 6242; identical to SEQ ID NO: 47758
  CDS (1)..(1023): transl_table=11

SEQ ID NO: 138958 - protein, 340 aa, Methanococcoides burtonii DSM 6242; identical to SEQ ID NO: 47759

SEQ ID NO: 138959 - DNA, 1053 bp, Acidobacteria bacterium Ellin345; identical to SEQ ID NO: 47764
  CDS (1)..(1053): transl_table=11

SEQ ID NO: 138960 - protein, 350 aa, Acidobacteria bacterium Ellin345; identical to SEQ ID NO: 47765

SEQ ID NO: 138961 - DNA, 1029 bp, Silicibacter sp. TM1040; identical to SEQ ID NO: 47766
  CDS (1)..(1029): transl_table=11

SEQ ID NO: 138962 - protein, 342 aa, Silicibacter sp. TM1040; identical to SEQ ID NO: 47767

SEQ ID NO: 138963 - DNA, 1068 bp, Myxococcus xanthus DK 1622; identical to SEQ ID NO: 47768
  CDS (1)..(1068): transl_table=11

SEQ ID NO: 138964 - protein, 355 aa, Myxococcus xanthus DK 1622; identical to SEQ ID NO: 47769

SEQ ID NO: 138965 - DNA, 1023 bp, Rubrobacter xylanophilus DSM 9941; identical to SEQ ID NO: 47772
  CDS (1)..(1023): transl_table=11

SEQ ID NO: 138966 - protein, 340 aa, Rubrobacter xylanophilus DSM 9941; identical to SEQ ID NO: 47773

SEQ ID NO: 138967 - DNA, 975 bp, Cytophaga hutchinsonii ATCC 33406; identical to SEQ ID NO: 47776
  CDS (1)..(975): transl_table=11

SEQ ID NO: 138968 - protein, 324 aa, Cytophaga hutchinsonii ATCC 33406; identical to SEQ ID NO: 47777

SEQ ID NO: 138969 - DNA, 1056 bp, Rhodococcus sp. RHA1; identical to SEQ ID NO: 47778
  CDS (1)..(1056): transl_table=11

SEQ ID NO: 138970 - protein, 351 aa, Rhodococcus sp. RHA1; identical to SEQ ID NO: 47779

SEQ ID NO: 138971 - DNA, 1059 bp, Trichodesmium erythraeum IMS101; identical to SEQ ID NO: 47780
  CDS (1)..(1059): transl_table=11

SEQ ID NO: 138972 - protein, 352 aa, Trichodesmium erythraeum IMS101; identical to SEQ ID NO: 47781

SEQ ID NO: 138973 - DNA, 1032 bp, Alkalilimnicola ehrlichei MLHE-1; identical to SEQ ID NO: 47786
  CDS (1)..(1032): transl_table=11

SEQ ID NO: 138974 - protein, 343 aa, Alkalilimnicola ehrlichei MLHE-1; identical to SEQ ID NO: 47787

SEQ ID NO: 138975 - DNA, 1041 bp, Leuconostoc mesenteroides subsp. mesenteroides ATCC 8293; identical to SEQ ID NO: 47792
  CDS (1)..(1041): transl_table=11

SEQ ID NO: 138976 - protein, 346 aa, Leuconostoc mesenteroides subsp. mesenteroides ATCC 8293; identical to SEQ ID NO: 47793

SEQ ID NO: 138977 - DNA, 1044 bp, Solibacter usitatus Ellin6076; identical to SEQ ID NO: 47794
  CDS (1)..(1044): transl_table=11

SEQ ID NO: 138978 - protein, 347 aa, Solibacter usitatus Ellin6076; identical to SEQ ID NO: 47795

SEQ ID NO: 138979 - DNA, 1050 bp, Magnetococcus sp. MC-1; identical to SEQ ID NO: 47796
  CDS (1)..(1050): transl_table=11

SEQ ID NO: 138980 - protein, 349 aa, Magnetococcus sp. MC-1; identical to SEQ ID NO: 47797

SEQ ID NO: 138981 - DNA, 981 bp, Shewanella sp. ANA-3
  CDS (1)..(981): transl_table=11
atgaaaaacatcgccattatcggtgccagtggttacacaggcgcacaactaacagctttagtccatgcggagtctgaattatcgattcaaggtctgtatgtctctgaaaatagtttagataaaggtagagctttagcagatttgtaccctgtctacagccacattgacttagcgctgtcgccactgactgaagaagcgaaggcgaagatcgtcgccgaggcggatgccgtagtgttagcgaccgagcattcggtgagtttgcatttagcggcttggttctacaaccaaggtttagccgtgtttgacttaagcggtgcctatcgtttcagcgatgtggcgcagtaccctaagtggtacggttttgaacatgagtatcccgaagtgttggccaaggcagtctatggtctggccgagtggaatgccaaagaagtcgccgccactaagatgattgctgtgccaggttgttacccaacagcatcattaactgcattgaaaccattaaagaatttactgacctcagcctatccagtgatcaatgcggtcagcggtgtgacaggtgcgggtcgtaaggcgcaactgcataccagtttttgcgaagtgagcctcacaccctacggtgtattaggccacagacatcaacccgaaattgccactcaactggggcaagaggtgatcttcacgccgcaccttggcaacttcaagcgcggcattttagcgaccattacggtacagctaaaaccgggcactaccactgccgatgtggctgcggcatacagtgtgtatgaccaagctccgctggtgacggtgaaacagaaccagttcccgaaagtggatgatgtggtgctgacgccgaattgccacttaggttggaagtttgatgagaacagtggctacttagtggttgccagtgccatcgacaatttgatgaaaggcgcggcgagccaagccctgcaatgcataaagattcactttaacctttaa

SEQ ID NO: 138982 - protein, 326 aa, Shewanella sp. ANA-3; identical to SEQ ID NO: 47785

SEQ ID NO: 138983 - DNA, 1044 bp, Mycobacterium avium 104; identical to SEQ ID NO: 47798
  CDS (1)..(1044): transl_table=11

SEQ ID NO: 138984 - protein, 347 aa, Mycobacterium avium 104; identical to SEQ ID NO: 47799

SEQ ID NO: 138985 - DNA, 1032 bp, Mycobacterium smegmatis str. MC2 155; identical to SEQ ID NO: 47800
  CDS (1)..(1032): transl_table=11

SEQ ID NO: 138986 - protein, 343 aa, Mycobacterium smegmatis str. MC2 155; identical to SEQ ID NO: 47801

SEQ ID NO: 138987 - DNA, 1047 bp, Nocardioides sp. JS614; identical to SEQ ID NO: 47802
  CDS (1)..(1047): transl_table=11

SEQ ID NO: 138988 - protein, 348 aa, Nocardioides sp. JS614; identical to SEQ ID NO: 47803

SEQ ID NO: 138989 - DNA, 1059 bp, Nostoc punctiforme PCC 73102; identical to SEQ ID NO: 47812
  CDS (1)..(1059): transl_table=11

SEQ ID NO: 138990 - protein, 352 aa, Nostoc punctiforme PCC 73102; identical to SEQ ID NO: 47813

SEQ ID NO: 138991 - DNA, 1032 bp, Listeria monocytogenes str. 1/2a F6854; identical to SEQ ID NO: 47816
  CDS (1)..(1032): transl_table=11

SEQ ID NO: 138992 - protein, 343 aa, Listeria monocytogenes str. 1/2a F6854; identical to SEQ ID NO: 47817

SEQ ID NO: 138993 - DNA, 1038 bp, Bacillus cereus G9241; identical to SEQ ID NO: 47818
  CDS (1)..(1038): transl_table=11

SEQ ID NO: 138994 - protein, 345 aa, Bacillus cereus G9241; identical to SEQ ID NO: 47819

SEQ ID NO: 138995 - DNA, 1059 bp, Crocosphaera watsonii WH 8501; identical to SEQ ID NO: 47820
  CDS (1)..(1059): transl_table=11

SEQ ID NO: 138996 - protein, 352 aa, Crocosphaera watsonii WH 8501; identical to SEQ ID NO: 47821

SEQ ID NO: 138997 - DNA, 1032 bp, Exiguobacterium sibiricum 255-15; identical to SEQ ID NO: 47822
  CDS (1)..(1032): transl_table=11

SEQ ID NO: 138998 - protein, 343 aa, Exiguobacterium sibiricum 255-15; identical to SEQ ID NO: 47823

SEQ ID NO: 138999 - DNA, 1017 bp, Prosthecochloris aestuarii DSM 271; identical to SEQ ID NO: 47824
  CDS (1)..(1017): transl_table=11

SEQ ID NO: 139000 - protein, 338 aa, Prosthecochloris aestuarii DSM 271; identical to SEQ ID NO: 47825

SEQ ID NO: 139001 - DNA, 1605 bp, Kineococcus radiotolerans SRS30216; identical to SEQ ID NO: 123255
  CDS (1)..(1605): transl_table=11

SEQ ID NO: 139002 - protein, 534 aa, Kineococcus radiotolerans SRS30216; identical to SEQ ID NO: 123256

SEQ ID NO: 139003 - DNA, 1050 bp, Xylella fastidiosa Dixon; identical to SEQ ID NO: 47826
  CDS (1)..(1050): transl_table=11

SEQ ID NO: 139004 - protein, 349 aa, Xylella fastidiosa Dixon; identical to SEQ ID NO: 47827

SEQ ID NO: 139005 - DNA, 1029 bp, Roseovarius nubinhibens ISM; identical to SEQ ID NO: 47832
  CDS (1)..(1029): transl_table=11

SEQ ID NO: 139006 - protein, 342 aa, Roseovarius nubinhibens ISM; identical to SEQ ID NO: 47833

SEQ ID NO: 139007 - DNA, 1029 bp, Oceanicola batsensis HTCC2597; identical to SEQ ID NO: 47834
  CDS (1)..(1029): transl_table=11

SEQ ID NO: 139008 - protein, 342 aa, Oceanicola batsensis HTCC2597; identical to SEQ ID NO: 47835

SEQ ID NO: 139009 - DNA, 927 bp, Erythrobacter sp. NAP1; identical to SEQ ID NO: 47836
  CDS (1)..(927): transl_table=11

SEQ ID NO: 139010 - protein, 308 aa, Erythrobacter sp. NAP1; identical to SEQ ID NO: 47837

SEQ ID NO: 139011 - DNA, 1065 bp, Synechococcus sp. WH 7805; identical to SEQ ID NO: 47840
  CDS (1)..(1065): transl_table=11

SEQ ID NO: 139012 - protein, 354 aa, Synechococcus sp. WH 7805; identical to SEQ ID NO: 47841

SEQ ID NO: 139013 - DNA, 1017 bp, Pseudoalteromonas tunicata D2; identical to SEQ ID NO: 47842
  CDS (1)..(1017): transl_table=11

SEQ ID NO: 139014 - protein, 338 aa, Pseudoalteromonas tunicata D2; identical to SEQ ID NO: 47843

SEQ ID NO: 139015 - DNA, 1014 bp, Photobacterium sp. SKA34; identical to SEQ ID NO: 47844
  CDS (1)..(1014): transl_table=11

SEQ ID NO: 139016 - protein, 337 aa, Photobacterium sp. SKA34; identical to SEQ ID NO: 47845

SEQ ID NO: 139017 - DNA, 1035 bp, Oceanospirillum sp. MED92; identical to SEQ ID NO: 47846
  CDS (1)..(1035): transl_table=11

SEQ ID NO: 139018 - protein, 344 aa, Oceanospirillum sp. MED92; identical to SEQ ID NO: 47847

SEQ ID NO: 139019 - DNA, 1053 bp, Xanthobacter autotrophicus Py2; identical to SEQ ID NO: 47658
  CDS (1)..(1053): transl_table=11

SEQ ID NO: 139020 - protein, 350 aa, Xanthobacter autotrophicus Py2; identical to SEQ ID NO: 47659

SEQ ID NO: 139021 - DNA, 978 bp, Flavobacteria bacterium BBFL7; identical to SEQ ID NO: 47848
  CDS (1)..(978): transl_table=11

SEQ ID NO: 139022 - protein, 325 aa, Flavobacteria bacterium BBFL7; identical to SEQ ID NO: 47849

SEQ ID NO: 139023 - DNA, 1053 bp, gamma proteobacterium HTCC2207
  CDS (1)..(1053): transl_table=11
gtgattaaagttggtattgttggagcaacaggttacaccggagcggagttactccggttgttggccgtgcacccagaagcagaagtgacggtgatcacttctcgcagtgagcagggcaaacctgtcgccgatctctatcccagtttgcgcggtatcgtagagctggctttttctctgcccgatgtggatcagcttgcccagtgcgatgtggtattttttgctacgccccacggtgtcgcgcagagcatggttgccagcatactcgagcgcggcgttaaagttatcgacctgtcagcggacttccgtattcgagatgtgcccacttgggagagctggtatggccaaactcacggcgcccccgaattaattccccaggcagtctatggattgccggaacttaatcgtgaggctatagcaaacgccagtctaatcgcctgccccggctgttatcccaccagcgtacagttgggctttttgccattgatggaagctggctgtatagatctcaatgatttgatcgccaactcggcatccggtgtcagcggtgcgggtcgtcaggccagtatcagcggattgcacaccgaggtcagtgatagctttaaagcctatgcagcgtcaggccatcgccatcttcctgagattgtgcagggtttaaatgatatggcgctgtctgcaaatggatcagaagatgcatcggttaacctcacttttgtacctcatttgctgccgattaatcgtggtattcacagtaccttgtatgccacgttgacggacttaaccgtcgatgtgcaggccctctttgaagctcgctatgcgggcgagccctttgttgatgtaatgccagctggtagtcatcctcagaccaactctgtacgcggttctaatgtctgtcgcatcgcagtgcatcgtcccaatggcggcgctaaagtagttgtgctggtagtggaagataacctgacaaaaggtgcatcaggtcagggtattcaatgtatgaatattatctgcggtctggctgaaaacgctggattagctgcgccagcgctgctgccctga

SEQ ID NO: 139024 - protein, 350 aa, gamma proteobacterium HTCC2207
MIKVGIVGATGYTGAELLRLLAVHPEAEVTVITSRSEQGKPVADLYPSLRGIVELAFSLPDVDQLAQCDVVFFATPHGVAQSMVASILERGVKVIDLSADFRIRDVPTWESWYGQTHGAPELIPQAVYGLPELNREAIANASLIACPGCYPTSVQLGFLPLMEAGCIDLNDLIANSASGVSGAGRQASISGLHTEVSDSFKAYAASGHRHLPEIVQGLNDMALSANGSEDASVNLTFVPHLLPINRGIHSTLYATLTDLTVDVQALFEARYAGEPFVDVMPAGSHPQTNSVRGSNVCRIAVHRPNGGAKVVVLVVEDNLTKGASGQGIQCMNIICGLAENAGLAAPALLP

SEQ ID NO: 139025 - DNA, 1038 bp, delta proteobacterium MLMS-1; identical to SEQ ID NO: 47850
  CDS (1)..(1038): transl_table=11

SEQ ID NO: 139026 - protein, 345 aa, delta proteobacterium MLMS-1; identical to SEQ ID NO: 47851

SEQ ID NO: 139027 - DNA, 1056 bp, Desulfitobacterium hafniense DCB-2; identical to SEQ ID NO: 47854
  CDS (1)..(1056): transl_table=11

SEQ ID NO: 139028 - protein, 351 aa, Desulfitobacterium hafniense DCB-2; identical to SEQ ID NO: 47855

SEQ ID NO: 139029 - DNA, 1005 bp, Vibrio sp. Ex25; identical to SEQ ID NO: 123277
  CDS (1)..(1005): transl_table=11

SEQ ID NO: 139030 - protein, 334 aa, Vibrio sp. Ex25; identical to SEQ ID NO: 123278

SEQ ID NO: 139031 - DNA, 1011 bp, Alteromonadales bacterium TW-7; identical to SEQ ID NO: 47858
  CDS (1)..(1011): transl_table=11

SEQ ID NO: 139032 - protein, 336 aa, Alteromonadales bacterium TW-7; identical to SEQ ID NO: 47859

SEQ ID NO: 139033 - DNA, 942 bp, Pseudomonas putida GB-1; identical to SEQ ID NO: 47862
  CDS (1)..(942): transl_table=11

SEQ ID NO: 139034 - protein, 313 aa, Pseudomonas putida GB-1; identical to SEQ ID NO: 47863

SEQ ID NO: 139035 - DNA, 1035 bp, Pseudomonas putida GB-1; identical to SEQ ID NO: 47864
  CDS (1)..(1035): transl_table=11

SEQ ID NO: 139036 - protein, 344 aa, Pseudomonas putida GB-1; identical to SEQ ID NO: 47865

SEQ ID NO: 139037 - DNA, 1038 bp, Marinobacter sp. ELB17; identical to SEQ ID NO: 47866
  CDS (1)..(1038): transl_table=11

SEQ ID NO: 139038 - protein, 345 aa, Marinobacter sp. ELB17; identical to SEQ ID NO: 47867

SEQ ID NO: 139039 - DNA, 1038 bp, Herbaspirillum seropedicae; identical to SEQ ID NO: 47876
  CDS (1)..(1038): transl_table=11

SEQ ID NO: 139040 - protein, 345 aa, Herbaspirillum seropedicae; identical to SEQ ID NO: 47877

SEQ ID NO: 139041 - DNA, 1404 bp, Oryza sativa subsp
  CDS (1)..(1404)
atggggattgccaccgggttcatcgacatgatgcctccacttcttctcaggtgggatgatgaagagaggcgcacatgcggatggttgtgtccgcgaagaggtgctcgcccacatatggctgtgttgatggagagagctttaccatactgtgctgtcaccaactcagatactggtgtagcctgcctcctcgtatcacgtgcccatgagcacggctgcatcacaccttggttagctgcttgtgtccgcgtgtcgctaaaggatggagtctttggatctaatctgaagcaatgcggtggtttcatgctcaaaacaacccctaaggttggatcctcttcagtccgtgtgagggcatctgttgcttcttcaccgcagaaacagcactctcccaagacatcaggagttaaatcaggggaggagattgtcaggcttctagcaaaccatcctcaatttcgtatcaaagtgatgactgcagatagaaaagctggcgaacagtttggatctgtatttcctcacttaataacacaggacctgccaaatttagttgcagtaaaagatgcagatttttcaaatgtggatgcagttttttgttgcttgccacatggtacaacccaggaaattattaaaggtttaccgcaggaactgaagattgttgatctctctgcagattttcgattgcgtgatatcaatgagtacgctgagtggtatggccattctcatagggcaccagaacttcagcaagaagctgtgtatggcttgactgaagttcttcgcaatgaaataaggaatgcacggcttgttgcaaatccgggatgttatcccacatctattcaacttcctcttgttcctctaataaaggcaaaactgatcaaagtgagcaacattatcattgatgcaaaatctggggttagtggggcaggacgtggagctaaggaagccaatctctacaccgagatagctgaaggcattcatgcttatggaataaaaggccaccggcatgttcctgagattgaacaaggactttcagaggctgctgagtctaaagtcactatcagctttactccaaatctgatttgtatgaaacgtgggatgcaatctactatgttcgttgaaatggcacctggagtgactgccaatgatttgtatcagcatctcaagtctacatatgagggtgaagaatttgtgaaactgttaaatggtagcagcgttcctcacacacgccatgttgtgggatcaaattactgcttcatgaatgtctttgaggacagaattcctggacgtgccatcatcatatctgttatagataatcttgtgaagggagcatcaggtcaggctgttcagaaccttaatctgatgatgggtctgccagagaacactgggctgcaatatcaacccctatttccttga

SEQ ID NO: 139042 - protein, 467 aa, Oryza sativa subsp
MGIATGFIDMMPPLLLRWDDEERRTCGWLCPRRGARPHMAVLMERALPYCAVTNSDTGVACLLVSRAHEHGCITPWLAACVRVSLKDGVFGSNLKQCGGFMLKTTPKVGSSSVRVRASVASSPQKQHSPKTSGVKSGEEIVRLLANHPQFRIKVMTADRKAGEQFGSVFPHLITQDLPNLVAVKDADFSNVDAVFCCLPHGTTQEIIKGLPQELKIVDLSADFRLRDINEYAEWYGHSHRAPELQQEAVYGLTEVLRNEIRNARLVANPGCYPTSIQLPLVPLIKAKLIKVSNIIIDAKSGVSGAGRGAKEANLYTEIAEGIHAYGIKGHRHVPEIEQGLSEAAESKVTISFTPNLICMKRGMQSTMFVEMAPGVTANDLYQHLKSTYEGEEFVKLLNGSSVPHTRHVVGSNYCFMNVFEDRIPGRAIIISVIDNLVKGASGQAVQNLNLMMGLPENTGLQYQPLFP

SEQ ID NO: 139043 - DNA, 2499 bp, Phaeosphaeria nodorum
  CDS (1)..(2499)
atgcagagcgtcgtacgcgctggtgctcgtgtggcagcacgctcgtcccgccagatcctcgcggcgtcccccaccgcgcgatcccttccccgagccctcgtgggcagcgcggtgcccagccgtctatatgcgtcgtccagcgatggcaagaagtcgtccatatacgctgccttcctcaacctcctggccagtgccagctcgcgcagagaggtcgaccagtacctcggccagttccgctccgtgtcaccgcaccaattcgccgtcgtgaaggttggaggcgcaatccttactgaccatctgcaagagctatgcttcgccctgcagcagctccacgcgatcggcctgtaccccatcattgttcacggcgccggcccccagatgaaccagctactcctggactctggcgtggagcccgacttcattgatggcatccgggttacagacaagaagacgctgggcattgctcgcaagctgtttctcgaagcaaacatggatctggtcatgacgttgaagagggactggggtgtgcctgcccgccccattactgccggcgcgctgcaggccgactacctggacaaggagaagtggaagtacggtgggctgttcaacgccgagactggcaagctgatctcgcacatcaacttggagggcgagtacgacacatacatgaaccaggcttgggtgagatacggcaccaagctcaagattgtagaagcaaagaacctgctcgatggcctgccacgaacatcgagcgtcgccatcacccacccctcaaacctcggaaaggagctgttcacgcacactggaggtggtacattgattcgcaatggcggcagcgtcaaagaggtctccaagtttgaggagctggacatcaaggccctgtcggaagcgcttgccaaagaacgaggaggcgccgaagcttctgatgccgtcaacaaatacctcgacaacctcaagagccgttcgttcgaggtcttctctgacgactccatgggcgtcgtagctgttgtgtacccgtcagctcaggatggcgagtttgctcagctttcaaccttctctaccaccaaggaagcgttccgaaccaacgtgaccgacctggtcttcgagcgcatcaagcagaaatacccaaagctctattgggtcgtggatagccaggagcagaacctggtcaagtggcacttggaaaagactgacggcttcctccgacgcgaccaagaaatcttctgctggtggggaactgcagagtcgaaggaaatcttctcgttgcttgaggactactcaaagcaggggcgtggaatgctaaaggacagcttagaccatcaattcaggagggcagccgactttgtcgccagtctgaaacagggccagcaggtccggacttactcgacggcaacagccccgcgacctatgggacgttcatcaaggccaactgcgaggcagatttacagtcctgccgcaagccggggcttcgcaactaccgtccccagatcagaagagaccactaaccccaatcctccatatggcatcaagttcaagagcagagactggccggcaaaggtggccttgatcggtgcccgaggttacactggacaggctctcatcgagctcctcaacaagcacccgaacatggatttacgccatgtctcttcgcgtgagctcaaaggcaagaagcttgaaggatacaccaagcgcaacattgtctacgagaacctttcgccagaggacgtcaagcgcatggctgagaaaggcgaagttgattgctgggttatggctctgcccaacggtgtatgcaagccttttgttgacgcgattaatgagtccggaaaatctgatgctgtcatcgtcgatctgagcgctgattaccgatttgatgacacttggacatatggtctgcccgagacagtcgaccgccggaagcttgctgatgccaagagaatagcaaatcctggatgctacgccaccgccgcacagcttggtattgcgcctctgcttgagttcatcggtggccagcccacggtattcggtgtttctggttactcgggggctggcaccaagcccagtcctaagaatgacgtcaaacacctcgagaacaaccttatcccgtacagcttgacggaccatattcacgagaaggaaatttcaaggcaactgggtaccgaggtggccttcatccctcatgtagcggtctggttccaaggaattcaccacaccatttctattccactcaaccgcacaatgacatcccgagacattcgcaatctctaccaggatcgctatgcaggtgaaaagctcgtcaaagttgttggcgagtcacctctggtgaagaacatctcgggcaagcacggtgtcgaaattggtggatttgccgttcacagctctgggaagcgtgttgttgttaacgcgacaatcgacaatctgctcaagggtgctgcgacgcaatgtttgcagaacatgaatctagccctcggatacggggaatatgagggtatcccttactga

SEQ ID NO: 139044 - protein, 832 aa, Phaeosphaeria nodorum
MQSVVRAGARVAARSSRQILAASPTARSLPRALVGSAVPSRLYASSSDGKKSSIYAAFLNLLASASSRREVDQYLGQFRSVSPHQFAVVKVGGAILTDHLQELCFALQQLHAIGLYPIIVHGAGPQMNQLLLDSGVEPDFIDGIRVTDKKTLGIARKLFLEANMDLVMTLKRDWGVPARPITAGALQADYLDKEKWKYGGLFNAETGKLISHINLEGEYDTYMNQAWVRYGTKLKIVEAKNLLDGLPRTSSVAITHPSNLGKELFTHTGGGTLIRNGGSVKEVSKFEELDIKALSEALAKERGGAEASDAVNKYLDNLKSRSFEVFSDDSMGVVAVVYPSAQDGEFAQLSTFSTTKEAFRTNVTDLVFERIKQKYPKLYWVVDSQEQNLVKWHLEKTDGFLRRDQEIFCWWGTAESKEIFSLLEDYSKQGRGMLKDSLDHQFRRAADFVASLKQGQQVRTYSTATAPRPMGRSSRPTARQIYSPAASRGFATTVPRSEETTNPNPPYGIKFKSRDWPAKVALIGARGYTGQALIELLNKHPNMDLRHVSSRELKGKKLEGYTKRNIVYENLSPEDVKRMAEKGEVDCWVMALPNGVCKPFVDAINESGKSDAVIVDLSADYRFDDTWTYGLPETVDRRKLADAKRIANPGCYATAAQLGIAPLLEFIGGQPTVFGVSGYSGAGTKPSPKNDVKHLENNLIPYSLTDHIHEKEISRQLGTEVAFIPHVAVWFQGIHHTISIPLNRTMTSRDIRNLYQDRYAGEKLVKVVGESPLVKNISGKHGVEIGGFAVHSSGKRVVVNATIDNLLKGAATQCLQNMNLALGYGEYEGIPY

SEQ ID NO: 139045 - DNA, 1158 bp, Medicago truncatula; identical to SEQ ID NO: 47880
  CDS (1)..(1158)

SEQ ID NO: 139046 - protein, 385 aa, Medicago truncatula; identical to SEQ ID NO: 47881

SEQ ID NO: 139047 - DNA, 1035 bp, Thermoanaerobacter ethanolicus; identical to SEQ ID NO: 47882
  CDS (1)..(1035): transl_table=11

SEQ ID NO: 139048 - protein, 344 aa, Thermoanaerobacter ethanolicus; identical to SEQ ID NO: 47883

SEQ ID NO: 139049 - DNA, 1026 bp, Streptomyces griseus subsp; identical to SEQ ID NO: 47884
  CDS (1)..(1026): transl_table=11

SEQ ID NO: 139050 - protein, 341 aa, Streptomyces griseus subsp; identical to SEQ ID NO: 47885

SEQ ID NO: 139051 - DNA, 2574 bp, Candida albicans; identical to SEQ ID NO: 47886
  CDS (1)..(2574): transl_table=12

SEQ ID NO: 139052 - protein, 857 aa, Candida albicans; identical to SEQ ID NO: 47887

SEQ ID NO: 139053 - DNA, 2658 bp, Schizosaccharomyces pombe; identical to SEQ ID NO: 47890
  CDS (1)..(2658)

SEQ ID NO: 139054 - protein, 885 aa, Schizosaccharomyces pombe; identical to SEQ ID NO: 47891

SEQ ID NO: 139055 - DNA, 3163 bp, Saccharomyces cerevisiae
  CDS (239)..(2830)
gaattcttatccgaatgactcagtctacatcaaaaaactgtggccgaatggtggtaattgatgactcttctatttttttttttcatataaagagcttgcgcgcgtgttgttgttcgctatccatttccattaggaacatttttggatattatttttcagacccgtaatatacttaacacatataccactaaaggcaaaagaaagagagatctgaagtgagaaataagtctgcatcattatgccatctgctagcttactcgtctcgacaaagagacttaacgcttccaaattccaaaaatttgtgtcttcattaaacaaatccaccatagcaggatttgcatctgtacccttgagagctccaccatccgttgcatttacgagaaagaaagtcggatactcaaagaggtatgtttcatctactaacggcttttcagctactagatccactgtgatccaactgttgaacaatatcagcacaaaaagagaggttgaacaatatttgaaatatttcacttccgtctcacaacaacaatttgctgtgatcaaggtgggtggtgccattatcagcgacaatctacacgaactcgcttcctgcttggcatttttgtatcatgttggtctatatccaatagttttacatggtaccggtcctcaggttaatggaaggctagaagcgcagggaattgagccagactatattgatggtattagaatcacggatgagcacacaatggccgtagttagaaaatgttttttggaacaaaatcttaagctagttactgcattagaacagctaggggtccgtgcaagacccattacttctggtgtttttactgctgactatttggataaggacaaatacaagctagtgggcaatattaaaagtgtcacaaaagagccaattgaagcatctattaaggcaggtgccctaccaatcttgacctctttagccgaaactgcttctggtcaaatgttgaacgtcaacgccgacgtagctgctggtgaattagcccgtgtttttgagcctttgaagatcgtttacctgaatgagaaagggggtattatcaatggctccacgggagaaaaaatttcgatgatcaatttggatgaagagtatgacgatttaatgaagcaaagttgggtgaagtatggtaccaaattaaaaattagagaaattaaagagcttttggactatcttcctcgttcttcttcagttgcaatcattaacgttcaagatctacaaaaagaactgttcactgattctggtgcgggtactatgatcaggagaggttacaaattagtgaagagatcctccattggcgaatttccatccgctgatgctctaagaaaagctcttcaaagggacgctggcattagttccggtaaagaatctgttgcttcttatttaagatatttggaaaactctgattttgtctcttatgctgatgaacctcttgaagcagtggccattgtaaagaaagatacgaacgttcccacactagacaaatttgtctgttctgacgcagcctggttgaataacgtcacagataatgtattcaatgttttgcgccgtgattttcctgctttacaatgggtagtcagtgaaaatgatgctaacattgcatggcattttgataagtctcaaggttcatatctaaaaggcggaaaagttttgttctggtatggtatcgatgatataaatacaatatccgagctcgttgaaaattttgtgaagtcgtgtgacactgcttctaccctcaactcatcagcaagtagtggagtatttgctaacaaaaaatcagctaggtcgtactcaactagatccactcctcgtcccgagggagttaacaccaaccctggtcgtgtcgcgcttattggtgctagaggttacacaggtaaaaatttggtatctttgatcaacggccacccatatttagaagtggcccatgtttcttctcgtgaattgaaaggtcaaaagttgcaagattatacaaaatccgaaattatatatgaaagtttgcaaatacaggatattaggaaactggaagaacaaaatgctgtggacttttgggttatggcattacccaacaaagtctgtgaacctttcgttgagacaatccaaagtgttcatggtaagtctaaaattattgatctgtccgctgatcacaggtttgtatcagaatcagactgggcttacggtttgccagaattgaatgatagagcaaaaattgcaaacgctgccaaaattgctaatcccggttgttatgctactggttcgcaattaacgatttctccgttaacaaagtatatcaatggtcttccaactgtgtttggtgtttcagggtattcaggcgcggggacgaagccttctccaaaaaacgatcccaaattcttgaacaataacttaattccttacgctttaagtgatcatatacacgaacgcgaaatctcagctcgcattgggcacaatgttgcattcatgccccatgttgggcagtggtttcaaggtatctctttgaccgtctctattccaataaaaaaaggttccttgtctattgatgagatcaggaaattatacagaaatttttacgaagacgaaaagctagtacatgtcatcgatgatatcccactggttaaagatattgagggcacccatggtgtagttattggtggtttcaagctgaatgatgctgaagatcgtgtagttgtttgcgcaaccatcgataacttacttaaaggcgccgctactcaatgtctgcaaaatattaatcttgctatgggttatggagagtatgctggtatccctgaaaataaaattattggtgtctgatcactgtgtatagtagatctgcagctcagtcacatgagacattaacgtatataaatatataaatatatatatatccattaaataacgaagtagacatggtctaaaaatagtgcttctcatgtatttgattttgagtagccataagaataattattgatttcaagatctttgatctccttacatccaaaattataataccactttatggtatcacgacatcaccacaacagagaaggattgccgcatttggatatcgtaaacaaaggcgttaccatagaaatgtactgattggcagaattactcttcaggagaatctttcatacaaaggaattc

SEQ ID NO: 139056 - protein, 863 aa, Saccharomyces cerevisiae; identical to SEQ ID NO: 47893

SEQ ID NO: 139057 - DNA, 1035 bp, Pseudomonas putida; identical to SEQ ID NO: 47900
  CDS (1)..(1035): transl_table=11

SEQ ID NO: 139058 - protein, 344 aa, Pseudomonas putida; identical to SEQ ID NO: 47901

SEQ ID NO: 139059 - DNA, 942 bp, Pseudomonas putida; identical to SEQ ID NO: 47908
  CDS (1)..(942): transl_table=11

SEQ ID NO: 139060 - protein, 313 aa, Pseudomonas putida; identical to SEQ ID NO: 47909

SEQ ID NO: 139061 - DNA, 1050 bp, Acinetobacter sp; identical to SEQ ID NO: 47912
  CDS (1)..(1050): transl_table=11

SEQ ID NO: 139062 - protein, 349 aa, Acinetobacter sp; identical to SEQ ID NO: 47913

SEQ ID NO: 139063 - DNA, 1068 bp, Aeropyrum pernix; identical to SEQ ID NO: 47914
  CDS (1)..(1068): transl_table=11

SEQ ID NO: 139064 - protein, 355 aa, Aeropyrum pernix; identical to SEQ ID NO: 47915

SEQ ID NO: 139065 - DNA, 999 bp, Archaeoglobus fulgidus; identical to SEQ ID NO: 47920
  CDS (1)..(999): transl_table=11

SEQ ID NO: 139066 - protein, 332 aa, Archaeoglobus fulgidus; identical to SEQ ID NO: 47921

SEQ ID NO: 139067 - DNA, 1029 bp, Azoarcus sp; identical to SEQ ID NO: 47922
  CDS (1)..(1029): transl_table=11

SEQ ID NO: 139068 - protein, 342 aa, Azoarcus sp; identical to SEQ ID NO: 47923

SEQ ID NO: 139069 - DNA, 1035 bp, Bacillus amyloliquefaciens; identical to SEQ ID NO: 47924
  CDS (1)..(1035): transl_table=11

SEQ ID NO: 139070 - protein, 344 aa, Bacillus amyloliquefaciens; identical to SEQ ID NO: 47925

SEQ ID NO: 139071 - DNA, 1038 bp, Bacillus anthracis; identical to SEQ ID NO: 47926
  CDS (1)..(1038): transl_table=11

SEQ ID NO: 139072 - protein, 345 aa, Bacillus anthracis; identical to SEQ ID NO: 47927

SEQ ID NO: 139073 - DNA, 1038 bp, Bacillus thuringiensis subsp; identical to SEQ ID NO: 47932
  CDS (1)..(1038): transl_table=11

SEQ ID NO: 139074 - protein, 345 aa, Bacillus thuringiensis subsp; identical to SEQ ID NO: 47933

SEQ ID NO: 139075 - DNA, 1035 bp, Bacillus clausii; identical to SEQ ID NO: 47936
  CDS (1)..(1035): transl_table=11

SEQ ID NO: 139076 - protein, 344 aa, Bacillus clausii; identical to SEQ ID NO: 47937

SEQ ID NO: 139077 - DNA, 1065 bp, Bordetella bronchiseptica; identical to SEQ ID NO: 47942
  CDS (1)..(1065): transl_table=11

SEQ ID NO: 139078 - protein, 354 aa, Bordetella bronchiseptica; identical to SEQ ID NO: 47943

SEQ ID NO: 139079 - DNA, 1029 bp, Campylobacter jejuni; identical to SEQ ID NO: 47952
  CDS (1)..(1029): transl_table=11

SEQ ID NO: 139080 - protein, 342 aa, Campylobacter jejuni; identical to SEQ ID NO: 47953

SEQ ID NO: 139081 - DNA, 1026 bp, Chlorobium tepidum; identical to SEQ ID NO: 47958
  CDS (1)..(1026): transl_table=11

SEQ ID NO: 139082 - protein, 341 aa, Chlorobium tepidum; identical to SEQ ID NO: 47959

SEQ ID NO: 139083 - DNA, 1029 bp, Chromobacterium violaceum; identical to SEQ ID NO: 47960
  CDS (1)..(1029): transl_table=11

SEQ ID NO: 139084 - protein, 342 aa, Chromobacterium violaceum; identical to SEQ ID NO: 47961

SEQ ID NO: 139085 - DNA, 1044 bp, Corynebacterium diphtheriae; identical to SEQ ID NO: 47964
  CDS (1)..(1044): transl_table=11

SEQ ID NO: 139086 - protein, 347 aa, Corynebacterium diphtheriae; identical to SEQ ID NO: 47965

SEQ ID NO: 139087 - DNA, 1005 bp, Escherichia coli O157; identical to SEQ ID NO: 47968
  CDS (1)..(1005): transl_table=11

SEQ ID NO: 139088 - protein, 334 aa, Escherichia coli O157; identical to SEQ ID NO: 47969

SEQ ID NO: 139089 - DNA, 1041 bp, Geobacter sulfurreducens; identical to SEQ ID NO: 47978
  CDS (1)..(1041): transl_table=11

SEQ ID NO: 139090 - protein, 346 aa, Geobacter sulfurreducens; identical to SEQ ID NO: 47979

SEQ ID NO: 139091 - DNA, 1053 bp, Gloeobacter violaceus; identical to SEQ ID NO: 47980
  CDS (1)..(1053): transl_table=11

SEQ ID NO: 139092 - protein, 350 aa, Gloeobacter violaceus; identical to SEQ ID NO: 47981

SEQ ID NO: 139093 - DNA, 1026 bp, Idiomarina loihiensis; identical to SEQ ID NO: 47984
  CDS (1)..(1026): transl_table=11

SEQ ID NO: 139094 - protein, 341 aa, Idiomarina loihiensis; identical to SEQ ID NO: 47985

SEQ ID NO: 139095 - DNA, 1044 bp, Leifsonia xyli subsp; identical to SEQ ID NO: 47988
  CDS (1)..(1044): transl_table=11

SEQ ID NO: 139096 - protein, 347 aa, Leifsonia xyli subsp; identical to SEQ ID NO: 47989

SEQ ID NO: 139097 - DNA, 1011 bp, Methanosarcina acetivorans; identical to SEQ ID NO: 48000
  CDS (1)..(1011): transl_table=11

SEQ ID NO: 139098 - protein, 336 aa, Methanosarcina acetivorans; identical to SEQ ID NO: 48001

SEQ ID NO: 139099 - DNA, 1032 bp, Methanopyrus kandleri; identical to SEQ ID NO: 48004
  CDS (1)..(1032): transl_table=11

SEQ ID NO: 139100 - protein, 343 aa, Methanopyrus kandleri; identical to SEQ ID NO: 48005

SEQ ID NO: 139101 - DNA, 1011 bp, Moritella abyssi; identical to SEQ ID NO: 48012
  CDS (1)..(1011): transl_table=11

SEQ ID NO: 139102 - protein, 336 aa, Moritella abyssi; identical to SEQ ID NO: 48013

SEQ ID NO: 139103 - DNA, 1011 bp, Moritella profunda; identical to SEQ ID NO: 48014
  CDS (1)..(1011): transl_table=11

SEQ ID NO: 139104 - protein, 336 aa, Moritella profunda; identical to SEQ ID NO: 48015

SEQ ID NO: 139105 - DNA, 1044 bp, Neisseria meningitidis serogroup B; identical to SEQ ID NO: 48024
  CDS (1)..(1044): transl_table=11

SEQ ID NO: 139106 - protein, 347 aa, Neisseria meningitidis serogroup B; identical to SEQ ID NO: 48025

SEQ ID NO: 139107 - DNA, 1029 bp, Nitrosomonas europaea; identical to SEQ ID NO: 48026
  CDS (1)..(1029): transl_table=11

SEQ ID NO: 139108 - protein, 342 aa, Nitrosomonas europaea; identical to SEQ ID NO: 48027

SEQ ID NO: 139109 - DNA, 1059 bp, Nostoc ellipsosporum; identical to SEQ ID NO: 48028
  CDS (1)..(1059): transl_table=11

SEQ ID NO: 139110 - protein, 352 aa, Nostoc ellipsosporum; identical to SEQ ID NO: 48029

SEQ ID NO: 139111 - DNA, 1041 bp, Oceanobacillus iheyensis; identical to SEQ ID NO: 48030
  CDS (1)..(1041): transl_table=11

SEQ ID NO: 139112 - protein, 346 aa, Oceanobacillus iheyensis; identical to SEQ ID NO: 48031

SEQ ID NO: 139113 - DNA, 1248 bp, Oryza sativa subsp; identical to SEQ ID NO: 48132
  CDS (1)..(1248)

SEQ ID NO: 139114 - protein, 415 aa, Oryza sativa subsp; identical to SEQ ID NO: 48133

SEQ ID NO: 139115 - DNA, 1008 bp, Pasteurella multocida; identical to SEQ ID NO: 48032
  CDS (1)..(1008): transl_table=11

SEQ ID NO: 139116 - protein, 335 aa, Pasteurella multocida; identical to SEQ ID NO: 48033

SEQ ID NO: 139117 - DNA, 1044 bp, Picrophilus torridus; identical to SEQ ID NO: 48036
  CDS (1)..(1044): transl_table=11

SEQ ID NO: 139118 - protein, 347 aa, Picrophilus torridus; identical to SEQ ID NO: 48037

SEQ ID NO: 139119 - DNA, 993 bp, Pyrococcus abyssi; identical to SEQ ID NO: 48046
  CDS (1)..(993): transl_table=11

SEQ ID NO: 139120 - protein, 330 aa, Pyrococcus abyssi; identical to SEQ ID NO: 48047

SEQ ID NO: 139121 - DNA, 1056 bp, Pyrobaculum aerophilum; identical to SEQ ID NO: 48048
  CDS (1)..(1056): transl_table=11

SEQ ID NO: 139122 - protein, 351 aa, Pyrobaculum aerophilum; identical to SEQ ID NO: 48049

SEQ ID NO: 139123 - DNA, 993 bp, Pyrococcus kodakaraensis; identical to SEQ ID NO: 48054
  CDS (1)..(993): transl_table=11

SEQ ID NO: 139124 - protein, 330 aa, Pyrococcus kodakaraensis; identical to SEQ ID NO: 48055

SEQ ID NO: 139125 - DNA, 1041 bp, Rhodopirellula baltica; identical to SEQ ID NO: 48064
  CDS (1)..(1041): transl_table=11

SEQ ID NO: 139126 - protein, 346 aa, Rhodopirellula baltica; identical to SEQ ID NO: 48065

SEQ ID NO: 139127 - DNA, 1257 bp, Rhodobacter capsulatus; identical to SEQ ID NO: 48066
  CDS (229)..(1257): transl_table=11

SEQ ID NO: 139128 - protein, 342 aa, Rhodobacter capsulatus; identical to SEQ ID NO: 48067

SEQ ID NO: 139129 - DNA, 1005 bp, Salmonella paratyphi; identical to SEQ ID NO: 48068
  CDS (1)..(1005): transl_table=11

SEQ ID NO: 139130 - protein, 334 aa, Salmonella paratyphi; identical to SEQ ID NO: 48069

SEQ ID NO: 139131 - DNA, 1005 bp, Salmonella typhimurium; identical to SEQ ID NO: 48070
  CDS (1)..(1005): transl_table=11

SEQ ID NO: 139132 - protein, 334 aa, Salmonella typhimurium; identical to SEQ ID NO: 48071

SEQ ID NO: 139133 - DNA, 981 bp, Shewanella oneidensis; identical to SEQ ID NO: 48072
  CDS (1)..(981): transl_table=11

SEQ ID NO: 139134 - protein, 326 aa, Shewanella oneidensis; identical to SEQ ID NO: 48073

SEQ ID NO: 139135 - DNA, 1005 bp, Shigella flexneri; identical to SEQ ID NO: 48074
  CDS (1)..(1005): transl_table=11

SEQ ID NO: 139136 - protein, 334 aa, Shigella flexneri; identical to SEQ ID NO: 48075

SEQ ID NO: 139137 - DNA, 1029 bp, Silicibacter pomeroyi; identical to SEQ ID NO: 48076
  CDS (1)..(1029): transl_table=11

SEQ ID NO: 139138 - protein, 342 aa, Silicibacter pomeroyi; identical to SEQ ID NO: 48077

SEQ ID NO: 139139 - DNA, 1032 bp, Staphylococcus aureus
  CDS (1)..(1032): transl_table=11
atgattaaagtaggtatcgttggcggtagcggttatggcgcaattgaattaattcgattgttacaaacacatcctcatgtaacgattgcacacatctactcacattcaaaagtagatgaaccgttgaaattaacatttccacatttacaacatattatgcaacatttcgaagcacttacagtggacaataatgactgtgatgtaattttctttgcgacaccagcacccgtaagtaaaacatgtatccctcccttagtagaaaaaggtattcatgttatcgatttatctggcgcatttagaattaagaatcgtgaaatatatgaagcatattacaaagaaactgctgcagcacaagatgatttgaatcatgctatttacagcatttcagaatggcaatcgtttgataacaatggaacgaagctcatttctaatcctggctgtttccctacagcaacattattagcattacatccacttattagcgaaaaaatagtagatttgtcatctattattattgatgctaagaccggcgtgtcaggtgctggtcgttcattatcacaacgtgttcatttttcagaaatgaatgaaaatctaagcgcttatgcaatcggaaaccataaacacaaaccggaaatcgagcaatatttatctatcattgcgggtcaagatgtatcagtcatatttacaccacatctcgtaccaatgacacgaggtattttatcaacaatatatgtcaaattatcatctgaatatacgactgaatcattacataaattaatgacctcttattatgctaatcagccatttgtcagaattagagatattgggacttttccaaccacaaaagaagtactcggtagtaactactgcgatatcggcatctatgtagatgaaacaacgcaaacagcaattttagtatcagtgattgataaccttgtcaaaggcgcaagtgggcaagccattcaaaatttaaatatattatatgattttgaagtgacgactggcctaaatcaatcaccagtttatccataa

SEQ ID NO: 139140 - protein, 343 aa, Staphylococcus aureus
MIKVGIVGGSGYGAIELIRLLQTHPHVTIAHIYSHSKVDEPLKLTFPHLQHIMQHFEALTVDNNDCDVIFFATPAPVSKTCIPPLVEKGIHVIDLSGAFRIKNREIYEAYYKETAAAQDDLNHAIYSISEWQSFDNNGTKLISNPGCFPTATLLALHPLISEKIVDLSSIIIDAKTGVSGAGRSLSQRVHFSEMNENLSAYAIGNHKHKPEIEQYLSIIAGQDVSVIFTPHLVPMTRGILSTIYVKLSSEYTTESLHKLMTSYYANQPFVRIRDIGTFPTTKEVLGSNYCDIGIYVDETTQTAILVSVIDNLVKGASGQAIQNLNILYDFEVTTGLNQSPVYP

SEQ ID NO: 139141 - DNA, 1029 bp, Streptomyces avermitilis; identical to SEQ ID NO: 48084
  CDS (1)..(1029): transl_table=11

SEQ ID NO: 139142 - protein, 342 aa, Streptomyces avermitilis; identical to SEQ ID NO: 48085

SEQ ID NO: 139143 - DNA, 1026 bp, Streptomyces clavuligerus; identical to SEQ ID NO: 48086
  CDS (1)..(1026): transl_table=11

SEQ ID NO: 139144 - protein, 341 aa, Streptomyces clavuligerus; identical to SEQ ID NO: 48087

SEQ ID NO: 139145 - DNA, 1029 bp, Streptomyces coelicolor; identical to SEQ ID NO: 48088
  CDS (1)..(1029): transl_table=11

SEQ ID NO: 139146 - protein, 342 aa, Streptomyces coelicolor; identical to SEQ ID NO: 48089

SEQ ID NO: 139147 - DNA, 1023 bp, Streptococcus mutans; identical to SEQ ID NO: 48090
  CDS (1)..(1023): transl_table=11

SEQ ID NO: 139148 - protein, 340 aa, Streptococcus mutans; identical to SEQ ID NO: 48091

SEQ ID NO: 139149 - DNA, 1053 bp, Sulfolobus acidocaldarius; identical to SEQ ID NO: 48092
  CDS (1)..(1053): transl_table=11

SEQ ID NO: 139150 - protein, 350 aa, Sulfolobus acidocaldarius; identical to SEQ ID NO: 48093

SEQ ID NO: 139151 - DNA, 1053 bp, Synechococcus elongatus; identical to SEQ ID NO: 48098
  CDS (1)..(1053): transl_table=11

SEQ ID NO: 139152 - protein, 350 aa, Synechococcus elongatus; identical to SEQ ID NO: 48099

SEQ ID NO: 139153 - DNA, 1056 bp, Synechocystis sp; identical to SEQ ID NO: 123453
  CDS (1)..(1056): transl_table=11

SEQ ID NO: 139154 - protein, 351 aa, Synechocystis sp; identical to SEQ ID NO: 47567

SEQ ID NO: 139155 - DNA, 1020 bp, Thermotoga maritima; identical to SEQ ID NO: 48104
  CDS (1)..(1020): transl_table=11

SEQ ID NO: 139156 - protein, 339 aa, Thermotoga maritima; identical to SEQ ID NO: 48105

SEQ ID NO: 139157 - DNA, 1002 bp, Vibrio cholerae
  CDS (1)..(1002): transl_table=11
atgttaaaaaccaccatcatcggcgcaagcggttacaccggagcagaactggctcttatggtgcacaaacacccacaactcacgctatcaggtttatacgtttccgccaacagtgtggatgcgggcaaatcgctggcgcagttgcatggtcgagtggcagggctgattgatatgccagtgcaagccttgactgatgtggatactgttgcggccgagtgtgatgtggtctttctggccaccgcgcatgaagtgagtcatgacctcgcgccgcaatttctcgctcaaggttgtcaggtctttgatctgtctggtgcatttcgggtgcagagcgaagcgttttatccaaccttttatggctttgcgcatcagcattctgaatggttggaaaaagcggtgtatggcctggctgagtggaatgcggaagcaatcaaaaccagccctatgattgctgttgcgggttgctacccaacggcatcgcaactggcgattaagcctctgttggtggatgggttaatcgacactacccaatggccagtgattaacgcggtgagtggtgtctctggtgcggggcgtaaagccaccatgaccaacagcttctgtgaagtgagcttgcagccctacggtgtgtttaaccaccgtcatcaaccagaaattgcgactcatctaggctgtgaggtgatcttcaccccgcatcttggcaactttaagcgcgggattctggccaccatcacaatgaaattagcggatggtgtcaccgagcagcaagtcgcagaagcttttagcaaggcgtatcaagataagccattggtgcgtttcagcaatggtttaccacggattcaagatgtcgagtttaccccattttgtgacctcggctggaaggtacaaggacgtcacatcatagtggtgtctgctatcgacaatttattgaaaggcgcatcgagtcaagcgatgcagtgtttaaatattcactacggtttcgatgaattaaccgcgttggtgtaa

SEQ ID NO: 139158 - protein, 333 aa, Vibrio cholerae; identical to SEQ ID NO: 48111

SEQ ID NO: 139159 - DNA, 1005 bp, Vibrio parahaemolyticus; identical to SEQ ID NO: 48112
  CDS (1)..(1005): transl_table=11

SEQ ID NO: 139160 - protein, 334 aa, Vibrio parahaemolyticus; identical to SEQ ID NO: 48113

SEQ ID NO: 139161 - DNA, 1014 bp, Wolinella succinogenes; identical to SEQ ID NO: 48118
  CDS (1)..(1014): transl_table=11

SEQ ID NO: 139162 - protein, 337 aa, Wolinella succinogenes; identical to SEQ ID NO: 48119

SEQ ID NO: 139163 - DNA, 951 bp, Xanthomonas axonopodis pv; identical to SEQ ID NO: 48120
  CDS (1)..(951): transl_table=11

SEQ ID NO: 139164 - protein, 316 aa, Xanthomonas axonopodis pv; identical to SEQ ID NO: 48121

SEQ ID NO: 139165 - DNA, 1005 bp, Yersinia pestis; identical to SEQ ID NO: 48128
  CDS (1)..(1005): transl_table=11

SEQ ID NO: 139166 - protein, 334 aa, Yersinia pestis; identical to SEQ ID NO: 48129

SEQ ID NO: 139167 - DNA, 1005 bp, Yersinia pseudotuberculosis
  CDS (1)..(1005): transl_table=11
atgttaaatacgttgattgttggtgccagtggctatgccggcgcggagcttacggcttaccttaatcgtcacccacatatgaacataaccggtttagcggtttcagcgcaaagtgcagatgcaggaaaattactttccgaactgcatccgcagttaaaaggcatccttgatctcccgctacagcccttggtagatgtggctcaggcggctaaaggtatcgatgtggttttcctcgctaccgctcatgaggtcagccatgatttggcaccacaatttttagccgctggctgtgtggtatttgatctttccggtgcattccgtgtgcgtgatgcggcgttttacagccaatattacggttttgaacaccaacatcccgattggctcgataaggcggtttatggcctggcagaatggcaatcagaagacattaagcaagctcaattgattgctgttcctggttgttatccaaccgcatcacaactggcgcttaaaccgttggttgatgggcaattactgaacgatgcacagtggccagtcattaatgccgtcagtggtgtcagcggtgcagggcgtaaagccagcatgggcaacagcttctgtgaagttagcttgcagccatatggcctatttacccaccgtcaccagccagaaattgttgcccatcttggcacccccgtcatttttacaccgcatctggggaattttgcccgagggatcttggcgacgattacctgccgcctgaaagctggggtcacggcgcaaaacatcgccgatgcctatcaccatgcttatcagaataagccactggtgcggttgtatcaacaaggtgtcccggcgctgaaagccgtggtcggcctacctttctgtgatattggtttctcggtacaaggcgagcatttaattattgttgccaccgaagataacctgctgaaaggtgctgcggctcaggccgtacaatgtatgaatatccgttttggcttcccggaaacgcagtccctgttgtag

SEQ ID NO: 139168 - protein, 334 aa, Yersinia pseudotuberculosis; identical to SEQ ID NO: 48131

SEQ ID NO: 139169 - DNA, 24 bp, Artificial sequence
  primer
atgttgaatacgctgattgtgggt

SEQ ID NO: 139170 - DNA, 24 bp, Artificial sequence
  primer
ttaaataagagactgcgtttccgc

SEQ ID NO: 139171 - protein, 404 aa, Artificial sequence
  consensus sequence
  Variant (2)..(3): Xaa in position 2 to 3 is any amino acid
  Variant (6)..(6): Xaa in position 6 is any amino acid
  Variant (8)..(8): Xaa in position 8 is any amino acid
  Variant (11)..(16): Xaa in position 11 to 16 is any amino acid
  Variant (19)..(28): Xaa in position 19 to 28 is any amino acid
  Variant (29)..(36): Xaa in position 29 to 36 is any or no amino acid
  Variant (38)..(51): Xaa in position 38 to 51 is any amino acid
  Variant (52)..(73): Xaa in position 52 to 73 is any or no amino acid
  Variant (75)..(80): Xaa in position 75 to 80 is any amino acid
  Variant (82)..(98): Xaa in position 82 to 98 is any amino acid
  Variant (99)..(108): Xaa in position 99 to 108 is any or no amino acid
  Variant (111)..(112): Xaa in position 111 to 112 is any amino acid
  Variant (114)..(114): Xaa in position 114 is any amino acid
  Variant (116)..(119): Xaa in position 116 to 119 is any amino acid
  Variant (120)..(128): Xaa in position 120 to 128 is any or no amino acid
  Variant (130)..(131): Xaa in position 130 to 131 is any amino acid
  Variant (132)..(148): Xaa in position 132 to 148 is any or no amino acid
  Variant (152)..(152): Xaa in position 152 is any amino acid
  Variant (154)..(164): Xaa in position 154 to 164 is any amino acid
  Variant (165)..(174): Xaa in position 165 to 174 is any or no amino acid
  Variant (178)..(179): Xaa in position 178 to 179 is any amino acid
  Variant (181)..(183): Xaa in position 181 to 183 is any amino acid
  Variant (185)..(187): Xaa in position 185 to 187 is any amino acid
  Variant (189)..(202): Xaa in position 189 to 202 is any amino acid
  Variant (203)..(211): Xaa in position 203 to 211 is any or no amino acid
  Variant (213)..(213): Xaa in position 213 is any amino acid
  Variant (218)..(233): Xaa in position 218 to 233 is any amino acid
  Variant (234)..(246): Xaa in position 234 to 246 is any or no amino acid
  Variant (248)..(251): Xaa in position 248 to 251 is any amino acid
  Variant (252)..(255): Xaa in position 252 to 255 is any or no amino acid
  Variant (257)..(257): Xaa in position 257 is any amino acid
  Variant (259)..(260): Xaa in position 259 to 260 is any amino acid
  Variant (262)..(271): Xaa in position 262 to 271 is any amino acid
  Variant (272)..(284): Xaa in position 272 to 284 is any or no amino acid
  Variant (286)..(286): Xaa in position 286 is any amino acid
  Variant (288)..(293): Xaa in position 288 to 293 is any amino acid
  Variant (296)..(298): Xaa in position 296 to 298 is any amino acid
  Variant (300)..(316): Xaa in position 300 to 316 is any amino acid
  Variant (317)..(325): Xaa in position 317 to 325 is any or no amino acid
  Variant (327)..(338): Xaa in position 327 to 338 is any amino acid
  Variant (339)..(345): Xaa in position 339 to 345 is any or no amino acid
  Variant (347)..(374): Xaa in position 347 to 374 is any amino acid
  Variant (375)..(377): Xaa in position 375 to 377 is any or no amino acid
  Variant (381)..(381): Xaa in position 381 is any amino acid
  Variant (384)..(386): Xaa in position 384 to 386 is any amino acid
  Variant (389)..(389): Xaa in position 389 is any amino acid
  Variant (391)..(392): Xaa in position 391 to 392 is any amino acid
  Variant (394)..(396): Xaa in position 394 to 396 is any amino acid
  Variant (398)..(398): Xaa in position 398 is any amino acid
  Variant (399)..(399): Xaa in position 399 is any or no amino acid
  Variant (401)..(402): Xaa in position 401 to 402 is any amino acid
GXXGYXGXELXXXXXXHPXXXXXXXXXXXXXXXXXXGXXXXXXXXXXXXXXXXXXXXXXXXXXXXXXXXXXXXDXXXXXXPXXXXXXXXXXXXXXXXXXXXXXXXXXXDLXXDXRXXXXXXXXXXXXXYXXXXXXXXXXXXXXXXXXXYGLXEXXXXXXXXXXXXXXXXXXXXXPGCXXTXXXLXXXPXXXXXXXXXXXXXXXXXXXXXXXGXSGAGXXXXXXXXXXXXXXXXXXXXXXXXXXXXXYXXXXXXXXHXHXXEXXXXXXXXXXXXXXXXXXXXXXXFXPXXXXXXRGXXXTXXXXXXXXXXXXXXXXXXXXXXXXXXYXXXXXXXXXXXXXXXXXXXPXXXXXXXXXXXXXXXXXXXXXXXXXXXXXXXDNLXKGXXXQAXQXXNXXXGXXEXXGL

SEQ ID NO: 139172 - protein, 16 aa, Artificial sequence
  protein pattern
  Variant (3)..(3): Xaa in position 3 is Ala, Gly, Gln or Ser
  Variant (4)..(4): Xaa in position 4 is Ala or Ser
  Variant (5)..(5): Xaa in position 5 is Ala, Gly, Ser or Thr
  Variant (7)..(7): Xaa in position 7 is Ala, Cys, Gly or Ser
  Variant (8)..(8): Xaa in position 8 is Ile, Leu, Met or Val
  Variant (10)..(10): Xaa in position 10 is Ala, Cys, Asp, Asn or Val
  Variant (11)..(11): Xaa in position 11 is any amino acid
  Variant (13)..(15): Xaa in position 13 to 15 is any amino acid
  Variant (16)..(16): Xaa in position 16 is Asp, Glu, Gly, Asn or Ser
KGXXXQXXQXXNXXXX

SEQ ID NO: 139173 - DNA, 1059 bp, Saccharomyces cerevisiae
  CDS (1)..(1059)
atggtcaaggagacaaaactttatgatttacttggagtatctccaagtgctaatgagcaagaactgaaaaagggttatagaaaagcagctctaaaatatcatccagataagccaacaggtgacacagaaaagtttaaggagatatcagaggcctttgaaattttaaatgatcctcaaaaaagggaaatatatgatcaatacggtctcgaggctgctagatctggtggtccaagctttggtcctggtggtcctggcggtgctggaggtgctggaggcttccctggcggtgcgggcggattctccggaggacatgcgttcagtaatgaggatgctttcaatattttttcacaattctttggcggcagttccccattcggtggtgctgatgacagtggcttcagtttctctagttatccatctggcggcggtgctggtatgggaggtatgcctggaggaatgggaggaatgcatggcggcatgggaggtatgcctggcggctttagatcagcatcaagctctcccacgtatccagaggaagaaacagttcaagttaatttaccagttagtctagaagatttgtttgttggtaaaaagaagtcatttaaaattggaagaaagggcccacatggggcctctgaaaagacacaaattgacattcaattaaaaccgggttggaaagctggtaccaaaataacatacaagaaccagggtgattacaatcctcaaacgggccgtagaaagactttgcagtttgtcatccaggaaaagagccatccaaactttaaaagagacggtgatgacctaatttacactctgccactatctttcaaggaatcattgttaggtttttcaaaaactatccaaacaattgatggcagaaccttacctttgtcgagagtacagcctgtccaaccctcacaaacttctacttatcctggtcaaggtatgccaactccaaagaacccatctcagagaggtaatttgattgtaaaatataaagtggactatccaatatcactaaacgacgctcaaaaacgtgctatagatgaaaatttttaa

SEQ ID NO: 139174 - protein, 352 aa, Saccharomyces cerevisiae
MVKETKLYDLLGVSPSANEQELKKGYRKAALKYHPDKPTGDTEKFKEISEAFEILNDPQKREIYDQYGLEAARSGGPSFGPGGPGGAGGAGGFPGGAGGFSGGHAFSNEDAFNIFSQFFGGSSPFGGADDSGFSFSSYPSGGGAGMGGMPGGMGGMHGGMGGMPGGFRSASSSPTYPEEETVQVNLPVSLEDLFVGKKKSFKIGRKGPHGASEKTQIDIQLKPGWKAGTKITYKNQGDYNPQTGRRKTLQFVIQEKSHPNFKRDGDDLIYTLPLSFKESLLGFSKTIQTIDGRTLPLSRVQPVQPSQTSTYPGQGMPTPKNPSQRGNLIVKYKVDYPISLNDAQKRAIDENF

SEQ ID NO: 139175 - DNA, 942 bp, Ciona intestinalis
  CDS (1)..(942)
atgggaattgattattacgcaatacttgggctgacgaggaatgccacagacgccgatataaagaaagctttccggaaactagcgctgaaatatcatcccgacaaaaataaggagcctggggcttcggaaaagttccagcaaatcgctgaagcgtatgatgtgctcagtgaaccacagaaacgagcgacatatgaccagtttggggaggaagggttgaaagggggaattccctcgccggatgggggtgggttcacatcgggttacacctttcatggcgaccccgaaaaagtttttcgagattttttcggtggctcaaacccatttgcggatttttttgacacgaacggggattttatgacggggtttggagggatcaggggaagaggaagaaagaagcaagatcctccaattgagagagatctcttcctctctttggaggagctgttccatggatgcaccaagaagatgaaaatctcacggagagtgatgaacgaagatggacacacttctagtattcgtgataaaatcctcaccatccatgtgaaaccaggttggaaagcggggacgaaggttacattcccacaagagggagaccaagggcccaacaacgtcccggcagatattgtgttcgttgtccgcgacaaacaacatccgttgttctccaggagcgggaataatcttgtcttcgttgcgaaaatcccgctcggaaaagctctcattggatgcagcattgaggtcccaacactggatgggaggttactaaacatccctattaatgacatcgtacacccaaagtacacaaagaagataccagcagaaggaatgccgctatctaaggacccaaatatcagaggagacctcgctatagagtttgacatccagttccctgagcaacttacacctgaaaagaaacaattgatccgacaagctctgcttatctga

SEQ ID NO: 139176 - protein, 313 aa, Ciona intestinalis
MGIDYYAILGLTRNATDADIKKAFRKLALKYHPDKNKEPGASEKFQQIAEAYDVLSEPQKRATYDQFGEEGLKGGIPSPDGGGFTSGYTFHGDPEKVFRDFFGGSNPFADFFDTNGDFMTGFGGIRGRGRKKQDPPIERDLFLSLEELFHGCTKKMKISRRVMNEDGHTSSIRDKILTIHVKPGWKAGTKVTFPQEGDQGPNNVPADIVFVVRDKQHPLFSRSGNNLVFVAKIPLGKALIGCSIEVPTLDGRLLNIPINDIVHPKYTKKIPAEGMPLSKDPNIRGDLAIEFDIQFPEQLTPEKKQLIRQALLI

SEQ ID NO: 139177 - DNA, 1056 bp, Bombyx mori; identical to SEQ ID NO: 117505
  CDS (1)..(1056)

SEQ ID NO: 139178 - protein, 351 aa, Bombyx mori; identical to SEQ ID NO: 117506

SEQ ID NO: 139179 - DNA, 1206 bp, Bombyx mori; identical to SEQ ID NO: 117507
  CDS (1)..(1206)

SEQ ID NO: 139180 - protein, 401 aa, Bombyx mori; identical to SEQ ID NO: 117508

SEQ ID NO: 139181 - DNA, 1050 bp, Oryza sativa (japonica cultivar-group)
  CDS (1)..(1050)
atgggggtcgactactacaaggtcctcggcgtcgaccgcggcgccggggacgacgacctcaagaaggcctaccacaagctcgccatgcggtggcaccccgacaagaaccccaccaacaacaagaaggaggccgaggccaagttcaagcagatctccgaggcctacgaggtccttagtgatccccagaaacgcacaatctatgatcaggtaggggaagaagggctcaaggggcagccgccccctggtgcgggaggtcctggagcatctcccttctaccctggtggtgcccattccaactcttttcacttcaacccaaggagtgcagacgacatttttgccgagttctttggattccgtggtcctttctctagcatgggtggcatgccaagtgtaagtggaggcatgagaggggacccaaggttcccagggtttggcaatgaatatttctcttcacgctttggtggtgagggttccaccagtatgcatcagccgtcacaccaactagcgaaacctccgcccattgagaaccggcttccagtcagccttgcagatctgtacaagggtgtaacaaaaaagatgaagatctcaagagagattatagacttcaacgggagagtttcacagcaggaggaaattttgcagatagaagtaaagccaggttggaagagggggacaaagatcacttttgaagagaaggggaatcaagctccaaacatgaaacctgctgatattgttttcataattgaggagaagccccatgacattttcaccagggagggaaatgatcttgttataacggagaaaatatctttggtggaagcgcttactgggtatactgcacgtatcattacacttgatgcgcgaagtctgtcagtgcccattaattcagtcatccatcctgactatgtggaggtggtccctggagaaggcatgcctaatccaaaagggcccaataagaagggagatctgaagattaaattcaacatcaggttcccttccaggttgacatctgatcaaaaagcagggttcaaaaggctcttgggttcttga

SEQ ID NO: 139182 - protein, 349 aa, Oryza sativa (japonica cultivar-group)
MGVDYYKVLGVDRGAGDDDLKKAYHKLAMRWHPDKNPTNNKKEAEAKFKQISEAYEVLSDPQKRTIYDQVGEEGLKGQPPPGAGGPGASPFYPGGAHSNSFHFNPRSADDIFAEFFGFRGPFSSMGGMPSVSGGMRGDPRFPGFGNEYFSSRFGGEGSTSMHQPSHQLAKPPPIENRLPVSLADLYKGVTKKMKISREIIDFNGRVSQQEEILQIEVKPGWKRGTKITFEEKGNQAPNMKPADIVFIIEEKPHDIFTREGNDLVITEKISLVEALTGYTARIITLDARSLSVPINSVIHPDYVEVVPGEGMPNPKGPNKKGDLKIKFNIRFPSRLTSDQKAGFKRLLGS

SEQ ID NO: 139183 - DNA, 1050 bp, Oryza sativa (japonica cultivar-group)
  CDS (1)..(1050)
atgggggtggactactacaagctgctgcaggtggagcggggcgccaccgaggaggagctgaagaaggcgtaccggaagctggccatgaagtggcacccggacaagaaccccaacagcaagaaggaggccgaggccaagttcaagcagatctccgaggcctacgaggtgctaagtgattcccagaaacgagcagtctatgaccagtacggagaagaggggctcaaagggcaggtgccacctcctggagcaggtgggcctggtgggtcttcatactatgggggtgatgggtcgacgttccggttcaaccctcgaagcgcggatgatatatttgctgagttcttcggattttccagcccattctcaagcatgggtggcatgggtggtatgggtggaggtgttgacaggggcatgcggggatcaaagtttgggatgtatgacaatgatatatttgggtccttctctcagttccctggtgaggcatcaatgcatgctccccaacggccccagaaggctgcaccaattgagaaccgactgccttgcaatctagctgacttgtacaaaggcaccaccaagaagatgaaaatttcacgggaaatattagattctagcgggagaaccatggttgttgaggagatcctaacaatcgacataaaacctggatggaagaaagggacaaaaattacttttcctgaaaagggtaacgagtctccgcatgtgattcctgcggatattgtattcgtgattgatgagaaaccacatgatctgtttacacgagaggggaatgatctcgtcatgacacagaagatttccttggctgaggccttgacaggatgtacagttcaggtaacagcactagatggtcggaacctaacagtaccaatcaataatgtcgtctaccctggctacgaggaggttgttctccgagagggcatgccaattccgaaggatccatcaaagaagggaaatcttaggatcaagttcaacatcaaattcccctcaaggctgacgtctgagcagaaatcagaaattaagaggctactagcttcttga

SEQ ID NO: 139184 - protein, 349 aa, Oryza sativa (japonica cultivar-group)
MGVDYYKLLQVERGATEEELKKAYRKLAMKWHPDKNPNSKKEAEAKFKQISEAYEVLSDSQKRAVYDQYGEEGLKGQVPPPGAGGPGGSSYYGGDGSTFRFNPRSADDIFAEFFGFSSPFSSMGGMGGMGGGVDRGMRGSKFGMYDNDIFGSFSQFPGEASMHAPQRPQKAAPIENRLPCNLADLYKGTTKKMKISREILDSSGRTMVVEEILTIDIKPGWKKGTKITFPEKGNESPHVIPADIVFVIDEKPHDLFTREGNDLVMTQKISLAEALTGCTVQVTALDGRNLTVPINNVVYPGYEEVVLREGMPIPKDPSKKGNLRIKFNIKFPSRLTSEQKSEIKRLLAS

SEQ ID NO: 139185 - DNA, 1263 bp, Oryza sativa (japonica cultivar-group); identical to SEQ ID NO: 63809
  CDS (1)..(1263)

SEQ ID NO: 139186 - protein, 420 aa, Oryza sativa (japonica cultivar-group); identical to SEQ ID NO: 63810

SEQ ID NO: 139187 - DNA, 1254 bp, Oryza sativa (japonica cultivar-group); identical to SEQ ID NO: 64081
  CDS (1)..(1254)

SEQ ID NO: 139188 - protein, 417 aa, Oryza sativa (japonica cultivar-group); identical to SEQ ID NO: 64082

SEQ ID NO: 139189 - DNA, 1089 bp, Oryza sativa (japonica cultivar-group); identical to SEQ ID NO: 118113
  CDS (1)..(1089)

SEQ ID NO: 139190 - protein, 362 aa, Oryza sativa (japonica cultivar-group); identical to SEQ ID NO: 118114

SEQ ID NO: 139191 - DNA, 1029 bp, Oryza sativa (japonica cultivar-group)
  CDS (1)..(1029)
atggggatggattactacaacgtgctgaaggtgaaccggaacgcgacggaggaggatctcaagaagtcgtaccggcggatggcgatgaagtggcaccccgacaagaaccccggcgacaagaagaaggaggccgaggccaagttcaagaagatctccgaggcctacgaggttttgagtgatccacagaagagggcaatatatgataaatatggagaggagggtctgaaggcctctgtggatgcaggggcttcatcatccatgaatggcaaccgccggttcaatcctcggaacgctgaagatgtattcgccgagttctttggcagcagcaagccctttgagggaatggggcgcgcaaagtcaatgaggttccagacagaaggtgctggcacttttggtggatttggtggtgggaatgagaacaagttcagatcatacaatgattcagccggcaccagttcaagccagccccggaagccaccagccgtggagacaaaattgccttgcacactggaagagctatatgctggttcgacgcgaaagatgaagatatccaggaacgttgtcaggcctactggccaaataggaactgaatcagagattctaactatcgatataaagcccggatggaagaaaggaaccaagattacgttcccggacaaggggaatgagcagccaaaccagctccctgctgaccttgtatttgtaatagatgaaaagccccatgatctgtacacaagagaaggtaatgatctccttgtgcaccagaagattgaattggtggatgcgttagcaggaaccaccgttaatctgaagactctcgatggccgggacctggtgatcaagctcactgatgtggtcacacctgggtacgagctcgcgatcgcaaaggaagggatgcctattgtcaaggagaatgggaggagaggcaatctaaggatcaagttcgacatcgttttccccaagaggttatcgtcagatcagcggcagaacattaggaaggttcttggagggcaaactcagcagcagtga

SEQ ID NO: 139192 - protein, 342 aa, Oryza sativa (japonica cultivar-group)
MGMDYYNVLKVNRNATEEDLKKSYRRMAMKWHPDKNPGDKKKEAEAKFKKISEAYEVLSDPQKRAIYDKYGEEGLKASVDAGASSSMNGNRRFNPRNAEDVFAEFFGSSKPFEGMGRAKSMRFQTEGAGTFGGFGGGNENKFRSYNDSAGTSSSQPRKPPAVETKLPCTLEELYAGSTRKMKISRNVVRPTGQIGTESEILTIDIKPGWKKGTKITFPDKGNEQPNQLPADLVFVIDEKPHDLYTREGNDLLVHQKIELVDALAGTTVNLKTLDGRDLVIKLTDVVTPGYELAIAKEGMPIVKENGRRGNLRIKFDIVFPKRLSSDQRQNIRKVLGGQTQQQ

SEQ ID NO: 139193 - DNA, 1050 bp, Arabidopsis thaliana
  CDS (1)..(1050)
atgggggtggattactacaatgttctgaaagtgaatcgaaatgctaacgaagatgatctgaagaagtcttaccggcgaatggctatgaaatggcaccctgacaaaaaccctacgagcaagaaagaagctgaagctaagttcaagcagatctctgaagcttacgacgtcttgagcgatcctcagagacgtcagatctacgatcagtacggagaagaaggtcttaaatccaccgatttacctactgcggcggagacggcggcgcatcagcagcagcggagctactcttctagcaactctgagtttcggtattatccgcgtgatgctgaagatatctttgctgagtttttcggcgaatccggtgatgcttttggcggagggagtagcggaaggacacgtggagatggcggtgatggtggcggtcggagatttaaaagtgcagaagcagggagccaggctaatagaaagacgccgccgacgaacaaaaaaacgacgccgccggcgaataggaaggctccggctattgagagtaaattggcttgcacattggaggagctctacaaaggtgcaaagaagaagatgcgaatttctcgcgttgttcctgatgattttggaaagccaaagacagtccaagagatattgaagatagacataaaaccaggttggaagaaaggcacaaagatcacttttccagagaaaggcaaccaagaacctggtgtcactcctgcggatcttatattcgtggttgacgagaaaccgcattcggtattcaagagagacggtaacgatctgattctcgagaagaaagtctctcttatagatgctttaaccggtctcaccattagcgtaacgactctagacgggaggagcctaactatcccggtgctggatatcgtaaaaccgggtcaggagattgtgatcccgaatgagggaatgcctactaaagaccctttgaagagaggagaccttagagttacctttgaaatcttgttcccgtcaaggctaacgtcagaacagaagaatgacctcaagagagttcttggtggaagctga

SEQ ID NO: 139194 - protein, 349 aa, Arabidopsis thaliana
MGVDYYNVLKVNRNANEDDLKKSYRRMAMKWHPDKNPTSKKEAEAKFKQISEAYDVLSDPQRRQIYDQYGEEGLKSTDLPTAAETAAHQQQRSYSSSNSEFRYYPRDAEDIFAEFFGESGDAFGGGSSGRTRGDGGDGGGRRFKSAEAGSQANRKTPPTNKKTTPPANRKAPAIESKLACTLEELYKGAKKKMRISRVVPDDFGKPKTVQEILKIDIKPGWKKGTKITFPEKGNQEPGVTPADLIFVVDEKPHSVFKRDGNDLILEKKVSLIDALTGLTISVTTLDGRSLTIPVLDIVKPGQEIVIPNEGMPTKDPLKRGDLRVTFEILFPSRLTSEQKNDLKRVLGGS

SEQ ID NO: 139195 - DNA, 1014 bp, Arabidopsis thaliana
  CDS (1)..(1014)
atgggagtggattactacaaagtcctccaagtcgatcgcagcgcaagcgacgatgatctcaagaaagcttatcgtaaacttgccatgaaatggcatcccgacaaaaatcccaacaacaaaaaggatgccgaagctatgttcaaacaaatatccgaagcttacgaggtactaagtgatcctcagaagaaagctgtgtatgatcaatatggtgaggaaggtttgaaagggaacgtgccacctccggatgcaggtggagctacttacttctctaccggggatggtccaacgtccttcaggttcaacccgagaaatgcggatgatatatttgctgagttctttggcttctctagcccatttggcggcggaagaggtggtacaagattctctagcagcatgtttggtgataatatgtttgcttctttcggcgaaggaggaggcggtggtggtggctcgatgcatcacggtggagctaggaaggctgctcctatcgaaaacaagttgccttgtagccttgaagatctttacaaaggaaccaccaaaaagatgaggatttctagggagattgctgatgtcagtggcaagacgatgcaggtggaagagattttgaccattgatgtgaaaccaggatggaagaaaggcacaaagatcacgttcccagagaaaggcaatgagcaacccggtgtgattccagcggatttagtcttcataatcgacgagaagcctcacccggttttcactcgagagggtaacgacctcatagtcacacagaagatctcacttgttgaggccttgactggttacacagtgaacctgactactcttgatggtcggagactgacaattccagtcaccaacgtggtccatcccgagtacgaggaagtggtaccgaaggaagggatgccattgcaaaaagaccagactaagagaggtaacttgaggatcaaatttaacatcaagttccctacaaggttaacctcagagcagaagacaggagtgaagaaacttctcggatga

SEQ ID NO: 139196 - protein, 337 aa, Arabidopsis thaliana
MGVDYYKVLQVDRSASDDDLKKAYRKLAMKWHPDKNPNNKKDAEAMFKQISEAYEVLSDPQKKAVYDQYGEEGLKGNVPPPDAGGATYFSTGDGPTSFRFNPRNADDIFAEFFGFSSPFGGGRGGTRFSSSMFGDNMFASFGEGGGGGGGSMHHGGARKAAPIENKLPCSLEDLYKGTTKKMRISREIADVSGKTMQVEEILTIDVKPGWKKGTKITFPEKGNEQPGVIPADLVFIIDEKPHPVFTREGNDLIVTQKISLVEALTGYTVNLTTLDGRRLTIPVTNVVHPEYEEVVPKEGMPLQKDQTKRGNLRIKFNIKFPTRLTSEQKTGVKKLLG

SEQ ID NO: 139197 - DNA, 972 bp, Arabidopsis thaliana
  CDS (1)..(972)
atgggggtcgattattacaaggttcttcaggtggatcggaatgcgaaagacgacgacttgaagaaagcttatcgcaaactcgccatgaagtggcatccagacaagaaccctaacaacaaaaaagacgccgaagccaaattcaagcagatctccgaagcttacgatgttttgagtgatcctcaaaagagagccatctatgatcaatatggagaagaaggtctaacaagccaggctccgcctcccggagcaggcggcgggttttcggatggaggggcttcgttccggttcaacggtagaagcgcagatgatatcttctcggagttctttggcttcacaagaccatttggtgactcacgtggtgcaggtccctctaatgggttccggttcgcggaagacgttttctcgtcaaatgttgttccaccgaggaaagctgcccctattgagagacaacttccttgtagtttggaagatctctacaaaggagtcagtaagaagatgaagatctctcgggacgtcctcgattcaagcgggagacccacaacagttgaggagatcttgacgatagaaatcaagccagggtggaagaaagggacgaagattaccttcccggagaaaggaaacgagcagcgaggaatcataccatcagatcttgtattcatagttgatgagaagccacatgcggtgttcaagcgagacgggaatgaccttgtgatgacacagaagatccctcttgtggaagccctcacgggatacactgctcaggtctcgactctggatggaagatcagtaacggttccaattaacaacgtgatcagcccttcttatgaagaggtggtgaaaggtgaaggcatgccaatccctaaagacccatcaaagaaagggaacttgagaatcaagttcactgttaagttcccatcgaggctaacaacagagcagaaatctggaatcaaacgaatgttttcgtcttcctag

SEQ ID NO: 139198 - protein, 323 aa, Arabidopsis thaliana
MGVDYYKVLQVDRNAKDDDLKKAYRKLAMKWHPDKNPNNKKDAEAKFKQISEAYDVLSDPQKRAIYDQYGEEGLTSQAPPPGAGGGFSDGGASFRFNGRSADDIFSEFFGFTRPFGDSRGAGPSNGFRFAEDVFSSNVVPPRKAAPIERQLPCSLEDLYKGVSKKMKISRDVLDSSGRPTTVEEILTIEIKPGWKKGTKITFPEKGNEQRGIIPSDLVFIVDEKPHAVFKRDGNDLVMTQKIPLVEALTGYTAQVSTLDGRSVTVPINNVISPSYEEVVKGEGMPIPKDPSKKGNLRIKFTVKFPSRLTTEQKSGIKRMFSSS

SEQ ID NO: 139199 - DNA, 1053 bp, Arabidopsis thaliana
  CDS (1)..(1053)
atgggtgtagattactacaatatactaaaggtgaatcacaacgcgacggaggatgatctcaagaaagcttacaagcgtctcgccatgatttggcatcccgataagaatccatcgacgcgtcgagacgaagctgaagccaaattcaaacggatctccgaagcttacgatgttctctctgatcctcagaaacgtcagatctacgatctttacggcgaggaaggtcttaaatctggcaaaatccctaattcttcttcatcggaggcttcttcttcttcttcttcttcctcctcgagatatcctcactttcatcagcacaggccgcagcatccgcctaacgcttcgtcgtttcgttttaaccctagagacgcggaggacatctatgctgagttctttggatctgaaaatggtggaggaagcaataatgctggtgggagaggaaacagagcgtttaggaatggtcatttcaacaccggtggtgccaatggttatagcggtgagatgaggaaagttccagctatggagaatccattgcctgtgagtttggaggatctgtataaaggtgtggtgaagaagatgcggataactagaaatgtctatgatgcttctgggagaatgatggtagaggcggagatattgcctatagaaataaaacctggttggaagaaaggaacaaagctgacatttcctaagaaaggcaatgaagagcctggaatcataccagcagatattgtattcgtggttgaagagaagccacatcctgtttacaagagagatgggaacgatcttttggtcagtcaggagataactctacttgaagctttaactggtaagactgtcaatctgatcacgcttgatggaaggactctcatgatcccattgacggagatcattaaacctgatcatgagattgttgttccaaacgaaggaatgcctatctctaaagaacctggaaaaaagggtaacttgaaactgaagcttagtgtgaaatacccgtcgaggctcacatcggatcagaaattcgagctaaagagagttcttggtggggtctcatga

SEQ ID NO: 139200 - protein, 350 aa, Arabidopsis thaliana
MGVDYYNILKVNHNATEDDLKKAYKRLAMIWHPDKNPSTRRDEAEAKFKRISEAYDVLSDPQKRQIYDLYGEEGLKSGKIPNSSSSEASSSSSSSSSRYPHFHQHRPQHPPNASSFRFNPRDAEDIYAEFFGSENGGGSNNAGGRGNRAFRNGHFNTGGANGYSGEMRKVPAMENPLPVSLEDLYKGVVKKMRITRNVYDASGRMMVEAEILPIEIKPGWKKGTKLTFPKKGNEEPGIIPADIVFVVEEKPHPVYKRDGNDLLVSQEITLLEALTGKTVNLITLDGRTLMIPLTEIIKPDHEIVVPNEGMPISKEPGKKGNLKLKLSVKYPSRLTSDQKFELKRVLGGVS

SEQ ID NO: 139201 - DNA, 1047 bp, Arabidopsis thaliana; identical to SEQ ID NO: 117515
  CDS (1)..(1047)

SEQ ID NO: 139202 - protein, 348 aa, Arabidopsis thaliana; identical to SEQ ID NO: 117516

SEQ ID NO: 139203 - DNA, 1008 bp, Arabidopsis thaliana
  CDS (1)..(1008)
atgggggttgatttctataaggttcttgaagttgatcgaagtgctaatgacgacgagcttaagaaagcttatcgcaaactcgccatgaaatggcatcctgataagaaccctaacaacaaaaaagaagccgaagctaaattcaagcagatctctgaagcttacgatgttttgagtgatcctcagaaacgagcaatctacgagcaatacggagaagaaggtttaaaccaagccccacctcccggcgccggtggtggctatcctggaggatcagacgccggagcttctttccggttcaatcccagaagcgctgatgatatcttctccgagttctttggtttcacgaggccttcttttggtacgggaagcgactcacgcgcaggaccttctggctttaggtatggcgatgatatcttcgcttccttcagggctgctactaccggaggagaagcctccattccttctaggaaatctgctcctattgagagacaattgccttgtagcttggaggatttgtataaaggtgtctccaagaagatgaagatctctcgtgatgttcttgactcttccgggaggccaacaccggttgaggagatcttgacgatagaaattaaacccggttggaaaaaaggaacaaagataaccttcctggaaaaaggtaatgagcatcgtggagtcataccatccgatctcgttttcatcgtagacgagaaaccgcatcccgttttcaaacgagacgggaatgatcttgtggtaatgcaaaagatttctctagtggatgctctcacaggttacaccgcacaggtcactactcttgacggaagaaccttaacagttccggtaaacaatgtgatcagtccgtcgtacgaagaggtggtgaaaggagaaggcatgccgatccctaaagatccgtcaagaaaaggaaacttgagaatcagattcatcatcaagttcccttcgaagctaaccactgagcagaaatcagggatcaagcggatgttatcaccttga

SEQ ID NO: 139204 - protein, 335 aa, Arabidopsis thaliana
MGVDFYKVLEVDRSANDDELKKAYRKLAMKWHPDKNPNNKKEAEAKFKQISEAYDVLSDPQKRAIYEQYGEEGLNQAPPPGAGGGYPGGSDAGASFRFNPRSADDIFSEFFGFTRPSFGTGSDSRAGPSGFRYGDDIFASFRAATTGGEASIPSRKSAPIERQLPCSLEDLYKGVSKKMKISRDVLDSSGRPTPVEEILTIEIKPGWKKGTKITFLEKGNEHRGVIPSDLVFIVDEKPHPVFKRDGNDLVVMQKISLVDALTGYTAQVTTLDGRTLTVPVNNVISPSYEEVVKGEGMPIPKDPSRKGNLRIRFIIKFPSKLTTEQKSGIKRMLSP

SEQ ID NO: 139205 - DNA, 939 bp, Deinococcus radiodurans R1; identical to SEQ ID NO: 117519
  CDS (1)..(939): transl_table=11

SEQ ID NO: 139206 - protein, 312 aa, Deinococcus radiodurans R1; identical to SEQ ID NO: 117520

SEQ ID NO: 139207 - DNA, 1263 bp, Deinococcus radiodurans R1
  CDS (1)..(1263): transl_table=11
  misc_feature (364)..(364): y is t or c
atggaacaggatacggcatggcgccaggaagcaaatcagaccttccatacccgcgccacttttcttgagtgtgctcgtgttaacctggggagcggaggccgggctgatctgtcccggcgaaaaagaagacctatggactactacgaactgctgggcgtgtcgcggacggcgagcgccgacgaaatcaagagtgcttaccgcaagctcgccctcaagctgcaccccgaccgcaacaaggaagagggcgccgccgagaaattcgcgcaggtcagcgaggcctactcggtcctgagcgacaccgaaaaacgcgcccactacgaccgcttcggctcggcgcccggcgcggggatgcccggcggcgacyccttcggcgggatggggggcatgggcggcgtgggcttcgaccccatggacatcttcgagcagctgttcggcggcgcggcgggcatgggtggacgcggacggcgcggcccggcgcggggcgacgaccttgaaaccgaagtgcgtattacgctcgagcaggcgcgcgcgggcgaggaagtcgaagtcacggtggaccgcctgaccgagtgcgagcactgccacggcacccgcaccgaacccggcggcaagccgcccgtcacctgctcgacctgcaacggcagcggcgccgtgcgcggtcaagcccgcaccattttcggcgtggtggaaacccagcaggtctgcccgacctgtaagggcgacggcaaaatggtggtggacccctgcaccgtttgccacgggcgcgggcgcaccctcaagtccgagccggtcaaggtcaagctgcccaaaggcatcgacgagggttaccgcatccgcgtggcgggccagggcaacgaaggccccggcggcaacggcgacctctacgtgcatatcgagatggagccgcaccctgaactgcaccgccaggacgagaacctgattttccccgcccgcatcggctttgcgacggcggcgctcggcgggcgcatccaggtgcccaccctcgacggcccgcaggaagtcgaggtcaaacccggcacccagcacggcgaacttcaccgtctgcgcggccaggggatgccccggctccagggcgcgggcacgggcgacctgattgtcgattacgaaattgtggtccccaagcacctcaacgccgaggcaaaagacgccctgcaagcctacgcccgcgctgtgggcgacgaggtacccgaggaacacgaggggctgttcggcaagatcggcaagctgttcgggcgcgactga

SEQ ID NO: 139208 - protein, 420 aa, Deinococcus radiodurans R1
  misc_feature (122)..(122): The Xaa at location 122 stands for Pro, or Ser.
MEQDTAWRQEANQTFHTRATFLECARVNLGSGGRADLSRRKRRPMDYYELLGVSRTASADEIKSAYRKLALKLHPDRNKEEGAAEKFAQVSEAYSVLSDTEKRAHYDRFGSAPGAGMPGGDXFGGMGGMGGVGFDPMDIFEQLFGGAAGMGGRGRRGPARGDDLETEVRITLEQARAGEEVEVTVDRLTECEHCHGTRTEPGGKPPVTCSTCNGSGAVRGQARTIFGVVETQQVCPTCKGDGKMVVDPCTVCHGRGRTLKSEPVKVKLPKGIDEGYRIRVAGQGNEGPGGNGDLYVHIEMEPHPELHRQDENLIFPARIGFATAALGGRIQVPTLDGPQEVEVKPGTQHGELHRLRGQGMPRLQGAGTGDLIVDYEIVVPKHLNAEAKDALQAYARAVGDEVPEEHEGLFGKIGKLFGRD

SEQ ID NO: 139209 - DNA, 1152 bp, Mycoplasma pulmonis UAB CTIP; identical to SEQ ID NO: 117521
  CDS (1)..(1152): transl_table=4

SEQ ID NO: 139210 - protein, 383 aa, Mycoplasma pulmonis UAB CTIP; identical to SEQ ID NO: 117522

SEQ ID NO: 139211 - DNA, 945 bp, Caulobacter crescentus CB15
  CDS (1)..(945): transl_table=11
ttggcgcgcgacccgtatcaggaactcggcgttacccgcaccgccagcgcggacgagatccgcaaggcgttccgcaagctcgccaagcagtatcaccccgacgccaactcgggcgacaagaaggccgaggagcgcttcaagcaggtcagcgccgcgttcgacatcgtcggcgacgccgaaaagcgcaagaaattcgaccttggccagatcgacgccgacgggcgcgagaccatgcgcggtttcggcggccagccgggcaacggcccgttcaacgccggcggctttggccagggcggcttccatcggtcgaacgaaggccctgagatcgacctgtcggacctgttcggcggcatgttcggcgggggcggcccgggcggcgcggggcgggggccgttcagcggcggcgcgggcggcgggttctcggccaagggcgccgacgtcaaggcgcggctcgatatcgacctggaagacgccatcaagggcggcaagaagcgcgtggccttctcggacggccgcacgatcgacgtcaccatccccaccggcgcccaggagggtcagaccctgcgcctgaagggccaaggctcgccggggcgcggcggccaaggcgacgccctgatcgagctggccatcaagccccacccgatctatcgccgcgagggcgaggccctggtcatggacctgccggtctcgatccccgacgcggtgctgggcggcaaggtcgaggccccgacgcccgacggcaatgtcatgctggccgtgcccaagggcagcaacagcggccagaccctgcgcctgaagggccggggcatgcccgacggcaagggcaagcgcggcgaccttttggctcgtctggtcgtgaccctgcccgagaccgtcgaccaggacctcgaaaagttcgccgaagcctggcgcgcccagaagccctatacgccgaagcggaagtag

SEQ ID NO: 139212 - protein, 314 aa, Caulobacter crescentus CB15
MARDPYQELGVTRTASADEIRKAFRKLAKQYHPDANSGDKKAEERFKQVSAAFDIVGDAEKRKKFDLGQIDADGRETMRGFGGQPGNGPFNAGGFGQGGFHRSNEGPEIDLSDLFGGMFGGGGPGGAGRGPFSGGAGGGFSAKGADVKARLDIDLEDAIKGGKKRVAFSDGRTIDVTIPTGAQEGQTLRLKGQGSPGRGGQGDALIELAIKPHPIYRREGEALVMDLPVSIPDAVLGGKVEAPTPDGNVMLAVPKGSNSGQTLRLKGRGMPDGKGKRGDLLARLVVTLPETVDQDLEKFAEAWRAQKPYTPKRK

SEQ ID NO: 139213 - DNA, 1185 bp, Haemophilus influenzae Rd KW20; identical to SEQ ID NO: 117523
  CDS (1)..(1185): transl_table=11

SEQ ID NO: 139214 - protein, 394 aa, Haemophilus influenzae Rd KW20; identical to SEQ ID NO: 117524

SEQ ID NO: 139215 - DNA, 1002 bp, Nostoc sp. PCC 7120
  CDS (1)..(1002): transl_table=11
atggctgcaaccgacttcaaagactattacgcgattttgggagttagtaaaactgccactccagaggaaattaaacaagcttttcgcaagttagcccgcaaatatcaccctgatgtcaatcctggtaataaacaggcggaagcaagcttcaaggaagttaacgaagcctacgaagttttatcagatgccgacaaacggaaaaaatacgatcaatttgggcaatattggcgacaagttggcgaaggcttccctggaggtggcgctggtgtcgatatgggtggagtggacttcagccaatacggcaattttgatgagtttattaatgagttgttaggacgctttggtggtgctgcacctcgtggtgggcgacaaagttactcttatcgcactcctggtggtagaccagggggtggttttggtggcttcaacgactttggatttcaagatgtaggcgcagcaggcggtggtcaagatgccgaagctaccatcagcctaacttttgctgaagcttttgctggagttcaaaagcgctttaatttaggtaacgaaactattgatgtgcggattccggctggtactaaacctggtactcgcttacgggtaagaggtaagggtcaatttaaccccatgacacaacaaagaggtgacctatatttaaaagtagaatttcagccccactcattcttccaaattgaaggggataacttagcctgcgaaattcctattactcccgatgaagcggcgctgggagcctccattgatgtacctacacccgatggttctgtgaacgttaaactacctgctggtgtgcgttctggtcaatctctccgtttacggggtaagggctggcctatagccaaaggcggacgaggagatcagtttgtcaaagtggctattgtgccaccaaaagatatgagccaacaagagcgagaatactatgaaaaaatccgggctatccgcagttacaatccccggagtcatttacaacaagtgaagttgtaa

SEQ ID NO: 139216 - protein, 333 aa, Nostoc sp. PCC 7120
MAATDFKDYYAILGVSKTATPEEIKQAFRKLARKYHPDVNPGNKQAEASFKEVNEAYEVLSDADKRKKYDQFGQYWRQVGEGFPGGGAGVDMGGVDFSQYGNFDEFINELLGRFGGAAPRGGRQSYSYRTPGGRPGGGFGGFNDFGFQDVGAAGGGQDAEATISLTFAEAFAGVQKRFNLGNETIDVRIPAGTKPGTRLRVRGKGQFNPMTQQRGDLYLKVEFQPHSFFQIEGDNLACEIPITPDEAALGASIDVPTPDGSVNVKLPAGVRSGQSLRLRGKGWPIAKGGRGDQFVKVAIVPPKDMSQQEREYYEKIRAIRSYNPRSHLQQVKL

SEQ ID NO: 139217 - DNA, 942 bp, Brucella melitensis 16M
  CDS (1)..(942): transl_table=11
atgcgcgatccctatagcgtgctgggcgtcgccaaaacggcgaagcccgaagaaataaaatcggcctttcgcaagctggccaagaagcaccacccggatcagaatcaggacgatccgaaggcgcaggagcgatttgcggaagtgaatcaggcctatgaaatcataggcgacaaggacaagcgcgcccagttcgaccgtggcgaaatcgatgtcgaaggcaagccggtatttcagggatttgccggcggacaggggtttggcggcgcgcatggcgatcctttcgcgggcttccgccagggcggaggcaacagtcattttgagttccggggcggtcccggcggatttcagggtggcggctttggcggtgcggaagatattctgaacgatcttttcggcggtgcttttggcggcggtcgctctggcgcgcgccagcgcggcccgtccaagggggcggacctgtctgcatccattgatatttcgctttcgcaggccgtgggcgcggaaaaggtcgaggctatctttccaaacggcaagcatctgaaaataaaactgccaaaattcgtcgaggatggccagaccattcgcctcaaggggcagggtgaaccgctgatgggcggtacgccgggggacgcgctggtgacgatccgcttcaagccgcattcgcgtttccgcttggaaggccgcgacgttcatgtcgaccttccggtcagcattgacgatgcggttctgggcggcaagcaggaagtggaaacgcttgatgggcgcatttcggtgaagattcccgcatggtccagttccgaccgcgtattgcgcctgaaggaaaagggccttcccttgaaagcgggcggcaggggcgacctctatgtccatgtccgcatcatgctgccggagggcggcgacaaggagcttgaagacttcctgcaaaaacgcagggttgtgtga

SEQ ID NO: 139218 - protein, 313 aa, Brucella melitensis 16M
MRDPYSVLGVAKTAKPEEIKSAFRKLAKKHHPDQNQDDPKAQERFAEVNQAYEIIGDKDKRAQFDRGEIDVEGKPVFQGFAGGQGFGGAHGDPFAGFRQGGGNSHFEFRGGPGGFQGGGFGGAEDILNDLFGGAFGGGRSGARQRGPSKGADLSASIDISLSQAVGAEKVEAIFPNGKHLKIKLPKFVEDGQTIRLKGQGEPLMGGTPGDALVTIRFKPHSRFRLEGRDVHVDLPVSIDDAVLGGKQEVETLDGRISVKIPAWSSSDRVLRLKEKGLPLKAGGRGDLYVHVRIMLPEGGDKELEDFLQKRRVV

SEQ ID NO: 139219 - DNA, 1029 bp, Drosophila melanogaster
  CDS (1)..(1029)
atgcctaaagactactacaagatactgggcatccagcgcactgccaatgatggcgaaatccgcaaggcatatcataagcaagcgctgcgctaccatccggacaaaaacaagagccctcaggcggaggagatctttaagcaggtggccaaggcatatgaagtcctatcagacaaaaagaagcgcggatcgtacgactcccgcaatgacaagggtacccgacgcaataccgcgaatcaaggtagcggtttcggcgatggaacggcatttggtagctgtggtggtggcagtggcagtggcagtggcggtggcagtggcggtggtcgccagaacaacccgcgggccaactttggacgtttcttcgacaacagcgaatcatattctacgttcttcgaggatatcgaaaacgattttgacagcgacgatgacgtcctgttgggtggaggagcgggcgcgcctaaacgtcgttgcgaacaacagtcaccccagtcaagcatcgaacatgtaatatacgttgctctggaggacattgccaacgggtgcaacaggcgcatgaagatctcccgggcttcgggtaggaacggcgttgatggggtacaatatgacagaattctcactgtcaagatacctccgggctgtaaggctggcaccaagatctgctttcccaatgagggtattcaactgcccaaccttgagcccgccaacgtcgtgtttataatccgggacaagccacacccaatctttcgccgcgatggcaacaatctgctgtacacagccgaaatctcgctgaaggatgctctgtgcggtttacacgtgatggtgccgacgcttcttggcaggccgatggaactcaagaccgacgtgggcgaggtaatcagtccgaaatccgtgcgccgcattctgggctacggattgcccgattccattaataattcccgtcgcggctccatcgtcgtcaggttctccatccagtttccagacgccatatccaaagaactcgcatcctcgctcgacagacttctgcaaaactga

SEQ ID NO: 139220 - protein, 342 aa, Drosophila melanogaster
MPKDYYKILGIQRTANDGEIRKAYHKQALRYHPDKNKSPQAEEIFKQVAKAYEVLSDKKKRGSYDSRNDKGTRRNTANQGSGFGDGTAFGSCGGGSGSGSGGGSGGGRQNNPRANFGRFFDNSESYSTFFEDIENDFDSDDDVLLGGGAGAPKRRCEQQSPQSSIEHVIYVALEDIANGCNRRMKISRASGRNGVDGVQYDRILTVKIPPGCKAGTKICFPNEGIQLPNLEPANVVFIIRDKPHPIFRRDGNNLLYTAEISLKDALCGLHVMVPTLLGRPMELKTDVGEVISPKSVRRILGYGLPDSINNSRRGSIVVRFSIQFPDAISKELASSLDRLLQN

SEQ ID NO: 139221 - DNA, 1224 bp, Schizosaccharomyces pombe 972h-; identical to SEQ ID NO: 117525
  CDS (1)..(1224)

SEQ ID NO: 139222 - protein, 407 aa, Schizosaccharomyces pombe 972h-; identical to SEQ ID NO: 117526

SEQ ID NO: 139223 - DNA, 1065 bp, Drosophila melanogaster
  CDS (1)..(1065)
atgcagcttatcaagtgcttggttataattcagctgtccctcttgctggtggaggagtcatttgccggccgggacttctacaaaatactgaacgtaaagaaaaacgccaacacgaacgaagtgaagaaggcgtatcgccgtttggccaaggagctgcatccggataagaacaaggacgacccggatgcctccacaaagttccaggacctgggagcggcctacgaagtcctctccaatccggacaaacggaagacctacgaccgctgcggcgaggaatgcctcaagaaggagggcatgatggatcacggtggtgatccgttctctagcttctttggggacttcggctttcacttcggtggtgatggccagcagcaagatgctccgcgaggcgccgatatcgtaatggacttgtacgtttccctggaggagctatactccggaaactttgtggaaattgtgaggaacaagcctgtaacgaaacccgcctcaggcaccaggaaatgcaactgccgccaggagatggtcacccggaaccttggacccgggcgcttccagatgatccaacagacggtgtgcgacgagtgtcccaacgtgaagctagtcaacgaggagcgcacattggagatcgaggtggaacagggcatggtcgacggccaagagacgaggttcgtggccgagggggagccacatatcgatggggagcccggcgacctcattgtgcgggttcaacaaatgccgcatccgcgattcctgcgcaagaatgatgatctgtacacgaacgtgaccatcagtctgcaggatgcccttgtcggcttctccatggagatcaagcaccttgatggacacctggtgcccgtcacgagagagaaggtaacgtggcccggcgctagaatccgcaagaagggcgagggcatgcccaactttgagaacaacaacctcaccggcaacctgtacatcaccttcgatgtggagttccccaagaaggatcttacggaggaggacaaggaagcgctcaagaaaatactcgaccaatcctccatcaatcgcatatacaatggactgtga

SEQ ID NO: 139224 - protein, 354 aa, Drosophila melanogaster
MQLIKCLVIIQLSLLLVEESFAGRDFYKILNVKKNANTNEVKKAYRRLAKELHPDKNKDDPDASTKFQDLGAAYEVLSNPDKRKTYDRCGEECLKKEGMMDHGGDPFSSFFGDFGFHFGGDGQQQDAPRGADIVMDLYVSLEELYSGNFVEIVRNKPVTKPASGTRKCNCRQEMVTRNLGPGRFQMIQQTVCDECPNVKLVNEERTLEIEVEQGMVDGQETRFVAEGEPHIDGEPGDLIVRVQQMPHPRFLRKNDDLYTNVTISLQDALVGFSMEIKHLDGHLVPVTREKVTWPGARIRKKGEGMPNFENNNLTGNLYITFDVEFPKKDLTEEDKEALKKILDQSSINRIYNGL

SEQ ID NO: 139225 - DNA, 1053 bp, Drosophila melanogaster
  CDS (1)..(1053)
atgggtaaggactactacaaaatcctgggtctgcccaaaactgccaccgacgatgagatcaaaaaggcctacaggaaactggccctgcgttatcatccggacaaaaacaaagccgccaacgccgaggacaagttcaaggaggtcgccgaggcgtacgaggttctttcggacaagagcaagcgggaggtgtacgacaaatacggcgaggatggtctcaagagcggaggcacacgaaacggcggtccgtcgagcaactcgtttacatatcagttccacggcgatccgcgggccaccttcgcccagttctttggcaacagcaatccgttcgcctcgttcttcgacatgggcgacaacctgttcgacaagaaggtcttcgatctggacacggaacccgatttcttctcctcgccctttggcggcattgggtcgcgacatggtctgggaagtggcttcaggccctctttcagatcacactccttcaatgtgcacacgccgttcaagaaggagcagaagcaggatccgcccgtcgaacacgatctctatgtgacgctggaggagatctaccacggctgtgttaagaaaatgaaaatctcccggcgcatcgttcaggcggacggcagttcccgcaaggaggagaagttcctggcgatatccatcaagcccggctggaagtccggcaccaaggtcaccttccagaaggagggcgaccaggcgcccggaaaaattcccgccgacattgtgttcatcatccgggacaagccgcacgccatgttcaagcgcgagggcagcgatctgcgctacacggcgagactgacgctcaagcaggctttgtgcggcgttgtcttccaagttcctaccatgtccggcgacaagttgcgcatcagcaccatgcaggagatcatcaagccgaacacggtgaagcgcatccagggatacgggctgccattccccaaggatacgacgcgcaagggcgacctcctggtggccttcgacattcagttcccggagaagctgaccgccgcccagaaggaggtgctcaaggacatgttatga

SEQ ID NO: 139226 - protein, 350 aa, Drosophila melanogaster
MGKDYYKILGLPKTATDDEIKKAYRKLALRYHPDKNKAANAEDKFKEVAEAYEVLSDKSKREVYDKYGEDGLKSGGTRNGGPSSNSFTYQFHGDPRATFAQFFGNSNPFASFFDMGDNLFDKKVFDLDTEPDFFSSPFGGIGSRHGLGSGFRPSFRSHSFNVHTPFKKEQKQDPPVEHDLYVTLEEIYHGCVKKMKISRRIVQADGSSRKEEKFLAISIKPGWKSGTKVTFQKEGDQAPGKIPADIVFIIRDKPHAMFKREGSDLRYTARLTLKQALCGVVFQVPTMSGDKLRISTMQEIIKPNTVKRIQGYGLPFPKDTTRKGDLLVAFDIQFPEKLTAAQKEVLKDML

SEQ ID NO: 139227 - DNA, 900 bp, Xanthomonas axonopodis pv. citri str. 306
  CDS (1)..(900): transl_table=11
atggaattcaaggattactacgcaacgctcggcgtggagcccagtgcaggcgatgcggagatcaagaccgcctaccgccggctcgcgcgcaaatatcaccccgacgtcagcaaggaagccggcgccgaagacaagttcaaggcgatcaacgaagcctacgaagcgctgcgcgacccggccaagcgcaaggcctacgaccagttgaaggcgcagggattccgcccgggcgacgagttccaggccccgcccaattacggcggcgggcagggcttcgatttcgaagaggtgttcggcaacggcggcgctggtggcggcttcagcgatttcttcgagagcctgttcgccggccagcgcggtggccgtccgcgcggcccgggtgccgggcctggtgcaggtgccggcccgcaggcgcgcggcgacacccgcgccaagcttgcggtgccgctggaagcggtgtattcgggcgacagtgtgcgcatcaccatcaacggcaagcagctggatgtgcgcgtgcccaagggcgtgcagcccggccaggtgatccgcctgagcgggcagggcaacggcggcggcaacctgttgctggagatcgaatacgcggcgcatccgcatttcgaggtggacgggcgcaacatcctgtacaccttgcaggtcatgccctggcaggccgcgctgggcacgaccatcagcgtgcccaccctgggcggctcggtcgaattgaaggtgccggccgactcggatgccgggcgcaagctgcggctgcgcggtcgcggcctgccgggcaccaccccgggcgaccagatcgtggaactggaaatcctcgccccggcccccaccgacgatgcgcagaagaaggcctaccgcaatctggccaaggcgttcggcgagaccgtgagctga

SEQ ID NO: 139228 - protein, 299 aa, Xanthomonas axonopodis pv. citri str. 306
MEFKDYYATLGVEPSAGDAEIKTAYRRLARKYHPDVSKEAGAEDKFKAINEAYEALRDPAKRKAYDQLKAQGFRPGDEFQAPPNYGGGQGFDFEEVFGNGGAGGGFSDFFESLFAGQRGGRPRGPGAGPGAGAGPQARGDTRAKLAVPLEAVYSGDSVRITINGKQLDVRVPKGVQPGQVIRLSGQGNGGGNLLLEIEYAAHPHFEVDGRNILYTLQVMPWQAALGTTISVPTLGGSVELKVPADSDAGRKLRLRGRGLPGTTPGDQIVELEILAPAPTDDAQKKAYRNLAKAFGETVS

SEQ ID NO: 139229 - DNA, 1212 bp, Drosophila melanogaster; identical to SEQ ID NO: 117527
  CDS (1)..(1212)

SEQ ID NO: 139230 - protein, 403 aa, Drosophila melanogaster; identical to SEQ ID NO: 117528

SEQ ID NO: 139231 - DNA, 936 bp, Thermosynechococcus elongatus BP-1
  CDS (1)..(936): transl_table=11
atggcgcgtaccgacttcaaagattactaccaaatcctcggggtcagcaaaaatgccacggaggctgaaattcggcaggcctttcgccgtcttgctcgcaaatatcacccggacttaaatccgggggataaagaggcagaagctcgttttaaggaaattaacgaagcccacgaagttctttcagatccgcaaaaacgacgcaaatacgatcaatttggtcagtactggcaacaggccagtgcagcggaggcgggtggctttaatgtcaatgtgggcgactttggcgctgattttagtcagtttgccaactttgaagactttatcaatgaattgctaggacgatttgccacaggcacagggcgtacccgctcttggagcaccgttggctttgatacctctggatttggcagtgccgatgtcgaagcggagatgcaaattagctttcaagaggcctttcagggctgccaaaaatcatttgccattggtaatgagcaggtgaccgtgacgattcccgctggcattaagccggggacgaagttgcggctgcggggcaaaggtcaatataacccctacactcaacagcggggagatctatatctcacggtacaggtggcgccccatcccctcttccgctttgaggatgatcaactggtgattgatttgcccatcactcccgatgaagcggctttgggggcgcaagtgacggtgccgacaccctcggggaatgtggttttgaatgtgcctgcgggaacgcgatccgggcaatcgctccggttacggggcaagggctggcgcagtagtggcggcattgctggcgatctccttgccaaggtgcaaattgtgccccccaaatccctgagcgcccaagaaaaagaactctacgaaaaattgcgatcgctccgtagtttcaatccccgtggccattggccgatctaa

SEQ ID NO: 139232 - protein, 311 aa, Thermosynechococcus elongatus BP-1
MARTDFKDYYQILGVSKNATEAEIRQAFRRLARKYHPDLNPGDKEAEARFKEINEAHEVLSDPQKRRKYDQFGQYWQQASAAEAGGFNVNVGDFGADFSQFANFEDFINELLGRFATGTGRTRSWSTVGFDTSGFGSADVEAEMQISFQEAFQGCQKSFAIGNEQVTVTIPAGIKPGTKLRLRGKGQYNPYTQQRGDLYLTVQVAPHPLFRFEDDQLVIDLPITPDEAALGAQVTVPTPSGNVVLNVPAGTRSGQSLRLRGKGWRSSGGIAGDLLAKVQIVPPKSLSAQEKELYEKLRSLRSFNPRGHWPI

SEQ ID NO: 139233 - DNA, 1128 bp, Thermosynechococcus elongatus BP-1; identical to SEQ ID NO: 63827
  CDS (1)..(1128): transl_table=11

SEQ ID NO: 139234 - protein, 375 aa, Thermosynechococcus elongatus BP-1; identical to SEQ ID NO: 63828

SEQ ID NO: 139235 - DNA, 1020 bp, Bifidobacterium longum NCC2705
  CDS (1)..(1020): transl_table=11
atggctgaaaacgaatggctcagcaaagacttctacaaagtccttggtgtctccaaggacgcttcggacgatgacatcaagaaggcgtaccgcaagctcgcccgcaaataccatcctgacgtcaacaagaccaaggaagccgaggagaagttcaaggacatctccgaagcctatgacgtgctgagcaagaaggaagatcgccagaagtacgacgcgattcgtcagttcggcatgggcggtgcccgcttcgccggcggttccggcggcttcgatgcttccggtttctccgacatctttggttccatgttcggccagggtgccggcggcaatggctcgcgcatccgcttctccacttcgggcggcggccccaacaacatcaacgacatcttctcgatgttcggcggtgctgcaggtcagggcggccagccgtatggcggctacggccaatcgccgtacggcaatgccggcggctatggctatgaggaggccccgcgccccgaaaacggcgaggaccgcaactccaagatcagcctgaccctgcgtcaggcggtcaagggcgctaccgtgtccctgtccgtggacggcaagaagttcaaggcccacgtgcctgcgggcgtcaaggacggacagaaaatcaagctggccggcaagggcaagctaggcatcaacggcggcaaggccggtgacctgtacctgcacgtcaccgtcaagcccgatgccacattctcgatgcgcggccatgatatcgtcatggacctgcccgtcaccgtgggccaggccgtggccggtggcaaggtcgaggccaaggatatcgacggcaatcccgttaccttcaaggtgccggcaggctccagctccggcgcggaagtcaagctcacgggacttggcgtccagcgcagcaaccagccgggcgatctgatcggccgtgtgcagatcatggtccccgccaagccgggtctggccgtcaagcacgccgccaaagaattcgacgaaaaagccggcgactatctcagcctgtaa

SEQ ID NO: 139236 - protein, 339 aa, Bifidobacterium longum NCC2705
MAENEWLSKDFYKVLGVSKDASDDDIKKAYRKLARKYHPDVNKTKEAEEKFKDISEAYDVLSKKEDRQKYDAIRQFGMGGARFAGGSGGFDASGFSDIFGSMFGQGAGGNGSRIRFSTSGGGPNNINDIFSMFGGAAGQGGQPYGGYGQSPYGNAGGYGYEEAPRPENGEDRNSKISLTLRQAVKGATVSLSVDGKKFKAHVPAGVKDGQKIKLAGKGKLGINGGKAGDLYLHVTVKPDATFSMRGHDIVMDLPVTVGQAVAGGKVEAKDIDGNPVTFKVPAGSSSGAEVKLTGLGVQRSNQPGDLIGRVQIMVPAKPGLAVKHAAKEFDEKAGDYLSL

SEQ ID NO: 139237 - DNA, 963 bp, Bradyrhizobium japonicum USDA 110
  CDS (1)..(963): transl_table=11
atgcgcgacccctatgaggtcttgggggtgccgcggagcgccaatgctgccgcgatcaagagcgcctatcgcaagcttgccaagaagcaccatcccgacagcaacaaggacgacccgaaggccgccgagcgtttcgccgaactcaattcggccaacgagatcctcggcgacgaggacaagcgcaagcagttcgaccgcggcgagatcgacgccgacggcaagccgcgcttccagggctttccgggcggcggcgggccgcgcggccgcgcgggtcccggcgggttcgagagctatacgttccgctccggcggcggcccgggtcagggcggcggcgcgttcgaggacatcctcaacagcatgttcggcggcggggtgcgcggcgcgcggccgggggccggcggcgccgggcagttcgaattcgacaccggcgggatcgggctcgatctcgacgtgaacgtcgccatgtccgtctcgctagaggagtcggtcaagggcggcgagaagcgcgtccgtctgccgacgggcaaggagctcaacgtcaagattccggccggcgtcaccgagggccagcagatccggctgcgcgggcagggcgagagcgcccagggccatccgccgggcgatcttctgatcaccatcggcatcgcgccgcacccgtatttcaaggtcgagggcgcggatctcaggatcgacctgccggtcacgctctacgaggcggtgctcggcggcaaggtccgcgtgccgacccttgggaatgcggtcgaactctcggtcccgaagaacacttccagcggccgcaccttccggctgaagggcaagggcctgccgaaagcaggcggaaccggggatctcttcgtcactgtcaggattatgctaccggacgggaacgacgccgagcttgaagcattgatggagaagtggcgggaccaacacccctacaatccacgtagcgggcttggttag

SEQ ID NO: 139238 - protein, 320 aa, Bradyrhizobium japonicum USDA 110
MRDPYEVLGVPRSANAAAIKSAYRKLAKKHHPDSNKDDPKAAERFAELNSANEILGDEDKRKQFDRGEIDADGKPRFQGFPGGGGPRGRAGPGGFESYTFRSGGGPGQGGGAFEDILNSMFGGGVRGARPGAGGAGQFEFDTGGIGLDLDVNVAMSVSLEESVKGGEKRVRLPTGKELNVKIPAGVTEGQQIRLRGQGESAQGHPPGDLLITIGIAPHPYFKVEGADLRIDLPVTLYEAVLGGKVRVPTLGNAVELSVPKNTSSGRTFRLKGKGLPKAGGTGDLFVTVRIMLPDGNDAELEALMEKWRDQHPYNPRSGLG

SEQ ID NO: 139239 - DNA, 966 bp, Bacteroides thetaiotaomicron VPI-5482
  CDS (1)..(966): transl_table=11
atggcttatatagattattataagattcttggagttgacaaaagtgcttctcaggatgatataaagaaggcttttcgtaagttggcccggaagtatcatcctgacctgaaccctaatgacccaagtgcgaaggacaagtttcaggaaatcaatgaagccaatgaagtactgagtgaccctgagaagcgtaagaagtatgacgagtatggggagcattggaaacatgccgatgagtttgaagctcagaaaaaagcgcggcagcaagccggtggctttggcggtgccggaggcttcggcggattcggtggtggcggtcagggattctctgatggtgacggaacgtattggtattcgtccgacggtggcaaaggattctccggaggtaatgccggtggtttctccgatttcttcgaatcgatgttcgggcatcggggcagaggacaaagctctgccggattccgtggacaggactttaatgcggagcttcatctttcactgcgtgatgctgctcagacgcataaacagatattgactgtcaatggtaaacaagtacgtattacgattcccgcaggcgtggccgacgggcaggtgattaaactgaaaggttacggagctgaaggtgtgaacggaggtccggccggtgacttgtatatcactttcgtcattgccgaagaccctgtattcaagcgcttgggcgatgacttgtacgtagacgtggaagtagacctttatactgctgtattgggtggtgataaagtcgttgacacgctggacggtaaagtgaaactgaagatcaaaccggagactcagaacggtacgaaagtacgtctgaaaggcaagggattcccggtctataagaaagaaggacaattcggtgacttgattgttacctattccgtcaagattccgacgaatctgacagaagcgcagaaggagttgttccgtcaattacagagtatgaactaa

SEQ ID NO: 139240 - protein, 321 aa, Bacteroides thetaiotaomicron VPI-5482
MAYIDYYKILGVDKSASQDDIKKAFRKLARKYHPDLNPNDPSAKDKFQEINEANEVLSDPEKRKKYDEYGEHWKHADEFEAQKKARQQAGGFGGAGGFGGFGGGGQGFSDGDGTYWYSSDGGKGFSGGNAGGFSDFFESMFGHRGRGQSSAGFRGQDFNAELHLSLRDAAQTHKQILTVNGKQVRITIPAGVADGQVIKLKGYGAEGVNGGPAGDLYITFVIAEDPVFKRLGDDLYVDVEVDLYTAVLGGDKVVDTLDGKVKLKIKPETQNGTKVRLKGKGFPVYKKEGQFGDLIVTYSVKIPTNLTEAQKELFRQLQSMN

SEQ ID NO: 139241 - DNA, 993 bp, Rhodopirellula baltica SH 1
  CDS (1)..(993): transl_table=11
gtggccgaagatctgtatcaaacgctgggagtttctcgcgacgccgacaaggccgaactgaccaaagcctatcgcaagttagcccggaagtaccatccggacatgaaccccgataacccggacgcgcaagaaaaattcaaacgcgttcaggaagcgtacgaagtcctcaacgacgaacaaaagcgagcggcatacgatcgctacggatccgacttcgaaaaaattcgcgggggttggaatcccggagccggtggtggtggcggagcagcgggtccatcctttgacggcttggatctggaacaaatcttcggcgcggccggtcgcggtggcgggggaggaggccaacctggatttgagaacgggttcaacgacttctttgaacaaatcctcggtggcggagcacgaggcggtggcggttcaccattcggtggtggccagcgatcggcgcctccgcaacgtggtcaaaacattcggcacgaattgtctgtcacgttccgcaccgcggtgctgggtgacaaagtcgagttctatctcgctcgaggtggcaaacaagaaaaactgtcggtcgcgattccacccggggtcagctccggcagcaaaattcgattgcgtgaacagggacatcccggccccggtggtgcgggtgacttgatcctgatcattcaagtcgacgaccacccgttctacaaacgcaacggcaaccacttggaactcaaacttccgatcaccgtcgcggaagctgtgttgggtgccaaggtcgacgtgccaactcccgcgggaacgatcacgctttcgattcccgccggcagttccagcggcaaacgtttgcgtctgaaaggacagggcgttcgcaacccaaagggaacggacggcgacttgatggtcgaactacaaatccaattgcctgaatcgatcgacgacgaatccaagaaactgatcgaacagttcgacgctgccaatcccatgcagccgcgtgaatcgctgaagttctga

SEQ ID NO: 139242 - protein, 330 aa, Rhodopirellula baltica SH 1
MAEDLYQTLGVSRDADKAELTKAYRKLARKYHPDMNPDNPDAQEKFKRVQEAYEVLNDEQKRAAYDRYGSDFEKIRGGWNPGAGGGGGAAGPSFDGLDLEQIFGAAGRGGGGGGQPGFENGFNDFFEQILGGGARGGGGSPFGGGQRSAPPQRGQNIRHELSVTFRTAVLGDKVEFYLARGGKQEKLSVAIPPGVSSGSKIRLREQGHPGPGGAGDLILIIQVDDHPFYKRNGNHLELKLPITVAEAVLGAKVDVPTPAGTITLSIPAGSSSGKRLRLKGQGVRNPKGTDGDLMVELQIQLPESIDDESKKLIEQFDAANPMQPRESLKF

SEQ ID NO: 139243 - DNA, 975 bp, Synechococcus sp. WH 8102
  CDS (1)..(975): transl_table=11
atgtcgggcagcggttacaaggactacttccaggtcttgggggttgaccgcagcgctgatgccgattcggttaagcgtgctttccgaaagctcgctcggcagtatcacccggatgtgaatcctggaaatgccagtgctgaagctcgttttaaagagatcagcgaggcctatgaggtgttgtcagatcccgacaagcgtcgacgctacgaacaattcggccagtactggaaccagtccggtgcttcggggggggctgcaggcccgggaatggatgtggatttcggacgttacggaaattttgatgatttcatcggcgatcttctcgggcgtttcggcggtcctgcagggggcggtggcttccagagcagcggattccctgggggtggtttttccggtggaggcttcccgaggggcaacgcagctgcccgcacacctgtgaatctggatgctgaagcatccgtcagcatcacgtttgcggaagcatttcggggcaccgaacgcaccctttctgtcaacaacgaacgggtgcaggtgcgcattccctcaggcgttaagaacggctctcgccttcgtttgaaggacaaaggaaatcttcagcctgggacagggcgtcgcggggatctcttcctgaatctgaacgtcaaagatcatcctgtttggcgcctggaggatgaccagctcaaggcagatctgcccgtcagcctcgacgagttggcgctgggtgccactgtcaccgtaatgacgcctgacggtgaagcgcaggtggcgatcccggcttgcaccgcccctggcagaagcctccgactgaaaagcaaaggctggccggccaaaggtggacggggtgatcttctgctgacactggccttggtgatgccgacatcgtggagtcctgaagaacagcaattgcttgagcagctccgcagacaacggtcggagagtccacgccacggctggttgcgatcagctgctctctaa

SEQ ID NO: 139244 - protein, 324 aa, Synechococcus sp. WH 8102
MSGSGYKDYFQVLGVDRSADADSVKRAFRKLARQYHPDVNPGNASAEARFKEISEAYEVLSDPDKRRRYEQFGQYWNQSGASGGAAGPGMDVDFGRYGNFDDFIGDLLGRFGGPAGGGGFQSSGFPGGGFSGGGFPRGNAAARTPVNLDAEASVSITFAEAFRGTERTLSVNNERVQVRIPSGVKNGSRLRLKDKGNLQPGTGRRGDLFLNLNVKDHPVWRLEDDQLKADLPVSLDELALGATVTVMTPDGEAQVAIPACTAPGRSLRLKSKGWPAKGGRGDLLLTLALVMPTSWSPEEQQLLEQLRRQRSESPRHGWLRSAAL

SEQ ID NO: 139245 - DNA, 882 bp, Wolinella succinogenes DSM 1740
  CDS (1)..(882): transl_table=11
atgtccaagagcctttatgacaccctaggagtcgattcgggggcgagtgcggaggaggtcaaacgagcctaccgcaagctcgccagacaataccaccccgacatcaacaaagaggcgggcgcggaggaaaaattcaaagagatcaacgccgcctacgagattttaagtgatgagaaaaagcgcgcccaatacgatcaattcggcgattcgatgttcggagggcaaaacttccatgactttgcgaggaatcaatacagccaaaatgtcaatctagatgagattctaagctccatttttggcgcgagtggcggctttggcgcgggcgctggaggttcgtttgggggatttggcggctttgggggttttggaggatttgaaggggtcaatcttgacctcacctctagaatcaccattccctttgccactgcgattttgggtggaaagcagcgcgtcaatctccaacatgactcttttgagatcaagattcccgcagggattcaaagcggcgaaaccatccgcctcaagggcaaaggcaaaagcttgcagggtcgaagtggtgatcttttgctcaaagtcgaggtggccccaagccaagagtacctccgagagggaaatgatctcaccaaaagctttgacctccccctaaaaaccgctctttttgggggcaaagtgacaattcccaccctccacaaagagatcacactcaaagtccccgccaacaccaaaaacgctcaacagttccgcgtcaaggagctcggagcgcccaatcgcaaaagcggtgtcaagggcgatctctatctcaaggccaacatcattcttccccctatcgaatcgcttgagccttcgcttcgtgaggcgctcgaacaacatctacctgaatga

SEQ ID NO: 139246 - protein, 293 aa, Wolinella succinogenes DSM 1740
MSKSLYDTLGVDSGASAEEVKRAYRKLARQYHPDINKEAGAEEKFKEINAAYEILSDEKKRAQYDQFGDSMFGGQNFHDFARNQYSQNVNLDEILSSIFGASGGFGAGAGGSFGGFGGFGGFGGFEGVNLDLTSRITIPFATAILGGKQRVNLQHDSFEIKIPAGIQSGETIRLKGKGKSLQGRSGDLLLKVEVAPSQEYLREGNDLTKSFDLPLKTALFGGKVTIPTLHKEITLKVPANTKNAQQFRVKELGAPNRKSGVKGDLYLKANIILPPIESLEPSLREALEQHLPE

SEQ ID NO: 139247 - DNA, 942 bp, Gloeobacter violaceus PCC 7421
  CDS (1)..(942): transl_table=11
atggaatatcgggactactacgagatactgggtgttcctaagtctgccgatgagcagcagatcaaaagcacctaccgcaaactggctcggcagttccatcccgacctcaatccgggcgacaagcaggcggaagaaaaattcaagacgatctccgaagcctacgaggtgctctccgacccgagcaagcgcagccgctacgatcaatacggtcgctactggcaacaggcgggccgctccggcggcaccccggcgggtggtgccgccccggccggggcaggcgtggggggcttcgagggattcgactttgactttagccgcttcggcagcttcgacgaatttatcgactcgctgatgggcaatctgcgcgggagcggcggcgagcgcgcggctcgggcgaacgtgcgcaccacccagcgcccgggccgcagcgaagacgtcgagatgtccctcgaactgacgctcgaagaagcgctgaacggcaccaaaaagcgcgtgcgcaccgccacgggcaaagtggtcgaggtcaacatccccgccggggtccacgaaggcaccaaggtgcgggtggcgggcgagggcagcggccggggcgatttgtttctggtcgtcaagctcaagacccacccgttttttgcggtcgatggcgacgatttgctctgtgaagtgcccctgacccccgccgaggcggccctcggcaccaaagtcgaagtgccgaccctcaccggccgcgtgcgggtgacgatcccggccggcacctccaccggccgcacactgcgcctcgcgggccgcggtctgccgcgccgggggggcggccggggcgaccagttggtcaaaatccgcatcgaggtgccgacggcactgtcctcggaggagcgcgacctgtacgagaagctctcccgcaccgagtcctttcgtccccgcgcccgcttcgacagccagtaa

SEQ ID NO: 139248 - protein, 313 aa, Gloeobacter violaceus PCC 7421
MEYRDYYEILGVPKSADEQQIKSTYRKLARQFHPDLNPGDKQAEEKFKTISEAYEVLSDPSKRSRYDQYGRYWQQAGRSGGTPAGGAAPAGAGVGGFEGFDFDFSRFGSFDEFIDSLMGNLRGSGGERAARANVRTTQRPGRSEDVEMSLELTLEEALNGTKKRVRTATGKVVEVNIPAGVHEGTKVRVAGEGSGRGDLFLVVKLKTHPFFAVDGDDLLCEVPLTPAEAALGTKVEVPTLTGRVRVTIPAGTSTGRTLRLAGRGLPRRGGGRGDQLVKIRIEVPTALSSEERDLYEKLSRTESFRPRARFDSQ

SEQ ID NO: 139249 - DNA, 1161 bp, Vibrio vulnificus YJ016; identical to SEQ ID NO: 117535
  CDS (1)..(1161): transl_table=11

SEQ ID NO: 139250 - protein, 386 aa, Vibrio vulnificus YJ016; identical to SEQ ID NO: 117536

SEQ ID NO: 139251 - DNA, 969 bp, Rhodopseudomonas palustris CGA009
  CDS (1)..(969): transl_table=11
atgcgcgacccctatgaggtcctgggggtgcagcgggacgccagcgctgcggcgatcaaaagcgcctatcgcaagctggcgaagaagcatcaccccgacagcaacaagaacgatcctaaagccgccgcgcgcttctctgagatcaactccgccaacgaaatcctcggcgacgagaccaagcgcaagcaatacgaccgcggcgagatcgatgccgaaggcaagccgcgcttccaggggttccctggtggtggcggccgcgcgggcggcgccggtgggttcgagcaatattccttccgcagcggcggcggtgcccccggtggtggattcggcggtgcggctggtttcgaggacatcctgaattcgatgttcggcggcgcagccggcgcgcgcggcgctggtgcgcgtggtcgcacccagggcttcgacttcgataccggcttcgcgcccgacctcgatcaatcggtgtcgatgacggtgacgttggaagaggcgacccgcggtaccgaaaagcgggtgcggctgccgaccggtaaggagctcaacgtcaagattccggccggcgtcagcgcgggccagcagatccggctgaaagggcagggcgagagcgcgcccggtcaccgcgccggcgacctgctgatcaccgtcaacatcgccccgcatccctacttcaagatcgacggcaatgatctgaagctcgagctgccgctgacgttgtacgaggcggtgctcggcgccaaggtccgggtcccgacgctgaccggcgcgatcgaattgtcgatcccgaagaacatctccagcggccggatcttccggctcaagggcaaggggctgccgaaaggcagcgcggtcggcgatctgttcgtcaccacccgcatcattctcccggacggccacgacgccgcgctggagaagctgatgcagaagtggcgggacgaacatccctacaatccgcggaccgaactcggctaa

SEQ ID NO: 139252 - protein, 322 aa, Rhodopseudomonas palustris CGA009
MRDPYEVLGVQRDASAAAIKSAYRKLAKKHHPDSNKNDPKAAARFSEINSANEILGDETKRKQYDRGEIDAEGKPRFQGFPGGGGRAGGAGGFEQYSFRSGGGAPGGGFGGAAGFEDILNSMFGGAAGARGAGARGRTQGFDFDTGFAPDLDQSVSMTVTLEEATRGTEKRVRLPTGKELNVKIPAGVSAGQQIRLKGQGESAPGHRAGDLLITVNIAPHPYFKIDGNDLKLELPLTLYEAVLGAKVRVPTLTGAIELSIPKNISSGRIFRLKGKGLPKGSAVGDLFVTTRIILPDGHDAALEKLMQKWRDEHPYNPRTELG

SEQ ID NO: 139253 - DNA, 942 bp, Geobacter sulfurreducens PCA
  CDS (1)..(942): transl_table=11
atggctaagtatcaggactattacgccattctcggcgtaagcaaaactgcaacccaagaggaggtacagcgggcctaccgtaagctggcccgcaagtaccaccccgatatcaataaggccggcgatgccgaagagaaattcaagcagatcaacgaggcttacgaggtgctcagtgacccggacaaacgggctacgtacgatcagctcggccgcgattgggatggacggcacggcactcagggctatcagggaggcgacaacgccggacatcatttctccactgccgatccgggccagttcagtgacttctttcaggacctgttcggcagcgggtggaactttggtggatcggctgaattccaggggggaggcaccaggagaaggcgaggccgcgaccatgaggccaccatcaccatcacgcttgctgaggcctatcatggcgccaggaaaagcattgaactggaacgggcggaggcggacagcgccggcaggctggccaggacgaggcgcacctatgatgttgccatcccgccaggggtgaccgacggctcgctgatccggcttgccgggcagggagggcgtggcacgggaggtggtgaagccggcgaccttttcctgcgggtcagcattctccctgacagccgcttcaccctgaacggcaacgacctgactaccatggtcgatgtcaccccgtgggaagccgcgttaggtgccaaggtgccggtaccgacggtagacggcaggatcaatctcaccgtgccggccggaacccagagcggccagatcttgcgcgttcgcggcaagggaatgccgattgcttcgggccgccacggagatttgctggtgagtgtgcgtatcgtggtgccgaagcacctctcagacagagaacggcatctcttcgaggaattggccaaagaatcgcgattcgatccgcgtatgtga

SEQ ID NO: 139254 - protein, 313 aa, Geobacter sulfurreducens PCA
MAKYQDYYAILGVSKTATQEEVQRAYRKLARKYHPDINKAGDAEEKFKQINEAYEVLSDPDKRATYDQLGRDWDGRHGTQGYQGGDNAGHHFSTADPGQFSDFFQDLFGSGWNFGGSAEFQGGGTRRRRGRDHEATITITLAEAYHGARKSIELERAEADSAGRLARTRRTYDVAIPPGVTDGSLIRLAGQGGRGTGGGEAGDLFLRVSILPDSRFTLNGNDLTTMVDVTPWEAALGAKVPVPTVDGRINLTVPAGTQSGQILRVRGKGMPIASGRHGDLLVSVRIVVPKHLSDRERHLFEELAKESRFDPRM

SEQ ID NO: 139255 - DNA, 1008 bp, Bdellovibrio bacteriovorus HD100
  CDS (1)..(1008): transl_table=11
ttgtctaaaaaagatttttactcccttttgaatgtttcccgctctgccactgctgatgagatcaaaaaatcttatcgcaagctggctatgcagtatcacccggataaaaatcctggcgataaaaaggccgaggaaaaattcaaggaaatcaccgaggcctacgaagtcttgagtgataccaaaaaacgcgagatgtatgaccagttcggtcacgccggagcccagggctttggcggagctggcggcccgttcggcggtgctggtggattcggtggctttgggggcgccggagctggcggtgctggagccggagccggtggtgatccgttccaggacatcttcggtgatgtctttggtgagatctttggcaatgcccgtggcggcccgggggctggtggagcgcgcgcgcgccgtccttccaaaggcacggacctgcgctatacgctgaatatctcttttgaagaatccgccttgggcagcgaaaaagtcatcagcttcatgcgccagcgcggcggccgtgaagagcctgcaaaactgtctgtgaatgttcctgccggcgtgaaagaaggccagcgcctgaaactggcgggcgaaggggatgcttccgggggcgctgccgccggagacctgtatgtgattatcaacattcaggagcacccgctgttcaaacgaaacgaaaacgatgtgacattggatcttccgattgtctacaccgacgcgattttgggaaccaacatcgaggttccgaccctgaccggaaaagccatgatccgtattcctccgggaacacactcaggtcagacgttccgactgaagggcaaaggcttcccgaaactgggtggcttcggatccggcgacatgcttgtgcgcgttctggtggacacgccgagcagtcttagcaacaaacaaaaagaactggtggaagagctcgccaaatccacggacacaagtcctctggtaaaggccttccaggataaagtcgcacaattgatgaggacgcgtaaatga

SEQ ID NO: 139256 - protein, 335 aa, Bdellovibrio bacteriovorus HD100
MSKKDFYSLLNVSRSATADEIKKSYRKLAMQYHPDKNPGDKKAEEKFKEITEAYEVLSDTKKREMYDQFGHAGAQGFGGAGGPFGGAGGFGGFGGAGAGGAGAGAGGDPFQDIFGDVFGEIFGNARGGPGAGGARARRPSKGTDLRYTLNISFEESALGSEKVISFMRQRGGREEPAKLSVNVPAGVKEGQRLKLAGEGDASGGAAAGDLYVIINIQEHPLFKRNENDVTLDLPIVYTDAILGTNIEVPTLTGKAMIRIPPGTHSGQTFRLKGKGFPKLGGFGSGDMLVRVLVDTPSSLSNKQKELVEELAKSTDTSPLVKAFQDKVAQLMRTRK

SEQ ID NO: 139257 - DNA, 1182 bp, Treponema denticola ATCC 35405; identical to SEQ ID NO: 117537
  CDS (1)..(1182): transl_table=11

SEQ ID NO: 139258 - protein, 393 aa, Treponema denticola ATCC 35405; identical to SEQ ID NO: 117538

SEQ ID NO: 139259 - DNA, 1200 bp, Apis mellifera; identical to SEQ ID NO: 117539
  CDS (1)..(1200)

SEQ ID NO: 139260 - protein, 399 aa, Apis mellifera; identical to SEQ ID NO: 117540

SEQ ID NO: 139261 - DNA, 1113 bp, Apis mellifera
  CDS (1)..(1113)
atgtcatgcgacgaaacttgtacatgtgataagcgtggtatagattactatggtgtattatcgttgacaaaagattgcgacgatttggaaatcaaatcagcatttcgacgtttagcgatacgatacaatccaaaaagagcaaaggatgaaagtttaagtactatttttgccttggtaactgaagcatacgatgtgctttcagatcctcttaaaagaactgtatatgatcaattcggtgaggaaggtcttaaaaatggcatacctggagtcgaagaattcatctgtccatatgtttatcatggagaaccgatgagaacttatagggaattcttcggtaccgaaagtccttatgctgatctaatctacgcagtaacgcagtctccatctctgctcgaatttctcgaggggcggggtataaaacgtaaagaagagcctctgataaaaaccttgtacttaacccttctggaggtttttcttggtggaattaagaaaatgaagatacagagattggttttggtaggggatgataaatctatgacagtggtaaaagaaaaaattttaacaatacctattaaaccaggcataccgacagggacgaggataacatttccagaggaaggtgaccaaggacccacgaaaatacctgcggatgtaatcttcatcacggaggaccggcctcacgagaccttccgaagagagggctctgacttgcacatgacggtcgatatctttctgcgagaggcactgaccggaacagtggtcaccgtcgacaccctcgacgacagaacccttcgaataccactaacgtctgtcatcacaccagattataagaaacgcatacttggagaaggattgccattaccagaaaatccaaaaggaaaaggagatctaattataacctttaacattgaatatccggtatatatgccagtatcaaataaaaattatgttaaacgagcatttgatacatcagaagatattagggatacagaatatgtccatcgtcttatattggctaataaaatgcgtagaaatattgattttgatgttcctgtacgccgagatcctaaagattatgaagcaaaagaattagactttatttgtaacatttaa

SEQ ID NO: 139262 - protein, 370 aa, Apis mellifera
MSCDETCTCDKRGIDYYGVLSLTKDCDDLEIKSAFRRLAIRYNPKRAKDESLSTIFALVTEAYDVLSDPLKRTVYDQFGEEGLKNGIPGVEEFICPYVYHGEPMRTYREFFGTESPYADLIYAVTQSPSLLEFLEGRGIKRKEEPLIKTLYLTLLEVFLGGIKKMKIQRLVLVGDDKSMTVVKEKILTIPIKPGIPTGTRITFPEEGDQGPTKIPADVIFITEDRPHETFRREGSDLHMTVDIFLREALTGTVVTVDTLDDRTLRIPLTSVITPDYKKRILGEGLPLPENPKGKGDLIITFNIEYPVYMPVSNKNYVKRAFDTSEDIRDTEYVHRLILANKMRRNIDFDVPVRRDPKDYEAKELDFICNI

SEQ ID NO: 139263 - DNA, 1077 bp, Strongylocentrotus purpuratus; identical to SEQ ID NO: 117541
  CDS (1)..(1077)

SEQ ID NO: 139264 - protein, 358 aa, Strongylocentrotus purpuratus; identical to SEQ ID NO: 117542

SEQ ID NO: 139265 - DNA, 1194 bp, Nasonia vitripennis; identical to SEQ ID NO: 117543
  CDS (1)..(1194)

SEQ ID NO: 139266 - protein, 397 aa, Nasonia vitripennis; identical to SEQ ID NO: 117544

SEQ ID NO: 139267 - DNA, 1197 bp, Nasonia vitripennis; identical to SEQ ID NO: 117545
  CDS (1)..(1197)

SEQ ID NO: 139268 - protein, 398 aa, Nasonia vitripennis; identical to SEQ ID NO: 117546

SEQ ID NO: 139269 - DNA, 1035 bp, Anopheles gambiae str. PEST; identical to SEQ ID NO: 117547
  CDS (1)..(1035)

SEQ ID NO: 139270 - protein, 344 aa, Anopheles gambiae str. PEST; identical to SEQ ID NO: 117548

SEQ ID NO: 139271 - DNA, 1116 bp, Magnaporthe grisea 70-15
  CDS (1)..(1116)
atggtgaaggaaactaagctttacgatgcactgggcatcaagcccgatgcgacacaagatgacatcaagaagggatacaggaaacaagcacttaagtggcaccccgacaagaacaagaacaacacagatgcagccgagaagttcaaggaggtatctcaagcatacgagatcctctcggatccagaaaagcgcaagacatatgaccaatatgggcttgaattcctcctgcgcgggggcgtgcccatggacacggatggtggcaaccccttcgctggcggtgctggtggcatgcctggaggcttccagaacttcggctttggcggtccaggtggtggcggcactttccgcttttcgaccaacggcagcgggttcagtttcagcaaccccgattccgtcttttcagatttcttcaggcaggccagtggtggtggcggcggcggtatgggtggcataaaccctgaagaccttgaagatattctcggcggcggtgcccgctcctcgaggggaggtccgcgcgtgcggtcgtcctttggtgattccgtgcccggtggtggtgcgaggtcacaaaggcaacccacacctgagatcacaacggtcgagcgtcccctgccagtgacgctggaggagatgttcaacggcaccaccaagaagatgaagatcaagcgcaagatgtttgacgactcaggaaagcgcaccactaccgacacggttctcgaggtccccatcaagcctggtttgaagaagggcagcaagatccgcttcaagggggtgggcgaccaggaggagggcggccagcaggatttggtctttatcgtggaagagaaaaaacatgcactctacactcgcgagggtgatgatgtcgtccacgatgtcgacctggagctcaaggaggccctgacaggctggaagcgcacaatcacaaccattgacggaaagcagctgcaaatcgacaaggcagggcctacgcagccaggctcccgtgatacctaccctggcctcggaatgccaatctccaagaagcctggccagaggggtaactttgttgtcaagtacaacgtcaagttccccacctacttgacacccgagcaaaagacaaagttgaaggagatcttatga

SEQ ID NO: 139272 - protein, 371 aa, Magnaporthe grisea 70-15
MVKETKLYDALGIKPDATQDDIKKGYRKQALKWHPDKNKNNTDAAEKFKEVSQAYEILSDPEKRKTYDQYGLEFLLRGGVPMDTDGGNPFAGGAGGMPGGFQNFGFGGPGGGGTFRFSTNGSGFSFSNPDSVFSDFFRQASGGGGGGMGGINPEDLEDILGGGARSSRGGPRVRSSFGDSVPGGGARSQRQPTPEITTVERPLPVTLEEMFNGTTKKMKIKRKMFDDSGKRTTTDTVLEVPIKPGLKKGSKIRFKGVGDQEEGGQQDLVFIVEEKKHALYTREGDDVVHDVDLELKEALTGWKRTITTIDGKQLQIDKAGPTQPGSRDTYPGLGMPISKKPGQRGNFVVKYNVKFPTYLTPEQKTKLKEIL

SEQ ID NO: 139273 - DNA, 1104 bp, Gibberella zeae PH-1
  CDS (1)..(1104)
atggtcaaagagacaaagctctacgacactcttaatgtcaagcctgaggcttctcaagacgagattaagaaggggtacaagaaagcagccttgaaatggcacccagacaagaacaagaacagccccgatgcggctgaaaagttcaaagaatgctcgcaagcatacgagattctctccgaccccgaaaagcgcaagatttatgattcatatggtctcgaattcctcctccgtggtggtaccgctcaacccgaaagcggtgccggtgccggtggcaatccctttgccgctggaggcatgcctggcggattcaacttcgaaggcggtatgcccggtggaggcacccgaactttccacttcaacaccggaggcggtggtgctggcggctttggtttcagtaaccccgaagacatcttcgccgagttcatgcgcaacggagccggcggtatgcacggcggcgttgatgatgaggacatggctggcatgttcggcggatttggtggaggtcctcgcagtcgtgcttcgcgcacgcgatcaggcttcgatggacgagccagggaaacgacaccagaggttacaactgttgagcgacctcttcctctgacccttgaggagttgttcaacggcgttaccaagaagatgaagatcaagcgtaagacgttcgatgattccacccagaagcgggtgcagaccgaccaaattctcgaagttcccatcaagcctggtctgaagaagggctccaagatcaagttcaacggagttggtgatcaagtagagggaggtcgccaagatcttcactttatcgtcgaagagaaggaacaccctctctacaagcgcgaggacaacgacctcgtccacacagtcactcttgacctaaaggaggcccttactggatggcgaagaacagtgactacgatcgatggccgacagctcaacttagagaagggcggtcctacccagcccaacagcgaggagcgttaccccggtctgggcatgccaatttcgaagaaaccgggccagcgaggcgattttgtcatcaagtacaagatcaacttcccatcaagtttgactgcagaccagaagcagaagttgagggagatcctatag

SEQ ID NO: 139274 - protein, 367 aa, Gibberella zeae PH-1
MVKETKLYDTLNVKPEASQDEIKKGYKKAALKWHPDKNKNSPDAAEKFKECSQAYEILSDPEKRKIYDSYGLEFLLRGGTAQPESGAGAGGNPFAAGGMPGGFNFEGGMPGGGTRTFHFNTGGGGAGGFGFSNPEDIFAEFMRNGAGGMHGGVDDEDMAGMFGGFGGGPRSRASRTRSGFDGRARETTPEVTTVERPLPLTLEELFNGVTKKMKIKRKTFDDSTQKRVQTDQILEVPIKPGLKKGSKIKFNGVGDQVEGGRQDLHFIVEEKEHPLYKREDNDLVHTVTLDLKEALTGWRRTVTTIDGRQLNLEKGGPTQPNSEERYPGLGMPISKKPGQRGDFVIKYKINFPSSLTADQKQKLREIL

SEQ ID NO: 139275 - DNA, 1254 bp, Gibberella zeae PH-1; identical to SEQ ID NO: 117551
  CDS (1)..(1254)

SEQ ID NO: 139276 - protein, 417 aa, Gibberella zeae PH-1; identical to SEQ ID NO: 117552

SEQ ID NO: 139277 - DNA, 1581 bp, Gibberella zeae PH-1; identical to SEQ ID NO: 63837
  CDS (1)..(1581)

SEQ ID NO: 139278 - protein, 526 aa, Gibberella zeae PH-1; identical to SEQ ID NO: 63838

SEQ ID NO: 139279 - DNA, 1014 bp, Apis mellifera
  CDS (1)..(1014)
atggggaaagattactataaaatattaggcataaacaaaaatgccactgatgatgaaataaaaaaagcatatagaaaattagcattgaaatatcatcctgataaaaatagaagtgctggagcagaagagaaattcaaagaaatagctgaagcttatgaagttctttctgatgctaaaaagagagaagtctatgataaatttggagaagaaggattaaagggaggagctggatcagcaggaggaggtggtggtggtacaacatatactttccatggagatccaaaagcaacttttgctcaattttttggttctgctagtcctttccaaactttctttgaatttggagatgatccacttggattaggagttggtccccaacgtcaaagtggccaaagtggagctttcagatcacattcttttaattttgtgggtccaaactctggtagaggaggtaacaaagatcgtgctcaagatcctgctattgaacatgacttatatatcagtttagaagaaattttacgtggttgtacaaagaaaatgaaaatttccaaacgagttgtacaacctgatggttctaccaaaaaggaagacaaagtccttacaattaatgtcaaaccaggatggaaggctggtacaaaaatcacttttcaaaaagaaggtgatcaaggtcgtgggaaagttccagcagatattgttttcattattagagacaaaccacatcctctttttagaagagaaggcagtgatataagatacacttgcaagctaagtttaaaacaagctttatgtggtactgttattgaagttcctacgcttattggcgaaaaaatcaacttaaatttgactagagaaattgtaaaacctaatatggtcaggaggattcagggtcatggtttaccattcccaaaagaaccatcaagaaaaggtgatctcctggtttcatttgatatcaaatttcccgaaacattatcccaaagtgcaaaggacatattatacgatactctgccgaattga

SEQ ID NO: 139280 - protein, 337 aa, Apis mellifera
MGKDYYKILGINKNATDDEIKKAYRKLALKYHPDKNRSAGAEEKFKEIAEAYEVLSDAKKREVYDKFGEEGLKGGAGSAGGGGGGTTYTFHGDPKATFAQFFGSASPFQTFFEFGDDPLGLGVGPQRQSGQSGAFRSHSFNFVGPNSGRGGNKDRAQDPAIEHDLYISLEEILRGCTKKMKISKRVVQPDGSTKKEDKVLTINVKPGWKAGTKITFQKEGDQGRGKVPADIVFIIRDKPHPLFRREGSDIRYTCKLSLKQALCGTVIEVPTLIGEKINLNLTREIVKPNMVRRIQGHGLPFPKEPSRKGDLLVSFDIKFPETLSQSAKDILYDTLPN

SEQ ID NO: 139281 - DNA, 1050 bp, Candida glabrata CBS 138
  CDS (1)..(1050)
atggttaaagagacaaagttatatgatctattgggtatatccccaagtgccaatgagcaagagattaagaaaggttacaggaaggctgcgttgaagtaccatccagacaagcctactggtgacactgagaagttcaaggagatttccgaggcgtttgagatcctgagcgatccgcagaaaagagaggtctacgaccagtacgggctcgaggccgccagaaacggtggtcctgcgttcgggggagccggtgggttccgaggtggtgggttcagcagcgctggcggtgcgcacgccttcagcaacgacgacgcgttcaacatcttctcgcagttcttcggtgggagctcgccgtttggtgccgccgacgatggcttcagctacagttcgttcggaggcatgcctggcggtatgggtggcatgcacggaggcatgggcggtggaatgcacggcggcatgggcggcggcatgggtggcatgggtggtatgccaggcgggttcaggtctgcctctagcccacagcctgaggaagaagtcgtcccagttaacttgtccgtgagcttggaagacctgtacactggtaagaagaagaccttcatgatcggtagaaagggccctaatggtgctccagagaagacccaggtcgatatccagttgaaaccaggctggaaagctggtacaaagattacctacaagaactacggtgactataaccctgccactggccgcagaaagactttgcagtttatcatccaggaaaagaagcatccatttttcactcgtgacggtaacgacctgatatacacactgccattgacattcaaggagtctctactcggtttcaataagactattcaaactatcgacggtagaacactgcctgtatcaagaatccaacctattcaaccatctgagaaatctacctacccaggccaaggtatgcctattccaaaaactccaggtcaaagaggtgacatgatcgtgaattacaaggtcgactaccctatctccttgacagataaacaaagacaggccatcgacgagaacttctaa

SEQ ID NO: 139282 - protein, 349 aa, Candida glabrata CBS 138
MVKETKLYDLLGISPSANEQEIKKGYRKAALKYHPDKPTGDTEKFKEISEAFEILSDPQKREVYDQYGLEAARNGGPAFGGAGGFRGGGFSSAGGAHAFSNDDAFNIFSQFFGGSSPFGAADDGFSYSSFGGMPGGMGGMHGGMGGGMHGGMGGGMGGMGGMPGGFRSASSPQPEEEVVPVNLSVSLEDLYTGKKKTFMIGRKGPNGAPEKTQVDIQLKPGWKAGTKITYKNYGDYNPATGRRKTLQFIIQEKKHPFFTRDGNDLIYTLPLTFKESLLGFNKTIQTIDGRTLPVSRIQPIQPSEKSTYPGQGMPIPKTPGQRGDMIVNYKVDYPISLTDKQRQAIDENF

SEQ ID NO: 139283 - DNA, 1569 bp, Candida glabrata CBS 138; identical to SEQ ID NO: 63841
  CDS (1)..(1569)

SEQ ID NO: 139284 - protein, 522 aa, Candida glabrata CBS 138; identical to SEQ ID NO: 63842

SEQ ID NO: 139285 - DNA, 1224 bp, Candida glabrata CBS 138; identical to SEQ ID NO: 117553
  CDS (1)..(1224)

SEQ ID NO: 139286 - protein, 407 aa, Candida glabrata CBS 138; identical to SEQ ID NO: 117554

SEQ ID NO: 139287 - DNA, 1065 bp, Kluyveromyces lactis NRRL Y-1140
  CDS (1)..(1065)
atggttaaggacactaaattatatgatttgctaggaatttcgcctagtgcaggtgaagccgagattaaaaaagggtacagaaaggctgccttgaagtatcatccagataagcctacaggtgacactgagaagtttaaagaaatctctgaggcttttgagattctttcagatgctcagaagagggaagtttacgatacttatggtctagaggctgctcgtggtaatgctcctcaatttggaggagcgggagggcctggtgggcctggtgggcctggaggattttcttctggtgggtttgccgggggacatgcgttctcacaagatgacgctttcaacatcttttcacagttctttggtggaggaggtgctgccggaggtgcttctccatttggattctctgctagcggcgggtctggtgatgatttcgggtttggaggcagtagtttccattcctcttcgggcggcatgccaggcggtatgccaggtggaatgccaggtggaatgccaggtggattcagtagacaacaggctagacctgaagaagaagttgttcaggtcaatctacctgtgtccttagaagatttattcagcggtaagaagaaatcattcaagatcacaagaaaaggcgccggtggtgtgtccgaaaagaaccaaattgacatccaattgaaaccaggttggaaagcaggtaccaagattactttcaaaggtgaaggtgactataatccaagaactggtggtagacaaacattacaattcgttctacaggaaaaaccacacgaatttttcaccagacaagacaatgatttgatttacactttaccactttctttcaaagaatctcttctaggtttctccaagcaagtacaaaccatcgacggtaaaacaattccaatcacaagaacgcagccaattcaacctactcaaacctcaacatatcccggacaaggtatgacactgtcaaagaatccttcccaaagaggtgatttgattattaagttcaagatcgattatccaacctctttaacacctcaacaaagacaagccattatggataacttctga

SEQ ID NO: 139288 - protein, 354 aa, Kluyveromyces lactis NRRL Y-1140
MVKDTKLYDLLGISPSAGEAEIKKGYRKAALKYHPDKPTGDTEKFKEISEAFEILSDAQKREVYDTYGLEAARGNAPQFGGAGGPGGPGGPGGFSSGGFAGGHAFSQDDAFNIFSQFFGGGGAAGGASPFGFSASGGSGDDFGFGGSSFHSSSGGMPGGMPGGMPGGMPGGFSRQQARPEEEVVQVNLPVSLEDLFSGKKKSFKITRKGAGGVSEKNQIDIQLKPGWKAGTKITFKGEGDYNPRTGGRQTLQFVLQEKPHEFFTRQDNDLIYTLPLSFKESLLGFSKQVQTIDGKTIPITRTQPIQPTQTSTYPGQGMTLSKNPSQRGDLIIKFKIDYPTSLTPQQRQAIMDNF

SEQ ID NO: 139289 - DNA, 1230 bp, Kluyveromyces lactis NRRL Y-1140; identical to SEQ ID NO: 117555
  CDS (1)..(1230)

SEQ ID NO: 139290 - protein, 409 aa, Kluyveromyces lactis NRRL Y-1140; identical to SEQ ID NO: 117556

SEQ ID NO: 139291 - DNA, 1380 bp, Debaryomyces hansenii CBS767
  CDS (1)..(1380)
atgactctggacttatatgaaatcttagaagttgatgtaagtgcaacgaacgcagaaatcaagaaagcgtatagaaagttagcattaaagtaccatccagataaggctactgaggacgacagggagcaatctgaaacaagatttaaagaaatatctcatgcttatgaagtattgatagatgaaactagacgtcaagagtacgatacgtacggaactactgatggtaggagaactggaggagaaggattcgattataatggtaacccattcgaagacttttacggtggagcacaacaagatttttctgccaatgatttctacaatttcttcaataatatgggaggagcaggtggtccacctggcggcgcaggaagaagtagatcgaaacctcgcacaaaggatgcggaattagaagttgatgtaacacttgaagatttatttaaggggaaggtaattagaactacttcaacgagagatatagtttgtacccattgtaaaggtagtggggctaaaaagaatgcagccatgaagaagtgtggagtttgtgaaggtgagggttcagttcgtaagatccgtagggttggtcctggattagtcactcaagactatattgaatgtgaaacttgtcacggagtgggtaaaatttaccgctctaaggataaatgtaaaaaatgtctcggtaaaagagttgtagatgaaaccaagatattggaatttgaaatattgaaaggttctaagagtggtgaatcgatagttttgacgaaagaatcagacgaataccctggaaaggaaactggtgatgttgtaatgacatttcactgtaaagagcatgttgttttcactaggaagggtgatgatttatttgcaaagtataaaattccattagttgattcattatgtggattttccaaggtcctagttaaacatttagatggcaggggtatacaagtttctacacctaaaggtaaggtcataagaccaggcgattatatcaaaattaaaaatgaaggtatgcctgtgaaacatgatccgaagaagaacagctggttcagctcctctgctggtaaaaggggtgatttatatatcgaagtcgatatcgaattccctccggataattggtatttagagaagaatgatatactaaaggctaaaaatttattgcctaacgatttacaaaacaagagggatacggagaagcaaacgatcgacgaaagctcattacctgaggccaatattgaattgatcactgattttacaatttctcgtgaaaatgcattacctgattatgctgaagatagacctgaagaggatactcatgaagaatactatggcacccatgatgattttggtggtgcccaaccagaatgctctcaacaatag

SEQ ID NO: 139292 - protein, 459 aa, Debaryomyces hansenii CBS767
MTLDLYEILEVDVSATNAEIKKAYRKLALKYHPDKATEDDREQSETRFKEISHAYEVLIDETRRQEYDTYGTTDGRRTGGEGFDYNGNPFEDFYGGAQQDFSANDFYNFFNNMGGAGGPPGGAGRSRSKPRTKDAELEVDVTLEDLFKGKVIRTTSTRDIVCTHCKGSGAKKNAAMKKCGVCEGEGSVRKIRRVGPGLVTQDYIECETCHGVGKIYRSKDKCKKCLGKRVVDETKILEFEILKGSKSGESIVLTKESDEYPGKETGDVVMTFHCKEHVVFTRKGDDLFAKYKIPLVDSLCGFSKVLVKHLDGRGIQVSTPKGKVIRPGDYIKIKNEGMPVKHDPKKNSWFSSSAGKRGDLYIEVDIEFPPDNWYLEKNDILKAKNLLPNDLQNKRDTEKQTIDESSLPEANIELITDFTISRENALPDYAEDRPEEDTHEEYYGTHDDFGGAQPECSQQ

SEQ ID NO: 139293 - DNA, 1221 bp, Debaryomyces hansenii CBS767; identical to SEQ ID NO: 117557
  CDS (1)..(1221)

SEQ ID NO: 139294 - protein, 406 aa, Debaryomyces hansenii CBS767; identical to SEQ ID NO: 117558

SEQ ID NO: 139295 - DNA, 1014 bp, Debaryomyces hansenii CBS767
  CDS (1)..(1014)
atggttaaagaaacaaagctttatgatttattgggtgtgcaaccttctgcttcagagcaagagttgaagaaggcatataggaagctggcattgaaatatcacccagacaagcctacaggggatacagagaagttcaaggagatttctgaagcgtttgatattttgtccaacggagacaagagacaggtgtacgatgactacgggttggaagcggctagaggtaatgcaccagctgggggtaatccatttgcaggagccggtcacgctggaggaggaggaggtgctagtccgtttggagggtttagttctagtggtggattttcccaggcggatgcgttcaatatattctcccaaatgggtggcttcggaatgggaggaggaggtggtggcagcgatgatttcggatttggtggattcggaggtggcagtggctttggtggtatgccaggaggttttagccaagggcattcttcccgctcgcgtccagagccagataccgtgaccatatcgttgccggtgtcattggaagatttgtatcacggtggagtaaagaaaatgaaattgaatagaaagggtatcagtggtaacaaagaaagtaaggttatgaccatcaatataaagcccgggtggaaagtgggcacgaaaatcaatttcgccaacgaaggtgactaccaaagagaatgccatgcgagacaaacggttcaattcatactcgaagagaagccccacccaattttcaagagagaaggtaacaacttgaagatgaacttgccattgacattcaaggaatcattatgtggtttttctaaagaggtgaataccatcgatggtagaagaatcccattactgagatccagccctatacaaccaaatacttccaccacataccctggtttaggtatgccaatcagtaaactgccgggctctagaggtgatttagaaattgtattcaaggtcgattatcctgtatccttaaatgctgaacaaaaacaagttattaatcaatacttctaa

SEQ ID NO: 139296 - protein, 337 aa, Debaryomyces hansenii CBS767
MVKETKLYDLLGVQPSASEQELKKAYRKLALKYHPDKPTGDTEKFKEISEAFDILSNGDKRQVYDDYGLEAARGNAPAGGNPFAGAGHAGGGGGASPFGGFSSSGGFSQADAFNIFSQMGGFGMGGGGGGSDDFGFGGFGGGSGFGGMPGGFSQGHSSRSRPEPDTVTISLPVSLEDLYHGGVKKMKLNRKGISGNKESKVMTINIKPGWKVGTKINFANEGDYQRECHARQTVQFILEEKPHPIFKREGNNLKMNLPLTFKESLCGFSKEVNTIDGRRIPLLRSSPIQPNTSTTYPGLGMPISKLPGSRGDLEIVFKVDYPVSLNAEQKQVINQYF

SEQ ID NO: 139297 - DNA, 1107 bp, Yarrowia lipolytica CLIB122
  CDS (1)..(1107)
atggtgaaagaaacaaagctctacgacgacctcggggtgtcttctggcgccagcgaggcggacatcaaaaaggcgtaccgaaaggctgctctcaagtaccatcctgacaagcccggaggaaatgaggagaagttcaagcagatttccgaggcgtacgacattctgtcagacaaggagaagcgagagctctacgaccagtatggtttagaggctgctcgaaaaggaggagttcccatgcccgaacccggccaaggaggcgggtttccgggcggaggcgggtttcccggcggcgccggaggtttccccggaggtggcttctctagtggaggaggcggtggtggccctcagactttccacttctcttctggtggcggtggtccgggtggcttcggtggtttctcgtctggcgacgccttcaacatcttcaactcattcggacagcagggcggattcgacgacgagggagacgactacggaggattcgccaacctctttggcggacgtgctggccgccgtgcaggaggcatgggtggcggcatgggcggtatgggaggcatgccgcgccagagggcccgatcgcccgagcgaacacaggtgacagtcaagatgcccgtgtctttggaggacctgtgcaccggtgccaccaagaaaatgaagatcacccgaaagggccccagtggccagcccgaagagaaggtgctgaccgtcaacatcaagcccggctggaaggcaggcaccaagctcacctttgctggcgagggagactctcagcccaacggtggccagcaggatgtggtgtttgtcattgagcagaagcccaaccccgtgtttactcgagacggtgatgatctcaaaatgtccatcaagctgtctctcaaggaggctctgtgtggattcaccaagatcattgagaccctggagggcaagaagctcaagattgagcagcgtctgcccatcaaccccggccacattatcacctaccccaactatggtatgcccatttccaagaagcctggtgagcgtggtcagttgatcatcaccatcaaggtggacttccccagctcgttgaccgacgcccagcgaaaggccattgaggacaacttttaa

SEQ ID NO: 139298 - protein, 368 aa, Yarrowia lipolytica CLIB122
MVKETKLYDDLGVSSGASEADIKKAYRKAALKYHPDKPGGNEEKFKQISEAYDILSDKEKRELYDQYGLEAARKGGVPMPEPGQGGGFPGGGGFPGGAGGFPGGGFSSGGGGGGPQTFHFSSGGGGPGGFGGFSSGDAFNIFNSFGQQGGFDDEGDDYGGFANLFGGRAGRRAGGMGGGMGGMGGMPRQRARSPERTQVTVKMPVSLEDLCTGATKKMKITRKGPSGQPEEKVLTVNIKPGWKAGTKLTFAGEGDSQPNGGQQDVVFVIEQKPNPVFTRDGDDLKMSIKLSLKEALCGFTKIIETLEGKKLKIEQRLPINPGHIITYPNYGMPISKKPGERGQLIITIKVDFPSSLTDAQRKAIEDNF

SEQ ID NO: 139299 - DNA, 1254 bp, Yarrowia lipolytica CLIB122; identical to SEQ ID NO: 117559
  CDS (1)..(1254)

SEQ ID NO: 139300 - protein, 417 aa, Yarrowia lipolytica CLIB122; identical to SEQ ID NO: 117560

SEQ ID NO: 139301 - DNA, 1134 bp, Aspergillus nidulans FGSC A4
  CDS (1)..(1134)
atggtcgcagaaacaaagttatacgatgcgcttggcatcaagccggacgcttcgcaggaagatatcaagaaagcctaccggaaggctgcgttgaagtaccatccagacaagaataaagatgatgctaaagctgctgagaaattcaaagaggtctcccaagcctacgaagtcctctcagatcctgagaaacgcaaagtctatgatcaattcggcttagaataccttctacgtggtggtcctgcaccaacacccggcggcggcggtcccaaccccttcgagggaggcggcatgcccggtgggttctcctttggtggcatgcccggcggcggtacgcgcacattccacttctcaacgggaccgggcggcagcggcgggttccaattcagctccgcggacgatattttccggaacttcaccaaggccagcggcggaatgggcggttttgacgacgatgacatcttctccatgctaggcggtggccttggtggcggagctcgcagcggcggtccgcggttccgaagcagtcgcggagcgagcgccagtggtaatggagccggcgctgggttccagcgacagtcgcagcgggcgccaactcctgaaccgacggtcgtggagaagcagttgccgctgacactggaggagattatgagcggttgtaagaagacggttactgtgaagagcaagacgttcgacgcgagtgggaaacggactgtgcaggatgttacgctggaagcgactatcaagcctgggttgcggaccggatcgaagatcaagtatcggggtgtcggcgaccaggaagaaggtggccgccaggatgtgcatctcattgtgacagagaaagaacaccccaacttcaaacgccacggcgacaacctcatcacaaccgtcgacctatccctcaaagaagcccttacaggttggactcgcatcgtgcgtaccattgacggcaagtcgctcagagtctcaaagcccggtcccacgccgcctgggtacgaagaaaagttccctggtctgggcatgacaatctcaaagaagcccagcgaacgaggcgatctcattgtgcgggttaacgttgaattcccaaagacgttgagttcgagtgcgaaggaggtgctaagggatattcttccttaa

SEQ ID NO: 139302 - protein, 377 aa, Aspergillus nidulans FGSC A4
MVAETKLYDALGIKPDASQEDIKKAYRKAALKYHPDKNKDDAKAAEKFKEVSQAYEVLSDPEKRKVYDQFGLEYLLRGGPAPTPGGGGPNPFEGGGMPGGFSFGGMPGGGTRTFHFSTGPGGSGGFQFSSADDIFRNFTKASGGMGGFDDDDIFSMLGGGLGGGARSGGPRFRSSRGASASGNGAGAGFQRQSQRAPTPEPTVVEKQLPLTLEEIMSGCKKTVTVKSKTFDASGKRTVQDVTLEATIKPGLRTGSKIKYRGVGDQEEGGRQDVHLIVTEKEHPNFKRHGDNLITTVDLSLKEALTGWTRIVRTIDGKSLRVSKPGPTPPGYEEKFPGLGMTISKKPSERGDLIVRVNVEFPKTLSSSAKEVLRDILP

SEQ ID NO: 139303 - DNA, 1395 bp, Aspergillus nidulans FGSC A4; identical to SEQ ID NO: 117561
  CDS (1)..(1395)

SEQ ID NO: 139304 - protein, 464 aa, Aspergillus nidulans FGSC A4; identical to SEQ ID NO: 117562

SEQ ID NO: 139305 - DNA, 1467 bp, Candida albicans SC5314; identical to SEQ ID NO: 63849
  CDS (1)..(1467): transl_table=12

SEQ ID NO: 139306 - protein, 488 aa, Candida albicans SC5314; identical to SEQ ID NO: 63850

SEQ ID NO: 139307 - DNA, 1032 bp, Candida albicans SC5314
  CDS (1)..(1032): transl_table=12
atggttaaagataagaaactttatgatttattaggtgttgatccatctgccaatgatcaagaaattaaaaaagcatatagaaaagctgcattgaaataccatccagataaacctactggtgatactgaaaagtttaaagaaatttctgaagcatttgatatattatccaatgccgataagagagaaatctatgataattatggtttagaagcagcaagggggaatgcaccagccggagatgcagggaatccatttgctggtgcaggaggggcaggaggacctcaattcaatttcaatactggaggaccaggaggattccgttcaagtacattttccaatgctgatgcattcaatatcttttcacaaatgggtggttttggtatgggagatgatcacggattcacatatagttcaagtggtgccggaggtaatccatttggtggagctggattcggtggtggaatgccaggagggtttggtggcggaagagcacgacaaagaccagaaccagatgttgtttccatgcccttaccagttagtttggaagatttgtataaaggtgctactaagaaattaaagattacaagaaagaattctaatggtactaaagaacaaaagatgattgaagtgaatataaaagcaggttggaaatcaggaacaaagattaattttgccaacgaaggtgattatcaaccagaatgtggagcaagacaaactattcaatttgtgattgaagaaaaaccaaacccagttttcaagagagaaggtaataatttgaaaatgaatgtgacattaacattcaaagaatcattgtgtggatttgacaaagatgtgacaacattggatggtagaagaatcccattatccagatcacaaccaatacaaccaggcacaacttcgacttaccctggtttaggtatgccaataagtaagagtcctggacaaagaggtgatttagaaattgtatataaggtggattatcctgtctccttgactccagctcaaaagaaggccatccaagacaatttctaa

SEQ ID NO: 139308 - protein, 343 aa, Candida albicans SC5314
MVKDKKLYDLLGVDPSANDQEIKKAYRKAALKYHPDKPTGDTEKFKEISEAFDILSNADKREIYDNYGLEAARGNAPAGDAGNPFAGAGGAGGPQFNFNTGGPGGFRSSTFSNADAFNIFSQMGGFGMGDDHGFTYSSSGAGGNPFGGAGFGGGMPGGFGGGRARQRPEPDVVSMPLPVSLEDLYKGATKKLKITRKNSNGTKEQKMIEVNIKAGWKSGTKINFANEGDYQPECGARQTIQFVIEEKPNPVFKREGNNLKMNVTLTFKESLCGFDKDVTTLDGRRIPLSRSQPIQPGTTSTYPGLGMPISKSPGQRGDLEIVYKVDYPVSLTPAQKKAIQDNF

SEQ ID NO: 139309 - DNA, 1017 bp, Candida albicans SC5314; identical to SEQ ID NO: 117563
  CDS (1)..(1017): transl_table=12

SEQ ID NO: 139310 - protein, 338 aa, Candida albicans SC5314; identical to SEQ ID NO: 117564

SEQ ID NO: 139311 - DNA, 1182 bp, Candida albicans SC5314; identical to SEQ ID NO: 117565
  CDS (1)..(1182): transl_table=12

SEQ ID NO: 139312 - protein, 393 aa, Candida albicans SC5314; identical to SEQ ID NO: 117566

SEQ ID NO: 139313 - DNA, 1305 bp, Ustilago maydis 521; identical to SEQ ID NO: 117567
  CDS (1)..(1305)

SEQ ID NO: 139314 - protein, 434 aa, Ustilago maydis 521; identical to SEQ ID NO: 117568

SEQ ID NO: 139315 - DNA, 1293 bp, Strongylocentrotus purpuratus; identical to SEQ ID NO: 63851
  CDS (1)..(1293)

SEQ ID NO: 139316 - protein, 430 aa, Strongylocentrotus purpuratus; identical to SEQ ID NO: 63852

SEQ ID NO: 139317 - DNA, 1206 bp, Strongylocentrotus purpuratus; identical to SEQ ID NO: 117571
  CDS (1)..(1206)

SEQ ID NO: 139318 - protein, 401 aa, Strongylocentrotus purpuratus; identical to SEQ ID NO: 117572

SEQ ID NO: 139319 - DNA, 951 bp, Strongylocentrotus purpuratus
  CDS (1)..(951)
atggggattgattactatgaaatgcttgccttgactcgatcggcaattgatgcagatattaaaaaagcctaccgcaagctcgctttgaagtatcacccagataagaaccaagagatcttggcaccagagaaattcaaacaagtctcagaagcttacgatgttctctgtgatccaaggaagaaggctgtctatgaccagtttggtgaagaaggtctgaagaatggggttccttctggagcagatgaagatggcggagcctggacacaaggctacacattccacggagactcacacaaagtcttcagggaattctttggtggaaacaatccatttaatgaatttaccgatggcgttgatggagaccttagcatggggtttggtggtctgttagggcggggtcgaaacaagcaggatcctcccatagagagagacctagtcctatctctggaagagatctaccatggttgtaccaagaagatgaagatttcaagaagagtaatgaatgaagatgggcacacatcaagcacaagggacaagatcctcactatcacagtgcacaagggatggagggaaggtacaaggatcaccttcccgaaggaagctgaccagggacccaacatcgtacctgccgacatcatcttcatcgtcagggataagccgcatcctcgcttccagcgggcggatgatgatctggtctttgtgtccagggttctcctgggcaaggcactgactggctgcagcgtagaggtgccaaccctggatgggaggttgctaaatgttcccatcaatgatattatcaaccctggctacaggaaggtggtgcctggtgaaggtatgccaatctctaagaaccccgctctgaagggcaacctcatcataacctttgacattgagttcccacggcaactgactccagacaagaaacagctcatcaaggatgctctcttataa

SEQ ID NO: 139320 - protein, 316 aa, Strongylocentrotus purpuratus
MGIDYYEMLALTRSAIDADIKKAYRKLALKYHPDKNQEILAPEKFKQVSEAYDVLCDPRKKAVYDQFGEEGLKNGVPSGADEDGGAWTQGYTFHGDSHKVFREFFGGNNPFNEFTDGVDGDLSMGFGGLLGRGRNKQDPPIERDLVLSLEEIYHGCTKKMKISRRVMNEDGHTSSTRDKILTITVHKGWREGTRITFPKEADQGPNIVPADIIFIVRDKPHPRFQRADDDLVFVSRVLLGKALTGCSVEVPTLDGRLLNVPINDIINPGYRKVVPGEGMPISKNPALKGNLIITFDIEFPRQLTPDKKQLIKDALL

SEQ ID NO: 139321 - DNA, 1047 bp, Strongylocentrotus purpuratus
  CDS (1)..(1047)
atggggaaagattactacaaggtgctcggggtagccaagggtgccaccgacgatgaaatcaagaaggcgtatcggaagatggcactgaagtatcatcccgacaagaataagtcaaagggagcggaagaaaaattcaaagaaatagccgaagcttatgaagttttgagcgacaagaagaagaagaacatttatgacaaatatggagaggaaggtctgaagggaggtggaggtgctccacatggagaacaaggaggagagaacttctcatcatggacattccatggcgatcccaacgcaactttcacaagcttctttggtaacagcaacccatttgacatgtttttcaatgttggtggcatgggtggccaacaaaacactcggtttaatttcgcaggtggccaacctgaagcaatggacatcgatgatgattttgggttcggtggtgggttcccaggccctggatcccaccaaacacgaagcaacagtcaaaggaaacgccaagatccaccagtacaccatgaccttagggtcacgctcgaggacgttttccgtgggtgcacgaagaaaatgaaaatcaatcgtcgagtaatgaatgaagacggccgaacaacaaggactgaggacaagattcttgaaatcaatgtgaagccaggatggaaggaaggcacaaaaatcacatttcccaaagaaggagaccaaggtccaaagagaactcctgcagacattgttttcaccctcaaagacataccacattcagtgttcaacagagacggcagcaacttagtctacaaagctaaaattccactaagagatgccttggtaggaacaagcctcaaagtaccgaccatcgaaggacgaacgataacagttccatgcaaagaagtaatcaagcccaactcaagaaaacgagtgaccagtgaggggctcccgtaccccaagcaacccagtcgccgcggtgacctcctcatcacctttgacatcgtattccctgaccatcttcctagcactaccaaggaaatcctatccgactgcctaccatcaccatga

SEQ ID NO: 139322 - protein, 348 aa, Strongylocentrotus purpuratus
MGKDYYKVLGVAKGATDDEIKKAYRKMALKYHPDKNKSKGAEEKFKEIAEAYEVLSDKKKKNIYDKYGEEGLKGGGGAPHGEQGGENFSSWTFHGDPNATFTSFFGNSNPFDMFFNVGGMGGQQNTRFNFAGGQPEAMDIDDDFGFGGGFPGPGSHQTRSNSQRKRQDPPVHHDLRVTLEDVFRGCTKKMKINRRVMNEDGRTTRTEDKILEINVKPGWKEGTKITFPKEGDQGPKRTPADIVFTLKDIPHSVFNRDGSNLVYKAKIPLRDALVGTSLKVPTIEGRTITVPCKEVIKPNSRKRVTSEGLPYPKQPSRRGDLLITFDIVFPDHLPSTTKEILSDCLPSP

SEQ ID NO: 139323 - DNA, 939 bp, Tribolium castaneum
  CDS (1)..(939)
atgggccgtgatttttacaaaattctcggtatcaacaaaaacgcgtcagacgatgaaatcaaaaaagcctacagaaaattggccctcaagtaccaccccgataagaacaagtcgccaggggctgaagacaagttcaaagaaatcgcagaagcgtatgaggtgctgtctgataagaaaaaacgcgacgtgtatgacgcttatggcgaggagggtttgaaggggggtgtgccggggggagccccctcagggttcacttacacgttccatggggacccccgggcgacttttgcacagtttttcggaagcgcggacccctttcagaatatgtttgagtttgaagaagggggtttcagcgacccttttaccctgtttacggggatgatttccaaaacgcaagaccctcccattgagtacgacttgaatgtttgtctagaggatattttacatggttgtaccaaaaatataaagatttccaggaacgtggttgagggtaatggacagagaaggcgggaggaaaaaatgctaacaatcaatataaagccaggctggaaggccgggactcgcatcacattcctaaaagaaggcgacatctacccgaataaaatccccgcggacgtcgtcttcatcgtgcgcgacaaaccccaccctgtgttcaaacgtgagggcacggacatccgctacacggcccagatttcgctgaagcaggccctttgtggcggctccgtgaccatccccacactgaacgaaaaaaatgttcgactggaattgggtcccgagatcatcaaaccgacgagtgtgaagcgcattccaggccaaggattgccgtttccgaaagaaccatcaaaacggggtgatatcatcgtcgactttaatataaagtttcccgacaagttgacgcaacaagtgaagaatattttagcggagaagcttcccaattaa

SEQ ID NO: 139324 - protein, 312 aa, Tribolium castaneum
MGRDFYKILGINKNASDDEIKKAYRKLALKYHPDKNKSPGAEDKFKEIAEAYEVLSDKKKRDVYDAYGEEGLKGGVPGGAPSGFTYTFHGDPRATFAQFFGSADPFQNMFEFEEGGFSDPFTLFTGMISKTQDPPIEYDLNVCLEDILHGCTKNIKISRNVVEGNGQRRREEKMLTINIKPGWKAGTRITFLKEGDIYPNKIPADVVFIVRDKPHPVFKREGTDIRYTAQISLKQALCGGSVTIPTLNEKNVRLELGPEIIKPTSVKRIPGQGLPFPKEPSKRGDIIVDFNIKFPDKLTQQVKNILAEKLPN

SEQ ID NO: 139325 - DNA, 1047 bp, Tribolium castaneum
  CDS (1)..(1047)
atgggcaaagattactacaaaatcctcggacttagcaaaggtgccagtgacgacgacatcaaaaaggcctaccgaaagctggccctgaagtaccaccccgacaagaacaaggccccgggggcggaggagcgcttcaaggaggtggccgaggcgtacgaggtgctctcggacaagaagaagcgcgacatctacgacagctacggcgaggagggcctgaagggcggagttccgggcaactccggcttcggcaactccagcttcagctacacctaccatggggacccgcgcgccaccttcgcgcagttcttcgggaacgcgagtcccttcgcggcgttcttcagcggaaatcacagcatgttcgggttcccggacgacgacatggacgtggacgaccccttcgcgtcgctcaacgtgggcccgacgcgggcggggcctggcggcgccttccggagccactcgttcaatttccacggcacccccaatcggagcaaggataaggtgcaggacccgcccatcgagcacgacctctacgtctcgttggaggacatcacgaagggctgcaccaagaagatgaagatcagtcggagggtgctgcaggcggacgggacggccaagaaggaggacaaggtcttgacgataaatgtgaagccggggtggaaggcggggacgaaaattacattccagcgggagggggatcaggggaggaataagatcccggctgatattgtttttattatcagggacaagccgcatcctttgttcaagcgcgaagggagcgatatcagatacacggcgaaaatctcactcaaacaggctttgtgtggttgcactattgaggttcctacgatgtcttccacgaagatacctctgcattacacctcggagattattaaaccaaatacggtgaggcgcatccagggctatgggctgcccctaccgaaggaaccctcccgcaggggcgacttgatagttaacttcgatatcaggtttcccgaggctctcacgcagtcggctaaagatatactatacgatactcttccgaactaa

SEQ ID NO: 139326 - protein, 348 aa, Tribolium castaneum
MGKDYYKILGLSKGASDDDIKKAYRKLALKYHPDKNKAPGAEERFKEVAEAYEVLSDKKKRDIYDSYGEEGLKGGVPGNSGFGNSSFSYTYHGDPRATFAQFFGNASPFAAFFSGNHSMFGFPDDDMDVDDPFASLNVGPTRAGPGGAFRSHSFNFHGTPNRSKDKVQDPPIEHDLYVSLEDITKGCTKKMKISRRVLQADGTAKKEDKVLTINVKPGWKAGTKITFQREGDQGRNKIPADIVFIIRDKPHPLFKREGSDIRYTAKISLKQALCGCTIEVPTMSSTKIPLHYTSEIIKPNTVRRIQGYGLPLPKEPSRRGDLIVNFDIRFPEALTQSAKDILYDTLPN

SEQ ID NO: 139327 - DNA, 1038 bp, Tribolium castaneum
  CDS (1)..(1038)
atggggatagatttttacggagtgttgcaaataccgcggagcagcacgaacctcgacatcaagaaggcgtttcgggacttggctcttgaattcaaccctgagaaactccagggcgagaatgcccagcaagtgttcagcctcatttgcgaggcttacgacgttctcagcgaccctctccggagatcagtgttcgatcaatatggcgaagagggcttgaagcggggagtccccgggcctgatagtttcatagagccttaccgctaccacggggaccccatgcgcacttataaagattttttcggtaccacttcgccctacgccaatttgctcgattatttgcgcaacccctcgtacgagtgcatgaccaagcacgggaaaatcttctgtgagaagcaaccgccgattacccaccctctgcacttgaccctccacgagattttcttcggggggattaaaaaaatgaagattcatcgcctggtttacatcaacgacgaaaagacgaaaaccaaagttaaggagaagatcctcactattcccatcaagccgggggttaggcctgggacagagctggttttcccggaggaaggcgaccagagttcgaatcatgttcccgctgacgttattttcgtggttcaggaaaggccccacgaagtgttccaaagggaggaggataatttggctatgatgtgtagtgtgacactcgaggaggcgctaatggggaccacggtcactgttaacacaatcgaccatcgcacagttcgggtgccaataacagacgtcatttttcctgggtacgaaaaaatcgtggagaatgagggaatgccggttttggacgattatcccaaaaggggaaacctgataatacggttcgacattgcctttccgaaatatttaccaaaggcttgtaaacatttgttacggaaaggattccagctggcgaagattggcggtggtgttgatcaatacgaaacggttaataagctggttttggccgataaaattcttcgcgttgatctcaacgagcaaatgccaccataa

SEQ ID NO: 139328 - protein, 345 aa, Tribolium castaneum
MGIDFYGVLQIPRSSTNLDIKKAFRDLALEFNPEKLQGENAQQVFSLICEAYDVLSDPLRRSVFDQYGEEGLKRGVPGPDSFIEPYRYHGDPMRTYKDFFGTTSPYANLLDYLRNPSYECMTKHGKIFCEKQPPITHPLHLTLHEIFFGGIKKMKIHRLVYINDEKTKTKVKEKILTIPIKPGVRPGTELVFPEEGDQSSNHVPADVIFVVQERPHEVFQREEDNLAMMCSVTLEEALMGTTVTVNTIDHRTVRVPITDVIFPGYEKIVENEGMPVLDDYPKRGNLIIRFDIAFPKYLPKACKHLLRKGFQLAKIGGGVDQYETVNKLVLADKILRVDLNEQMPP

SEQ ID NO: 139329 - DNA, 1221 bp, Tribolium castaneum; identical to SEQ ID NO: 117573
  CDS (1)..(1221)

SEQ ID NO: 139330 - protein, 406 aa, Tribolium castaneum; identical to SEQ ID NO: 117574

SEQ ID NO: 139331 - DNA, 1212 bp, Tribolium castaneum; identical to SEQ ID NO: 117575
  CDS (1)..(1212)

SEQ ID NO: 139332 - protein, 403 aa, Tribolium castaneum; identical to SEQ ID NO: 117576

SEQ ID NO: 139333 - DNA, 981 bp, Tribolium castaneum
  CDS (1)..(981)
atgggcaaagattactacaaaatcctcggacttagcaaaggtgccagtgacgacgacatcaaaaaggcctaccgaaagctggccctgaagtaccaccccgacaagaacaaggccccgggggcggaggagcgcttcaaggaggtggccgaggcgtacgaggtgctctcggacaagaagaagcgcgacatctacgacagctacggcgaggagggcctgaagggcggagttccgggcaactccggcttcggcaactccagcttcagctacacctaccatggggacccgcgcgccaccttcgcgcagttcttcgggaacgcgagtcccttcgcggcgttcttcagcggaaatcacagcatgttcgggttcccggacgacgacatggacgtggacgaccccttcgcgtcgctcaacgtgggcccgacgcgggataaggtgcaggacccgcccatcgagcacgacctctacgtctcgttggaggacatcacgaagggctgcaccaagaagatgaagatcagtcggagggtgctgcaggcggacgggacggccaagaaggaggacaaggtcttgacgataaatgtgaagccggggtggaaggcggggacgaaaattacattccagcgggagggggatcaggggaggaataagatcccggctgatattgtttttattatcagggacaagccgcatcctttgttcaagcgcgaagggagcgatatcagatacacggcgaaaatctcactcaaacaggctttgtgtggttgcactattgaggttcctacgatgtcttccacgaagatacctctgcattacacctcggagattattaaaccaaatacggtgaggcgcatccagggctatgggctgcccctaccgaaggaaccctcccgcaggggcgacttgatagttaacttcgatatcaggtttcccgaggctctcacgcagtcggctaaagatatactatacgatactcttccgaactaa

SEQ ID NO: 139334 - protein, 326 aa, Tribolium castaneum
MGKDYYKILGLSKGASDDDIKKAYRKLALKYHPDKNKAPGAEERFKEVAEAYEVLSDKKKRDIYDSYGEEGLKGGVPGNSGFGNSSFSYTYHGDPRATFAQFFGNASPFAAFFSGNHSMFGFPDDDMDVDDPFASLNVGPTRDKVQDPPIEHDLYVSLEDITKGCTKKMKISRRVLQADGTAKKEDKVLTINVKPGWKAGTKITFQREGDQGRNKIPADIVFIIRDKPHPLFKREGSDIRYTAKISLKQALCGCTIEVPTMSSTKIPLHYTSEIIKPNTVRRIQGYGLPLPKEPSRRGDLIVNFDIRFPEALTQSAKDILYDTLPN

SEQ ID NO: 139335 - DNA, 1125 bp, Prochlorococcus marinus str. AS9601
  CDS (1)..(1125): transl_table=11
atggctgatttctatcaaatacttggagtttcaagagatgctgatgcagataccttaaaaaaggcttatagaaaattagcaagacaataccatcctgatgttaataaagaacctggtgcggaagataaatttaaagaaattggtaaggcttacgaagcattagctgaccctgaaactagagccaggtatgaccaatttggagaggctggccttggaggcgcagctgggatgcctgatatgggagacatgggtggatttgctgatctatttgaaactttttttaatggatttggggggcaaaatccacagggtggaagaacacaaagaagaggtcctcaacaaggagatgatctaaggtatgaccttaatgttgaatttaaagatgcaatttttggtcaacaaagagaaattaaaattcctcatctggaaacatgtgaagtctgtaggggaacgggtgcaaaacaaggaaccggacccaaaacttgctcaacatgtggtggaagtggacaagttagaagagctacaagaacaccttttggtaatttcacacaagtagctgaatgtccctcatgtaatggggctggtcagataattgcagatccatgtgtaaattgcggcggtaatggagtgaagcaagtcagaaaaaaattaagaattaatatacctgcaggagttgataccggtactaaattaagagtttccggtgagggaaatgttggtttaaaagggggcccacctggagatctttatgtctttataaaggttaagaatgattcaaaacttaaaagagatggtgtaactatttactcagaaatagcagtgagttatttacaggctatcttaggcgacacggttaaaattactacggttgatggagaagttaatttaaaaattccaagtggtacgcagccaaatacaactctttcacttgagaataaaggggtacctaggcttggtaatccagttgcgagaggaaaccatgaagtcttagtaaaagtaaaattaccaactcgtataacagatggagaacgagagcttttggagggtttagcttctcaatattcagataaaaatattaattccactagtggactttttagtaaattatttggtaaagattcttaa

SEQ ID NO: 139336 - protein, 374 aa, Prochlorococcus marinus str. AS9601
MADFYQILGVSRDADADTLKKAYRKLARQYHPDVNKEPGAEDKFKEIGKAYEALADPETRARYDQFGEAGLGGAAGMPDMGDMGGFADLFETFFNGFGGQNPQGGRTQRRGPQQGDDLRYDLNVEFKDAIFGQQREIKIPHLETCEVCRGTGAKQGTGPKTCSTCGGSGQVRRATRTPFGNFTQVAECPSCNGAGQIIADPCVNCGGNGVKQVRKKLRINIPAGVDTGTKLRVSGEGNVGLKGGPPGDLYVFIKVKNDSKLKRDGVTIYSEIAVSYLQAILGDTVKITTVDGEVNLKIPSGTQPNTTLSLENKGVPRLGNPVARGNHEVLVKVKLPTRITDGERELLEGLASQYSDKNINSTSGLFSKLFGKDS

SEQ ID NO: 139337 - DNA, 1125 bp, Prochlorococcus marinus str. MIT 9515; identical to SEQ ID NO: 63855
  CDS (1)..(1125): transl_table=11

SEQ ID NO: 139338 - protein, 374 aa, Prochlorococcus marinus str. MIT 9515; identical to SEQ ID NO: 63856

SEQ ID NO: 139339 - DNA, 1131 bp, Prochlorococcus marinus str. NATL1A; identical to SEQ ID NO: 63857
  CDS (1)..(1131): transl_table=11

SEQ ID NO: 139340 - protein, 376 aa, Prochlorococcus marinus str. NATL1A; identical to SEQ ID NO: 63858

SEQ ID NO: 139341 - DNA, 1137 bp, Prochlorococcus marinus str. MIT 9303; identical to SEQ ID NO: 117581
  CDS (1)..(1137): transl_table=11

SEQ ID NO: 139342 - protein, 378 aa, Prochlorococcus marinus str. MIT 9303; identical to SEQ ID NO: 117582

SEQ ID NO: 139343 - DNA, 960 bp, Prochlorococcus marinus str. MIT 9303
  CDS (1)..(960): transl_table=11
atggccggcagcggctaccgggattatttcaaggttctcggagttgagcgcaacgccgatagcgatgacatcaagcgagcattccgcaagctggcgcgccagtaccaccctgatgtgaatcccggggattctactgctgaggcgaagttcaaggaggtgagtgaggcatatgaggtgctttccgatccggataaacgcagtaaatatgagcagtttggccgctattggaatcaggccagtggcatgggtggtggaggtcctgccggggctggttttgaagttgactttggtcgttatgggaattttgacgacttcatcaatgaccttttgggccgttttggtgggcctcaagctgctgctggttttggcgctggtttccctggtggcgcaggcttccctagagggagctctcgtgctccggtgaatcttgatgccgaagccaccttgaaggtgagttttgctgaagcgtttcgcggtaccgaacgcaccctttctgtgaatgaagaacgagtgcaggtgcgcattccgcagggcattaaacctggttcgcgcttacgcctcaagggaaagggcaatcttcaacctggtactggccggcggggtgatcttttcctcaatattgatgtacaaacccatcccttatggcggttggatggtgatcagctgcgggccgatttgcccgttgctctcgatgagtttgcactggggggtacggcgactgtgatgactcctgatggggaagctcaggtgaccattcctgcaggaacctcgccaggccgcagtctgcggcttaaaggcaaaggttggccttcgcctggggggcgtggtgatttgctcttgaccctcaacctgaagttaccgtctgaatggtctgctgatgaactggagttgttgaaacggttgcagcagtcccgcagtactgacccccgtcaggcgtggcttcagatggctccactctga

SEQ ID NO: 139344 - protein, 319 aa, Prochlorococcus marinus str. MIT 9303
MAGSGYRDYFKVLGVERNADSDDIKRAFRKLARQYHPDVNPGDSTAEAKFKEVSEAYEVLSDPDKRSKYEQFGRYWNQASGMGGGGPAGAGFEVDFGRYGNFDDFINDLLGRFGGPQAAAGFGAGFPGGAGFPRGSSRAPVNLDAEATLKVSFAEAFRGTERTLSVNEERVQVRIPQGIKPGSRLRLKGKGNLQPGTGRRGDLFLNIDVQTHPLWRLDGDQLRADLPVALDEFALGGTATVMTPDGEAQVTIPAGTSPGRSLRLKGKGWPSPGGRGDLLLTLNLKLPSEWSADELELLKRLQQSRSTDPRQAWLQMAPL

SEQ ID NO: 139345 - DNA, 1155 bp, Clostridium difficile 630; identical to SEQ ID NO: 63859
  CDS (1)..(1155): transl_table=11

SEQ ID NO: 139346 - protein, 384 aa, Clostridium difficile 630; identical to SEQ ID NO: 63860

SEQ ID NO: 139347 - DNA, 1125 bp, Prochlorococcus marinus str. MIT 9301; identical to SEQ ID NO: 117585
  CDS (1)..(1125): transl_table=11

SEQ ID NO: 139348 - protein, 374 aa, Prochlorococcus marinus str. MIT 9301; identical to SEQ ID NO: 117586

SEQ ID NO: 139349 - DNA, 1191 bp, Streptococcus pyogenes MGAS10394; identical to SEQ ID NO: 63861
  CDS (1)..(1191): transl_table=11

SEQ ID NO: 139350 - protein, 396 aa, Streptococcus pyogenes MGAS10394; identical to SEQ ID NO: 63862

SEQ ID NO: 139351 - DNA, 987 bp, Leifsonia xyli subsp. xyli str. CTCB07
  CDS (1)..(987): transl_table=11
gtggcaagccaggactggttcgacaaggacttctacaaggtccttggcgtctccaaggacgtcagcgacgcggagctcaagaagacctaccgcaagctcgcgcgcaaataccaccccgactcgaatcccggcgacagtgccgcggaggcgaagttcaaggagatcagcgaagcgtactcggtgctgagtgacgccgaggagcgcaaagagtacgaccaggtccgcgcgatgggttcgggcgcgcggttcaccgccccgggcagcggcgcccccggcggcggcttcgacgatgtgttcggtgggatgttcggcggcggccagcagcgcggccagtactacgcgggcgggggcaacttcgacgatgtgctcggcgggctcttcggcaacggccgtttcggcactacgaccggcggctatcgcggctacggcggtccggcccgcggccgcgacatcaccgcccacaccgccatcgacttcctcacggccaccaagggcgagaccatcagcttgcaggccgccgatggcaaacccttcaaagtgaagatccccgccggtgtcgccgacgggcagaagatcaagctgcgcggcaaaggcgagcccagtccggacggcggcgaggccggcgacatcgtcctgacggtgtcggtgcgcaagcaccccgtcttcgagcgcgacggcctcaaccttcgcgtgaccgttccggtgacgttcgccgaagccgcgctcggcgcgaccatcgaggtcccgacccttggcggcgacccggtcaagttgcgtgttgcccccggcacaccgagcggccgtgtcctgcgcgtgagaggccgcggtgtgcagaccgcgaaggggaccggcgacctgctcgccgtcgtccagatcgcggtgccctcgcatctgtccggagaggccaaggaggcccttgaggcgttcgccgagaaactcctcgacgagaatccgcgagaggacctcctggccaaggcgcggagctga

SEQ ID NO: 139352 - protein, 328 aa, Leifsonia xyli subsp. xyli str. CTCB07
MASQDWFDKDFYKVLGVSKDVSDAELKKTYRKLARKYHPDSNPGDSAAEAKFKEISEAYSVLSDAEERKEYDQVRAMGSGARFTAPGSGAPGGGFDDVFGGMFGGGQQRGQYYAGGGNFDDVLGGLFGNGRFGTTTGGYRGYGGPARGRDITAHTAIDFLTATKGETISLQAADGKPFKVKIPAGVADGQKIKLRGKGEPSPDGGEAGDIVLTVSVRKHPVFERDGLNLRVTVPVTFAEAALGATIEVPTLGGDPVKLRVAPGTPSGRVLRVRGRGVQTAKGTGDLLAVVQIAVPSHLSGEAKEALEAFAEKLLDENPREDLLAKARS

SEQ ID NO: 139353 - DNA, 966 bp, Desulfotalea psychrophila LSv54
  CDS (1)..(966): transl_table=11
ttgatatttttcagagcacaattgtgctctttgttttttacagagagagaaaagatggattattacggaaagctagagattgacaagtcagctactgcagccgaaataaagaagtcctacagaaaacttgcccaaaaatatcaccctgacaaaaacagtggtgataaggcagctgaagaaaaatttaaggaaatcagcgaagcctatgccgttctttccgatccagaaaaaaaagaactctacgacacccatggttccaccgactttcatcagcgctattcccaagaagatatttttaaaaattttgacatcaatgatatcttcagtcaatttgccggtggtggacgtaccagctcttttagaggcggtggaggaggagatccattcagctcttttaggggtggtggaggtggttgtggtggtggaggttgtcccacccctactcctgggcgagatatcacctaccagataaccgttaccctccaggaagttcttgaaggtgccgagcgaaccgttgccctccgtaaaaatggtgaacatcaaaatgtcaccgtgaaaattccgcagggaattgtagagggtaaaaagctgcgacttcgtgacaagggtgaaccgtcacagactggcggagccaatggtgatctctatctcaaggtttctgtggcagccgatgagcgttttactcgggacgaggacgatctgattgttcaacacgctgtttcctacagtgaggcctgtttgggaacaaaaattaccgtagaaaccattgatggcaagaagattgcggtaaaaattgccccgggaatggcttcaggcaaacgacttcgcttgaagggttttggcctgccccaagggccaaacagcaccagaggtgacctttatgtgcaggtagcagtaagcgtccctcaggagctttctgaagagcagaaggttttaattgaaagccttgccgaggcagggctatag

SEQ ID NO: 139354 - protein, 321 aa, Desulfotalea psychrophila LSv54
MIFFRAQLCSLFFTEREKMDYYGKLEIDKSATAAEIKKSYRKLAQKYHPDKNSGDKAAEEKFKEISEAYAVLSDPEKKELYDTHGSTDFHQRYSQEDIFKNFDINDIFSQFAGGGRTSSFRGGGGGDPFSSFRGGGGGCGGGGCPTPTPGRDITYQITVTLQEVLEGAERTVALRKNGEHQNVTVKIPQGIVEGKKLRLRDKGEPSQTGGANGDLYLKVSVAADERFTRDEDDLIVQHAVSYSEACLGTKITVETIDGKKIAVKIAPGMASGKRLRLKGFGLPQGPNSTRGDLYVQVAVSVPQELSEEQKVLIESLAEAGL

SEQ ID NO: 139355 - DNA, 831 bp, Borrelia garinii PBi
  CDS (1)..(831): transl_table=11
atggcaaaagattactataatatacttgaaatacaaaaaaatgctagtaatgaagaaattaaaaaagcttacaaaaaattggcaataaaatatcacccggacaaaaacaaaggaaacaaaatagctgaagaaaagtttaaagaaataaatgaagcctatgaaattttatcttctcctgataaaaaaagaaattacgacgctttgggtagcaccaattttaatggcaacaacgaccattttgaaagagaatttaatggctcaagatttagcaattttgaagatttagattttttttccaaaatatttactggatcttcaagaaaaacagcagacaaagaaataactttaaatatttcactttatgatgcttatatgggaagtaaaaaaacaatacttataaacaacaaaaaagtcgaagtaataatcccaaaaggaacattagaaacaactaaaataaaaataaacaataaaggccctattaatccaatttctggaacaaaagagatcttaatagtcaaatttaacatatcaagctataaaaaatttaaactgaatggaaaaaccttagaaacaacaatagaagtttatccatgggaaatagctctaggttgcgaaaaactatttgaaacaattgaaggaaaaaaaataaaacttaaaattccttcggatgcacaaaatggagaaattttaaacttaaaagaactaggaatgcctataattggaagcaactcaaaaagggaccttaaagtcactttgatagtaaaaattccaaaaataataaataatgaagtaaaagctatttacgaaagattaaaagagatatatgactaa

SEQ ID NO: 139356 - protein, 276 aa, Borrelia garinii PBi
MAKDYYNILEIQKNASNEEIKKAYKKLAIKYHPDKNKGNKIAEEKFKEINEAYEILSSPDKKRNYDALGSTNFNGNNDHFEREFNGSRFSNFEDLDFFSKIFTGSSRKTADKEITLNISLYDAYMGSKKTILINNKKVEVIIPKGTLETTKIKINNKGPINPISGTKEILIVKFNISSYKKFKLNGKTLETTIEVYPWEIALGCEKLFETIEGKKIKLKIPSDAQNGEILNLKELGMPIIGSNSKRDLKVTLIVKIPKIINNEVKAIYERLKEIYD

SEQ ID NO: 139357 - DNA, 1170 bp, Mannheimia succiniciproducens MBEL55E; identical to SEQ ID NO: 64035
  CDS (1)..(1170): transl_table=11

SEQ ID NO: 139358 - protein, 389 aa, Mannheimia succiniciproducens MBEL55E; identical to SEQ ID NO: 117590

SEQ ID NO: 139359 - DNA, 1071 bp, Dehalococcoides ethenogenes 195; identical to SEQ ID NO: 117591
  CDS (1)..(1071): transl_table=11

SEQ ID NO: 139360 - protein, 356 aa, Dehalococcoides ethenogenes 195; identical to SEQ ID NO: 117592

SEQ ID NO: 139361 - DNA, 942 bp, Bacteroides fragilis NCTC 9343
  CDS (1)..(942): transl_table=11
atggcttatatagattattacaagattctcggagttgacaaaaatgcttctcaggatgatattaaaaaggctttccgtaaattggcccgtaaatatcatccggacctgaatcctaatgacccaagcgctaaggataagtttcaggagattaatgaagctaacgaagtattgagcgatccggagaaaaggaaaaagtacgacgaatacggcgaacattggaaacatgcggacgaattcgaagcgcagaagaaggcgcggcagcatgccggtggaggcggaggaggattctccggctttggcggagacggcggttcttattggtactcgtccgatggagaggggttctcgggtggtgatgccggaggattctcggacttctttgaatctatgttcggacatagaggaggaggcggacgaggcaatgcaggcttccgaggacaagattttaatgcagaattgcacctgtctcttcgcgatgcggcccggacccacaaacaggtgttgaatgtgaatggcaaacaggttcgtattacgataccggccggtgtagccgacggacaggtgattaagttgaagggatacggaggcgaaggcatcaacggtggccctgcaggagacctgtatatcactttcaagatagccgaagactctgtattcaagcgtcttggagacgacctgtatgtggatgtggagatggatctttatactgccgtactgggtggtgagaaggtgatcgatacactggaaggtaaagtgaaactgaagataaagcccgaaacccagaatggaacgaaagtgcgcctgaaaggtaaaggttttcccgtttataaaaaagaaggacagtttggcgacttgatcatcacttattcagtcaagatacctaccaatctgacagataggcagaaagaactgttcagagagttacaacagagtatgaactaa

SEQ ID NO: 139362 - protein, 313 aa, Bacteroides fragilis NCTC 9343
MAYIDYYKILGVDKNASQDDIKKAFRKLARKYHPDLNPNDPSAKDKFQEINEANEVLSDPEKRKKYDEYGEHWKHADEFEAQKKARQHAGGGGGGFSGFGGDGGSYWYSSDGEGFSGGDAGGFSDFFESMFGHRGGGGRGNAGFRGQDFNAELHLSLRDAARTHKQVLNVNGKQVRITIPAGVADGQVIKLKGYGGEGINGGPAGDLYITFKIAEDSVFKRLGDDLYVDVEMDLYTAVLGGEKVIDTLEGKVKLKIKPETQNGTKVRLKGKGFPVYKKEGQFGDLIITYSVKIPTNLTDRQKELFRELQQSMN

SEQ ID NO: 139363 - DNA, 1143 bp, Pseudomonas syringae pv. syringae B728a; identical to SEQ ID NO: 117593
  CDS (1)..(1143): transl_table=11

SEQ ID NO: 139364 - protein, 380 aa, Pseudomonas syringae pv. syringae B728a; identical to SEQ ID NO: 117594

SEQ ID NO: 139365 - DNA, 945 bp, Pseudomonas syringae pv. syringae B728a
  CDS (1)..(945): transl_table=11
atggatttcaaagactactacaagatacttgccgtggagccgactgcggacgacaaggcgatcaagaccgcctatcgcaaactcgcgcgcaagtatcatccggacgtcagcaaggaggcaggcgccgaagacaagttcaaggaagcttccgaagcctatgaggtactcagcagccctgaaaagcgcgccgagtatgatgagctgcgcaaatacggtcgtcagggccgcccgttccagactccgccgggctggcaaagccgcgcaggcgccggggcaggcgggttcgaggaaacggcagacttctcggagtttttcagctccattttcggtggccggcctcagcagggcgggcgtacccgcaacccggggcgtaccgggcaggacgtggagatggaactggcggtgtttctcgaagaaaccctgtcgggggaatccaagcaggtcagcttcaaggtgccgcagcacagccccaacgggcagcgcatgagtgatatcaccaagaccctgaacgtgaagattcccgcgggcgtcgtcgatggcgagcgtattcgcctgaaggggcagggcgcgccgggcgtaggcggtggtgccaatggcgatctgtacctgatcattcgcctggccccgcacccgctgttcgaggtcgaaggccatgatctggtcatcaccgtgccgctggccccctgggaagccgtgctgggcaccaaggtcgccgtgccgacgctgaccagcaggatcaacctgaccatccgcccggacagtcagaacggtcagcgtctgcggatcaagggtaacggcttgatgaacaagagtggcgaacgcggcgatctttatgcgcagttgaaaatcgtcgtgcccaagcacaccgacgaggctacgcgggcgctctggcagaaactggccgacagttcttcgttcgatccccgtgcgcagtggaagggttga

SEQ ID NO: 139366 - protein, 314 aa, Pseudomonas syringae pv. syringae B728a
MDFKDYYKILAVEPTADDKAIKTAYRKLARKYHPDVSKEAGAEDKFKEASEAYEVLSSPEKRAEYDELRKYGRQGRPFQTPPGWQSRAGAGAGGFEETADFSEFFSSIFGGRPQQGGRTRNPGRTGQDVEMELAVFLEETLSGESKQVSFKVPQHSPNGQRMSDITKTLNVKIPAGVVDGERIRLKGQGAPGVGGGANGDLYLIIRLAPHPLFEVEGHDLVITVPLAPWEAVLGTKVAVPTLTSRINLTIRPDSQNGQRLRIKGNGLMNKSGERGDLYAQLKIVVPKHTDEATRALWQKLADSSSFDPRAQWKG

SEQ ID NO: 139367 - DNA, 957 bp, Pseudomonas fluorescens Pf-5
  CDS (1)..(957): transl_table=11
atggtgattccctcgatggacttcaaagactattacaagattctcggcgtggagccgacagcggacgacaaggcgatcaaggccgcctatcgcaagctggcgcgtaagtaccaccccgacgtcagtaaggaaaaggatgccgaggccaagttcaaggacgcctcggaagcctatgaagcgctgaaaagcgccgacaagcgcgccgagtacgatgacctgcgcaagtacggccagcatggccagcccttccagggcccgccgggctggcagagccgtggcggttttggcggcggcgaggacggtggcgatttctcggacttcttcagttcgatctttggtaaccgggggccaggattcggcggcccggagcagcgccgcagcagcggtcgtcgtggacaggatgtggaaatggaactgccgatctttcttgaagaaaccctgtccaccgagtcgaagaagatcagcttccaggtgccgcagtacaacgccaatggccaacacgtcagcaacaccagcaagagcctgaacgtgaagattccggcaggtgtcaccgacggcgagcgcatccgcctcaagggccagggcgcgcccggcgtgggcggcggcgcgaatggcgacctgtacctgaccattcgcttcgcgccgcatcccaagttcgatgtcgaaggcgagaacctgatcatcaccctgccactggccccctgggagctggcgctggggaccgaggtcgcggtaccgaccctgaccggcaagatcaacctcaaggttccggccggcagccagaatggccagcgcatgcgcgccaagggccatggcctgctgaacaaggccggccagcgcggctacctgttcgtgcaactcaaggcggtcatgcccaagcaggcgggcgacgacgtcaaggccttgtggcaggagctggcgaagaaggcagcgttcgacccccgggaaaatttctga

SEQ ID NO: 139368 - protein, 318 aa, Pseudomonas fluorescens Pf-5
MVIPSMDFKDYYKILGVEPTADDKAIKAAYRKLARKYHPDVSKEKDAEAKFKDASEAYEALKSADKRAEYDDLRKYGQHGQPFQGPPGWQSRGGFGGGEDGGDFSDFFSSIFGNRGPGFGGPEQRRSSGRRGQDVEMELPIFLEETLSTESKKISFQVPQYNANGQHVSNTSKSLNVKIPAGVTDGERIRLKGQGAPGVGGGANGDLYLTIRFAPHPKFDVEGENLIITLPLAPWELALGTEVAVPTLTGKINLKVPAGSQNGQRMRAKGHGLLNKAGQRGYLFVQLKAVMPKQAGDDVKALWQELAKKAAFDPRENF

SEQ ID NO: 139369 - DNA, 1125 bp, Pseudomonas fluorescens Pf-5; identical to SEQ ID NO: 63863
  CDS (1)..(1125): transl_table=11

SEQ ID NO: 139370 - protein, 374 aa, Pseudomonas fluorescens Pf-5; identical to SEQ ID NO: 63864

SEQ ID NO: 139371 - DNA, 1137 bp, Colwellia psychrerythraea 34H; identical to SEQ ID NO: 63867
  CDS (1)..(1137): transl_table=11

SEQ ID NO: 139372 - protein, 378 aa, Colwellia psychrerythraea 34H; identical to SEQ ID NO: 63868

SEQ ID NO: 139373 - DNA, 1143 bp, Pseudomonas syringae pv. phaseolicola 1448A
  CDS (1)..(1143): transl_table=11
atggcaaagcgtgattattacgaagtgttgggagtggagcgaggctccagcgaggcggacctgaaaaaggcttatcgccgtctggcgatgaagcatcaccccgaccgtaaccctgatgacaaagcctcggaagagctgttcaaagaggccaacgaggcctacgaagtgctgtccgatgccagcaagcgcgctgcgtacgatcagtatggccatgctggtgtcgacccgagcatgggtggcggcggcggttttggtggtggtgccggtggtgccaacttctccgacatcttcggtgatgtgttcagtgatttctttggcggcggccgtgggggtggcggcggtggtcgcggcggtgcccagcgcggcagcgatctgcgctatacgctggagctgaatctggaagaagcggttcgcggtactaacgtgaatatccgcgttccgacactggtcaactgcaagccgtgcgatggcagcggtgccaagaaaggctcgtcgcccgttacctgccctacctgcggtggtatcggtcaggttcgcatgcagcagggtttcttctctgtgcagcaaacctgcccacgctgccatggacacggcaagattatttccgacccgtgcgattcgtgccacggcgaaggtcgtgtcgaagagtccaagacgctttccgtcaaggtgccgccaggtgtcgataccggtgaccgcattcgtctgtctggcgaaggcgaagcgggtactcagggcgggccgaccggcgacctgtatgtcgtgatcaatgtgcgcgaacacgcgatcttccagcgtgacggcaagcacctgttctgcgaagtgccgatcagctttaccgatgccgcgctgggtggcgagcttgaagtaccgacccttgatggtcgcgtcaaactgaaaatccccgaaggtacccagaccggcaagcagttccgcttgcgtggcaagggtgtcgctccggtacgtggcggcggtgctggtgacttaatgtgccatgtagcagtcgagaccccggtcaacctgagcaagcgtcagcgcgagctgcttgaagagttccgcacttcgcttgaaaacgacgagtcccactctcccaaggccagtggctggttcgagggtgtgaagcgtttcttcggcgatctgtaa

SEQ ID NO: 139374 - protein, 380 aa, Pseudomonas syringae pv. phaseolicola 1448A
MAKRDYYEVLGVERGSSEADLKKAYRRLAMKHHPDRNPDDKASEELFKEANEAYEVLSDASKRAAYDQYGHAGVDPSMGGGGGFGGGAGGANFSDIFGDVFSDFFGGGRGGGGGGRGGAQRGSDLRYTLELNLEEAVRGTNVNIRVPTLVNCKPCDGSGAKKGSSPVTCPTCGGIGQVRMQQGFFSVQQTCPRCHGHGKIISDPCDSCHGEGRVEESKTLSVKVPPGVDTGDRIRLSGEGEAGTQGGPTGDLYVVINVREHAIFQRDGKHLFCEVPISFTDAALGGELEVPTLDGRVKLKIPEGTQTGKQFRLRGKGVAPVRGGGAGDLMCHVAVETPVNLSKRQRELLEEFRTSLENDESHSPKASGWFEGVKRFFGDL

SEQ ID NO: 139375 - DNA, 960 bp, Pseudomonas syringae pv. phaseolicola 1448A
  CDS (1)..(960): transl_table=11
atgggtgatcgttacatggatttcaaagactactacaagatacttgacgttgagccgactgcggacgacaaggcgatcaagaccgcctatcgcaaactggcgcgcaagtatcaccctgacgtcagcaaggaagcaggcgctgaagacaagttcaaggaagcgtccgaagcctatgaagtgctcagcagccctgacaagcgcgccgagtacgatgagctgcgcaagtacggtcggcagggtcgtccgttccagactccgccaggctggcaaagccgggctggcgcaggcgctggaggattcgaggaaacggcagacttttcagaatttttcagctccattttcggcggccggccacagcagggcggccgtacccgcaaccccgggcgtaccgggcaggacgttgagatggagctggcagtcttccttgaggagaccttgtcgggtgagtccaagcaggtcagcttcaaggtgccgcagcacagccccaacgggcagcgcatgagcgatatcaccaagaccctgaacgtgaagattcctgcgggcgtcgtcgacggcgagcgcattcgtctcaagggccagggcgcgccaggagtgggcggaggtgccaacggcgatctgtacctgatcattcgcctggcaccgcatccgctgttcgaggtcgagggccatgatctggtcatcaccgttccactggcgccctgggaagcagtgctgggcaccaaggtggcggtaccgacgctgaacagcaggatcaacctgaccatccgcccggacagtcagaacggtcagcgtctgcggatcaagggtaacggcttgatgaacaagagcggcgagcggggcgacctttacgcccagctgaaaatcgtcgtgccaaagcacaccgacgaagcaacccgggcgctgtggcagaaactggcagacagttcctcgtttgatccccgggcgcagtggaagggttga

SEQ ID NO: 139376 - protein, 319 aa, Pseudomonas syringae pv. phaseolicola 1448A
MGDRYMDFKDYYKILDVEPTADDKAIKTAYRKLARKYHPDVSKEAGAEDKFKEASEAYEVLSSPDKRAEYDELRKYGRQGRPFQTPPGWQSRAGAGAGGFEETADFSEFFSSIFGGRPQQGGRTRNPGRTGQDVEMELAVFLEETLSGESKQVSFKVPQHSPNGQRMSDITKTLNVKIPAGVVDGERIRLKGQGAPGVGGGANGDLYLIIRLAPHPLFEVEGHDLVITVPLAPWEAVLGTKVAVPTLNSRINLTIRPDSQNGQRLRIKGNGLMNKSGERGDLYAQLKIVVPKHTDEATRALWQKLADSSSFDPRAQWKG

SEQ ID NO: 139377 - DNA, 1137 bp, Dechloromonas aromatica RCB; identical to SEQ ID NO: 117599
  CDS (1)..(1137): transl_table=11

SEQ ID NO: 139378 - protein, 378 aa, Dechloromonas aromatica RCB; identical to SEQ ID NO: 117600

SEQ ID NO: 139379 - DNA, 1140 bp, Ralstonia eutropha JMP134; identical to SEQ ID NO: 63869
  CDS (1)..(1140): transl_table=11

SEQ ID NO: 139380 - protein, 379 aa, Ralstonia eutropha JMP134; identical to SEQ ID NO: 63870

SEQ ID NO: 139381 - DNA, 1149 bp, Ehrlichia canis str. Jake; identical to SEQ ID NO: 63871
  CDS (1)..(1149): transl_table=11

SEQ ID NO: 139382 - protein, 382 aa, Ehrlichia canis str. Jake; identical to SEQ ID NO: 63872

SEQ ID NO: 139383 - DNA, 1167 bp, Methanosarcina barkeri str. Fusaro; identical to SEQ ID NO: 117607
  CDS (1)..(1167): transl_table=11

SEQ ID NO: 139384 - protein, 388 aa, Methanosarcina barkeri str. Fusaro; identical to SEQ ID NO: 117608

SEQ ID NO: 139385 - DNA, 993 bp, Dehalococcoides sp. CBDB1
  CDS (1)..(993): transl_table=11
atggctaatgaaaaaaacttatacgaaacgctgggcgtccctaaaaccgccagtgcggacgaaataaaaaaggcataccgtaagcttgcccgcaaataccaccctgacttgaatccgggggacaaggcgtctgaagaaaccttcaagaagataaatcaggcttacgaaatattgagcaaccctgaaaaccggaccaagtatgacaagtacggggagcagtggcagtatggtgagcagtatgaaaaagcccgcgccagccagcagcaaacccagggcagtccctttggcggatatgactttaactttggcagttccgaaggcggcggatttgaagatatcttaagccagatgctgggcggacgcaccggcagacgccgaagccatccccagcctggacaaagcattgaacaacccatagacatttcgctggaggaagccgccagcggtaccagccgtctgctaagtttccagatgcaaaaaccctgtgaaacctgcgggggcagcggtgcaaaagataaaaaggtctgcccaacctgtcagggtacgggtgtaaatccggggattgaaaggctggaagtcaagataccggccggtgttaatactgactccaaaatccgtctggcaggcaaaggcgggtatggacaggcgggtggacaaaggggtgacctgtaccttcgcatccatgtacgcccccatgaaaagtttgaacgcaaagacgatgaccttacggtaaatgtaccggtaaacctgactaccgccatgctgggcggggaaatatttatcccctcgctcaagggcaaactggcgcttaaaataccggctgaaacccagaacggtcgcactttccgccttaaaggacagggtatcccccatctggggaaggatggaagcggagatttgctggctaaagtcagcattgtactgcctgaaaaacttacagataccgaaagagacctttttgaaaaactgcgccagcttcggccggacagttaa

SEQ ID NO: 139386 - protein, 330 aa, Dehalococcoides sp. CBDB1
MANEKNLYETLGVPKTASADEIKKAYRKLARKYHPDLNPGDKASEETFKKINQAYEILSNPENRTKYDKYGEQWQYGEQYEKARASQQQTQGSPFGGYDFNFGSSEGGGFEDILSQMLGGRTGRRRSHPQPGQSIEQPIDISLEEAASGTSRLLSFQMQKPCETCGGSGAKDKKVCPTCQGTGVNPGIERLEVKIPAGVNTDSKIRLAGKGGYGQAGGQRGDLYLRIHVRPHEKFERKDDDLTVNVPVNLTTAMLGGEIFIPSLKGKLALKIPAETQNGRTFRLKGQGIPHLGKDGSGDLLAKVSIVLPEKLTDTERDLFEKLRQLRPDS

SEQ ID NO: 139387 - DNA, 1119 bp, Thiobacillus denitrificans ATCC 25259; identical to SEQ ID NO: 63873
  CDS (1)..(1119): transl_table=11

SEQ ID NO: 139388 - protein, 372 aa, Thiobacillus denitrificans ATCC 25259; identical to SEQ ID NO: 63874

SEQ ID NO: 139389 - DNA, 1008 bp, Anabaena variabilis ATCC 29413
  CDS (1)..(1008): transl_table=11
atggttgcagcaaccgatttcaaagattattacgaaattctgggtgtcagtaagaacgccactccggaggatatcaaaaaagcctaccggaaattggcacggaaatatcacccggacttaaatcctaaggataagcaagccgaagcgcggttcaaagaaattaacgaagctaatgaagtgctgtctgacccagaaaaacgccagaagtatgaccagtatggtcagtactggcaacaggctgcggcgggtacacctccacccagaggggcgggtacacaaggttatgattttagccagtatggcaactttaatgatttcattgatgaattgctgggagggttaggtcgcagtggcggtcgtacaaggcagcgcacagctaattatcgcactacaacaagaccagaaggattccgggaatacgccgactttggctatggagaagaccccttcggccgcttcactgaagttcccgcacaggatacggaagcagcgatcgctctcactttttctgaagcatttcacggtacacagaagcagctacaaattgatggagaaactatcactgttcgcattccgccaggagtaaaatcgggaagccgcattcgagtcaaaggcaaaggacagatgagtccttttattcagcaacgcggcgatttgtatctgacaattgaattattgccccatcctttcttcaaatttgagggcgacaatcttgcttgcgaagtacctgtcagcccagaggaagctgtacttggcgcacaaatagatgttcctacgcccgatggcaaggtaacgatgacgattccggccggtgtggattccggtcaagcactccgactacgtggcaagggctggcgcgatccaaaaggtaatcgtaccgctttgatcgtgcggttaaaaattgtgactcccaaagatttgagtccccaagaaagagagtgctatgaaaaattgcggcaggtcagtagttttaattcccgtcaaggcttaacggaggtgcggttatga

SEQ ID NO: 139390 - protein, 335 aa, Anabaena variabilis ATCC 29413
MVAATDFKDYYEILGVSKNATPEDIKKAYRKLARKYHPDLNPKDKQAEARFKEINEANEVLSDPEKRQKYDQYGQYWQQAAAGTPPPRGAGTQGYDFSQYGNFNDFIDELLGGLGRSGGRTRQRTANYRTTTRPEGFREYADFGYGEDPFGRFTEVPAQDTEAAIALTFSEAFHGTQKQLQIDGETITVRIPPGVKSGSRIRVKGKGQMSPFIQQRGDLYLTIELLPHPFFKFEGDNLACEVPVSPEEAVLGAQIDVPTPDGKVTMTIPAGVDSGQALRLRGKGWRDPKGNRTALIVRLKIVTPKDLSPQERECYEKLRQVSSFNSRQGLTEVRL

SEQ ID NO: 139391 - DNA, 1131 bp, Anabaena variabilis ATCC 29413
  CDS (1)..(1131): transl_table=11
atggcccgcgactattatgagattctaggcgttgctcgtgacgctgacaaagaagaaatcaaacaagcctaccgccgtctagcccggaaatatcaccctgatgtgaataaagaaccgggagccgaagagcgttttaaggaaattaaccgtgcttatgaagtactttctgagccggaaacccgcgcacgttacgatcgctttggcccggaaggtgtttcaggtgctggtgtcggcttccaagatatgagcgatatgggtggtttcgccgatatctttgaaagtattttcagtggttttgctggtggcggtatgggtggtccaacgcagcaaagaagacgcggtgggccagcgcggggtgatgatttacggctagacctaaagttagactttcgagaagcggtatttggtggggaaaaggaaattcgcatttcccatttagaaacctgtgaaacctgtagtggttcaggcgcaaaaccaggaacccgtccccgcacttgttcgacttgtagcggttccggtcaagtccgccgcgtcaccagaaccccctttggtagctttactcaagtctctacttgtcctacctgtaatggtacaggtatggtaattgaagacaaatgtgatgcttgtgatggtaaggggacaaatcaagttaccaaaaaactaaaaattaccattcccgcaggcgtggacaatggtacgcgcttacgcatacaacaggaaggtgatgcgggtcaacgtggtggccctccaggggatttgtatgtatatctgttcgtcaatgaagacgaagaatttcaacgggatggcattaatgtgatctcggaaattaaagttagctacttgcaagcaattttaggctgtcggctggaagtaaacacagtagatgggcctgtggagttgattattccggcgggtactcaaccgaatacggtgatgaaactagaaaatcgtggtgtacctcgcttggggaatcctgttagtcggggcgatcatctgttaacggtgttaattgatatccccactaaagtaattcctgaggagagagaattgctagagaagctggctaaaattaagggagaccgtaccggtaaaggtggtctggaaggatttttgggaaatttgtttaagtaa

SEQ ID NO: 139392 - protein, 376 aa, Anabaena variabilis ATCC 29413
MARDYYEILGVARDADKEEIKQAYRRLARKYHPDVNKEPGAEERFKEINRAYEVLSEPETRARYDRFGPEGVSGAGVGFQDMSDMGGFADIFESIFSGFAGGGMGGPTQQRRRGGPARGDDLRLDLKLDFREAVFGGEKEIRISHLETCETCSGSGAKPGTRPRTCSTCSGSGQVRRVTRTPFGSFTQVSTCPTCNGTGMVIEDKCDACDGKGTNQVTKKLKITIPAGVDNGTRLRIQQEGDAGQRGGPPGDLYVYLFVNEDEEFQRDGINVISEIKVSYLQAILGCRLEVNTVDGPVELIIPAGTQPNTVMKLENRGVPRLGNPVSRGDHLLTVLIDIPTKVIPEERELLEKLAKIKGDRTGKGGLEGFLGNLFK

SEQ ID NO: 139393 - DNA, 1002 bp, Anabaena variabilis ATCC 29413
  CDS (1)..(1002): transl_table=11
atggctgcaacagacttcaaagactattacgcgattttgggagttagtaaaactgccactccagaggaaattaaacaagcttttcgcaaattagcccgcaaatatcaccctgatgttaatccagggaataaacaggcggaagcaagcttcaaggaagttaacgaagcctacgaagttttgtcagatgccgaaaaacgccaaaaatacgatcaatttggacaatattggcgacaagtaggcgaaggcttccctgggggtggcgctggtgtcgatatgggtggagtggacttcagccaatacggcaattttgatgaatttattaatgagttgttagggcgctttggtggtgctgcgcctcgtggtgggcgacaaggttactcttatcgcacttctggtggtagaccaggaggtggttttggcggctttaatgactttggatttcaagatgtaggcacagcaggcggtggtcaagatgccgaagctaccatcagcctcacttttgctgaagcttttgctggagttcaaaagcgctttaatttaggtaacgaaactattgatgtgcgaattccggctggtactaaacccggtactcgcttacgggtcaggggtaagggtcaatttaaccccatgacacaacaaagaggcgatttatatttaaaagtagaatttcagccccactcatttttccaaattgaaggggataacttggcctgcgaaattcccattactcccgatgaagctgcgctgggagcctccattgatgtgcctacacccgatggttctgtgaacgttaaactacctgctggtgtgcgttctggtcaatcactccgtttacggggcaaaggctggcctatagccaaaggcggacggggtgatcagtttgtcaaagtggctattgttccaccaaaagatatgagccaacaagagcgagaatactatgaaaaaatccgggctatccgcagttacaatccccggagtcatttacaacaagttaagttgtga

SEQ ID NO: 139394 - protein, 333 aa, Anabaena variabilis ATCC 29413
MAATDFKDYYAILGVSKTATPEEIKQAFRKLARKYHPDVNPGNKQAEASFKEVNEAYEVLSDAEKRQKYDQFGQYWRQVGEGFPGGGAGVDMGGVDFSQYGNFDEFINELLGRFGGAAPRGGRQGYSYRTSGGRPGGGFGGFNDFGFQDVGTAGGGQDAEATISLTFAEAFAGVQKRFNLGNETIDVRIPAGTKPGTRLRVRGKGQFNPMTQQRGDLYLKVEFQPHSFFQIEGDNLACEIPITPDEAALGASIDVPTPDGSVNVKLPAGVRSGQSLRLRGKGWPIAKGGRGDQFVKVAIVPPKDMSQQEREYYEKIRAIRSYNPRSHLQQVKL

SEQ ID NO: 139395 - DNA, 1116 bp, Streptococcus agalactiae A909; identical to SEQ ID NO: 63875
  CDS (1)..(1116): transl_table=11

SEQ ID NO: 139396 - protein, 371 aa, Streptococcus agalactiae A909; identical to SEQ ID NO: 63876

SEQ ID NO: 139397 - DNA, 951 bp, Pseudomonas fluorescens PfO-1
  CDS (1)..(951): transl_table=11
atggacttcaaagactattacaagatactcggcgtggagccgacggctgacgacaaggcaatcaaggctgcctatcgcaagctggcgcgcaaataccaccccgatgtcagcaaggaaaaggacgccgaggccaagttcaaggacgcctcggaagcctacgaagcgctgaaaagcgccgacaagcgcgccgaatacgacgaactgcgtcgttatggtcagcacggccagccgtttcagggcccaccggggtggcagagccgtggcggctttggcggcggcggtggcgacaccggcgacttctcggacttcttcagttcgatcttcggcaatcgcggccccggtttcggtggcggcgctggccggcaatcccgcagcgccggacggcgagggcaagacgtggaactggaactgccgatctttctggaggagacgctttcgaacgaatcgaaaaagatcagcttccaggtcccgcaatacaacggttcgggccagcacgtcagcaacaccagcaaaagcctgaacgtgaagatcccggcgggcgtgaccgatggcgagcgcatccgcctcaagggccagggtgcaccgggcataggtggcggcgccaatggcgatctgtacctgaccatccgtttcgcgccgcacccgaaattcgacgttgaaggcgaaaacctgatcatcaccttgccgctggcaccgtgggagctggcgctgggcgccgaagtcgccgtgccgaccctgaccggcaagatcaacctcaaggtcccggccggcagccagaacggccagcgcatgcgtgccaagggccacggtctgcagaacaaggcgggcgagcgcggttatctgttcgtccagctcaaggccgtgatgccgaaagccaacggcgatgacgtcaaggcgctgtggcaggaactggcgaagaaggccgccttcaatccgcgcgagaacttctga

SEQ ID NO: 139398 - protein, 316 aa, Pseudomonas fluorescens PfO-1
MDFKDYYKILGVEPTADDKAIKAAYRKLARKYHPDVSKEKDAEAKFKDASEAYEALKSADKRAEYDELRRYGQHGQPFQGPPGWQSRGGFGGGGGDTGDFSDFFSSIFGNRGPGFGGGAGRQSRSAGRRGQDVELELPIFLEETLSNESKKISFQVPQYNGSGQHVSNTSKSLNVKIPAGVTDGERIRLKGQGAPGIGGGANGDLYLTIRFAPHPKFDVEGENLIITLPLAPWELALGAEVAVPTLTGKINLKVPAGSQNGQRMRAKGHGLQNKAGERGYLFVQLKAVMPKANGDDVKALWQELAKKAAFNPRENF

SEQ ID NO: 139399 - DNA, 1146 bp, Carboxydothermus hydrogenoformans Z-2901; identical to SEQ ID NO: 117617
  CDS (1)..(1146): transl_table=11

SEQ ID NO: 139400 - protein, 381 aa, Carboxydothermus hydrogenoformans Z-2901; identical to SEQ ID NO: 117618

SEQ ID NO: 139401 - DNA, 1137 bp, Burkholderia sp. 383
  CDS (1)..(1137): transl_table=11
atggcgaaacgggattactacgaggttctgggcgtcgcgaagaatgcgggcgacgacgaaatcaagaaggcgtatcgcaagcttgcgatgaagtatcaccctgaccgcaatccggacaacaaggatgcggaagagcatttcaaggaggtgaaggaagcctatgaaatgctgtcggacggccagaagcgggcagcgtacgaccagtacggccacgcgggcgtcgatccgaacatgggcggtgcgggcgcacagggcttcggcggtttcgcggacgcgttcggcgacatcttcggcgacatcttcggccaggcagcgggcggtgccgcgcgcggcggccgtggcggcccgcaggtgtatcgcggtgccgacctgcgctacagcatggaaatcacgctcgagcaggccgcacacggctacgacacgcagatccgcgtgccgagctgggtatcgtgcgaggtctgccacgggtcgggcgcgaagcccggcacgaagccggaaacctgcccgacctgtcacggccagggcacggtgcgcatgtcgcagggcttcttcagcatccagcagacctgcccgaagtgccacggcacgggcacctacatccccgagccgtgcgtgcattgccacgggtcgggcaaggtgaaggaaaccaagacgctcgaagtgaagatcccggccgggatcgacgacgggatgcggatccgctcggccggcaatggcgagccgggcatcaacggcgggccgccgggcgacctgtacgtcgagatccacatcaagccgcactcggtgttcgagcgcgacggcgacgatctccactgccagatgccgatcccgttcacgaccgccgcactcggcggcgagatcgaggtgccgacgctggccggccgtgcgtcgttcccggtgccggaaggcacgcagtcgggcaagacgttccgcctgcgcggcaagggcatcaaggggctgcgttcgagcatcgcgggcgatctgtacgttcacgtgcaggtcgagacgccggtgaagctgaccgacaaccagcgcgacctgctcaagcagttcgagaagtcgctggccgagggcggcgcgcgtcacagcccgcagagcaagagctggttcgaccgtgtgaagagcttcttcgagtaa

SEQ ID NO: 139402 - protein, 378 aa, Burkholderia sp. 383
MAKRDYYEVLGVAKNAGDDEIKKAYRKLAMKYHPDRNPDNKDAEEHFKEVKEAYEMLSDGQKRAAYDQYGHAGVDPNMGGAGAQGFGGFADAFGDIFGDIFGQAAGGAARGGRGGPQVYRGADLRYSMEITLEQAAHGYDTQIRVPSWVSCEVCHGSGAKPGTKPETCPTCHGQGTVRMSQGFFSIQQTCPKCHGTGTYIPEPCVHCHGSGKVKETKTLEVKIPAGIDDGMRIRSAGNGEPGINGGPPGDLYVEIHIKPHSVFERDGDDLHCQMPIPFTTAALGGEIEVPTLAGRASFPVPEGTQSGKTFRLRGKGIKGLRSSIAGDLYVHVQVETPVKLTDNQRDLLKQFEKSLAEGGARHSPQSKSWFDRVKSFFE

SEQ ID NO: 139403 - DNA, 1137 bp, Synechococcus sp. CC9605; identical to SEQ ID NO: 117619
  CDS (1)..(1137): transl_table=11

SEQ ID NO: 139404 - protein, 378 aa, Synechococcus sp. CC9605; identical to SEQ ID NO: 117620

SEQ ID NO: 139405 - DNA, 993 bp, Synechococcus sp. CC9605
  CDS (1)..(993): transl_table=11
atgggtatggcaggcagcggatacaaggattatttccaggtgctcggtgttgatcgcagcgctgatgccaatgccatcaagaaagcttttcgcagcctggcgcgccagtaccaccctgacgtcaaccccggtgatgcccaggcggaagcacggttcaaggagatcagtgaggcctacgaagtgctctctgatcccgagaaacggcgtcgttatgagcaatttggccagtactggaaccaggccggtggcatgggcgggggagccgcacccggcatggatgtcgacttcggtcgctacggcaatttcgacgatttcatcaacgacctgctgggccgtttcggtggaccaggcggcggtggcttccaggggggtggttttcctgggggtggattccccggcgggggattcgcaggaggtggtttccctcgtggtgctcaggcttcacgcgctccggtgaatctggatgccgaagcttcggtgaatgtgacgtttgcggaggcttttcgaggtggagaacgcagcctctcggtgaacaatgagcgcgttcaggtgcgcattcctgctggggtgaagaacggctcgcggctgcggttgaagggcaagggcaacctgcaaccaggaaccggacggcgcggcgatctctatctcaatctcaagattcaggatcacccgatctggcggctggagtcggatcagctgcgggccgacctgcccgtcagcctcgatgagctggcccttggaggcatggtctcggtgatgacgcccgatggtgaggcccaggtgagcattccggccggcaccgctccgggccgcagcctgcggctgaagggaaaaggttggccgtcgaaaaccggtcgtggtgatctcctgctcacaatgacgttggccatgccgtcctcatggagtgaagaggagcgtcgcttgctcgagcagttgcgtgccaagcgcacggaccatccacgtcaagagtggcttcgttcggcgtctctctga

SEQ ID NO: 139406 - protein, 330 aa, Synechococcus sp. CC9605
MGMAGSGYKDYFQVLGVDRSADANAIKKAFRSLARQYHPDVNPGDAQAEARFKEISEAYEVLSDPEKRRRYEQFGQYWNQAGGMGGGAAPGMDVDFGRYGNFDDFINDLLGRFGGPGGGGFQGGGFPGGGFPGGGFAGGGFPRGAQASRAPVNLDAEASVNVTFAEAFRGGERSLSVNNERVQVRIPAGVKNGSRLRLKGKGNLQPGTGRRGDLYLNLKIQDHPIWRLESDQLRADLPVSLDELALGGMVSVMTPDGEAQVSIPAGTAPGRSLRLKGKGWPSKTGRGDLLLTMTLAMPSSWSEEERRLLEQLRAKRTDHPRQEWLRSASL

SEQ ID NO: 139407 - DNA, 1119 bp, Geobacter metallireducens GS-15; identical to SEQ ID NO: 63877
  CDS (1)..(1119): transl_table=11

SEQ ID NO: 139408 - protein, 372 aa, Geobacter metallireducens GS-15; identical to SEQ ID NO: 63878

SEQ ID NO: 139409 - DNA, 1125 bp, Prochlorococcus marinus str. MIT 9312; identical to SEQ ID NO: 117625
  CDS (1)..(1125): transl_table=11

SEQ ID NO: 139410 - protein, 374 aa, Prochlorococcus marinus str. MIT 9312; identical to SEQ ID NO: 117626

SEQ ID NO: 139411 - DNA, 981 bp, Synechococcus elongatus PCC 7942
  CDS (1)..(981): transl_table=11
atggcagcgacggacttcaaagactactacgcaaccctcggagtggggcgtgctgccagtgccgatgagatcaaaaaagctttccgtaagctggctcgccagtaccaccccgatatgaatccgggcgacaaggttgctgaggcacgctttaaggaaatcaacgaagcttacgaggtgctctccgacaccgataagcgccgcaagtacgaccagtttggccaatattggagccgagttggtggccccacaggtggcccagggcctggggtcggcttcgaggactttgagtttggccgctatggcagctttgatgacttcatcaacgaactgctcggccgttttggcggcggcgcgacggctagcgccagtgccggttatcgcagtcctggttttcaggattttgccggcggttttggtagccaggccactgctggggctcgtgccgtcaatttggatgctgaagccagtattagtctcagcctcagcgatgcttttcgggggacgcaaaagcagctccgcatcaacagcgaaatggttgaggtcaaggtgccggctggcatcaaagcagggagtaaactgcgcctgcggggcaagggcaacatcatgcccaatacgggcaagcgcggcgatctctacctgaagattgaggttaagccccacgagtttttccagctagagggcgaccagttgagctgtgaggtgccgatcgcaccggatgaagcagccctcggtgccacgatcgcggttcccacaccggatggcttggtcaacgtcacgattccggccggagttcgcaccggacaatccctgcggctgcggggtaagggctggccaactcgcacgggccgcggggatctgctggtgaaagtggcgatcgcggtaccgaaaagcctgaccgaggcagaacgtcaggcctacgaacagttgcagcggtcgcgcagtaccgatctgcgatcggcactcatgcaatacagcctctag

SEQ ID NO: 139412 - protein, 326 aa, Synechococcus elongatus PCC 7942
MAATDFKDYYATLGVGRAASADEIKKAFRKLARQYHPDMNPGDKVAEARFKEINEAYEVLSDTDKRRKYDQFGQYWSRVGGPTGGPGPGVGFEDFEFGRYGSFDDFINELLGRFGGGATASASAGYRSPGFQDFAGGFGSQATAGARAVNLDAEASISLSLSDAFRGTQKQLRINSEMVEVKVPAGIKAGSKLRLRGKGNIMPNTGKRGDLYLKIEVKPHEFFQLEGDQLSCEVPIAPDEAALGATIAVPTPDGLVNVTIPAGVRTGQSLRLRGKGWPTRTGRGDLLVKVAIAVPKSLTEAERQAYEQLQRSRSTDLRSALMQYSL

SEQ ID NO: 139413 - DNA, 1149 bp, Moorella thermoacetica ATCC 39073; identical to SEQ ID NO: 117627
  CDS (1)..(1149): transl_table=11

SEQ ID NO: 139414 - protein, 382 aa, Moorella thermoacetica ATCC 39073; identical to SEQ ID NO: 117628

SEQ ID NO: 139415 - DNA, 1131 bp, Burkholderia thailandensis E264; identical to SEQ ID NO: 117629
  CDS (1)..(1131): transl_table=11

SEQ ID NO: 139416 - protein, 376 aa, Burkholderia thailandensis E264; identical to SEQ ID NO: 117630

SEQ ID NO: 139417 - DNA, 1134 bp, Syntrophus aciditrophicus SB; identical to SEQ ID NO: 117635
  CDS (1)..(1134): transl_table=11

SEQ ID NO: 139418 - protein, 377 aa, Syntrophus aciditrophicus SB; identical to SEQ ID NO: 117636

SEQ ID NO: 139419 - DNA, 1008 bp, Frankia sp. CcI3
  CDS (1)..(1008): transl_table=11
gtggcccaggactactaccagcttctcggtgtcggccggggcgcgagcgccgaggagatccagcaggcctaccgccgcctcgcccgccgttaccaccccgacgtcaaccgcggcccggaggcggaggagcggttcaaggagatcggtgaggcgtaccgcgtgctgtccgacccgaagacgcgggcgcgctacgaccggttcggcgcggacttccggcgcatccccgaggactacgacggacgggtgaccgccgggccggacttcggccaggccggccggggctggagccgcaccggccgggtccgggccgaaccgagcttcggcggcgccgacttcgccgatggcaccgacttcgcagacttcgccgacaggggtttcggacgcgccggccccggtggcgcgggcctcggcgggagcatcttcggtgacctgttcggtgatctgttcggggcccacggcgcgaccgggccgatccccggcgccgaccaggaagccgagctcgagctgaccgtcgaggaggcctaccggggcgggcggcgtcagatcaccctcgccggccccggcgggagcccacgcagctaccaggtcaccatcccgcggggggtggtcgaaggccagcgcgtccggctggccggccaaggcggccgcggcagcaggcacggccagcccggcgacctctacctacacgtgaagatcgcgccgcatccgtattaccggctgtccggacgagacatcaacgtcccgctgccggtcaccccctgggaggccgccctgggcgcccgggtcccggtcaccacccccggcggcgagatcaaggtgcgcgtcccggcaggatcgtccagcggccggcggctgcgcctacgcggcgccggcctacccaaccccaccggcccgcccggcgacctgcacgccgaggtgcgcgtggcggtgccgccggccctgaccgcccgggaacgcgcgctgttcgagcagctggccgccgtctcggccttcgacccgagaacgtga

SEQ ID NO: 139420 - protein, 335 aa, Frankia sp. CcI3
MAQDYYQLLGVGRGASAEEIQQAYRRLARRYHPDVNRGPEAEERFKEIGEAYRVLSDPKTRARYDRFGADFRRIPEDYDGRVTAGPDFGQAGRGWSRTGRVRAEPSFGGADFADGTDFADFADRGFGRAGPGGAGLGGSIFGDLFGDLFGAHGATGPIPGADQEAELELTVEEAYRGGRRQITLAGPGGSPRSYQVTIPRGVVEGQRVRLAGQGGRGSRHGQPGDLYLHVKIAPHPYYRLSGRDINVPLPVTPWEAALGARVPVTTPGGEIKVRVPAGSSSGRRLRLRGAGLPNPTGPPGDLHAEVRVAVPPALTARERALFEQLAAVSAFDPRT

SEQ ID NO: 139421 - DNA, 1191 bp, Frankia sp. CcI3
  CDS (1)..(1191): transl_table=11
gtgagtgttcgcgacatggtcgagaaggactattacgccgctctcggcgttccaaaggacgcctcggcgaccgacatcaagaaggcgtaccgcgggctggcccgtgagctgcaccccgacaagaacccgggggacgccaaggccgaggcgcgcttcaaggaggtctccgaggcctacgacgttctctcggacgagggccgtcgacgggagtacgacgaggcccgcgcgctgttcgcggccggcggtcgtcccggcggcggcttcggcgggcctggccgagccgggggttacggcgggttcggcgcgcccggcacgggctacggcagcgggccgaacctcaacctcgacgaccttctcgggggggcgaacggcggcctcggcggcatcttcgacaacctgttccagcggtcgtcacccggacgcggtccgcgtcggggtgccgacatcgaggccgaggtcacgatccccttcgagaagtcgctgaccggcctggaggcgtcggtccggcttcccggggccgcgacctgtaccacctgcaccggcagcggggcgcgtcccggcacgacgccgcgcacctgcccgacctgccgtgggctaggtgtggtctcccgctcccagggtggcttcgcgctctccgagccctgccgcgactgcctgggcaagggcaccctgatcgaccatccctgcccggactgccggggcaccggccggcgtgagcgtgagcagcgcatccgcatcccagccggggtgagcgacggacagcggctgcgggtccgggggcgtggtatacccggcgaacggggcggaccggccggcgacctcgaggtgacggtgcacgtgctgcgccatccggtgttcgagcgggaggggagcaacctggcgattactctccccgtgacgatcaccgaggccgcgctcggcgcatcgatacgggtgccgaccctggacggtgctccgctcacgatgaaggtgccggcggggacctccagcggtcgacgcctgcgggcccgcgggcggggtgtccccacagccggaggcgggaacggggacctcatcgtcaccctcgaggtgacggtaccgaagccgagtgatctctcgccacgggcacgtacggcgttgctggagttcgcccaggcccatcccgaggacccacgggcgccgttgatggaacggatggaggcaggcggatga

SEQ ID NO: 139422 - protein, 396 aa, Frankia sp. CcI3
MSVRDMVEKDYYAALGVPKDASATDIKKAYRGLARELHPDKNPGDAKAEARFKEVSEAYDVLSDEGRRREYDEARALFAAGGRPGGGFGGPGRAGGYGGFGAPGTGYGSGPNLNLDDLLGGANGGLGGIFDNLFQRSSPGRGPRRGADIEAEVTIPFEKSLTGLEASVRLPGAATCTTCTGSGARPGTTPRTCPTCRGLGVVSRSQGGFALSEPCRDCLGKGTLIDHPCPDCRGTGRREREQRIRIPAGVSDGQRLRVRGRGIPGERGGPAGDLEVTVHVLRHPVFEREGSNLAITLPVTITEAALGASIRVPTLDGAPLTMKVPAGTSSGRRLRARGRGVPTAGGGNGDLIVTLEVTVPKPSDLSPRARTALLEFAQAHPEDPRAPLMERMEAGG

SEQ ID NO: 139423 - DNA, 1137 bp, Novosphingobium aromaticivorans DSM 12444
  CDS (1)..(1137): transl_table=11
atgtcggccgagatcgatttctacgaactgctcgaagtggagcgcaccgcggacgacaaggtgctgaagtccgcttatcgcaagctggcgatgaagtaccacccggacaagaatcccgggtgcgcggattccgaagccaggttcaagcagatcaacgaggcctatgcctgcctctccgacccgcagaagcgggcggcctacgatcgctatggccacgccgcgttccagcagggcgccggtggaggagccgggggcggtggcttcggcgggggcgacttcggcgacatcggcgacattttcgagacgatcttcggtggcgccttcggcggcggcggccggcagcagccgcgccgtggggccgacctgcgctacgacatggaaatcagcctggaagacgccttccacggcaaggatgccgaaatcgaggtcgaggtttcgcagaagtgcgatccctgtggtggatcgggcgcgacgcccggcacgtccgcgcggcgctgcaacctttgtggcggccacggcaaggtccgtgcccagcagggcttcttcatggtcgagcggccgtgtcccaattgccacgggcgcggcgaagtgatcgaaaagccttgcaagcattgccgtggcgagggccgggtcgatgccgagcagcgattgcaggtcacgatcccggccggggtggacaatggcacccgcatccgccttgccggaaagggcgaggcggggccgttcggtgcgcctccgggcgacctctacatcttcctccacatccagcggcaccgggtgttcgagcgcgaaggcacgacgctgctgacccgttgcccgatcagcttcaccactgcggcgcttggcggcgagatcgagattccgggcctcgacggcaaggtccacgccatcgagattcccgccggcatccagtccggcaagcagttgcgcaagcgtggcgcgggcatgcccgtgcttcagggacgcggaattggcgatctcgtggtggagatccacgtcgagacgccgaccaagctgtccgcgcgccagaaggaactgctgcgcgagttccaggcgaccgagaccggcgaggaatgcccccagtcgaagggcttcttcgaacggatcaaggacgcctggaccgaccttaccgagtaa

SEQ ID NO: 139424 - protein, 378 aa, Novosphingobium aromaticivorans DSM 12444
MSAEIDFYELLEVERTADDKVLKSAYRKLAMKYHPDKNPGCADSEARFKQINEAYACLSDPQKRAAYDRYGHAAFQQGAGGGAGGGGFGGGDFGDIGDIFETIFGGAFGGGGRQQPRRGADLRYDMEISLEDAFHGKDAEIEVEVSQKCDPCGGSGATPGTSARRCNLCGGHGKVRAQQGFFMVERPCPNCHGRGEVIEKPCKHCRGEGRVDAEQRLQVTIPAGVDNGTRIRLAGKGEAGPFGAPPGDLYIFLHIQRHRVFEREGTTLLTRCPISFTTAALGGEIEIPGLDGKVHAIEIPAGIQSGKQLRKRGAGMPVLQGRGIGDLVVEIHVETPTKLSARQKELLREFQATETGEECPQSKGFFERIKDAWTDLTE

SEQ ID NO: 139425 - DNA, 1149 bp, Anaplasma phagocytophilum HZ; identical to SEQ ID NO: 63879
  CDS (1)..(1149): transl_table=11

SEQ ID NO: 139426 - protein, 382 aa, Anaplasma phagocytophilum HZ; identical to SEQ ID NO: 63880

SEQ ID NO: 139427 - DNA, 1140 bp, Neorickettsia sennetsu str. Miyayama
  CDS (1)..(1140): transl_table=11
atgccaggaaagaaaaaagattactacgaaatactcggcgtgagtagaagtgcctccaccgaagaaataaggaaggcttataagaagcttgcacttcaataccacccagatcgtaataagggtgataaggaggcagcggaaaaatttaaagaaattggtgaagcatacagtgtcttaagtaatcctgaaaaaaaggcatcctatgaccaatatggacactcggcattcaacggaggcggttttggaggtgcaggtggtttctctgcagacttctctggtatggacttctcagatattttcaacgatcttttcggagggggaaggacgcgcagaacaaaagctgacttcaatgaagtcatcaaggaagacggctcagatttgcgatatgatgtatcaatcactctaagagaagcatttgaaggtaaggaagtaaaaatttcctatacaaaactagcagaatgtgagcagtgtggtaatacaggatgtgagggaaaaatcaagccggtgcaatgcagtacgtgtaatggtgcgggatcaatcaggtcacaacagggcttttttactgtagaaagaagctgcagtacctgcaacgggagtggaatgatcattgaaaatccatgcaaaaaatgtggaggcacaggacgaatcaggaaaggtgtaaccacttgtgcaaaaataccacgcggaataagtgacggtgcaaaagtattacttagaggtcaaggggaagcgggctctagaggaggtaagccgggtgacttatatatgattgtccatattaaacaggacgaatttttcacacgtaaaaacaatgatctttattgcgaagtcccaataaggatgtctttggcagccctgggtggagaaatagaagttccatcattagaaggtaaaaagttcaagatcaaactcccagaagggtctcaaacaggtgataaacttaaactcaaaggaaaaggtatgtatctccttaactctgagtataggggcgatatgtatgttcgactcactatagagacaccggtaaaacttacgaaaaaacagagagaaatattagaagaatttgagaaagaatcgcttgggtgcagcccaaaatctgagaaattttttagcaaaattcgctctatgtttggtctctaa

SEQ ID NO: 139428 - protein, 379 aa, Neorickettsia sennetsu str. Miyayama
MPGKKKDYYEILGVSRSASTEEIRKAYKKLALQYHPDRNKGDKEAAEKFKEIGEAYSVLSNPEKKASYDQYGHSAFNGGGFGGAGGFSADFSGMDFSDIFNDLFGGGRTRRTKADFNEVIKEDGSDLRYDVSITLREAFEGKEVKISYTKLAECEQCGNTGCEGKIKPVQCSTCNGAGSIRSQQGFFTVERSCSTCNGSGMIIENPCKKCGGTGRIRKGVTTCAKIPRGISDGAKVLLRGQGEAGSRGGKPGDLYMIVHIKQDEFFTRKNNDLYCEVPIRMSLAALGGEIEVPSLEGKKFKIKLPEGSQTGDKLKLKGKGMYLLNSEYRGDMYVRLTIETPVKLTKKQREILEEFEKESLGCSPKSEKFFSKIRSMFGL

SEQ ID NO: 139429 - DNA, 1143 bp, Ehrlichia chaffeensis str. Arkansas; identical to SEQ ID NO: 117641
  CDS (1)..(1143): transl_table=11

SEQ ID NO: 139430 - protein, 380 aa, Ehrlichia chaffeensis str. Arkansas; identical to SEQ ID NO: 117642

SEQ ID NO: 139431 - DNA, 924 bp, Desulfitobacterium hafniense Y51
  CDS (1)..(924): transl_table=11
ttgcaatataaggattattatcaaattctcggtgtagataaaaaggcgacccttgaggaaatcaaaaaggcctatcgaggcctgaccaaaaaatatcacccggacattaatccgggcaacaaggaagctgaggaaaagtataaggagatcaatgaagcctacgaagttctgggggatcctgaaaaacgggagaaatacgacaactttggcaatgaattcaactaccataacggctataattttgacccctcccaatttgggttcgggaatggccagtttgaatttaagactgccggagcaggtgattacagcgatttcttcaacctcttttttggcgaaggcggtttggacggcttctttggtcaaaaaggtccccgcacccggggagcacgttcccaatttgcctatcccggggaggatattgagtcggagctgcacatcacattggaagaaggctttcatggcgcggaaaaacagctctctctaagaggcaggaatggacagaaaagtctctctgtgaaaattcccaaggggattaacgaaggagaaaagatccggcttaaaggacaaggtgagcaagggattaacggcggagaaaacggggatttatatctcactattcgcttacatccccatagaaactatattcaggaaggaattaatcttaccaccacagtggatgtgctcccttgggatgctgctttaggatcggaagtaaccgtgaaaaccctggattccaccatcaaagtcagaatacccccaggaatacagacggatagtaagattcgcatcgctggcaaaggatatatcgatcgtaaggggacccggggagacctctatatcaaagtacgaatcatcaacccgacctcgatcagcccggaaatgaagagcttgtatgaaaagctaaaggatttgtcaaagtag

SEQ ID NO: 139432 - protein, 307 aa, Desulfitobacterium hafniense Y51
MQYKDYYQILGVDKKATLEEIKKAYRGLTKKYHPDINPGNKEAEEKYKEINEAYEVLGDPEKREKYDNFGNEFNYHNGYNFDPSQFGFGNGQFEFKTAGAGDYSDFFNLFFGEGGLDGFFGQKGPRTRGARSQFAYPGEDIESELHITLEEGFHGAEKQLSLRGRNGQKSLSVKIPKGINEGEKIRLKGQGEQGINGGENGDLYLTIRLHPHRNYIQEGINLTTTVDVLPWDAALGSEVTVKTLDSTIKVRIPPGIQTDSKIRIAGKGYIDRKGTRGDLYIKVRIINPTSISPEMKSLYEKLKDLSK

SEQ ID NO: 139433 - DNA, 1134 bp, Desulfitobacterium hafniense Y51; identical to SEQ ID NO: 63881
  CDS (1)..(1134): transl_table=11

SEQ ID NO: 139434 - protein, 377 aa, Desulfitobacterium hafniense Y51; identical to SEQ ID NO: 63882

SEQ ID NO: 139435 - DNA, 1125 bp, Saccharophagus degradans 2-40; identical to SEQ ID NO: 117645
  CDS (1)..(1125): transl_table=11

SEQ ID NO: 139436 - protein, 374 aa, Saccharophagus degradans 2-40; identical to SEQ ID NO: 117646

SEQ ID NO: 139437 - DNA, 1122 bp, Methylobacillus flagellatus KT; identical to SEQ ID NO: 63883
  CDS (1)..(1122): transl_table=11

SEQ ID NO: 139438 - protein, 373 aa, Methylobacillus flagellatus KT; identical to SEQ ID NO: 63884

SEQ ID NO: 139439 - DNA, 1143 bp, Burkholderia xenovorans LB400; identical to SEQ ID NO: 117647
  CDS (1)..(1143): transl_table=11

SEQ ID NO: 139440 - protein, 380 aa, Burkholderia xenovorans LB400; identical to SEQ ID NO: 117648

SEQ ID NO: 139441 - DNA, 1140 bp, Ralstonia metallidurans CH34; identical to SEQ ID NO: 117651
  CDS (1)..(1140): transl_table=11

SEQ ID NO: 139442 - protein, 379 aa, Ralstonia metallidurans CH34; identical to SEQ ID NO: 117652

SEQ ID NO: 139443 - DNA, 1206 bp, Acidobacteria bacterium Ellin345; identical to SEQ ID NO: 117653
  CDS (1)..(1206): transl_table=11

SEQ ID NO: 139444 - protein, 401 aa, Acidobacteria bacterium Ellin345; identical to SEQ ID NO: 117654

SEQ ID NO: 139445 - DNA, 1137 bp, Acidobacteria bacterium Ellin345; identical to SEQ ID NO: 117655
  CDS (1)..(1137): transl_table=11

SEQ ID NO: 139446 - protein, 378 aa, Acidobacteria bacterium Ellin345; identical to SEQ ID NO: 117656

SEQ ID NO: 139447 - DNA, 1158 bp, Silicibacter sp. TM1040; identical to SEQ ID NO: 117657
  CDS (1)..(1158): transl_table=11

SEQ ID NO: 139448 - protein, 385 aa, Silicibacter sp. TM1040; identical to SEQ ID NO: 117658

SEQ ID NO: 139449 - DNA, 1128 bp, Myxococcus xanthus DK 1622
  CDS (1)..(1128): transl_table=11
atgtcagcggcggcgggtcagaaacgcgactactacgaggtcctgggcgtccagaaatctgtctccgcgcaggagctcaagagcgcgttccgcaaggtggcgctgcagtaccacccggatcgcaatccggggaactcggacgccgaggagaagttcaaggaggcctcggaagcctatgaggtgctgagcgaccctgaacggcgggcgaagtacgaccgcttcgggcacgcgggcaaccccttcgacggcttcggtggcgccgggggcgggttccagggcgtcaacatcaacgacatcttcggcgagattttcggcgacatcttcggcggtggccggggagggcggcggacgagctcgcgtggcgcggacctgcgctacaacctggaaatcaccttcgaggaagcggccttcggctgccggcccaaggtgaccattccccggccgaagaagtgcgacacctgctccggctccggcagcaagagcaacaccgggccccggccctgctcggcgtgcggcggcagcggcgagctgcgctacacccagggcttcttcgcggtgtcccggccctgtggtgactgcggcggcacgggcgcggtggtgccggacccgtgcacgcgttgcaagggctcgggcaaggtgccctccgaggaggtcatcgaggtggccatcccgggcggcgtggacaacggcacgcgcgtgcggctgtccggcatgggcgagcctggagaccggggcggtccgccgggtgacctctacgtcaccgtcatcgtgaaggagcacccgctcttccagcgcgaggagtacgaggtcttctgcgaggtgcccatctccttcacgcaggcggcgctgggcgcgaaaatcgacgtccccacgctggacggcaaggtgaagatgaccgtccccaacggcacccagtccggcaaggtgttccggctcaagggcaagggcatcccccacctgcacagccagcagcggggagaccagcacgtgcgcgtcgtggtggagacgcccaccgagctgtcgtcgaagcagcgcgagctgctggagaagttcgcggaggcctccggcgaggagtcgcacccgcagtcgaagagcttcatcgccaaggtgaaggagctgttcggctga

SEQ ID NO: 139450 - protein, 375 aa, Myxococcus xanthus DK 1622
MSAAAGQKRDYYEVLGVQKSVSAQELKSAFRKVALQYHPDRNPGNSDAEEKFKEASEAYEVLSDPERRAKYDRFGHAGNPFDGFGGAGGGFQGVNINDIFGEIFGDIFGGGRGGRRTSSRGADLRYNLEITFEEAAFGCRPKVTIPRPKKCDTCSGSGSKSNTGPRPCSACGGSGELRYTQGFFAVSRPCGDCGGTGAVVPDPCTRCKGSGKVPSEEVIEVAIPGGVDNGTRVRLSGMGEPGDRGGPPGDLYVTVIVKEHPLFQREEYEVFCEVPISFTQAALGAKIDVPTLDGKVKMTVPNGTQSGKVFRLKGKGIPHLHSQQRGDQHVRVVVETPTELSSKQRELLEKFAEASGEESHPQSKSFIAKVKELFG

SEQ ID NO: 139451 - DNA, 1179 bp, Mycobacterium sp. MCS; identical to SEQ ID NO: 117659
  CDS (1)..(1179): transl_table=11

SEQ ID NO: 139452 - protein, 392 aa, Mycobacterium sp. MCS; identical to SEQ ID NO: 117660

SEQ ID NO: 139453 - DNA, 1122 bp, Rubrobacter xylanophilus DSM 9941
  CDS (1)..(1122): transl_table=11
atgcagacgaaggatctctacaaggttctcggcgtagaccggggggcgtcgcaggaggagatccggcgcgcctaccggaagctggcgcgccggtaccatccggacgcgaaccctggggacaaggaggccgaggagcgcttcaaggagatccagcacgcctacgagatcctctccgacccccagaagcggcgcgagtacgacgaggggccccgcaccttcttcgagggcgcccgccagggcaccggggggttccggcccggcggcttctcggacctctcggatctcttcgagggcttcggcgggctgggcgatatcttcggtcgcgccgggcggcggggcgatgccgggcctcgccgcggcgaggacgttaccgtgagcgtgaacttgaggtttaaggacgcgctggagggggtcaccacccgcgtgagcgttccggtggaggcggtgtgcgaggcctgccggggcacgggcgcggcgccggggacggtaccgcgccggtgtccgcggtgcgacggccggggcatgaggagccgggaccaggggctgttcgccttctcggagccgtgttcggcgtgcggcgggcgcgggaccgtcatagacagcccgtgttcggcgtgcggcggcgggggacgggtgcggatgaaccgccgggttaccgtcagggtgccgcccggcgcccgggacggcatgaagataagggtgccgggccggggcagcgcgggccgggacggcggtccgccgggcgacctgtacgtggtgacccgggtggaggagcacccggtcttcaagcggcgcggggacgacttcgtggtcgaggtgccggtgagctttgtggaggccgcgctgggcgcggagatcgaggtgccgcgccccgagggggggaggctccgcctgcggcttccggccggcacgcaggagggccggcagttcagggtgcggggcgcgggggcgcccaaggcccggagccgcagcggggagaggggagacctgatcgtaagggcgcacgtggtggtgccccagaagctccggcggcgggaacgtgagatacttgaggcgttcgccgaggagcgcggcgaggacgttcgtgaggagctgttcaagagggcgggctcgtggacgtga

SEQ ID NO: 139454 - protein, 373 aa, Rubrobacter xylanophilus DSM 9941
MQTKDLYKVLGVDRGASQEEIRRAYRKLARRYHPDANPGDKEAEERFKEIQHAYEILSDPQKRREYDEGPRTFFEGARQGTGGFRPGGFSDLSDLFEGFGGLGDIFGRAGRRGDAGPRRGEDVTVSVNLRFKDALEGVTTRVSVPVEAVCEACRGTGAAPGTVPRRCPRCDGRGMRSRDQGLFAFSEPCSACGGRGTVIDSPCSACGGGGRVRMNRRVTVRVPPGARDGMKIRVPGRGSAGRDGGPPGDLYVVTRVEEHPVFKRRGDDFVVEVPVSFVEAALGAEIEVPRPEGGRLRLRLPAGTQEGRQFRVRGAGAPKARSRSGERGDLIVRAHVVVPQKLRRREREILEAFAEERGEDVREELFKRAGSWT

SEQ ID NO: 139455 - DNA, 1128 bp, Rubrobacter xylanophilus DSM 9941
  CDS (1)..(1128): transl_table=11
atgcctgccggaaagcgcgactactacgaggttctgggcttgtcccgggacgcctcggagcaggacataaagcgggcctaccgccggctggcccggaagtaccaccccgacgcaaaccccaacgatcccgaggccgaggagcgcttcaaggagctgaacgaggcctacgaggtgctctccaaccccgaggcccggcgcgcctacgatacctacggacaccaggtgccgagcggcgcgtcggggcgtcccggcggcgacccgttcggcggcttccaggacatcttcgaggccttcttcggcgaccgcttcggggacccgttcttcgacctcgggcgccgcaggcagccctcgcgcgggggcgacaccgaggccgaggtcgagatcagcctggaggaggccgccttcggcactgaacgtgaggttcaggtgcagaccatacggaactgcccggcgtgcgacggggctggcgggacggagaccaggctgtgcggggcctgtggcgggagcggcgttgtacggacggtaagggagacgctgctcgggcaggtgatgcaccagcagacgtgctcggcctgcgggggcagcggccgggtggtggtcgaccgctgccgggagtgccgggggagcggccgggtctccgaggtggtgggccgcaggatcaggataccggccggcatagaggacgggatgcggctgcgcgtgcccggctgggggcacgccggggagcccggtgcctcctccggggacctgtacgtgaagataagggtgaaggagcacccggagctgatgcgggatggggaggatctcatccaccgggcgagcgtgacgttcgtgcaggcggctctggggacggaggtggaggttcccacgctggaggggacggagacggtcaggatagagccggggacgcagcccggcacgacgctcgtgctccggggcgaggggatgcccaggatgcggggcgtgggccgcggggatctcaaggtggtcgtcgacgtgatggttccgacgcggctcacgggcgagcagcggaagcttctggagaggttcgaggcggccagcggggaggagacctacaacggccgttccgggtccttcttcgaccgcctcaggggtgtcttcaggtag

SEQ ID NO: 139456 - protein, 375 aa, Rubrobacter xylanophilus DSM 9941
MPAGKRDYYEVLGLSRDASEQDIKRAYRRLARKYHPDANPNDPEAEERFKELNEAYEVLSNPEARRAYDTYGHQVPSGASGRPGGDPFGGFQDIFEAFFGDRFGDPFFDLGRRRQPSRGGDTEAEVEISLEEAAFGTEREVQVQTIRNCPACDGAGGTETRLCGACGGSGVVRTVRETLLGQVMHQQTCSACGGSGRVVVDRCRECRGSGRVSEVVGRRIRIPAGIEDGMRLRVPGWGHAGEPGASSGDLYVKIRVKEHPELMRDGEDLIHRASVTFVQAALGTEVEVPTLEGTETVRIEPGTQPGTTLVLRGEGMPRMRGVGRGDLKVVVDVMVPTRLTGEQRKLLERFEAASGEETYNGRSGSFFDRLRGVFR

SEQ ID NO: 139457 - DNA, 1125 bp, Mesorhizobium sp. BNC1; identical to SEQ ID NO: 117663
  CDS (1)..(1125): transl_table=11

SEQ ID NO: 139458 - protein, 374 aa, Mesorhizobium sp. BNC1; identical to SEQ ID NO: 117664

SEQ ID NO: 139459 - DNA, 1140 bp, Cytophaga hutchinsonii ATCC 33406; identical to SEQ ID NO: 63885
  CDS (1)..(1140): transl_table=11

SEQ ID NO: 139460 - protein, 379 aa, Cytophaga hutchinsonii ATCC 33406; identical to SEQ ID NO: 63886

SEQ ID NO: 139461 - DNA, 1149 bp, Rhodococcus sp. RHA1; identical to SEQ ID NO: 117667
  CDS (1)..(1149): transl_table=11

SEQ ID NO: 139462 - protein, 382 aa, Rhodococcus sp. RHA1; identical to SEQ ID NO: 117668

SEQ ID NO: 139463 - DNA, 1185 bp, Rhodococcus sp. RHA1; identical to SEQ ID NO: 63887
  CDS (1)..(1185): transl_table=11

SEQ ID NO: 139464 - protein, 394 aa, Rhodococcus sp. RHA1; identical to SEQ ID NO: 63888

SEQ ID NO: 139465 - DNA, 927 bp, Rhodococcus sp. RHA1
  CDS (1)..(927): transl_table=11
atggcgcgtgactactacgaagcgctcggggtcccgcggggcgccgccgccgacgaaatccagcaggcctaccgcaagctggcccgcaagtaccaccccgatgtgaacaaggaccccactgcggaggacaagttcaaggaggccaacgaggcctaccaggtgttgtccgacccggacacccggaaacgctacgaccgattcggtgccgacttccggcgtgtgcccgaggactacgacgaacgggtccgggcaagcgccggtggatacggcggcggcgggtacggcggtgggggcgggggcagaagggtgcacttcggtcacggtgtcggtggcgaaggcggcgtcgacttcgaggacctcttcgggcagatgttcggcggcggtggcgggtacgggccgattcccggcgccgatcaggaagcggaactggaactgaccctggaagaggcgtatcggggcggcaaacgcactctcagactggacggacggcagtacgacgtcgacattccggccggtgtcctggacggccagcgaatccggctggccgggcaaggcggccggggcaacggtgacgcgccgcccggggatctgtacctcgtggtgcggatcaagccgcattcccggttccgggtacagggccgggacatctacgtcgacctgcccgtatcgccatgggaggcggtcctcgggtcgaccgtcgtcgttcccaccccgggtggcgaggcgaaagtcaaagtggctccgggctcgtcgacgggaaggaagctgcgcctgcgcggagaaggaatgcccaattcgcgtggcgccaacggcaacctctacgccgaaatcaaggtgatggtgccgtcgaaaccgacagcacgcgaacgcgagctgttcgagcagttggccgccgaatcgaacttcgatccgaggaaagagacatga

SEQ ID NO: 139466 - protein, 308 aa, Rhodococcus sp. RHA1
MARDYYEALGVPRGAAADEIQQAYRKLARKYHPDVNKDPTAEDKFKEANEAYQVLSDPDTRKRYDRFGADFRRVPEDYDERVRASAGGYGGGGYGGGGGGRRVHFGHGVGGEGGVDFEDLFGQMFGGGGGYGPIPGADQEAELELTLEEAYRGGKRTLRLDGRQYDVDIPAGVLDGQRIRLAGQGGRGNGDAPPGDLYLVVRIKPHSRFRVQGRDIYVDLPVSPWEAVLGSTVVVPTPGGEAKVKVAPGSSTGRKLRLRGEGMPNSRGANGNLYAEIKVMVPSKPTARERELFEQLAAESNFDPRKET

SEQ ID NO: 139467 - DNA, 1188 bp, Rhodococcus sp. RHA1
  CDS (1)..(1188): transl_table=11
gtgacgcagcaggagtggatcgaacgcgacttctacgccgacctgggtgtgccgtcgacggcgtcggcggaggacatcaaacgggcctaccgcaagctggcccggcaactgcacccggacgccaacccgcacgaccaggcggccggggaacgattcaaggcggtcagcgaggcgcacgcggcgctctcggacccggccacccgcgccgagtacgaccggacccggcagctgtaccggtccggggcgttccggcgggccggcacccgctccggcgccggcggcggcgggccggccggcggaatgggcgggttcgacctctccgacctgttcggcggcgggagttcctcattcacctccggcgaggccgggttcggtgacgtgttcggggatctgttccgccgcagcggcacccgcacaaccgcgtcccgcccgcggcggggcagcgacgtcgaggcgcagacccggctcccgttccggcaggccgtcaccggggtggtgttgccgctgcaggtcagcgggcccacggtgtgcaccagctgtcacggtagcggcgcccggcccggaacccagccgcggcggtgcccctcgtgcggcggcgccggaaccctcacccgcaatcagggcggcttcgggttcagcgaatcctgcgacgactgccgcggcaccggggtgatcgtcgactccccctgcacggactgccagggcaccggggtcgggcaccgcacccgcaccatcaacgtccgcatcccaccgggagtgaccgacggccaacgcatccggctgcccgcgcacggcgagcccgggctgcgcggcgccccgtcgggggacctgtacgtcaccgtcggggtggacccggatccggtcttcggccgcgacggcgacgatctcacggtcaccgtgccggtcggcttcgccgaactcgcgctcggcaccacgatctcggtgcccaccctcgacggtcgggtcagcgtgaagatccccgccggcaccccgtccggtcggaccttccggttacaaggtcgcggcgttcccctccgcggccgggcgccgggcgatctgcgggtgaccgtgcaggtggcggtgcccgccgggctcaaccagagggctatcgatgccctgcgcgcctacgagaaggccgagaaggccgccggattcgacccccgcaccacctggcccggccgccggtag

SEQ ID NO: 139468 - protein, 395 aa, Rhodococcus sp. RHA1
MTQQEWIERDFYADLGVPSTASAEDIKRAYRKLARQLHPDANPHDQAAGERFKAVSEAHAALSDPATRAEYDRTRQLYRSGAFRRAGTRSGAGGGGPAGGMGGFDLSDLFGGGSSSFTSGEAGFGDVFGDLFRRSGTRTTASRPRRGSDVEAQTRLPFRQAVTGVVLPLQVSGPTVCTSCHGSGARPGTQPRRCPSCGGAGTLTRNQGGFGFSESCDDCRGTGVIVDSPCTDCQGTGVGHRTRTINVRIPPGVTDGQRIRLPAHGEPGLRGAPSGDLYVTVGVDPDPVFGRDGDDLTVTVPVGFAELALGTTISVPTLDGRVSVKIPAGTPSGRTFRLQGRGVPLRGRAPGDLRVTVQVAVPAGLNQRAIDALRAYEKAEKAAGFDPRTTWPGRR

SEQ ID NO: 139469 - DNA, 1122 bp, Haemophilus somnus 129PT; identical to SEQ ID NO: 117671
  CDS (1)..(1122): transl_table=11

SEQ ID NO: 139470 - protein, 373 aa, Haemophilus somnus 129PT; identical to SEQ ID NO: 117672

SEQ ID NO: 139471 - DNA, 1125 bp, Trichodesmium erythraeum IMS101; identical to SEQ ID NO: 63889
  CDS (1)..(1125): transl_table=11

SEQ ID NO: 139472 - protein, 374 aa, Trichodesmium erythraeum IMS101; identical to SEQ ID NO: 63890

SEQ ID NO: 139473 - DNA, 1134 bp, Shewanella sp. MR-4
  CDS (1)..(1134): transl_table=11
atgtcaaagcgagattattacgaagtattaggcgttggtcgtgacgccagcgaacgtgaaattaaaaaagcctacaagcgtttggcgatgaagtttcaccccgatcgcaatcctggcgacaaagctgccgaggcgagcttcaaagaagtgaaagaagcctacgaaatcctgaccgatgccaacaaaaaagcggcctatgaccaatttggtcatgcgggtgtggatccgaatcgcggcggcggtggtggctacggtggtgcgggagatttcggcgatattttcggtgatgtctttggcgatattttcggcggtggacgtcgtggcggtcaacgccaagcggcccgcggctcagatttacgttacaacctagagttatcactggaagaagccgtaaaaggcctcaccaaagaactgcgtattccgaccttagccagctgtgatgtatgtgacggcagcggtgcgaaaaaaggcacctcggcgaccacttgtggtacctgtcatggtcaaggccaagtgcaaatgcgccaaggtttcttcaccgtgcaacaagcctgcccaacctgtcatggccgcggcaagatcattaaagatccttgcactaagtgccatggcgatggccgtgtcgagaagaccaaaacattgtcagttaagatccctgcgggtgtcgacactggcgaccgtatccgcttagcgggtgaaggtgaagcgggcgaatttggtgcgccaccgggcgatttatacgttcaggtcacagtacgtgaacatgctattttcgtgcgtgatggcaacaacctctactgcgaagtgccgatttcattcagcaaagcggcgctcggcggcgagattgaagtcccaacactggacggcaaagtcagcctgaagatcccagctgaaacgcaaacgggccgcatgttccgtctgcgtggcaaaggggtgaaatcggttcgcagccatgccgttggcgacctgctctgcaaagtcgtgatggaaacgccagtcaacctcaatgagcgtcagaaagaattactgcgtgagtttgaggcgaccttaaccggtgaatcaaagaagcacagcccaaaggctgaaggctttttcgatggagtgaagaagtttttccaagacctaaatagctaa

SEQ ID NO: 139474 - protein, 377 aa, Shewanella sp. MR-4
MSKRDYYEVLGVGRDASEREIKKAYKRLAMKFHPDRNPGDKAAEASFKEVKEAYEILTDANKKAAYDQFGHAGVDPNRGGGGGYGGAGDFGDIFGDVFGDIFGGGRRGGQRQAARGSDLRYNLELSLEEAVKGLTKELRIPTLASCDVCDGSGAKKGTSATTCGTCHGQGQVQMRQGFFTVQQACPTCHGRGKIIKDPCTKCHGDGRVEKTKTLSVKIPAGVDTGDRIRLAGEGEAGEFGAPPGDLYVQVTVREHAIFVRDGNNLYCEVPISFSKAALGGEIEVPTLDGKVSLKIPAETQTGRMFRLRGKGVKSVRSHAVGDLLCKVVMETPVNLNERQKELLREFEATLTGESKKHSPKAEGFFDGVKKFFQDLNS

SEQ ID NO: 139475 - DNA, 1152 bp, Alkalilimnicola ehrlichei MLHE-1; identical to SEQ ID NO: 117675
  CDS (1)..(1152): transl_table=11

SEQ ID NO: 139476 - protein, 383 aa, Alkalilimnicola ehrlichei MLHE-1; identical to SEQ ID NO: 117676

SEQ ID NO: 139477 - DNA, 1161 bp, Hyphomonas neptunium ATCC 15444; identical to SEQ ID NO: 117677
  CDS (1)..(1161): transl_table=11

SEQ ID NO: 139478 - protein, 386 aa, Hyphomonas neptunium ATCC 15444; identical to SEQ ID NO: 117678

SEQ ID NO: 139479 - DNA, 1128 bp, Rhizobium leguminosarum bv. viciae 3841; identical to SEQ ID NO: 63891
  CDS (1)..(1128): transl_table=11

SEQ ID NO: 139480 - protein, 375 aa, Rhizobium leguminosarum bv. viciae 3841; identical to SEQ ID NO: 63892

SEQ ID NO: 139481 - DNA, 1125 bp, Pediococcus pentosaceus ATCC 25745; identical to SEQ ID NO: 63893
  CDS (1)..(1125): transl_table=11

SEQ ID NO: 139482 - protein, 374 aa, Pediococcus pentosaceus ATCC 25745; identical to SEQ ID NO: 63894

SEQ ID NO: 139483 - DNA, 930 bp, Oenococcus oeni PSU-1
  CDS (1)..(930): transl_table=11
atggataatgaagaatattacaaaattcttggcgtggcaaagagtgccagtcaggatgaaataaaacatgcttaccggaagatgtcaaagaaatatcatccggatttgaatcatcagcctggagcggaagacaagtataagcaagttcaagaagcttacgaaactttgggcgatcctcaaaaacgagcggcttacgaccaatacggcaaggctggtgcaaatgccaacaatggccaaggtggttttggtggtttccaacagagtggattcaattttaatggtcaggattttggtgattttagtgatattttcagccagatgtttggaggatcttttaatccaaacgcaccaagaaaaggccgcgatttacaatatcgaattaatttaactttcgaagaggctgtttttggcaaagaaaccgaaatcaagtatgttcgtcaggaaagcggtggcaattccaaagaacacaccgttaaggtcacaattccagccggtgttgaaactggtcagcaaatgcgtttggctggtcaaggagaagctggaacgcacggtggcccttatggtgatttatatgttgaatttattgttggcaagtccaaggatggttttgaacgtcagggagcaaacatttatcttgaagaaccgattaattttgtgcaagctgctcttggtgacaagatcaaggttaaaaccgttcacggtgatgtcgaactaacaattccggccggaactcagacagatactgaattcaggttgcgaggaaaaggcgctccgtatgtaaattcttcgcgaattggggacgaatatgttaaggtcattgtccaagtaccaaagagactaaatgagaaagaaaagaaggcattgaaaacttatgccgatctgcgtggagaaaatgttaatccacaaaaaagaaggggactgtttggctaa

SEQ ID NO: 139484 - protein, 309 aa, Oenococcus oeni PSU-1
MDNEEYYKILGVAKSASQDEIKHAYRKMSKKYHPDLNHQPGAEDKYKQVQEAYETLGDPQKRAAYDQYGKAGANANNGQGGFGGFQQSGFNFNGQDFGDFSDIFSQMFGGSFNPNAPRKGRDLQYRINLTFEEAVFGKETEIKYVRQESGGNSKEHTVKVTIPAGVETGQQMRLAGQGEAGTHGGPYGDLYVEFIVGKSKDGFERQGANIYLEEPINFVQAALGDKIKVKTVHGDVELTIPAGTQTDTEFRLRGKGAPYVNSSRIGDEYVKVIVQVPKRLNEKEKKALKTYADLRGENVNPQKRRGLFG

SEQ ID NO: 139485 - DNA, 900 bp, Leuconostoc mesenteroides subsp. mesenteroides ATCC 8293
  CDS (1)..(900): transl_table=11
gtgaataacactgaatattatgaccgtctcggcgttagtaaagacgccagtcaagatgaaattaaaaaggcttatcgtaagctatcaaaaaaataccatccagatttgaatcatgaacctggtgctgaagaaaaatataaagaagttcaagaagcttttgagacgctaggtgatgaacaaaagcgtgcgcaatatgatcaatttggacctaacggcgcacaaggtggttttggtggccaaggcggttttggcggccaaggtggctttagcgacttctccgatttgggtgatatatttagtcaaatgtttggtggcggatttgatccaaatcgtccgcgcaaaggacaagatttacagtaccgcatgaacttgacttttgaagaggccatttttggtaaggaaactacgattaagtttaaccgtggtgatggtaagcaacacgagattaaggttactgtacctgctggtgttgaaactgggcagcaaatgcgtttgagtggacaaggtgaaagtggtgttaatggtggaccacaaggagacttgttcgttgtcttccaagtatcaccatcaagggatggatttgaacgtgatggtgcagatgtctacttagaacaaaagataagctttgtgacagctgcgttgggtgacgaaattcaagtcaagacggttcacggtgaagtgaagttaagaatcccagctggtactcaaactggtaagcgtttccgcttgagtggtaagggtgctccgcgtttgcgtggcaatggacacggagatcaatttgttattgtgactgtcgaagtaccgacacgacttaataaagatcagaaaaaggcgttggaagctttcaaggaagctaccgacggtacaactaagaaaaagagtttcttcgataaattgtaa

SEQ ID NO: 139486 - protein, 299 aa, Leuconostoc mesenteroides subsp. mesenteroides ATCC 8293
MNNTEYYDRLGVSKDASQDEIKKAYRKLSKKYHPDLNHEPGAEEKYKEVQEAFETLGDEQKRAQYDQFGPNGAQGGFGGQGGFGGQGGFSDFSDLGDIFSQMFGGGFDPNRPRKGQDLQYRMNLTFEEAIFGKETTIKFNRGDGKQHEIKVTVPAGVETGQQMRLSGQGESGVNGGPQGDLFVVFQVSPSRDGFERDGADVYLEQKISFVTAALGDEIQVKTVHGEVKLRIPAGTQTGKRFRLSGKGAPRLRGNGHGDQFVIVTVEVPTRLNKDQKKALEAFKEATDGTTKKKSFFDKL

SEQ ID NO: 139487 - DNA, 1191 bp, Solibacter usitatus Ellin6076; identical to SEQ ID NO: 117685
  CDS (1)..(1191): transl_table=11

SEQ ID NO: 139488 - protein, 396 aa, Solibacter usitatus Ellin6076; identical to SEQ ID NO: 117686

SEQ ID NO: 139489 - DNA, 1173 bp, Mycobacterium smegmatis str. MC2 155; identical to SEQ ID NO: 117693
  CDS (1)..(1173): transl_table=11

SEQ ID NO: 139490 - protein, 390 aa, Mycobacterium smegmatis str. MC2 155; identical to SEQ ID NO: 117694

SEQ ID NO: 139491 - DNA, 1191 bp, Nocardioides sp. JS614; identical to SEQ ID NO: 117699
  CDS (1)..(1191): transl_table=11

SEQ ID NO: 139492 - protein, 396 aa, Nocardioides sp. JS614; identical to SEQ ID NO: 117700

SEQ ID NO: 139493 - DNA, 1128 bp, Azoarcus sp. BH72; identical to SEQ ID NO: 63897
  CDS (1)..(1128): transl_table=11

SEQ ID NO: 139494 - protein, 375 aa, Azoarcus sp. BH72; identical to SEQ ID NO: 63898

SEQ ID NO: 139495 - DNA, 1149 bp, Magnetospirillum magnetotacticum MS-1; identical to SEQ ID NO: 117703
  CDS (1)..(1149): transl_table=11

SEQ ID NO: 139496 - protein, 382 aa, Magnetospirillum magnetotacticum MS-1; identical to SEQ ID NO: 117704

SEQ ID NO: 139497 - DNA, 1014 bp, Nostoc punctiforme PCC 73102
  CDS (1)..(1014): transl_table=11
atggctgcaaccgacttcaaagactattacgcaattttgggagttagtaagactgccactcaggatgagattaaacaagcctttcgtaaactagcccgcaaatatcaccccgatgtcaacccaaataacaaacaggcagaggcacgctttaaagaagttagcgaagcctacgaggttgtttcagatgtagataaacgcaaaaaatatgaccaattcggccaatattggaaacaagctggtgaaggtttccccggcggcggcgttggtgccgatatgggtggctttgacttcagtcaatatggtaattttgatgagttcattaatgagttgctagggcgctttggcggtgctgcccctcgcggtggaggtgggcgacaaagttactcacaaagttactcttaccgccctcctacaggtgcgccaagtggttttggtggctttaacgattatgggtttcaagatccaggtgcgggtacttcccaggatagtgaagctataatcaccctaacttttgctgaagcatttaatggcgtgcaaaagcgctttagtttgggtaacgagacaattgatgttcgtatcccatctggggctaaacctggtactcgtctgcgcgtgcggggtaaaggtcaaatcaacccgatgactcaacaacgaggagatttatacttaaaagttgaacttcagccgcactcgttctttcaaatggaaggcgataacttggtgtgcgaagtagcaattacaccagatgaagctactctaggggcgtctattgatgtacccactcccgatggttcagttaatgtaaagctaccagccggagtgcgttctggccaatcgctgcgtttgcgtggcaaaggttggcccctcgccaagggtggacgtggcgatcagttggtgaaggtggcgatcgcaccaccaaaagacctcagccaacaagaacgagaatattatgaaaaaatccgggctatacgtacttataatccccgcagtcatttgcagcaagtcaagctgtga

SEQ ID NO: 139498 - protein, 337 aa, Nostoc punctiforme PCC 73102
MAATDFKDYYAILGVSKTATQDEIKQAFRKLARKYHPDVNPNNKQAEARFKEVSEAYEVVSDVDKRKKYDQFGQYWKQAGEGFPGGGVGADMGGFDFSQYGNFDEFINELLGRFGGAAPRGGGGRQSYSQSYSYRPPTGAPSGFGGFNDYGFQDPGAGTSQDSEAIITLTFAEAFNGVQKRFSLGNETIDVRIPSGAKPGTRLRVRGKGQINPMTQQRGDLYLKVELQPHSFFQMEGDNLVCEVAITPDEATLGASIDVPTPDGSVNVKLPAGVRSGQSLRLRGKGWPLAKGGRGDQLVKVAIAPPKDLSQQEREYYEKIRAIRTYNPRSHLQQVKL

SEQ ID NO: 139499 - DNA, 1008 bp, Nostoc punctiforme PCC 73102
  CDS (1)..(1008): transl_table=11
atggttgcagcaaccgatttcaaagattattacgaaattctgggtgtcagtaagaacgccactccggaggatatcaaaaaagcctaccggaaattggcacggaaatatcacccggacttaaatcctaacgataagcaagccgaagcgcggttcaaagaaattaacgaagctaatgaagtgctgtccgacccagcaaaacgccagaagtatgaccagtatggtcagtactggcaacaggctgcggcgggtgcacctccacccagaggggcgggtacacaaggctatgactttagccagtatagcaactttaatgatttcattgatgaattgctgggagggttaggtcgcagtggcggtcgtacaaggcagcgcggagctaattatcgcactacaagaagaccagaaggattccgggactacgtagattttgggtatggagaagacccctccagccgcttcactgatattcccgcacaggatacggaagcggcgatcgctctcactttttctgaagcatttcatggtacacagaagcgcctacaaattgatggggaaaccatcactgttcgtattccgccgggtgtgaaaccgggaagccgcattcgggtaaaaggcaaaggacagatgagtccttttaaccagcaacgcggcgatctttatctgtcgattgaattattgcctcatcctttcttcaaatttgagggcgacaatcttgcctgtgaagtacctgtcagcccagaagaagcagtgcttggcgcacaaatagatgttcctacgcccgatggcaaggtaacgatgaagattccggctggtgtggattccggccaagcactgcggctacgtggcaagggctggcgcgatccaaaaggcaatcgtaccgctttgattgtgcggttaaaaattgtaacacccaaagatttgagtccccaagaaagagagtgctatgaaaaattgcgacaagttagcagttttaatccccgtcaaggcttagaagaggtgcggttatga

SEQ ID NO: 139500 - protein, 335 aa, Nostoc punctiforme PCC 73102
MVAATDFKDYYEILGVSKNATPEDIKKAYRKLARKYHPDLNPNDKQAEARFKEINEANEVLSDPAKRQKYDQYGQYWQQAAAGAPPPRGAGTQGYDFSQYSNFNDFIDELLGGLGRSGGRTRQRGANYRTTRRPEGFRDYVDFGYGEDPSSRFTDIPAQDTEAAIALTFSEAFHGTQKRLQIDGETITVRIPPGVKPGSRIRVKGKGQMSPFNQQRGDLYLSIELLPHPFFKFEGDNLACEVPVSPEEAVLGAQIDVPTPDGKVTMKIPAGVDSGQALRLRGKGWRDPKGNRTALIVRLKIVTPKDLSPQERECYEKLRQVSSFNPRQGLEEVRL

SEQ ID NO: 139501 - DNA, 966 bp, Nostoc punctiforme PCC 73102
  CDS (1)..(966): transl_table=11
atgccaactgcaaatgatttcaaagattattacaacattttgggagttagcaaaactgcaacttccgacgaaattaagcgagcttaccgcaaacttgcccgcaaatatcatcctgacgtgaatcctggcaatccagaagccgaggaaaaattcaaagacatcaatgaagccaacgaagttttatcaaacccagaaaagcgcgaaaaatatgactcttttgggcagtactggaagcaagcggaggctagcggtactcctcctggaggaactagcacgtatgcagagaattttgaccaatatagcaactttgatgactttatcaatgatttgctaggtggtttagggggcaggacaagagcaggacggacttattaccgtacctcggctaggcagcctgatgactttggctcatttggcagccaagcaccagcacccgatagtgaagctgcgatcgcactctccttctcggaagcgtttcatggcgttcaaaagcggttgcagttggatgatgaaactatcaacgttcgtattcccgcaggtgctaaaccgggtagtcgaattcgcattaaaggcaaaggtcgccccagccctttttctcaacagcgaggcgatttgtatctcacaattgagctgcttcctcatccgttttttcaattttcggatgacaatttaacttgcgaagttcccattcgtccagatgaagcagtcttaggcgctcaaattcaagtaccaacaccagagggccgcgtcacattgagcgttcctaaaggtgtgcgttccggtcaatcgctgcggctacgaggaaaaggctggacgcaaccaaaaggcgggcgaactgacctaattgtgaaacttcagatcgtgtctccgaaagagttaagcgaaattgagcgggattgctatgaaaagattcaggccaatagcagctttaacccgcgtactgcattagaaggagtgacgttatga

SEQ ID NO: 139502 - protein, 321 aa, Nostoc punctiforme PCC 73102
MPTANDFKDYYNILGVSKTATSDEIKRAYRKLARKYHPDVNPGNPEAEEKFKDINEANEVLSNPEKREKYDSFGQYWKQAEASGTPPGGTSTYAENFDQYSNFDDFINDLLGGLGGRTRAGRTYYRTSARQPDDFGSFGSQAPAPDSEAAIALSFSEAFHGVQKRLQLDDETINVRIPAGAKPGSRIRIKGKGRPSPFSQQRGDLYLTIELLPHPFFQFSDDNLTCEVPIRPDEAVLGAQIQVPTPEGRVTLSVPKGVRSGQSLRLRGKGWTQPKGGRTDLIVKLQIVSPKELSEIERDCYEKIQANSSFNPRTALEGVTL

SEQ ID NO: 139503 - DNA, 1128 bp, Nostoc punctiforme PCC 73102; identical to SEQ ID NO: 117705
  CDS (1)..(1128): transl_table=11

SEQ ID NO: 139504 - protein, 375 aa, Nostoc punctiforme PCC 73102; identical to SEQ ID NO: 117706

SEQ ID NO: 139505 - DNA, 1026 bp, Bifidobacterium longum DJO10A
  CDS (1)..(1026): transl_table=11
atggctgaaaacgaatggctcagcaaagacttctacaaagtccttggtgtctccaaggacgcttcggacgacgacatcaagaaggcgtaccgcaagctcgcccgcaaataccatcctgacgtcaacaagaccaaggaagccgaggagaagttcaaggacatctccgaagcctatgacgtgctgagcaagaaggaagatcgccagaagtacgacgcgattcgtcagttcggcatgggcggtgcccgcttcgccggcggttccggcaccggcggcttcgatgcttccggtttctccgacatctttggttccatgttcggccagggtgccggcggcaatggctcgcgcatccgcttctccacttcgggcggcggccccaacaacatcaacgacatcttctcgatgttcggcggtgctgcaggtcagggcggccagccgtatggcggctacggccaatcgccgtacggcaatgccggcggctatggctatgaggaggccccgcgccccgaaaacggcgaggaccgcaactccaagatcagcctgaccctgcgtcaggcggtcaagggcgctaccgtgtccttgtccgtggacggcaagaagttcaaggcccacgtgcctgcgggcgtcaaggacggacagaaaatcaagctggccggcaagggcaagccaggcatcaacggcggcaaggccggtgacctgtacctgcacgtcactgtcaagcccgatgccacattctcgatgcgcggccatgatatcgtcatggacctgcccgtaactgtgggccaggccgtggccggtggcaaggtcgaggccaaggatatcgacggcaatcccgtcaccttcaaggtgccggcaggctccagctccggcgcggaagtcaagctcacgggacttggcgtccagcgcagcaaccagccgggcgatctgatcggccgtgtgcagatcatggtccccgccaagccgggtctggccgtcaagcacgccgccaaagaattcgacgaaaaagccggcgactatctcagcctgtaa

SEQ ID NO: 139506 - protein, 341 aa, Bifidobacterium longum DJO10A
MAENEWLSKDFYKVLGVSKDASDDDIKKAYRKLARKYHPDVNKTKEAEEKFKDISEAYDVLSKKEDRQKYDAIRQFGMGGARFAGGSGTGGFDASGFSDIFGSMFGQGAGGNGSRIRFSTSGGGPNNINDIFSMFGGAAGQGGQPYGGYGQSPYGNAGGYGYEEAPRPENGEDRNSKISLTLRQAVKGATVSLSVDGKKFKAHVPAGVKDGQKIKLAGKGKPGINGGKAGDLYLHVTVKPDATFSMRGHDIVMDLPVTVGQAVAGGKVEAKDIDGNPVTFKVPAGSSSGAEVKLTGLGVQRSNQPGDLIGRVQIMVPAKPGLAVKHAAKEFDEKAGDYLSL

SEQ ID NO: 139507 - DNA, 1122 bp, Haemophilus somnus 2336
  CDS (1)..(1122): transl_table=11
atggcaaaacgagattattatgaaatattaggtgttcaaaaaggagcggatgataaagaaatcaaacgtgcttacaaacgccttgcgatgaaatatcacccagatcgaactaaaggtgataaagaaagcgaagaaaaattcaaagaaattaatgaagcatacgaagttttggctgataaagagaaaagggcaatgtatgaccaatatggtcatgccgcttttgaacaaggtggtggtgccggcggtttcggcggctttagcggagctgactttggtgatattttcggcgatatgttcggcgatatttttggtggcggacgttctcgtcaacgtgttgttcgtggtgaggatttacgctacgatattgaaataagtttggaagaagcggtaaaaagctgtaaaaaagatattcaaattaacactcttgttcactgtggaacttgtcatggctcaggtgcggaagcgggttcaaaaattgaatcttgtccaacctgtcatggtgcaggtcgtgttcgtcgccaacaaagtttctttgttacagaacaaacttgtccacactgtcacggtactggcaaaaaaatagagaaaccttgtcatacctgtcacggtgaaggtagagttcataaaacccaaaatcttaccgttaccattccaatgggcgtagatacaggtaatcaattacgtttagcaggtaaaggtgcagcgggtgaaaatggtgcacctgccggtgatttatatgtggttatccatgtaaaaaaacaccatatttttgaacgtgatggtaacaatctttattgtgaagtccctatcagctttactatggctgcattaggtggcgaagtagaaattccaactttagacggtcgtcttaaagttaaaattcctgctgaaacacaaaccggtaaactgcttcgtctaagaggaaaaggcattacctctcgcggctatgctggcgatttaatctgcgagatcgttattgaaacaccaattaaactaaacgaagaacaaaaagagttactaagaaaattggaagaaagtttagaaggtaaaacgctccaacgccctaaatcctcaggttttttagatggtgtaaaaaaattctttgataatttaggaaaataa

SEQ ID NO: 139508 - protein, 373 aa, Haemophilus somnus 2336
MAKRDYYEILGVQKGADDKEIKRAYKRLAMKYHPDRTKGDKESEEKFKEINEAYEVLADKEKRAMYDQYGHAAFEQGGGAGGFGGFSGADFGDIFGDMFGDIFGGGRSRQRVVRGEDLRYDIEISLEEAVKSCKKDIQINTLVHCGTCHGSGAEAGSKIESCPTCHGAGRVRRQQSFFVTEQTCPHCHGTGKKIEKPCHTCHGEGRVHKTQNLTVTIPMGVDTGNQLRLAGKGAAGENGAPAGDLYVVIHVKKHHIFERDGNNLYCEVPISFTMAALGGEVEIPTLDGRLKVKIPAETQTGKLLRLRGKGITSRGYAGDLICEIVIETPIKLNEEQKELLRKLEESLEGKTLQRPKSSGFLDGVKKFFDNLGK

SEQ ID NO: 139509 - DNA, 1143 bp, Actinobacillus pleuropneumoniae serovar 1 str. 4074; identical to SEQ ID NO: 117707
  CDS (1)..(1143): transl_table=11

SEQ ID NO: 139510 - protein, 380 aa, Actinobacillus pleuropneumoniae serovar 1 str. 4074; identical to SEQ ID NO: 117708

SEQ ID NO: 139511 - DNA, 1182 bp, Fusobacterium nucleatum subsp. vincentii ATCC 49256; identical to SEQ ID NO: 117709
  CDS (1)..(1182): transl_table=11

SEQ ID NO: 139512 - protein, 393 aa, Fusobacterium nucleatum subsp. vincentii ATCC 49256; identical to SEQ ID NO: 117710

SEQ ID NO: 139513 - DNA, 1149 bp, Haemophilus influenzae R2846; identical to SEQ ID NO: 63899
  CDS (1)..(1149): transl_table=11

SEQ ID NO: 139514 - protein, 382 aa, Haemophilus influenzae R2846; identical to SEQ ID NO: 63900

SEQ ID NO: 139515 - DNA, 1149 bp, Haemophilus influenzae R2866; identical to SEQ ID NO: 117715
  CDS (1)..(1149): transl_table=11

SEQ ID NO: 139516 - protein, 382 aa, Haemophilus influenzae R2866; identical to SEQ ID NO: 117716

SEQ ID NO: 139517 - DNA, 1149 bp, Crocosphaera watsonii WH 8501
  CDS (1)..(1149): transl_table=11
ttgattaaaagttgcgatatcttccgcatcactgagttgggccagacgtatgtttatggtatccaatgtttaactcaagttcgtttagttgacaatccctattttactccccagaaggacttgatacagattatgattgatatggaggacaatatttttaaggataattctacgggatatatggattacaaagattactatgctacattgggcatcaataaaagttccagcgcagacgagatcaaaaaagccttccgcaaattagcggttaaatatcatcctgacagaaaccctgatgacaagccagctgaagaacgtttcaaagagatcagcgaagcttatgaagtgttgtctgatcccgaaaaacgcaagaaatacgaccagtttggtcaatattggaaacaagcgggtcaaagcacctggcctggtggcggtgctaacgtggatatgggaaacttcgattttagccagtatggtaactttgaagagttcatcaatgagttattaggaaagttctctactccagggggagggagaacgggtaattatggttatggcaatcagggaacgggatatagtggttatagtgggggttatggcaatcaaactccggcaccaaaccgagaagcaaccttaaaactgactttttctgaggcatttcgtggggtacaaaaacgtcttaacttagggaatgagatcatcgatgtgcgtattcctgccggggcaaaaaatggtagtcgtatccgtgttaaagggaaagggggaaatagtccttatagtcaaaatagaggagacttgtatctgaatgtagaactgactccccataacttttttgcctttgaagatgataacctggtgtgtgaagttcctatttcccccgatgaagcggtattaggaagtaccatagatgtacctacccctgatggtatggtaacggttaaagttcctcctggtattcgctctggccagtgtttacggttgcgtggaaaaggatgggtaaaccagaaaaaagggagaggggatcaactggttaaaattatcattgatacccctcaacatataactgatacggaacgaaactattacgagaaaattcgtgatagtcgcagttatcaacctcgtcagcatttacaaacgattagtttatga

SEQ ID NO: 139518 - protein, 382 aa, Crocosphaera watsonii WH 8501
MIKSCDIFRITELGQTYVYGIQCLTQVRLVDNPYFTPQKDLIQIMIDMEDNIFKDNSTGYMDYKDYYATLGINKSSSADEIKKAFRKLAVKYHPDRNPDDKPAEERFKEISEAYEVLSDPEKRKKYDQFGQYWKQAGQSTWPGGGANVDMGNFDFSQYGNFEEFINELLGKFSTPGGGRTGNYGYGNQGTGYSGYSGGYGNQTPAPNREATLKLTFSEAFRGVQKRLNLGNEIIDVRIPAGAKNGSRIRVKGKGGNSPYSQNRGDLYLNVELTPHNFFAFEDDNLVCEVPISPDEAVLGSTIDVPTPDGMVTVKVPPGIRSGQCLRLRGKGWVNQKKGRGDQLVKIIIDTPQHITDTERNYYEKIRDSRSYQPRQHLQTISL

SEQ ID NO: 139519 - DNA, 1131 bp, Crocosphaera watsonii WH 8501; identical to SEQ ID NO: 117719
  CDS (1)..(1131): transl_table=11

SEQ ID NO: 139520 - protein, 376 aa, Crocosphaera watsonii WH 8501; identical to SEQ ID NO: 117720

SEQ ID NO: 139521 - DNA, 1113 bp, Exiguobacterium sibiricum 255-15; identical to SEQ ID NO: 117721
  CDS (1)..(1113): transl_table=11

SEQ ID NO: 139522 - protein, 370 aa, Exiguobacterium sibiricum 255-15; identical to SEQ ID NO: 117722

SEQ ID NO: 139523 - DNA, 1188 bp, Prosthecochloris aestuarii DSM 271; identical to SEQ ID NO: 63903
  CDS (1)..(1188): transl_table=11

SEQ ID NO: 139524 - protein, 395 aa, Prosthecochloris aestuarii DSM 271; identical to SEQ ID NO: 63904

SEQ ID NO: 139525 - DNA, 882 bp, Xylella fastidiosa Dixon
  CDS (1)..(882): transl_table=11
atgcaattcaaggactattacgcgactttaggtgttgaaccgagtgcgggtgaggctgagatcaagaccgcttaccgtcggctagcgcgcaaatatcatcctgacgtcagtcaggagccgggggcggaggagagattcaaggccgtcaacgaggcttatgaggcattacgcgatccgaacaagcgtgcggcttatgaccagctccgtgcacaagggtaccggcctggagatgaattccatgctcctcctaattttggtggtgggcatggttttaactttgaagaggtgtttggcaatgcgtcgggggggaatttcagcgatttctttgagagcttatttgctggagcccgtgccggtggtcgtcatgcaggtccaggggggggcgacaaatcgcaacacggtgatacgcgttccaagttgactgtgccactggaagccatttacagcgggggaagtgtgcgggtcacggtcaatgggcgtcagcttgatgtgcgtgtgcctaaaggtatccaacctggcaaggtgattcggttgaacggacaggggagctacgctcgtcatctcttgttagagatcgaatatgctccgcatccgcaatttgaagttgatgggcacaatattctgcacactgtgcaagtgacgccatggcaggccgcattggggacttcgatcagcgtgccgactctcggtggatctgtggagctgaaggtgccacctgattccgatgcgggacgcaagttgcgtctgcgcggtcgtggtttgcctggtcctccgccaggagaccagatcgttgagttggaaatcactgctcctttagctacaaacgagacacagcgcaaggcatatcgggcgcttgccaaagcgtttggcgagaaggtttga

SEQ ID NO: 139526 - protein, 293 aa, Xylella fastidiosa Dixon
MQFKDYYATLGVEPSAGEAEIKTAYRRLARKYHPDVSQEPGAEERFKAVNEAYEALRDPNKRAAYDQLRAQGYRPGDEFHAPPNFGGGHGFNFEEVFGNASGGNFSDFFESLFAGARAGGRHAGPGGGDKSQHGDTRSKLTVPLEAIYSGGSVRVTVNGRQLDVRVPKGIQPGKVIRLNGQGSYARHLLLEIEYAPHPQFEVDGHNILHTVQVTPWQAALGTSISVPTLGGSVELKVPPDSDAGRKLRLRGRGLPGPPPGDQIVELEITAPLATNETQRKAYRALAKAFGEKV

SEQ ID NO: 139527 - DNA, 882 bp, Xylella fastidiosa Ann-1
  CDS (1)..(882): transl_table=11
atgcaattcaaggactattacgcgactttaggtgttgaaccgagtgcgggtgaggctgagatcaagaccgcttaccgtcggctagcgcgcaaatatcatcctgacgtcagtcaggagccgggggcggaggagagattcaaggccgtcaacgaggcttatgaggcattacgcgatccgaacaagcgtgcggcttatgaccagctccgtgcacaagggtaccggcctggagatgaattccatgctcctcctaattttggtggtgggcatggttttaactttgaagaggtgtttggcaatgcgtcgggggggaatttcagcgatttctttgagagcttatttgctggagcccgtgccggtggtcgtcatgcaggtccaggggggggcgccaaatcgcaacacggtgatacgcgttccaagttgactgtgccactggaagccatttacagcgggggaagtgtgcgggtcacggtcaatgggcgtcagcttgatgtgcgtgtgcctaaaggtatccaacctggcaaggtgattcggttgaacggacaggggagctacgctcgtcatctcttgttagagatcgaatatgctccgcatccgcaatttgaagttgatgggcacaatattctgcacactgtgcaagtgacgccatggcaggccgcattggggacttcgatcagcgtgccgactctcggtggatctgtggagctgaaggtgccacctgattccgatgcgggacgcaagttgcgtctgcgcggtcgtggtttgcctggtcctccgccaggagaccagatcgttgagttggaaatcactgctcctttagctacaaacgatacacagcgcaaggcatatcgggcgcttgccaaagcgtttggcgagaaggtttga

SEQ ID NO: 139528 - protein, 293 aa, Xylella fastidiosa Ann-1
MQFKDYYATLGVEPSAGEAEIKTAYRRLARKYHPDVSQEPGAEERFKAVNEAYEALRDPNKRAAYDQLRAQGYRPGDEFHAPPNFGGGHGFNFEEVFGNASGGNFSDFFESLFAGARAGGRHAGPGGGAKSQHGDTRSKLTVPLEAIYSGGSVRVTVNGRQLDVRVPKGIQPGKVIRLNGQGSYARHLLLEIEYAPHPQFEVDGHNILHTVQVTPWQAALGTSISVPTLGGSVELKVPPDSDAGRKLRLRGRGLPGPPPGDQIVELEITAPLATNDTQRKAYRALAKAFGEKV

SEQ ID NO: 139529 - DNA, 1137 bp, Streptococcus suis 89/1591; identical to SEQ ID NO: 63905
  CDS (1)..(1137): transl_table=11

SEQ ID NO: 139530 - protein, 378 aa, Streptococcus suis 89/1591; identical to SEQ ID NO: 63906

SEQ ID NO: 139531 - DNA, 1131 bp, Croceibacter atlanticus HTCC2559; identical to SEQ ID NO: 117729
  CDS (1)..(1131): transl_table=11

SEQ ID NO: 139532 - protein, 376 aa, Croceibacter atlanticus HTCC2559; identical to SEQ ID NO: 117730

SEQ ID NO: 139533 - DNA, 1158 bp, Sulfitobacter sp. EE-36; identical to SEQ ID NO: 117731
  CDS (1)..(1158): transl_table=11

SEQ ID NO: 139534 - protein, 385 aa, Sulfitobacter sp. EE-36; identical to SEQ ID NO: 117732

SEQ ID NO: 139535 - DNA, 1134 bp, Prochlorococcus marinus str. MIT 9211
  CDS (1)..(1134): transl_table=11
atggctgatttttacgacctactaggagttagtcgagatgctgatgctgactcattaaaacgtgcgtataggcgactagctcgtcaataccatcctgatatcaataaagaacctggagcggaagaacgttttaaagagataggacgagcatatgaagttcttggagatccacaaaaacgtgcaacttatgaccaatttggagaagctggcttaggaggaagtgctggaatgccagatatgggcgatatgggtggctttgcagatctttttgaaactttctttagtggttttggtggggcttcttcttcaggtgcgagatctcagcgtagaggacctcagcaaggagatgacctgcgttatgacctgactgttgattttcaacaagctgtctttggccaagaaaccgaaattaaaattcctcatttagaaacttgtgacacttgcaatggtagtggggctaaacctggtactggtcctaccgcttgctctacttgtggaggagctgggcaagttcgaagagctacaagaacgccttttggaagtttcacccaagttgcagaatgtcctgcatgtaatggatcaggacaattaatagctaatccgtgctctagttgtggtggtcaaggtgtcaaacagattcgtaaaaaacttaggattaatattcctccaggagtagatactggaacaaaattacgagtttctggagaaggtaatgctggattaagaggaggaccttctggagatttatacgtttttcttaaggtgaaaagtcatccaaaattaagacgagatggtttgactattcattcagaagtaaatgttagttatttgcaggcaattttaggagatacaattgaagttgatactgttgatggtccaacaaatatagaaataccaatcggcactcaaccaaatgcagttcttaccttagataacaaagggattcctaaattaggaaatcctgtagctagaggtaatcattgcattttagtcaaaataaatcttccaacaaggttgacggaagatgaaaagactttgttagagcaattagcaacttatcattctgcaaaaggtgtacaacatcaccatcataagagtggcttatttggaaaattatttagcaataatgaataa

SEQ ID NO: 139536 - protein, 377 aa, Prochlorococcus marinus str. MIT 9211
MADFYDLLGVSRDADADSLKRAYRRLARQYHPDINKEPGAEERFKEIGRAYEVLGDPQKRATYDQFGEAGLGGSAGMPDMGDMGGFADLFETFFSGFGGASSSGARSQRRGPQQGDDLRYDLTVDFQQAVFGQETEIKIPHLETCDTCNGSGAKPGTGPTACSTCGGAGQVRRATRTPFGSFTQVAECPACNGSGQLIANPCSSCGGQGVKQIRKKLRINIPPGVDTGTKLRVSGEGNAGLRGGPSGDLYVFLKVKSHPKLRRDGLTIHSEVNVSYLQAILGDTIEVDTVDGPTNIEIPIGTQPNAVLTLDNKGIPKLGNPVARGNHCILVKINLPTRLTEDEKTLLEQLATYHSAKGVQHHHHKSGLFGKLFSNNE

SEQ ID NO: 139537 - DNA, 1143 bp, Erythrobacter sp. NAP1; identical to SEQ ID NO: 117733
  CDS (1)..(1143): transl_table=11

SEQ ID NO: 139538 - protein, 380 aa, Erythrobacter sp. NAP1; identical to SEQ ID NO: 117734

SEQ ID NO: 139539 - DNA, 975 bp, Synechococcus sp. RS9917
  CDS (1)..(975): transl_table=11
atggccggcagtggctaccgcgattacttcaaggtgctcggggttgatcgcagcgccgatgctgatgcgatcaagcgggcgtttcgcaaattggcgcgccagtatcacccggatgtgaatcccggtgacgcaacggctgaggccaaattcaaggaggtgagcgaggcctatgaggtgctctccgatccggaaaaacggcgccgctatgagcagttcggccagtactggaatcaggttggcggtggtgccccaggtgccggcggggctggttttgatgtggatttcggccgttacggcaacttcgacgatttcatcaatgacctgctcggccgtttcggaggtgctggtggtggcgctggcttccccggtgggtttggcggcgggtcgggatttccaggtggtggcttccctcgcggagcccaacagcgtcagccgatcaatctggatgccgaagccagcgtcaaagtcagctttgctgaagcgttccgcggcagtgagcgcaccctgtcggtgaatgacgagcgcgtgcaggtgcggattccggcgggtgtgaaaaatgggtcgcgcctgcgtctcaagggcaagggcaactcgcagcctggcaccgggcgacgcggtgatctctacctcaatcttgaggtccagccccatccggtgtggcggctcgatggcgaccagttgcgcgctgagctgccggttgctttggatgagctgaccctcggtggcacgatcaccgtgatgactccggatggcgaggcggacgtgaccattcccgccggcaccgcacctgggcgcagtctgcggttgaagggcaagggctggcccctgaaatcaggccgcggcgatttgttgctgaccctcagcctgcagtggccggaatcctggtcggccgaggagcggcagctgctcgaccaactgcgccaggcccgcgctcaggatccgcgtcgcaactggttgtcatcggcgcgcctctga

SEQ ID NO: 139540 - protein, 324 aa, Synechococcus sp. RS9917
MAGSGYRDYFKVLGVDRSADADAIKRAFRKLARQYHPDVNPGDATAEAKFKEVSEAYEVLSDPEKRRRYEQFGQYWNQVGGGAPGAGGAGFDVDFGRYGNFDDFINDLLGRFGGAGGGAGFPGGFGGGSGFPGGGFPRGAQQRQPINLDAEASVKVSFAEAFRGSERTLSVNDERVQVRIPAGVKNGSRLRLKGKGNSQPGTGRRGDLYLNLEVQPHPVWRLDGDQLRAELPVALDELTLGGTITVMTPDGEADVTIPAGTAPGRSLRLKGKGWPLKSGRGDLLLTLSLQWPESWSAEERQLLDQLRQARAQDPRRNWLSSARL

SEQ ID NO: 139541 - DNA, 990 bp, Synechococcus sp. WH 5701
  CDS (1)..(990): transl_table=11
atgagtgccaacggctaccgcgactatttcaaggtgctgggcgtcgagcgcagtgcggatgccgatgccgtcaagcgctcgtttcgcaagctggcccgccagtaccacccggatgtgaaccccggtgatgccacggccgaggccaagttcaaggagatcagcgaggcctatgaggtgctctccgatcccgacaagcgtcggcgctatgagcagttcggccagtactggagtcaggccggcggggcgcctggcggggccccgggcttcgatgtggatttcggccgctacggcaacttcgacgaattcatcaacgacctgctcggtcgcttcggtggggcccaggggagttccggttttggggcaggccccggaggtttcgggttctccggtggttttcccggcggcttccccagcggtttcggcggaccggcgacgggtcgcagcgggaccctcaacctggacgcggaagccaccatcagcctcagctttgccgaagcgttccgcggctgcgagcgcaccctggccgtcaacgaggagcgggtgcaggtgcgcattccgccaggggtacgcagtggcagtcgcctgcgcctcaagggcaagggcaacctgcagcccggcaccggacgccgcggcgatctctatctcaaccttcaacttcaggaccacccgatctggcgcctggatggcgatcagctgcgcgccgatctacccctcagcctcgatgaactggccctgggcggcgaggtgagggtggccacccccgacggggaagccaccgtgcaggtgcctcccggtgtggccctgggccgcagcctgcgcctcaagggcaagggctggccggtcaaggacggccgtggggatctgctgctcagcctcaccctcaagcttccggagcagttcagcgacgccgagcggcagttgctggagaagctgcgcgaggcccgcagtcttgatcctcgccgtgagtggatgagggcggcccagctctga

SEQ ID NO: 139542 - protein, 329 aa, Synechococcus sp. WH 5701
MSANGYRDYFKVLGVERSADADAVKRSFRKLARQYHPDVNPGDATAEAKFKEISEAYEVLSDPDKRRRYEQFGQYWSQAGGAPGGAPGFDVDFGRYGNFDEFINDLLGRFGGAQGSSGFGAGPGGFGFSGGFPGGFPSGFGGPATGRSGTLNLDAEATISLSFAEAFRGCERTLAVNEERVQVRIPPGVRSGSRLRLKGKGNLQPGTGRRGDLYLNLQLQDHPIWRLDGDQLRADLPLSLDELALGGEVRVATPDGEATVQVPPGVALGRSLRLKGKGWPVKDGRGDLLLSLTLKLPEQFSDAERQLLEKLREARSLDPRREWMRAAQL

SEQ ID NO: 139543 - DNA, 990 bp, Synechococcus sp. WH 7805
  CDS (1)..(990): transl_table=11
atggccggcagtgggtaccgcgattacttcaaggtgctcggggtggatcgtggcgctgatgctgatgccattaagcgggcgtttcgaaaactggcgcgccagtaccacccggatgtgaatccgggtgacaagacggctgaagccaagttcaaggaagtgagcgaggcctatgaggtcttgtcggatcctgagaagcgcaagcggtacgagcaatttgggcagtactggaatcaggccggcagtggcggtgccgggatgggtgatgttgatttcggccgctacggcaatttcgacgatttcatcaatgaccttcttggtcgattcggcggtcaaggcggtggtggtttcggcggtgcaccgggtggtttctcgggcggtggatttcctggtggtggatttcctggcggttttgctgggggcggctttcctcgaggagcttcacgccctccggtgaatctcgatgctgaagctacggtgaaagtgagtttcgcggaggctttccgtggtggtgagcgcatgctttccgtgaatgatgaacgggtacaggtgcgcatccctgcgggagtgaagaacggttcccgcctccgtctcaagggcaagggcaaccttcagccaggaaccgggcgtcgcggcgatctctatctgaaccttgaggttcaggctcaccccgtgtggcgcttcgacggtgatcagctgcgtgctgatcttcctgtggctctcgatgagttggcgctcggaggcatcgttaccgtgatgacaccggacggcgaagccgaagtctcgatccctgcgggcaccagcccaggccgcagtctgcggctgaagggcaagggttggccgctgaaaactggccggggagacctccttttcaccctcagcctgcagtggccttcccagtggtctgagacgcagcgctctctacttgagcgattgcgtgaggaacgcggcgatgatccgcgccgcgattggattcaaaccgcccggctctga

SEQ ID NO: 139544 - protein, 329 aa, Synechococcus sp. WH 7805
MAGSGYRDYFKVLGVDRGADADAIKRAFRKLARQYHPDVNPGDKTAEAKFKEVSEAYEVLSDPEKRKRYEQFGQYWNQAGSGGAGMGDVDFGRYGNFDDFINDLLGRFGGQGGGGFGGAPGGFSGGGFPGGGFPGGFAGGGFPRGASRPPVNLDAEATVKVSFAEAFRGGERMLSVNDERVQVRIPAGVKNGSRLRLKGKGNLQPGTGRRGDLYLNLEVQAHPVWRFDGDQLRADLPVALDELALGGIVTVMTPDGEAEVSIPAGTSPGRSLRLKGKGWPLKTGRGDLLFTLSLQWPSQWSETQRSLLERLREERGDDPRRDWIQTARL

SEQ ID NO: 139545 - DNA, 1131 bp, Synechococcus sp. WH 7805; identical to SEQ ID NO: 117739
  CDS (1)..(1131): transl_table=11

SEQ ID NO: 139546 - protein, 376 aa, Synechococcus sp. WH 7805; identical to SEQ ID NO: 117740

SEQ ID NO: 139547 - DNA, 1131 bp, Pseudoalteromonas tunicata D2; identical to SEQ ID NO: 117741
  CDS (1)..(1131): transl_table=11

SEQ ID NO: 139548 - protein, 376 aa, Pseudoalteromonas tunicata D2; identical to SEQ ID NO: 117742

SEQ ID NO: 139549 - DNA, 1134 bp, Oceanospirillum sp. MED92; identical to SEQ ID NO: 117743
  CDS (1)..(1134): transl_table=11

SEQ ID NO: 139550 - protein, 377 aa, Oceanospirillum sp. MED92; identical to SEQ ID NO: 117744

SEQ ID NO: 139551 - DNA, 1131 bp, Flavobacteria bacterium BBFL7; identical to SEQ ID NO: 117745
  CDS (1)..(1131): transl_table=11

SEQ ID NO: 139552 - protein, 376 aa, Flavobacteria bacterium BBFL7; identical to SEQ ID NO: 117746

SEQ ID NO: 139553 - DNA, 969 bp, gamma proteobacterium HTCC2207
  CDS (1)..(969): transl_table=11
atggattttcaggactactacaaaatactctcggtcgctcctgacgccgatagcaaaaccattaaaactgcctatcgcaaattggctagaaaataccacccagatgttagcgagcaccatgaggccgaagaaaaattcaaacagatcgccgaagcctatgaggtgttgaaagacccgaaaaagcgggctcaatacgatgagttgcgcgagcatggcgggcagggatatcgacaggaacagacgcagggcacttcaggacagcactattcccaatcatcctctgatcatggcgacttctcagactttttctcgtcgatttttggtggcgcttatcagccagaggagggagctggggctcatgggttttcgcagcagggtttctctagtcaaagagcggccagaaaaggtcaagacatcgaaactgatatgccgatctttcttgaagacaccttggccaccagctcgaaacccatctcctatagcttgcctcatcgtgatgctcaggggcaggttagccaggtcaataaaactctcaatgtaaaaatccccgctggcgtagccgagggcgagcgcattcgtctcaaaggccaaggcggtcagggtctaggtgatgccccctcgggagacctctatctgcgtattcgtctggtaccgcacccactgttcgatgtcgaggcccacaacctgattcttaccgtaccccttgcaccttgggaagccgcgcttggcaccagccttgaagccccaaccctatcaggcaagatcaaaatcaccatccccgccaatagccaaagtggccagcgtttgagaatcaaaggcaaaggcctggtgcgcaaacagggtcatggcgacctctacgcagtgttaaaagtggtgatgcccggctcagtgtcagaggagagcaagcagcactggcagcaactggcagatgctgccgcttttgatccgcgaatggaatggagacaataa

SEQ ID NO: 139554 - protein, 322 aa, gamma proteobacterium HTCC2207
MDFQDYYKILSVAPDADSKTIKTAYRKLARKYHPDVSEHHEAEEKFKQIAEAYEVLKDPKKRAQYDELREHGGQGYRQEQTQGTSGQHYSQSSSDHGDFSDFFSSIFGGAYQPEEGAGAHGFSQQGFSSQRAARKGQDIETDMPIFLEDTLATSSKPISYSLPHRDAQGQVSQVNKTLNVKIPAGVAEGERIRLKGQGGQGLGDAPSGDLYLRIRLVPHPLFDVEAHNLILTVPLAPWEAALGTSLEAPTLSGKIKITIPANSQSGQRLRIKGKGLVRKQGHGDLYAVLKVVMPGSVSEESKQHWQQLADAAAFDPRMEWRQ

SEQ ID NO: 139555 - DNA, 1119 bp, delta proteobacterium MLMS-1; identical to SEQ ID NO: 63909
  CDS (1)..(1119): transl_table=11

SEQ ID NO: 139556 - protein, 372 aa, delta proteobacterium MLMS-1; identical to SEQ ID NO: 63910

SEQ ID NO: 139557 - DNA, 987 bp, delta proteobacterium MLMS-1
  CDS (1)..(987): transl_table=11
atggattactataaagtgctcggactggaaaaaaacgccaaaccggaagatatcaaaaaggcttaccgcaagctggccttgaagtatcaccccgatcataaccagggcaacaaggaggccgaagccaagttcaaggagatcagcgaggcctacgcggtgctttccgatcccgaaaaacgccagcagtacgatacccacggctctgcgggcttccagcaacgctactcccaggaggatattttccgcaatgccgatatcaacgatatcttgcgggaatttggtatcaatctggggggcggccgggccactttccggtccggcggcggtttcttcgacgatctcttcggggtcggcggttctggaggcatgggtggggccggtggcaggggcggccaggggcgcgaatttcatttcttccgccagggtggggcccccggcggcggccaacagcagatggtcaagggcaacgatctgagcctggagctgccggtgagcctggaggatgtcctcaaaggcgccgagaagaccatcgccctgggacaacagggcggcaccgccggccagaaggtatcaatcaagatcccggccggcatcgaggatggcaaaaagctgcgcttaagcggcaagggcgctccctcaccgctgggtggcccgccgggggatctgttgctgctgatccgtatccagccccatcccacctttagccgcgagggcaacaacctggtggtggacaaggaaattcccatcagcgccgctctgctgggcagcgagctggcagtacccaccctggaagggcgcaaactcaaggtcaaggtgccgccgggcagcaagcccggctcgcggctgcgcctcaagggccacggcctgccttccggtccccgggggtccaagggcgatctgctggtccgcatcaacctggccatccccggcaagctgagcgaccagcaaaaagagctggccaggcagttggccgccgccggcctctag

SEQ ID NO: 139558 - protein, 328 aa, delta proteobacterium MLMS-1
MDYYKVLGLEKNAKPEDIKKAYRKLALKYHPDHNQGNKEAEAKFKEISEAYAVLSDPEKRQQYDTHGSAGFQQRYSQEDIFRNADINDILREFGINLGGGRATFRSGGGFFDDLFGVGGSGGMGGAGGRGGQGREFHFFRQGGAPGGGQQQMVKGNDLSLELPVSLEDVLKGAEKTIALGQQGGTAGQKVSIKIPAGIEDGKKLRLSGKGAPSPLGGPPGDLLLLIRIQPHPTFSREGNNLVVDKEIPISAALLGSELAVPTLEGRKLKVKVPPGSKPGSRLRLKGHGLPSGPRGSKGDLLVRINLAIPGKLSDQQKELARQLAAAGL

SEQ ID NO: 139559 - DNA, 1113 bp, Oceanobacter sp. RED65; identical to SEQ ID NO: 117753
  CDS (1)..(1113): transl_table=11

SEQ ID NO: 139560 - protein, 370 aa, Oceanobacter sp. RED65; identical to SEQ ID NO: 117754

SEQ ID NO: 139561 - DNA, 1023 bp, Synechococcus sp. RS9916
  CDS (1)..(1023): transl_table=11
atggccggcacgggttaccgcgactacttcaaggtgctcggagtggagcgcggggccgatgccgacaccatcaagcgcgcatttcgcaaactggcgcggaaatatcaccccgacgtgaatccggggaacgccgcagctgaggccaagttcaaggaggtgagtgaggcctacgaggtgctctccgaccccgaaaagcggcgccgctacgagcagttcggtcagtactggaatcaggccggcggcgctgggccgggggctggagtcgatgttgatttcgggcgctacggcaatttcgacgatttcatcaacgacctgctcggacgtttcgggggaccgggtggtggttccgccggatttggcggtggctttccgggtggttttgccggtgcctctgggttcccaggcggtggctttgctggcggtccctttcccggtggtggtttcggaggcccgggtcgtgctggtgccgccccgcgtcaaccggccaaccttgatgctgaagcgaccgtcaaagtgtcgttcccggaggccttccgcggcggggaacgcaccctgtcggtgaacgacgaacgggtgcaagtgcgaattcctgctggggtgaagaacgggtcccgtttgcgcctcaagggcaagggcaaccttcagccaggcaccggacgtcgtggcgatttgtatctcaaccttgaggttcagccccatgaggtttggcgcctggatggtgatcaactgcgtgccgatttaccggtgtcggtggacgagttagccctggggggcaccgtcaccgtgatgactcccgatggagaagccgatgtctccatccccgccggtactccgccagggcgcagcctgcgtttgaagggcaagggctggccggggcgcaatggccgtggtgaccttcttctcaccctcagccttcagtggcctgagtcgtggagtgagcgtgagaaagacctgttgacccagttgcaacacaaccgatccagcgatccccgtcgcagctggcttcagtcggcccgtctctga

SEQ ID NO: 139562 - protein, 340 aa, Synechococcus sp. RS9916
MAGTGYRDYFKVLGVERGADADTIKRAFRKLARKYHPDVNPGNAAAEAKFKEVSEAYEVLSDPEKRRRYEQFGQYWNQAGGAGPGAGVDVDFGRYGNFDDFINDLLGRFGGPGGGSAGFGGGFPGGFAGASGFPGGGFAGGPFPGGGFGGPGRAGAAPRQPANLDAEATVKVSFPEAFRGGERTLSVNDERVQVRIPAGVKNGSRLRLKGKGNLQPGTGRRGDLYLNLEVQPHEVWRLDGDQLRADLPVSVDELALGGTVTVMTPDGEADVSIPAGTPPGRSLRLKGKGWPGRNGRGDLLLTLSLQWPESWSEREKDLLTQLQHNRSSDPRRSWLQSARL

SEQ ID NO: 139563 - DNA, 1134 bp, Synechococcus sp. RS9916; identical to SEQ ID NO: 117755
  CDS (1)..(1134): transl_table=11

SEQ ID NO: 139564 - protein, 377 aa, Synechococcus sp. RS9916; identical to SEQ ID NO: 117756

SEQ ID NO: 139565 - DNA, 1149 bp, Vibrio sp. Ex25; identical to SEQ ID NO: 117757
  CDS (1)..(1149): transl_table=11

SEQ ID NO: 139566 - protein, 382 aa, Vibrio sp. Ex25; identical to SEQ ID NO: 117758

SEQ ID NO: 139567 - DNA, 1140 bp, Alteromonadales bacterium TW-7; identical to SEQ ID NO: 117759
  CDS (1)..(1140): transl_table=11

SEQ ID NO: 139568 - protein, 379 aa, Alteromonadales bacterium TW-7; identical to SEQ ID NO: 117760

SEQ ID NO: 139569 - DNA, 1137 bp, marine gamma proteobacterium HTCC2143; identical to SEQ ID NO: 117761
  CDS (1)..(1137): transl_table=11

SEQ ID NO: 139570 - protein, 378 aa, marine gamma proteobacterium HTCC2143; identical to SEQ ID NO: 117762

SEQ ID NO: 139571 - DNA, 1026 bp, Medicago truncatula
  CDS (1)..(1026)
atgggtttggactactatgagattttggaggttgacaagaatgccacagacgatgaattgaagaaagcatatagaaaacttgccatgaaatggcaccctgacaagaatcctgacaataagaatgatgctgagactaaattcaaactcatatctgaagcatatgaggttctaagtgatccgcaaaagagagcaatttatgatcagtatggagaaagcaaccttaaaaatggaatgcctacagcaggtgacaatgcagctccatacttccaaactcatgatggcagaaggtttaggttcaatcccagaagtgcagatggcatatttgcagaagtttttggcttttcaagcccttatggaggaatgggaatgaggggtggcggctgcagaggcatgggcatgaggggtcagtcgtgggtgtccaggtcttttggcgatatttttggcaaagatgtatttggagaaagcagacaaacgagtcaagctccgagacgcaaggcacctcccattgaaaataaattgccttgcagccttgaggaactttataaaggcactaccaaaaagatgaagatctcaagggaaattgcatacgcaagcggcaaaactgtacctgtggaggaaatactaacaattgaaatccaaccaggctggaaaaagggaacaaaaatcactttcccggagaaaggaaatgagcaaccaaatgtcatcgctgcagatattgtatttgttattgacgagaaacctcacaatgtatttacaagacaaggtaatgatttggttatgacacaaaagatattacttgcagaaggagaagctctaagcagaagctacaccttccaacttactactttggatggacgaggtctgaccattgccatagacaatggaattgatccaacctatgaagaagtgattgccggtgaagggatgccaatttccaagaatccttcacagaggggtaatcttaggatcaaattcgacatcacattccctagcatggtagatgctgaaacagaaagccagaactaa

SEQ ID NO: 139572 - protein, 341 aa, Medicago truncatula
MGLDYYEILEVDKNATDDELKKAYRKLAMKWHPDKNPDNKNDAETKFKLISEAYEVLSDPQKRAIYDQYGESNLKNGMPTAGDNAAPYFQTHDGRRFRFNPRSADGIFAEVFGFSSPYGGMGMRGGGCRGMGMRGQSWVSRSFGDIFGKDVFGESRQTSQAPRRKAPPIENKLPCSLEELYKGTTKKMKISREIAYASGKTVPVEEILTIEIQPGWKKGTKITFPEKGNEQPNVIAADIVFVIDEKPHNVFTRQGNDLVMTQKILLAEGEALSRSYTFQLTTLDGRGLTIAIDNGIDPTYEEVIAGEGMPISKNPSQRGNLRIKFDITFPSMVDAETESQN

SEQ ID NO: 139573 - DNA, 1023 bp, Medicago truncatula; identical to SEQ ID NO: 117765
  CDS (1)..(1023)

SEQ ID NO: 139574 - protein, 340 aa, Medicago truncatula; identical to SEQ ID NO: 117766

SEQ ID NO: 139575 - DNA, 1242 bp, Aspergillus niger; identical to SEQ ID NO: 117767
  CDS (1)..(1242)

SEQ ID NO: 139576 - protein, 413 aa, Aspergillus niger; identical to SEQ ID NO: 117768

SEQ ID NO: 139577 - DNA, 1251 bp, Aspergillus niger
  CDS (1)..(1251)
atgcgaaccgtggccctcttcgtggtcctcaccatctgtctcatccaattggtcctcgccgcagaagactactacaagatcctgggactggataaatccgcctcggagaaggacattaaacgcgcatacagacatctgagcaagaagttccatccggataagaacccaggcgacgaaacggcccaaaagagattcgtcgaaatcgccgaagcctacgacgtcctctccacctcctcgacacgcaagatctacgaccaatacggccacgaaggactcgagcagcaccgtcaaggcggccgacaatcgcacgacccgttcgacctattctcgagattcttcggcggcggaggccacttcggccatgcgccgggacatcgcagaggaccggacatggagctccgggtcgggttaccgctaagggatttctacaatggacgggaattctcgttcggtgtggagaagcagcagatctgtgatgcctgtgagggcacagggtccgcggaccgggaggtagtcacctgcgataagtgttctggacgcggaatagtcatccagaagcatcagttagcgccgggcatgttccagcaggtgcagatgcattgtgataagtgtggcggacagggcaagatgatcaagaagccgtgtcccgtatgtcatggacatcgggtagttcgccgcgaggtcgagacgcacgcgactgtcgagccggggatggataaggggatgcggctggtatacgagaacgaggcggacgagagtccggactggatcgcgggcgacttggtgctgattcttgaggagaaggagccggagctgggcgacgccgaggaacatcgtacggatgggacgtttttccggcggaagggcaaggatttgttttggaaggaggcgctgtcgctgcgcgaggcgtggatgggcgagtggacgcgcaatatcacgcatttggatggtcatgtggttcagttggggaggaagcgtggggaggtcgtgcagccgttgtcggttgagacgatcaagggcgagggtatgccgcattactcggatgggcatcttcatgataatgaggatgaggatgaggagcctgggaacttgtatgtggagtatgccgttattctgccggatgagatggagagcggcatggagaaggacttctttgcgctgtgggagaaatggcgcaagaagaacggggttgatttgggtcgcgatagtggtcggcctatgcctcctccgccggtgaaggacgagttatga

SEQ ID NO: 139578 - protein, 416 aa, Aspergillus niger
MRTVALFVVLTICLIQLVLAAEDYYKILGLDKSASEKDIKRAYRHLSKKFHPDKNPGDETAQKRFVEIAEAYDVLSTSSTRKIYDQYGHEGLEQHRQGGRQSHDPFDLFSRFFGGGGHFGHAPGHRRGPDMELRVGLPLRDFYNGREFSFGVEKQQICDACEGTGSADREVVTCDKCSGRGIVIQKHQLAPGMFQQVQMHCDKCGGQGKMIKKPCPVCHGHRVVRREVETHATVEPGMDKGMRLVYENEADESPDWIAGDLVLILEEKEPELGDAEEHRTDGTFFRRKGKDLFWKEALSLREAWMGEWTRNITHLDGHVVQLGRKRGEVVQPLSVETIKGEGMPHYSDGHLHDNEDEDEEPGNLYVEYAVILPDEMESGMEKDFFALWEKWRKKNGVDLGRDSGRPMPPPPVKDEL

SEQ ID NO: 139579 - DNA, 1131 bp, Aspergillus niger
  CDS (1)..(1131)
atggttgcagaaacgaaactctacgatgccctctcgatcaggcccgatgcctcgcaggatgagatcaaaaaagcttaccgtaaggcagcattgaagtaccaccccgacaagaacaaggataatccgaccgcctcggagaagttcaaagaggtgtcccaggcatacgaggttctttccgaccctgagaaacgaaaagtttatgaccaattcggccttgaatatctccttcgtggcggtcccccgccgaccagcggtggtggtggtgccgacggccccaaccccttcgaaggtggcatgcccggcgggttctcgttcggcggcatgcctggcggcggcggcggcggtacccggacattccacttctcgactggtcccggcggcggcggcagcgggttccggttcagcaatgcagacgatatcttccggaactttgccaaaggcagcatgggcggtatgggtggtggtatgggcggcggtatggatgacgacgatatcttctcaatgctgggaggtgggcttggcggcggtcggaacttccggagtagtcgcgggcctagcggattcaagcaatcgtcgcagcgcgcgcccacgcccgagcccacggtcatggagaaggagctaccgctgacgctggaggagttgatgcgcggtacgaccaagaaggtgtctgtgaagagcaagacgttcgatgcgagcggcaagcgcaccgtgcaggatgtgacgcttgaagcgaatatcaagccgggtctgcgcaccggctcgaagatcaagtaccggggagtaggcgatcaggaggagggtggccgacaggacgtgcatttgattgtaactgagaaagaacaccccaacttcaaacgccaaggcgacaacctcgtgacaacagttgaactcagcctaaaagaagcgctcaccggctgggagcgcatcgtacgcacgattgacggcaaatccatccgagtgtccaagcccggcccgacacagcccggacatgaagagcggttccccggactgggcatgacgatctcgaagaagcccagcgagcgcggcgatttggtggttcgggtgaatgtgcggttcccggctagcctgagcgcgtcgcagaaggacattctcaaggacgttctcccgtga

SEQ ID NO: 139580 - protein, 376 aa, Aspergillus niger
MVAETKLYDALSIRPDASQDEIKKAYRKAALKYHPDKNKDNPTASEKFKEVSQAYEVLSDPEKRKVYDQFGLEYLLRGGPPPTSGGGGADGPNPFEGGMPGGFSFGGMPGGGGGGTRTFHFSTGPGGGGSGFRFSNADDIFRNFAKGSMGGMGGGMGGGMDDDDIFSMLGGGLGGGRNFRSSRGPSGFKQSSQRAPTPEPTVMEKELPLTLEELMRGTTKKVSVKSKTFDASGKRTVQDVTLEANIKPGLRTGSKIKYRGVGDQEEGGRQDVHLIVTEKEHPNFKRQGDNLVTTVELSLKEALTGWERIVRTIDGKSIRVSKPGPTQPGHEERFPGLGMTISKKPSERGDLVVRVNVRFPASLSASQKDILKDVLP

SEQ ID NO: 139581 - DNA, 1041 bp, Locusta migratoria
  CDS (1)..(1041)
atggggaaagattactacaaaatccttggagtccccaaaagtgcaacagatgatgaaattaaaaaagcttaccgcaaattggctctgaagtaccaccctgacaaaaataagagtccaggtgctgaagaaaggtttaaggaggtggctgaggcttatgaagttctaagtgataaaaagaagagagacgtgtatgacaaatttggtgaggaagggctgaagggaggtgcacctggtgcatctgaaggtggtggacctggattcacttacacattccatggtgatccacgtgcaacatttgcacagttctttggttcttcgagcccattccaagctttctttgaaatgagtgggcctggtggcaacagaatttttgatgacatggagttggatgacccatttacttcaatgggcatgaagtcgggtggtcctgcattcagatctcattctttcaattaccatcctggtggatcccctactcgcaacaaggacaaaatacaggatgctccaattgaacatgatttgtatgtaacattagaggacattctgcgaggttgtacaaagaaaatgaagatatcaaggaaggttctgcaacctgatggttctacacgtaaagaagataaagtgttaactataagtgtgaagcctggttggaaggcaggtacaaaaattactttccagcgtgaaggggaccaaggtcgaaacaaaattccagcagatattgttttcataataagagacaagccacatcctcttttcaagagagaaggaagtgatatccgcttcacgtcaaaaatcactttgaaacaggccttatgtggaactgttatccaggtacctacgttaacaggtgaaaaaattcctataaatctcacaaatgagattgtgaaaccgactacagtgaagcgcattcagggtcatggtctgccattcccaaaggaaccaagcagaaaaggggacttattggtttcgtttgatattaaatttcctgacgttctctcacaaagtgtcagagacattttatatgatactttaccaaattga

SEQ ID NO: 139582 - protein, 346 aa, Locusta migratoria
MGKDYYKILGVPKSATDDEIKKAYRKLALKYHPDKNKSPGAEERFKEVAEAYEVLSDKKKRDVYDKFGEEGLKGGAPGASEGGGPGFTYTFHGDPRATFAQFFGSSSPFQAFFEMSGPGGNRIFDDMELDDPFTSMGMKSGGPAFRSHSFNYHPGGSPTRNKDKIQDAPIEHDLYVTLEDILRGCTKKMKISRKVLQPDGSTRKEDKVLTISVKPGWKAGTKITFQREGDQGRNKIPADIVFIIRDKPHPLFKREGSDIRFTSKITLKQALCGTVIQVPTLTGEKIPINLTNEIVKPTTVKRIQGHGLPFPKEPSRKGDLLVSFDIKFPDVLSQSVRDILYDTLPN

SEQ ID NO: 139583 - DNA, 1272 bp, Medicago sativa; identical to SEQ ID NO: 63913
  CDS (1)..(1272)

SEQ ID NO: 139584 - protein, 423 aa, Medicago sativa; identical to SEQ ID NO: 63914

SEQ ID NO: 139585 - DNA, 1260 bp, Zea mays; identical to SEQ ID NO: 117773
  CDS (1)..(1260)

SEQ ID NO: 139586 - protein, 419 aa, Zea mays; identical to SEQ ID NO: 64118

SEQ ID NO: 139587 - DNA, 1497 bp, Pisum sativum
  CDS (1)..(1497)
atggcagttctttccctctctcttcttcctcctccttctactactcattcttgcttctgtgcctccggaatccatttccgttcccacaccaccaccaacaatttcctttccattcattctccttctccttttccttctactttctctaactctaattctaaattctccgctagaagaaaacgatttcacactgtttttgccgcttcttctgattattacgctactctcggagttcccaaatccgccaccgtcaaagatatcaaagccgcttatcgaaggttagctcgtcagtatcatcctgatgtgaacaaagagcctggtgcaacggataagtttaaagagattagtaatgcttatgaggtgctatcagatgacaaaaagagggctttgtatgatcaatatggcgaggcaggggttaagagctcagtgggaggaggatcaagtgcctatgcgacaaatccatttgacttatttgagacattttttgggtcaaatatgggcggctttggtggcatggatccaactggatttggcacacggcgtcgtagtacagttactaagggcgaagacatccggtatgatttctccttggagttttctgaggcaattttcggagcagagaaagaattcgagcttttccatttagaaacatgtgaagtctgtactggtactggtgcaaagttaggatccaagatgagagtatgttcaacttgtggtggcaggggtcaggtgatgaggaccgaacaaacaccttttgggttgttctcacaggtttcagtatgtccaaactgtggaggtgatggtgaagtcatatctgaaaattgccgtaaatgcagtggtgcaggacgcatacgggttaagaaaaatatgaaagttaaagttcctcccggggttagctcaggcagtatcttaagagtcactggagagggtgatgctggaccaagagggggtcctccaggagatctttacgtatatcttgacgtgcttgagataccaggaattcaaagagatgacattaatctccgctcaacaatatcaatcacttatctagatgctatattggggtctgtagtgaaggtaaagacagttgaaggcacttctgaactacaaatcccttctggtactcaacctggagatgtcctcgtccttgcaaagaagggtgtaccaaaattaaacagaccatcaatacgtggtgaccacttatttactgttaaagttacaataccaaaacgtatcagttcaaaggagcgtgaggtgcttgaagaacttgcttctctaggtggcacaagcagtcattcaagatcccgtcctaggacccaaccttccaccggaagtaaggaagctcctgcagctcaaagggccgaaagtccaacagaaacagtcacagaaaaaccagagaaatcagaagaagaagatgatgacttatggaacaaactaaagaacatggctgggtctgtggcaaatggagctctaaagtggtttaaagataatctctag

SEQ ID NO: 139588 - protein, 498 aa, Pisum sativum; identical to SEQ ID NO: 63916

SEQ ID NO: 139589 - DNA, 1170 bp, Ostreococcus tauri; identical to SEQ ID NO: 63917
  CDS (1)..(1170)

SEQ ID NO: 139590 - protein, 389 aa, Ostreococcus tauri; identical to SEQ ID NO: 63918

SEQ ID NO: 139591 - DNA, 1251 bp, Oryza sativa
  CDS (1)..(1251)
atgtttgggcgtgtaccgaggagtaacaacaccaagtactatgaggttcttggagttcctaaaactgcaagcaaggatgagctaaagaaggcataccggaaggctgccataaaaaaccatcctgacaagggaggggatccagaaaagtttaaagaattatcacaagcgtatgaggttctcactgatcctgagaagagagacatatatgaccaatatggggaggatgctcttaaggatggaatgggaggaggcagtgacttccataatccatttgacatatttgagcagtttttcgggggtggtgcctttggggggagtagctcaagagtacgcagacagagacgtggtgaagatgtggtgcatactttgaaggtgtctttagaagatgtgtataatggatctatgaagaaactatcattatcacgaaatattctgtgcccaaagtgcaaaggaaaagggaccaagtctgaggctccagcaacatgctatggttgtcatggtgtaggaatgaggaatataatgcgacagataggactaggcatgattcaacatatgcagactgtctgtcctgaatgcagaggatcaggtgagatcataagtgacagggataaatgcacaaactgcagagctagcaaagttattcaggagaaaaaggtgcttgaggttcatattgagaagggaatgcaacatggccaaaaaattgtattccaaggtgaagctgatgaagctcctgatacagtgacaggagatatagtatttatcttgcaagttaaggtacatccaagatttaagaggaaatatgatgacctgttcattgagcgcacaatctctttaactgaggcattgtgtgggttccaattcatcctcactcatctggacagtaggcagctcctaatcaaggcaaatcctggcgaaattattaaacctggtcaacacaaggccataaatgatgagggaatgccacaccatggccggcctttcatgaagggccgtctctttgtggaattcaatgttgagttccctgaatctggtgtactctcccgtgaccaatgccgggcacttgagatgatcctaccacctaaacctgggcaccaattatcagatatggacctggatcaatgtgaggaaactaccatgcatgatgtgaacatagaagaggagatgaggcgcaagcagtatcaaaggaagcaggaagcgtacgacgaagatgaggaggaggatgctccaagagtacagtgtgctcaacagtaa

SEQ ID NO: 139592 - protein, 416 aa, Oryza sativa
MFGRVPRSNNTKYYEVLGVPKTASKDELKKAYRKAAIKNHPDKGGDPEKFKELSQAYEVLTDPEKRDIYDQYGEDALKDGMGGGSDFHNPFDIFEQFFGGGAFGGSSSRVRRQRRGEDVVHTLKVSLEDVYNGSMKKLSLSRNILCPKCKGKGTKSEAPATCYGCHGVGMRNIMRQIGLGMIQHMQTVCPECRGSGEIISDRDKCTNCRASKVIQEKKVLEVHIEKGMQHGQKIVFQGEADEAPDTVTGDIVFILQVKVHPRFKRKYDDLFIERTISLTEALCGFQFILTHLDSRQLLIKANPGEIIKPGQHKAINDEGMPHHGRPFMKGRLFVEFNVEFPESGVLSRDQCRALEMILPPKPGHQLSDMDLDQCEETTMHDVNIEEEMRRKQYQRKQEAYDEDEEEDAPRVQCAQQ

SEQ ID NO: 139593 - DNA, 1257 bp, Allium porrum; identical to SEQ ID NO: 63921
  CDS (1)..(1257)

SEQ ID NO: 139594 - protein, 418 aa, Allium porrum; identical to SEQ ID NO: 63922

SEQ ID NO: 139595 - DNA, 1257 bp, Ricinus communis; identical to SEQ ID NO: 63923
  CDS (1)..(1257)

SEQ ID NO: 139596 - protein, 418 aa, Ricinus communis; identical to SEQ ID NO: 63924

SEQ ID NO: 139597 - DNA, 1263 bp, Triticum aestivum; identical to SEQ ID NO: 63925
  CDS (1)..(1263)

SEQ ID NO: 139598 - protein, 420 aa, Triticum aestivum; identical to SEQ ID NO: 63926

SEQ ID NO: 139599 - DNA, 1143 bp, Spiroplasma citri
  CDS (1)..(1143): transl_table=4
atggtaatgggaaaacgagactattatgaagtattgggcgttaatcgtaatgccactgatgatgaaattaaacgtgcttttcgacaattagcaaaaaaatatcaccctgatgtttcaaaagaaaaagatgccgaagcaaagtttaaggaaattaatgaagcttatgaagttttatctgttccaaataaacgccgtaattatgatcagtttggtcatgctggaactgaccctaacggctttggtggctttagtcatggttttagtagtactggagattttgaagatattttctctggtggctttggtggctttggtgatatttttgaaaatttttttggtggtggtaaaaaacgccgtggttttagtaatcagccaattaaaggggaaaatattgctgcccgtgtcacattaacgttaaaagaacaaatgtttgggaaaaaaataaacttagatttaaatattgataaaaaatgtgaaatgtgtgatggaactggggcaaaagaccctaaaaaagatattcatacttgtacaacttgtgatgggtatggttatgttaacctagaacaacgtagtctttttggtgtgattcaatcacaacaaccatgtcctgactgtaaagggcgaggaaaagtaattaccaataaatgttcaaaatgtaaagggcaaggaaattatcgaggtaaagaaacagtagaaattgatttaccaaaatcaatttatgaaaatcaacaattacgaattcaagaaaaaggaaactacggtttaaataatggccgacgaggggatatttatttagaaatttcagtaaaaccaaataaatattttaaacgagttaatgataaccttcatttaaatttaccagtatcttatttagatgctttactaggagctgaagttaaagttccaacttttgatgaggatgtttatttgaaattaccaccaaatacaaaaacaaatagtatttttaatattccaaatcatgggtttttcaagtcaccaacatcaaccaaacggggagacttaattgttaatgtgattgtaacaattccaacaaaattatcgccagaagaaaaaacaattttacaaaagttaagaaataatagttcgtttaaaattactgatgatttttatgaagatttataa

SEQ ID NO: 139600 - protein, 380 aa, Spiroplasma citri
MVMGKRDYYEVLGVNRNATDDEIKRAFRQLAKKYHPDVSKEKDAEAKFKEINEAYEVLSVPNKRRNYDQFGHAGTDPNGFGGFSHGFSSTGDFEDIFSGGFGGFGDIFENFFGGGKKRRGFSNQPIKGENIAARVTLTLKEQMFGKKINLDLNIDKKCEMCDGTGAKDPKKDIHTCTTCDGYGYVNLEQRSLFGVIQSQQPCPDCKGRGKVITNKCSKCKGQGNYRGKETVEIDLPKSIYENQQLRIQEKGNYGLNNGRRGDIYLEISVKPNKYFKRVNDNLHLNLPVSYLDALLGAEVKVPTFDEDVYLKLPPNTKTNSIFNIPNHGFFKSPTSTKRGDLIVNVIVTIPTKLSPEEKTILQKLRNNSSFKITDDFYEDL

SEQ ID NO: 139601 - DNA, 1020 bp, Liriomyza sativae; identical to SEQ ID NO: 117781
  CDS (1)..(1020)

SEQ ID NO: 139602 - protein, 339 aa, Liriomyza sativae; identical to SEQ ID NO: 117782

SEQ ID NO: 139603 - DNA, 1023 bp, Liriomyza huidobrensis; identical to SEQ ID NO: 117783
  CDS (1)..(1023)

SEQ ID NO: 139604 - protein, 340 aa, Liriomyza huidobrensis; identical to SEQ ID NO: 117784

SEQ ID NO: 139605 - DNA, 1044 bp, Medicago truncatula
  CDS (1)..(1044)
atgggtgtagactactacaaaatcttgcaggttgataagaatgccaacgacgatgaactcaagaaagcttataggaaacttgccatgaaatggcaccctgataaaaatccaaccaacaaaaaagatgctgaagctaagttcaagcaaatttctgaagcttatgaggtacttgctgatcctgaaaagaaagcaatctatgatcaatatggggaagaaggtttaaagggtcaagttcctcctcctgatgctggtagtggaggtggaactagtttctattccacaggagatatgcctgggtcgtttcggttcaatccgaggaatgcagatgacatttttgcagagttttttggattctcaagtccatttggtggcatgggtggaagaggtggtggtggtggtatgagatcaaggttctctggggggatgtttggtgatgatatgtttggatcttttggagaaggaggaggaatccatatgagtcaagctgcacctcggaaagctcctgcaattgagaacaagttgagctgcactcttgaggagatatatagaggaactacaaagaagatgaagatctctagagaaattgcagatgttagtggcaaaaccatgccagtggaagagatattgaccataaccgtgaagcctggttggaagaaggggacaaagatcaccttcccggagaagggtaacgaacagccaaatgtaaccgctgcagatcttatttttgtcatcgacgaaaggccacacagcgtcttcagtcgtgaagggaacgatttgattgtgactcaaaagatatctcttgcggaggccttaactggttacacagtgcacctcactacattggatggtagaaacttaagcataccaatcaacaatgttatccatcccaactatgaggaggttgttccaaaagaaggaatgccactccccaaggatccaacaaagaaaggaaacttgaggattaagtttaacattaagttccctactcggctcaccgatgaacagaaagcaggagttaggaaactcctggcttcctcggcctga

SEQ ID NO: 139606 - protein, 347 aa, Medicago truncatula
MGVDYYKILQVDKNANDDELKKAYRKLAMKWHPDKNPTNKKDAEAKFKQISEAYEVLADPEKKAIYDQYGEEGLKGQVPPPDAGSGGGTSFYSTGDMPGSFRFNPRNADDIFAEFFGFSSPFGGMGGRGGGGGMRSRFSGGMFGDDMFGSFGEGGGIHMSQAAPRKAPAIENKLSCTLEEIYRGTTKKMKISREIADVSGKTMPVEEILTITVKPGWKKGTKITFPEKGNEQPNVTAADLIFVIDERPHSVFSREGNDLIVTQKISLAEALTGYTVHLTTLDGRNLSIPINNVIHPNYEEVVPKEGMPLPKDPTKKGNLRIKFNIKFPTRLTDEQKAGVRKLLASSA

SEQ ID NO: 139607 - DNA, 1251 bp, Medicago truncatula; identical to SEQ ID NO: 117785
  CDS (1)..(1251)

SEQ ID NO: 139608 - protein, 416 aa, Medicago truncatula; identical to SEQ ID NO: 117786

SEQ ID NO: 139609 - DNA, 1209 bp, Acyrthosiphon pisum; identical to SEQ ID NO: 117787
  CDS (1)..(1209)

SEQ ID NO: 139610 - protein, 402 aa, Acyrthosiphon pisum; identical to SEQ ID NO: 117788

SEQ ID NO: 139611 - DNA, 1146 bp, Bifidobacterium breve
  CDS (1)..(1146): transl_table=11
gtggcagattattacgagacgctgggcatcgaccgcaacgcgagcgacgacgagatcaagaaggcgtaccgcaagctcagccgtaagtatcaccctgatatcgcgggaccggagttcgaggacaagttcaaggaagtgaacaacgcctacgatgtgctgtccaatccggataagcgccgtatgtatgattccggcgttgaccccaacgatccgaacgccggtgctggcggcttctccggcgcgggattcggcgatatgggagacgtattctccacgttctttggttccgcattcggtggcggctcacagggcccggtgccgcgcacacagcctggacgcgatgcgctggcttccgcttccatcgacttgaaaaccgccgtattcggcggcacggcgcacgtcaagatcaatacgttctccctgtgtcaggagtgcggcggctccggcgcacaaggcggcgcccagccggtcacttgcccggactgccatggacagggcttcatgcaaaaggtcgtgcgcactatgctcggccagatgatgacctccgctccctgcgagcgctgcgagggtcacggcaccatcatccagaatccatgcccgagctgcatgggtcacggccgcgttcgcaccacgcgtaatgtgggtgtcactgtgccggccggtatcaacgacaatgctcgactgcgcttggccaaccagggtgaagtcggtgagggcggcggcgctgccggcgatttgtacattgatattcgcatcaaggcagataagcagttcacccgcgacggcgatgacctgcattgctggattcaggttccgatgagctgggccgtgctcggacacgatctgtccattgatacgtttgacggcgagcagaccgtatccattccggcgggctgccagcctgaggatacggtgacgttgaagggtctgggcgttaccaatattcgcaataaggatgagcgcggcaatctggttgcccatgtgaacgtactgattcccaccaagctcagcgagtccgagcggggactgattgaacagttcgccgcctcgcatgattccgatgccacgcacgtctcccaggcttcccgtccgcaaaccggtcagaagaagggattctttagcaagttaaaggatgtcttgagctga

SEQ ID NO: 139612 - protein, 381 aa, Bifidobacterium breve
MADYYETLGIDRNASDDEIKKAYRKLSRKYHPDIAGPEFEDKFKEVNNAYDVLSNPDKRRMYDSGVDPNDPNAGAGGFSGAGFGDMGDVFSTFFGSAFGGGSQGPVPRTQPGRDALASASIDLKTAVFGGTAHVKINTFSLCQECGGSGAQGGAQPVTCPDCHGQGFMQKVVRTMLGQMMTSAPCERCEGHGTIIQNPCPSCMGHGRVRTTRNVGVTVPAGINDNARLRLANQGEVGEGGGAAGDLYIDIRIKADKQFTRDGDDLHCWIQVPMSWAVLGHDLSIDTFDGEQTVSIPAGCQPEDTVTLKGLGVTNIRNKDERGNLVAHVNVLIPTKLSESERGLIEQFAASHDSDATHVSQASRPQTGQKKGFFSKLKDVLS

SEQ ID NO: 139613 - DNA, 1251 bp, Aspergillus oryzae
  CDS (1)..(1251)
atgcgcctcgcttgccttttcctcgcgattgcactgtgcctagtgcagttggtgctggcggcagaagactattacaaaactcttggcttagacaaatcggcttcagaaagggatatcaaaagagcatatcgcacattgagcaagaaataccatcctgataagaatccaggcgacgaggacgcacgcgagaaatttgtcgaaatcgccgaggcatatgacgttctttcgacatccaccacgcgcaagatctacgatcagtatggacacgagggagtggagcagcatcgacagggaggcaatgcgggacgacaggcgcacgatcccttcgacctgttttcgcggtttttcggcggcggcggacacttcggacatgcgccggggcatcggaggggaccggacatggaattcaagattgggttgccgctacgcgatttctataatggcagggaggtcactattatgttagagaaacagcagatctgcgatgcgtgcgagggtacggggtcggcagatcgtgaggttgtcacctgtgatcggtgcgcgggacatggaagggtcatccagaagcatatgctggcacccggaatgtttcagcaagtgcagatgacatgcgataagtgtggtgggcaagggaagatgatcaagaagccttgccctgtctgtcatggacatcgcgtcgtgcgcaaggaggtggaaacaacgtttacggtagagcctggaatggggaagggatcacggattgttttcgaaaacgaggccgacgagagtcccgactatattgctggcgacctggtgctgattttagatgagcggcaacccgaggcgagcgattaccagtggcagacggacggcacctttttccgaaggaagggtaaggacctattctggagggaagcgctatcattgcgggaggcatggatgggtgagtggactcgcaatatcacccatttggacggacacaccgtccagcttggacgcaaacgcggtgaggtcgtgcaacccttgtctgtggaaacagttaagggtgagggcatgccattctactcggacggtcatctccacgaaagccacgaccaagatgaggagccgggcaatctgtacgtggagtatagtgtgatccttcctgaccagatggagagcggaatggagaaggagttctttgcgctgtgggagaagtggcgcaagaagaacggggttaatctggacaaggagagcggtcggcctgaaccatcagtgaaggatgagttatga

SEQ ID NO: 139614 - protein, 416 aa, Aspergillus oryzae
MRLACLFLAIALCLVQLVLAAEDYYKTLGLDKSASERDIKRAYRTLSKKYHPDKNPGDEDAREKFVEIAEAYDVLSTSTTRKIYDQYGHEGVEQHRQGGNAGRQAHDPFDLFSRFFGGGGHFGHAPGHRRGPDMEFKIGLPLRDFYNGREVTIMLEKQQICDACEGTGSADREVVTCDRCAGHGRVIQKHMLAPGMFQQVQMTCDKCGGQGKMIKKPCPVCHGHRVVRKEVETTFTVEPGMGKGSRIVFENEADESPDYIAGDLVLILDERQPEASDYQWQTDGTFFRRKGKDLFWREALSLREAWMGEWTRNITHLDGHTVQLGRKRGEVVQPLSVETVKGEGMPFYSDGHLHESHDQDEEPGNLYVEYSVILPDQMESGMEKEFFALWEKWRKKNGVNLDKESGRPEPSVKDEL

SEQ ID NO: 139615 - DNA, 1113 bp, Aspergillus oryzae
  CDS (1)..(1113)
atggttgcagaaactaagctgtacgattccttgggtatcaaacccgaagcatcccaggacgaaataaaaaaagcataccggaagtgtgcattgaaatatcatccggataagaacaaggataatccgaccgcatcggagaagttcaaagaggtatcgcaagcctacgaagttctgtccgatcccgaaaagcgcaagatatatgaccaattcggcctcgactatctaatgcggggcggtccagcccctcctccgcctggtagtggcgctggcggtgctggtggaagtccgtttgatggtggaatgccaggcggcttttcattcggaggcatgcctggaggaggtggtgctcggaccttccgtttttcgactggccccggcggtggcagtggcttccagttcagctccgcagatgatatcttccgaaacttcgctaagggtgggggtggtggcatggatcacgacgatctatttgatatcctgggtgggatgggaggcggcggtggcggcgccggccgtagcttccgctcaagccgtggccccagtgccttccagcaatctcagcgcgcacctacccccgaaccgaccgtagttgaaaaggagttgccattgacactggaagagttgatgcgcggaacgacgaagcaggtgaccgtgaagagcaagactttcgacacgagcggaaagcgcactgtccaagatgtaactcttgaagcgaacattaagccgggcttgcggaccggttcgaagatcaaatacagaggtgtgggcgatcaagaagaaggtggaagacaggatgtccatcttatcgtgacagagaaagaacatcccaacttcaaacgccagggcgacaacctcattacaactgttgaaatcagcctaaaagaggctctcaccggctgggaccggatcgtgcgcacaatcgatggaaaatcgatccgggtagccaagcccggtccgacacaacccggatacgaagaaaggttccccggccagggtatgacaatatcgaagaagccaagcgagcgaggagatctgatagtccacgtgaacgtccggttcccggccagcttgacagcctctcagaaagatattcttaaagacgtgcttccgtaa

SEQ ID NO: 139616 - protein, 370 aa, Aspergillus oryzae
MVAETKLYDSLGIKPEASQDEIKKAYRKCALKYHPDKNKDNPTASEKFKEVSQAYEVLSDPEKRKIYDQFGLDYLMRGGPAPPPPGSGAGGAGGSPFDGGMPGGFSFGGMPGGGGARTFRFSTGPGGGSGFQFSSADDIFRNFAKGGGGGMDHDDLFDILGGMGGGGGGAGRSFRSSRGPSAFQQSQRAPTPEPTVVEKELPLTLEELMRGTTKQVTVKSKTFDTSGKRTVQDVTLEANIKPGLRTGSKIKYRGVGDQEEGGRQDVHLIVTEKEHPNFKRQGDNLITTVEISLKEALTGWDRIVRTIDGKSIRVAKPGPTQPGYEERFPGQGMTISKKPSERGDLIVHVNVRFPASLTASQKDILKDVLP

SEQ ID NO: 139617 - DNA, 1320 bp, Aspergillus oryzae; identical to SEQ ID NO: 117789
  CDS (1)..(1320)

SEQ ID NO: 139618 - protein, 439 aa, Aspergillus oryzae; identical to SEQ ID NO: 117790

SEQ ID NO: 139619 - DNA, 1614 bp, Aspergillus oryzae; identical to SEQ ID NO: 63929
  CDS (1)..(1614)

SEQ ID NO: 139620 - protein, 537 aa, Aspergillus oryzae; identical to SEQ ID NO: 63930

SEQ ID NO: 139621 - DNA, 1242 bp, Aspergillus oryzae; identical to SEQ ID NO: 117791
  CDS (1)..(1242)

SEQ ID NO: 139622 - protein, 413 aa, Aspergillus oryzae; identical to SEQ ID NO: 117792

SEQ ID NO: 139623 - DNA, 1332 bp, Solanum tuberosum; identical to SEQ ID NO: 117793
  CDS (1)..(1332)

SEQ ID NO: 139624 - protein, 443 aa, Solanum tuberosum; identical to SEQ ID NO: 63932

SEQ ID NO: 139625 - DNA, 1143 bp, Gluconobacter oxydans
  CDS (1)..(1143): transl_table=11
atggccaccagaatcgactattacgaatcccttgaagtctcccgcatggcctcgcaggacgagctgaagaaagccttccgcaaacaggccatgcggtaccatcccgaccgtaatccgggtgatgacgccgccgagcagaagttcaaggaaatcaatgaagcctatgacgtcctgaaggacgagcagaagcgggctgcctatgaccgctacggccatgacgcctttgaaggtggcatgggcggaatgggcggcggcttcggtggtggctttgccggtgcaggcggtctgggcgacatcttcgaccagatgttcggcgacatgatggggggccgtcgtgatggtggacgccggaccggggcggatgtccaggttcaggtcgagattacgctgatggaagccttcacgggcgtgacgaaggacgtcgaagtccggacgcgcgtgacctgtgaagcctgtcatgggtcgggttcggccgatccgaaggctggcagcagcacctgccccacctgtcatggtgcgggcaaggttcgtgcgcagcagggcttcttcctcgtcgagcgcccctgcccgacctgtcacggttcgggacgcaccgtcaccaatccgtgcaaggtctgtcacggtacgggcacggaagcgaagacggaaaccatcagcatcgacatcccggctggcgtcgaggatggcacccgcatccgcatggctggcaagggcgaggccggtggcgaaggcgtgcagccgggtgatctgtatgtccacatctccgtcctgtcgcatgacattttccagcgcgacggggcgaacatctactgccgcgttccgctgcgcatgacgcaggcggctcttggtacggaagtcgaggttccggttgtggatggtggccgcagcaaggtccgcatccctgccggcacacagacgggcgagacgttccgcctgcgcggcgagggcttctcggtcctgcgctcctcggcccgtggagacatgtacatccaggtttcggtcgaaacgccgagccatctgacgaagcgccagcgcgaacttctcgaagaattcgagaaggaagccggggacgaccacgctaagggcagtcccgaaaacagcggcttcttcgccaaggtccgcgacttcctcgaaggccgctga

SEQ ID NO: 139626 - protein, 380 aa, Gluconobacter oxydans
MATRIDYYESLEVSRMASQDELKKAFRKQAMRYHPDRNPGDDAAEQKFKEINEAYDVLKDEQKRAAYDRYGHDAFEGGMGGMGGGFGGGFAGAGGLGDIFDQMFGDMMGGRRDGGRRTGADVQVQVEITLMEAFTGVTKDVEVRTRVTCEACHGSGSADPKAGSSTCPTCHGAGKVRAQQGFFLVERPCPTCHGSGRTVTNPCKVCHGTGTEAKTETISIDIPAGVEDGTRIRMAGKGEAGGEGVQPGDLYVHISVLSHDIFQRDGANIYCRVPLRMTQAALGTEVEVPVVDGGRSKVRIPAGTQTGETFRLRGEGFSVLRSSARGDMYIQVSVETPSHLTKRQRELLEEFEKEAGDDHAKGSPENSGFFAKVRDFLEGR

SEQ ID NO: 139627 - DNA, 1260 bp, Solanum tuberosum
  CDS (1)..(1260)
atgtttgggagggcaccagagaagagcgacaacacgaagtactatgagatcttaggtgtccctaagactgctgcacaggaagatctcaagaaagcttaccgtaaagctgctattaagaatcatcctgataagggaggtgatcctgaaaagtttaaagagcttgcacaagcttatgaggttctgagtgatcccgagaagcgtgagatatatgatcagtatggagaagatgctctcaaggaaggaatgggtggtggaggtggtggacacgacccatttgatattttctcatctttctttggtggcagcccatttggtggaggtggtggaagcagcagaggaagaagacaaagaagaggagaggatgttgtccatcctctcaaagtttctctggaggatctgtacaatggaacatcaaagaagctgtcactatctcgcaatgtattgtgctcgaagtgcaaggggaaaggatctaaatcaggtgcttcaatgaagtgttctggctgtcaagggtctgggatgaaagtcactattagacaacttggcccatccatgatccagcagatgcagcacccttgcaacgagtgtaagggtactggtgagatgatcaatgataaagataggtgtgggcagtgtaaaggtgagaaagttgtgcaggagaagaaggtgttggaagttgttgtcgagaagggtatgcagaacggacagaagataacattcccgggcgaagctgatgaagcacctgataccgtcactggggacatagtttttgtcttgcaacagaaggaacatcccaagtttaagcgaaagggagatgatctctttgtagagcacaccttgagcttaaccgaggccctgtgtggtttccagttcatcttgactcacctagataataggcagctgatcatcaagccccaagccggagaagttgtcaagcctgatcaatttaaagccataaatgatgaaggaatgcctatgtaccaaaggccatttatgagaggaaaactatacattcactttactgtagaattccccgacacattatcccccgagcaatgcaagaaccttgaagcagtattgccaccaaaaccgaaaacacaaatgactgatatggaattggacgagtgcgaggagaccaccttacatgatgttaacatcgaagaggagatgcggaggaagcagcaacaggcccaagaggcatatgacgaagatgatgaagacatgcatggaggtgcacagagagttcagtgtgcacaacagtaa

SEQ ID NO: 139628 - protein, 419 aa, Solanum tuberosum
MFGRAPEKSDNTKYYEILGVPKTAAQEDLKKAYRKAAIKNHPDKGGDPEKFKELAQAYEVLSDPEKREIYDQYGEDALKEGMGGGGGGHDPFDIFSSFFGGSPFGGGGGSSRGRRQRRGEDVVHPLKVSLEDLYNGTSKKLSLSRNVLCSKCKGKGSKSGASMKCSGCQGSGMKVTIRQLGPSMIQQMQHPCNECKGTGEMINDKDRCGQCKGEKVVQEKKVLEVVVEKGMQNGQKITFPGEADEAPDTVTGDIVFVLQQKEHPKFKRKGDDLFVEHTLSLTEALCGFQFILTHLDNRQLIIKPQAGEVVKPDQFKAINDEGMPMYQRPFMRGKLYIHFTVEFPDTLSPEQCKNLEAVLPPKPKTQMTDMELDECEETTLHDVNIEEEMRRKQQQAQEAYDEDDEDMHGGAQRVQCAQQ

SEQ ID NO: 139629 - DNA, 930 bp, Oenococcus oeni
  CDS (1)..(930): transl_table=11
atggataatgaagaatattacaaaattcttggcgtggcaaagagtgccagtcaggatgaaataaaacatgcttaccggaagatgtcgaagaaatatcatccggatttgaatcatcagccaggagcggaagacaagtataagcaagttcaagaagcttacgaaactttgggcgatcctcaaaaacgagcggcttacgaccaatacggcaaggctggtgcaaatgccaacaatggccaaggtggttttggtggtttccaacagagtggattcaattttaatggtcaggattttggtgattttagtgatattttcagccagatgtttggaggatcttttaatccaaacgcaccaagaaaaggccgcgatttacaatatcgaattaatttaactttcgaagaggctgtttttggcaaagaaaccgaaatcaagtatgttcgtcaggaaagcggtgccaattccaaagaacacaccgttaaggtcacaattccagccggtgttgaaactggtcagcaaatgcgtttggctggtcaaggagaagctggaacgcacggtggcccttatggtgatttatatgttgaatttattgttggcaagtccaaggatggttttgaacgtcagggagcaaacatttatcttgaagaaccgattaattttgtgcaagctgctcttggtgacaagatcaaggttaaaaccgttcacggtgatgtcgaactaacaattccggccggaactcagacagatactgaattcaggttgcgaggaaaaggcgctccgtatgtaaattcttcgcgaattggggacgaatatgttaaggtcattgtccaagtaccaaagagactaaatgagaaagaaaagaaggcattgaaaacttatgccgatctgcgtggagaaaatgttaatccacaaaaaagaaggggactgtttggctaa

SEQ ID NO: 139630 - protein, 309 aa, Oenococcus oeni
MDNEEYYKILGVAKSASQDEIKHAYRKMSKKYHPDLNHQPGAEDKYKQVQEAYETLGDPQKRAAYDQYGKAGANANNGQGGFGGFQQSGFNFNGQDFGDFSDIFSQMFGGSFNPNAPRKGRDLQYRINLTFEEAVFGKETEIKYVRQESGANSKEHTVKVTIPAGVETGQQMRLAGQGEAGTHGGPYGDLYVEFIVGKSKDGFERQGANIYLEEPINFVQAALGDKIKVKTVHGDVELTIPAGTQTDTEFRLRGKGAPYVNSSRIGDEYVKVIVQVPKRLNEKEKKALKTYADLRGENVNPQKRRGLFG

SEQ ID NO: 139631 - DNA, 1134 bp, Lactobacillus sanfranciscensis; identical to SEQ ID NO: 63933
  CDS (1)..(1134): transl_table=11

SEQ ID NO: 139632 - protein, 377 aa, Lactobacillus sanfranciscensis; identical to SEQ ID NO: 63934

SEQ ID NO: 139633 - DNA, 1125 bp, Pseudomonas putida; identical to SEQ ID NO: 117797
  CDS (1)..(1125): transl_table=11

SEQ ID NO: 139634 - protein, 374 aa, Pseudomonas putida; identical to SEQ ID NO: 117798

SEQ ID NO: 139635 - DNA, 1014 bp, Bifidobacterium breve
  CDS (1)..(1014): transl_table=11
atggctgaaaacgaatggctcagtaaagacttctacaaagtccttggtgtctccaaggacgcttcggacgacgacatcaaaaaggcgtaccgcaagctcgcccgcaagtaccaccctgacgtcaacaagaccaaggaagccgaggagaagttcaaggacatctccgaagcttacgacgtgctgagcaagaaagaagatcgccaaaagtacgacgcgattcgccagttcggtatgggcggcgcccgctttgccggtggttccggtgccggcggcttcgacgcttccggcttctccgacatcttcggctccatgtttggccagggtgccggtggcaacggttcgcgtatccgcttctccacttcgggcggcggcaaccccaatctcaacgacatcttctcgatgttcggtggggccgcggggcagggtgctggcggctacggccagcaggcatacggtaacgccggtggctacggctatgaggaagccccgcgccccgaaaacggcgaggaccgcaactccaagatcagcttgacccttcgtcaggcggtcaagggtgcgaccgtgtccctgtccgtggatggcaagaagttcaaggctcatgtgcccgccggcgtcaaggacggtcagaagatcaagctggccggcaagggcaagccgggcatcaacggcggcaaggccggcgatttgtacctgcacgtcaccgtcaatccggattccacgttctcgatgcgcggtcgtgacatcgtcatgaacctgcccgtcaccgtaggccaggccgtggccggcggcaaggtcgacgccaaggacatcgacgggaacctggttaccttcaaggtgcccgcgggctccagctccggtgccgaggtcaagttggccgggctgggcgtcaagcgtggcaaccagccgggcgacctgatcggccgtgtgcagatcatggtccctgccaagccgggtctggcggtcaagcacgccgccaaagaattcgacgaaaaagccggcgactatctcaactaa

SEQ ID NO: 139636 - protein, 337 aa, Bifidobacterium breve
MAENEWLSKDFYKVLGVSKDASDDDIKKAYRKLARKYHPDVNKTKEAEEKFKDISEAYDVLSKKEDRQKYDAIRQFGMGGARFAGGSGAGGFDASGFSDIFGSMFGQGAGGNGSRIRFSTSGGGNPNLNDIFSMFGGAAGQGAGGYGQQAYGNAGGYGYEEAPRPENGEDRNSKISLTLRQAVKGATVSLSVDGKKFKAHVPAGVKDGQKIKLAGKGKPGINGGKAGDLYLHVTVNPDSTFSMRGRDIVMNLPVTVGQAVAGGKVDAKDIDGNLVTFKVPAGSSSGAEVKLAGLGVKRGNQPGDLIGRVQIMVPAKPGLAVKHAAKEFDEKAGDYLN

SEQ ID NO: 139637 - DNA, 1041 bp, Chlamydomonas reinhardtii
  CDS (1)..(1041)
atgacgcggggcttggactattacgaggtcatgggccttacaaggagtgccaatgacattgatattcgccgagcctaccgccggctggcgcttaagtatcacccagatatcaacaaggatggggcggctggcgatgagttcctccgcatttgcgaggcgtacgaggtgctctgcgatcccaagacgaaggggttttatgacctatacggagaggacgcactaaaggacgggatatccgacggcaacggaggtctgaagggccccatgtatcggttcaacccagaggagagccccaaggctgtgtttgagcgcttcttcggcaccgccaacccctacgaggcactggaggcgctgtccaaccagttcgagtccatgacctcggaggaggcgcccgcgcgcggcaagaacaaagtgtacccactggagcttacgctggaggagatcttccacggctgcctgaagaaggtggcgcacaaacgcaaggtgcttctgttcagcggcgagtacgtggaggaggagcgccagctcaccgtggacgtcaagccgggcctgcctactggcacgcgcttcgtgttcgagggggaagggaacaagacgcccaagaaggagcccgggccggttgtgttcgtgctcaagcctaagccgcacccgcgcttcgtgcgccgcggctccgacctggtgcacaaggtgacgctgccgctgcaccacgcgctcatcggcaccacgcttgatatccgcaccctggatgaccgcgacctcaaggtgcccatctccgacatcatgcggcccggctcctcgctcacggtgcccggcgagggcatgccactgcccgccacgccctcggcgcgcggtaacttggtcattgagatcgacctgctgttcccgacgcacctgacggagacgcaaaagatgctgctacgcagcgcgttcttccttccgccgcccacggaacagaacgaggagaccaagaaggcgctgcgggactacgaggcggcgttcaagcacgatctcaagggctgggcccccgtgttcaagcggtag

SEQ ID NO: 139638 - protein, 346 aa, Chlamydomonas reinhardtii
MTRGLDYYEVMGLTRSANDIDIRRAYRRLALKYHPDINKDGAAGDEFLRICEAYEVLCDPKTKGFYDLYGEDALKDGISDGNGGLKGPMYRFNPEESPKAVFERFFGTANPYEALEALSNQFESMTSEEAPARGKNKVYPLELTLEEIFHGCLKKVAHKRKVLLFSGEYVEEERQLTVDVKPGLPTGTRFVFEGEGNKTPKKEPGPVVFVLKPKPHPRFVRRGSDLVHKVTLPLHHALIGTTLDIRTLDDRDLKVPISDIMRPGSSLTVPGEGMPLPATPSARGNLVIEIDLLFPTHLTETQKMLLRSAFFLPPPTEQNEETKKALRDYEAAFKHDLKGWAPVFKR

SEQ ID NO: 139639 - DNA, 1257 bp, Chlamydomonas reinhardtii; identical to SEQ ID NO: 63935
  CDS (1)..(1257)

SEQ ID NO: 139640 - protein, 418 aa, Chlamydomonas reinhardtii; identical to SEQ ID NO: 63936

SEQ ID NO: 139641 - DNA, 918 bp, Nicotiana tabacum
  CDS (1)..(918)
atgggacttgattactatgacgtactgaaagtatctcggaatgcaagtgaagaagatttaaagagatcgtataagcgattagcgatgaaatggcatccagataagaacagtcagaacaaaaaggaagctgaagcgaaattcaagcagatttctgaagcgtatgatgtgcttagtgatcctcagaagcgtcagatctatgacgtgtacggtgatgatgcattgaaatccggtcaatttgcttcggcgtcgccgactagtgctggtagtaacggcagaggatttaggttcaatacgcgtgacgcggaggctattttcgctgagtttttcggtggatcggatagtaattccgctgccggagtaggtcggaaggcggcaccggtggagaataaactgccgtgtagcttggaggagctttacaaaggatctagaaggaaaatgaagatctcacggattcttcttgatgactctggtaagcctacaactgttgaagaggtcctagcgatacacatcaaaccaggttggaagaaaggcacaaaaatcactttcccagagaaagggaactatgaacctggagctactcctggtgatcttatttttgtgatagatgaaaagccacatgctgtcttcaagagggatggaaatgatctagtgatcaatcagaaaatatctttactagatgctcttactgggaaaactataagcttgatcactttggatggacgggaactcacaataccaatcacagatgttgttaaaccaggacatgagcatataatcccaaatgaaggaatgccaatatcaaaggaacgtggcaagaaaggaaatttgaagatcaagtttgacattaaattcccatctaggctaagtgcagatcagaaatctgatatcaggagggtactgtgcaggaactctgactaa

SEQ ID NO: 139642 - protein, 305 aa, Nicotiana tabacum
MGLDYYDVLKVSRNASEEDLKRSYKRLAMKWHPDKNSQNKKEAEAKFKQISEAYDVLSDPQKRQIYDVYGDDALKSGQFASASPTSAGSNGRGFRFNTRDAEAIFAEFFGGSDSNSAAGVGRKAAPVENKLPCSLEELYKGSRRKMKISRILLDDSGKPTTVEEVLAIHIKPGWKKGTKITFPEKGNYEPGATPGDLIFVIDEKPHAVFKRDGNDLVINQKISLLDALTGKTISLITLDGRELTIPITDVVKPGHEHIIPNEGMPISKERGKKGNLKIKFDIKFPSRLSADQKSDIRRVLCRNSD

SEQ ID NO: 139643 - DNA, 918 bp, Nicotiana tabacum
  CDS (1)..(918)
atgggacttgattactataacgtactaaaagtatctcggaatgcaagtgaagaagatttaaagagatcgtacaagcgattagctatgaaatggcatccagataagaacagtcagaacaaaaaagaagcagaagcaaaattcaagcagatttctgaagcgtatgatgtgcttagtgatcctcagaagcgtcagatctatgacgtgtacggtgatgatgcattgaaatccggtcaatttgcctcggcgtcgccgactagtgctggtagtaacgccagagggtttaggttcaatacgcgtgatgcggaggctatttttgctgagtttttcggtggatcgggtagtaattccggtgccggagtcggtcggaaggcggcgccggtggagaataaactgccgtgtagcttggaggagctttacaaaggttctagaagaaaaatgaagatctcacggattcttctggatgactctggtaagcctacaactgttgaagaggtcttagcgatacacatcaagcctggttggaagaaaggcacaaaaatcactttcccagagaaaggaaactatgagcctggagctactcctggtgatcttatttttgtgatagatgaaaagccgcatgctgtcttcaagagggatggaaatgatctggagatcaatcagaaaatttctttactagatgctcttactgggaaaactataagcttgatcactttggatggacgggaactcacaataccaatcacagatattgttaaaccaggacatgagcatataatcccaaatgaaggaatgccaatatcaaaggaacgtggcaagaaaggaaatttgaagatcaagtttgacattaaattcccatcaaggctaagtgcagatcagaaatctgatatcaggagggtactgtgcaggagcgctgactaa

SEQ ID NO: 139644 - protein, 305 aa, Nicotiana tabacum
MGLDYYNVLKVSRNASEEDLKRSYKRLAMKWHPDKNSQNKKEAEAKFKQISEAYDVLSDPQKRQIYDVYGDDALKSGQFASASPTSAGSNARGFRFNTRDAEAIFAEFFGGSGSNSGAGVGRKAAPVENKLPCSLEELYKGSRRKMKISRILLDDSGKPTTVEEVLAIHIKPGWKKGTKITFPEKGNYEPGATPGDLIFVIDEKPHAVFKRDGNDLEINQKISLLDALTGKTISLITLDGRELTIPITDIVKPGHEHIIPNEGMPISKERGKKGNLKIKFDIKFPSRLSADQKSDIRRVLCRSAD

SEQ ID NO: 139645 - DNA, 921 bp, Nicotiana tabacum
  CDS (1)..(921)
atgggcgttgattactacaaaatactcaaagtgtcacgcaatgcgagtgaagaagatttgaaaaaatcgtacaagcgattggcgatgaaatggcatccggataagaacagtgagaaagaagcagaagcgaaattcaagcagatatcggaggcctatgatgtgctaagtgatccacagaagcgtcagatctatgatatatacggcgatgaggcgttgaaatcgggtcaattcgatccctcgtcacctatgaatggtaatgggagaggatttaagttcgattcgcgtgatgcggaagatatttttgcggaattttttggtggatcggatgggtatagtaggagtcctactggtggtactgtacggattaggaagccggcgccggtggagaacaagttgccatgtagcttggaggaattgtacaagggttctaagaggaagatgaagatttcaaggattgttcttgatgtcactggtaagcctacaacaattgaagaggtcttggcaatacacattaaacctggttggaagaaaggcacaaaaatcacttttccagagaaagggaaccatgaacctggagctgcacctggtgatcttatttttgtaatcgatgaaaagccacatgatgtcttcaagagagatggaaatgatctagtgatcaatcagaaaatctcattagtagatgctctctctgggaagattatcaacttggctactttggatggaagggaactcacgataccaatcacagatgttgttaagccaggacatgagcagataatcgcagatgaaggaatgccaatatcaaaagaacccgggaagaaaggaaatttgaggatcaagtttgaggttaagttcccgtcaaggcttagttcagatcagaaattggatatcagaagagtgctgggcaggactgttgactaa

SEQ ID NO: 139646 - protein, 306 aa, Nicotiana tabacum
MGVDYYKILKVSRNASEEDLKKSYKRLAMKWHPDKNSEKEAEAKFKQISEAYDVLSDPQKRQIYDIYGDEALKSGQFDPSSPMNGNGRGFKFDSRDAEDIFAEFFGGSDGYSRSPTGGTVRIRKPAPVENKLPCSLEELYKGSKRKMKISRIVLDVTGKPTTIEEVLAIHIKPGWKKGTKITFPEKGNHEPGAAPGDLIFVIDEKPHDVFKRDGNDLVINQKISLVDALSGKIINLATLDGRELTIPITDVVKPGHEQIIADEGMPISKEPGKKGNLRIKFEVKFPSRLSSDQKLDIRRVLGRTVD

SEQ ID NO: 139647 - DNA, 1329 bp, Arabidopsis thaliana; identical to SEQ ID NO: 117799
  CDS (1)..(1329)

SEQ ID NO: 139648 - protein, 442 aa, Arabidopsis thaliana; identical to SEQ ID NO: 117800

SEQ ID NO: 139649 - DNA, 1059 bp, Drosophila simulans
  CDS (1)..(1059)
atgggcaaagacttctacaagattctgggcatcgaccgcaaggccagcgacgatgagatcaagaaggcctaccgcaaactggcactcaaataccatcccgacaagaacaagagcccgcaggcggaggagcgcttcaaggagatcgccgaggcgtacgaggtgctgtccgacaaaaagaagcgcgacatcttcgacaagtacggtgaggatggactgaagggcggacagccgggaccagatggcggcggtcagccgggagcgtacacttaccagttccacggcgatcccagggccacctttgcccagttctttggatcgtcggatccgtttggcgtcttctttaccggcggcgataacatgtttgctggtcagggtcagggcggcaataccaacgagatcttcatgaacattggcggcgacgatatgttttcctccttccccggcaatcctatggctggagccttccgttcgcagtcattcaatgcacaggcacccagtcgcaagcgccagcagcaacaggatccgcccatcgagcatgatctgtacgtgtcgctggaggaagtggacaagggatgcataaagaagatgaaaatctcacgcatggccaccggaagcaatggaccgttcaaggaggagaaggtgctgagaatcacagtcaagccgggctggaaggccggcaccaagattaccttcccccaagagggtgattcggcgccaaacaagacgccagccgacatcgtcttcatcatacgcgacaagccgcatgcgctgttcaaacgcgagggcatcgatctaaagtacacagcccagatcagtctgaagcaggccttgtgcggagcactggtcagtgtgcccacgctgcagggcagcaggatacaggtgaacccgaaccacgagatcatcaagcccaccacaacgcgccggatcaacggactgggtctgcccgtgcccaaggagccatcgaggcgcggcgatctgatcgtgtccttcgacatcaagtttcccgacacactggcacccagcctgcagaatcagctgtccgagctgctgcccaactag

SEQ ID NO: 139650 - protein, 352 aa, Drosophila simulans
MGKDFYKILGIDRKASDDEIKKAYRKLALKYHPDKNKSPQAEERFKEIAEAYEVLSDKKKRDIFDKYGEDGLKGGQPGPDGGGQPGAYTYQFHGDPRATFAQFFGSSDPFGVFFTGGDNMFAGQGQGGNTNEIFMNIGGDDMFSSFPGNPMAGAFRSQSFNAQAPSRKRQQQQDPPIEHDLYVSLEEVDKGCIKKMKISRMATGSNGPFKEEKVLRITVKPGWKAGTKITFPQEGDSAPNKTPADIVFIIRDKPHALFKREGIDLKYTAQISLKQALCGALVSVPTLQGSRIQVNPNHEIIKPTTTRRINGLGLPVPKEPSRRGDLIVSFDIKFPDTLAPSLQNQLSELLPN

SEQ ID NO: 139651 - DNA, 1005 bp, Drosophila melanogaster
  CDS (1)..(1005)
atgggcaaagacttctacaagattctgggcctcgagcgcaaggccagcgacgatgagatcaagaaggcctaccgcaaactggcactcaaataccatcccgacaagaacaagagcccacaggcggaggagcgcttcaaggagatcgccgaggcgtacgaggtgctgtcggacaaaaagaagcgcgacatcttcgacaattacggtgaggatggattgaagggcggacagccgggaccagatggcggcggtcagccgggagcgtacacttaccagttccacggcgatccgagggccacatttgcccagttctttggatcgtcggatccgtttggcgcgttctttaccggcggcgataacatgtttagtggcggtcagggcggcaataccaacgagatcttctggaacattggcggcgacgatatgtttacctttaatgcccaagcacccagtcgcaagcgccagcaggatccgcccatcgagcatgatctgttcgtgtcgctggaggaagtggacaagggatgcatcaagaagatgaaaatctcacgcatggccaccggaagcaatgggccgtacaaggaggagaaggtgctgaggatcacagtgaagccgggctggaaggccggtaccaagattaccttcccccaagagggtgattcggcgccaaataagacgccagccgacatcgtcttcatcatacgggacaaaccgcattcgctgttcaaacgcgagggaatcgatctaaagtacacagcccagatcagtctgaagcaggccttgtgcggagcactggttagtgtgcccacgctgcagggcagcaggatacaggtgaatccgaaccacgagatcatcaagcccaccacaacgcgccggatcaacggactgggtctgccggtgcccaaggagccatcgaggcgcggcgatctgatcgtctccttcgacattaagtttcccgacacactggcacccagtctgcagaatcagctgtccgagctgctgcccaactag

SEQ ID NO: 139652 - protein, 334 aa, Drosophila melanogaster
MGKDFYKILGLERKASDDEIKKAYRKLALKYHPDKNKSPQAEERFKEIAEAYEVLSDKKKRDIFDNYGEDGLKGGQPGPDGGGQPGAYTYQFHGDPRATFAQFFGSSDPFGAFFTGGDNMFSGGQGGNTNEIFWNIGGDDMFTFNAQAPSRKRQQDPPIEHDLFVSLEEVDKGCIKKMKISRMATGSNGPYKEEKVLRITVKPGWKAGTKITFPQEGDSAPNKTPADIVFIIRDKPHSLFKREGIDLKYTAQISLKQALCGALVSVPTLQGSRIQVNPNHEIIKPTTTRRINGLGLPVPKEPSRRGDLIVSFDIKFPDTLAPSLQNQLSELLPN

SEQ ID NO: 139653 - DNA, 1059 bp, Drosophila sechellia
  CDS (1)..(1059)
atgggcaaagacttctacaagattctgggcatcgaccgcaaggccagcgacgatgagatcaagaaggcctaccgcaaactggcactcaaataccatcccgacaagaacaagagcccgcaggcggaggagcgcttcaaggagatcgccgaggcgtacgaggtgctgtcggacaaaaagaagcgcgacatcttcgacaaacacggtgaggatggactgaagggcggacagccgggaccagatggcggcgttcagccgggagcgtacacttaccagttccacggcgatccgagggccacctttgcccagttctttggatcgtcgaatccgtttgaagccttctttaccggcggcgataacatgtttgctggtcagggtcagggcggcaataccaacgagatcttcatgaacattggcggcgacgatatgtttgcctccttccctggcaatcctatggctggagccttccgttcgcagtcattcaatgcacaggcacccagtcgcaagcgccagcagcaacaggatccgcccatcgagcatgatctgtacgtgtcgctagaggaagtggacaagggatgtataaagaagatgaaaatctcacgcatggccaccggaagcaatggaccgttcaaggaggagaaggtgctgagaatcacagtgaagccaggctggaaggccggcaccaagattaccttcgcccaagagggtgattcggcgccaaacaagacgccagccgacatcgtcttcatcatacgcgacaaaccgcatgcgctgttcaaacgcgagggcatcgatctaaagtacacagcccagatcagtctgaagcaggccttgtgcggagcactggtcagtgtgcccacgctgcagggcagcaggatacaggtgaacccgaaccacgagatcatcaagcccaccacaacgcgccggatcaacggactgggtctgcccgtgcccaaggagccatcgaggcgcggcgatctgatcgtgtccttcgacatcaagtttcccgacgcactggcacccagcctgcagaatcagctgtccgagctgctgcccaactag

SEQ ID NO: 139654 - protein, 352 aa, Drosophila sechellia
MGKDFYKILGIDRKASDDEIKKAYRKLALKYHPDKNKSPQAEERFKEIAEAYEVLSDKKKRDIFDKHGEDGLKGGQPGPDGGVQPGAYTYQFHGDPRATFAQFFGSSNPFEAFFTGGDNMFAGQGQGGNTNEIFMNIGGDDMFASFPGNPMAGAFRSQSFNAQAPSRKRQQQQDPPIEHDLYVSLEEVDKGCIKKMKISRMATGSNGPFKEEKVLRITVKPGWKAGTKITFAQEGDSAPNKTPADIVFIIRDKPHALFKREGIDLKYTAQISLKQALCGALVSVPTLQGSRIQVNPNHEIIKPTTTRRINGLGLPVPKEPSRRGDLIVSFDIKFPDALAPSLQNQLSELLPN

SEQ ID NO: 139655 - DNA, 1059 bp, Drosophila mauritiana; identical to SEQ ID NO: 117801
  CDS (1)..(1059)

SEQ ID NO: 139656 - protein, 352 aa, Drosophila mauritiana; identical to SEQ ID NO: 117802

SEQ ID NO: 139657 - DNA, 1056 bp, Drosophila yakuba; identical to SEQ ID NO: 117803
  CDS (1)..(1056)

SEQ ID NO: 139658 - protein, 351 aa, Drosophila yakuba; identical to SEQ ID NO: 117804

SEQ ID NO: 139659 - DNA, 1056 bp, Drosophila teissieri; identical to SEQ ID NO: 117805
  CDS (1)..(1056)

SEQ ID NO: 139660 - protein, 351 aa, Drosophila teissieri; identical to SEQ ID NO: 117806

SEQ ID NO: 139661 - DNA, 1056 bp, Drosophila erecta
  CDS (1)..(1056)
atgggcaaagacttctacaagattctgggcatcgaccgcaaggccagcgacgatgagatcaagaaggcctaccgcaaactagccctgaaataccatcccgacaagaacaagagcccgcaggcggaggagcgcttcaaggagatcgccgaggcgtacgaggtgctatcggacaaaaagaagcgcgacatcttcgacaagtacggtgaggatggactgaagggcggacagccgggaccagatggcggcggccagccgggagcgtacagctatcagttccacggcgatccgagggccacatttgcccagttctttggatcgtcagatccgtttggcgtcttctttaccggcagtgataacatgtttagtggcggtcagggcggcaataccaacgagatatttatgaacattggcggcgacgatctgcttggcggtttcccgggcaatcctatggctggagccttccggtcgcagtccttcaatgcccaagcacccagtcgcaagcgccagcagcaacaggatccgcccatcgagcatgatctgtacgtgtcgctggaagaagtggacaagggatgcaccaagaagatgaaaatctcacgcatggccaccggaaaaaatggcccgttcaaggaggagaaggtgctgagcatcacagtgaaaccgggctggaaggccggtaccaagattaccttccccaaggagggcgatgcggcgccaaacaagataccagctgacatcatcttcatcatacgcgacaagccgcattcgctgttcaaacgcgagggcatcgatctgaagtacacagcccaggtcagtctgaagcaggccttatgcggagcactggttagtgtacccacgctgcagggcagtagaatacaggtgaacgcaaatcacgagatcatcaagcccaccacaacgcgcaggatcagcggactaggtctgcccgtgcccaaggagccctcgaggcgcggcgatctgatcgtgtccttcgacatcaagttccccgacacactggcgaccagtctgcagaatcagctggccgagctgctgcccaactag

SEQ ID NO: 139662 - protein, 351 aa, Drosophila erecta
MGKDFYKILGIDRKASDDEIKKAYRKLALKYHPDKNKSPQAEERFKEIAEAYEVLSDKKKRDIFDKYGEDGLKGGQPGPDGGGQPGAYSYQFHGDPRATFAQFFGSSDPFGVFFTGSDNMFSGGQGGNTNEIFMNIGGDDLLGGFPGNPMAGAFRSQSFNAQAPSRKRQQQQDPPIEHDLYVSLEEVDKGCTKKMKISRMATGKNGPFKEEKVLSITVKPGWKAGTKITFPKEGDAAPNKIPADIIFIIRDKPHSLFKREGIDLKYTAQVSLKQALCGALVSVPTLQGSRIQVNANHEIIKPTTTRRISGLGLPVPKEPSRRGDLIVSFDIKFPDTLATSLQNQLAELLPN

SEQ ID NO: 139663 - DNA, 1053 bp, Drosophila orena; identical to SEQ ID NO: 117807
  CDS (1)..(1053)

SEQ ID NO: 139664 - protein, 350 aa, Drosophila orena; identical to SEQ ID NO: 117808

SEQ ID NO: 139665 - DNA, 1065 bp, Drosophila mimetica; identical to SEQ ID NO: 117809
  CDS (1)..(1065)

SEQ ID NO: 139666 - protein, 354 aa, Drosophila mimetica; identical to SEQ ID NO: 117810

SEQ ID NO: 139667 - DNA, 882 bp, Meiothermus ruber
  CDS (1)..(882): transl_table=11
atgaatatggcctacaaggactactacaaaattcttggggttcctaagaacgccagcgaagatgaaatcaaaaaggccttcaagaagctggcccgtaagtaccacccggacgtgaacaaagagccgggggccgaggagaaattcaaagagattaacgaggcctacacggtgctgtccgacccggaaaagcgccgctactacgatacctacggtgcggctgcgggcagcgcgggctggcagggccccccgccggggccgggtggttttgggggttttaccggcaatgtgggcgatttctccgactttttccaacagctttttggcggccggggtggttttggcggcctgggtgacctgttcgagcagaccccaggccggggtgcgcgccgggtggcgggcgacctcgaggccgagcttcccctgagcctcgaggaggcctaccgcggcggagaaaaaaccatctccgttggcgccgagcgccttacggtgcgcatcccaccaggggtgcgcgagggccagaagatccgcctggccggcaaggggcgcgccgggggcgacctgtacctgcacgtcaagctgcagtcccggccggagatgcgcctggaaggcgatgacatttacaccgtggtggaagtaccggcccccattgcggtggtggggggcaaggtgcgggtgcaaaccctcgacggcccggtggaaatcaccattcccaggcgaacccaggccggacgcaagctgcgcctggccgggaagggctggccccgcaaagacaaaagccggggcgaccagtacgccgaggtgcgggtgaccatccccaccaaccccagccccgaggaagagcgcctgtatgcccaactggccgagctgatcaaggttcagtaa

SEQ ID NO: 139668 - protein, 293 aa, Meiothermus ruber
MNMAYKDYYKILGVPKNASEDEIKKAFKKLARKYHPDVNKEPGAEEKFKEINEAYTVLSDPEKRRYYDTYGAAAGSAGWQGPPPGPGGFGGFTGNVGDFSDFFQQLFGGRGGFGGLGDLFEQTPGRGARRVAGDLEAELPLSLEEAYRGGEKTISVGAERLTVRIPPGVREGQKIRLAGKGRAGGDLYLHVKLQSRPEMRLEGDDIYTVVEVPAPIAVVGGKVRVQTLDGPVEITIPRRTQAGRKLRLAGKGWPRKDKSRGDQYAEVRVTIPTNPSPEEERLYAQLAELIKVQ

SEQ ID NO: 139669 - DNA, 972 bp, Arabidopsis thaliana
  CDS (1)..(972)
atgggggtcgattattacaaggttcttcaggtggatcggaatgcgaaagacgacgacttgaagaaagcttatcgcaaactcgccatgaagtggcatccagacaagaaccctaacaacaaaaaagacgccgaagccaaattcaagcagatctctgaagcttacgatgttttgagtgatcctcaaaagagagccatctatgatcaatatggagaagaaggtctaacaagccaggctccgcctcccggagcaggcggcgggttttcggatggaggggcttcgttccggttcaacggtagaagcgcagatgatatcttctcggagttctttggcttcacaagaccatttggtgactcacgtggtgcaggtccctctaatgggttccggttcgaagaagacgttttctcgtcgaatgttgttccaccgaggaaagctgcccctattgagagacaacttccttgtagtttggaagatctctacaaaggagtcagtaagaagatgaagatctctcgggacgtcctcgattcaagcgggagacccacaacagttgaggagatcttgacgatagaaatcaagccagggtggaagaaagggacgaagattaccttcccggagaaaggaaacgagcagcgaggaatcataccatcagatcttgtattcatagttgatgagaagccgcatgctgtgttcaagcgagacgggaatgaccttgtgatgacacagaagatccctcttgtggaagccctcacgggatacactgctcaggtctcgactctggatggaagatcagtaacggttccaattaacaacgtgatcagcccttcttatgaagaggtggtgaaaggtgaaggcatgccaatccctaaagacccatcaaagaaagggaacttgagaatcaagttcactgttaagttcccatcgaggctaacaacagagcagaaatctggaatcaaacgaatgttttcgtcttcctag

SEQ ID NO: 139670 - protein, 323 aa, Arabidopsis thaliana
MGVDYYKVLQVDRNAKDDDLKKAYRKLAMKWHPDKNPNNKKDAEAKFKQISEAYDVLSDPQKRAIYDQYGEEGLTSQAPPPGAGGGFSDGGASFRFNGRSADDIFSEFFGFTRPFGDSRGAGPSNGFRFEEDVFSSNVVPPRKAAPIERQLPCSLEDLYKGVSKKMKISRDVLDSSGRPTTVEEILTIEIKPGWKKGTKITFPEKGNEQRGIIPSDLVFIVDEKPHAVFKRDGNDLVMTQKIPLVEALTGYTAQVSTLDGRSVTVPINNVISPSYEEVVKGEGMPIPKDPSKKGNLRIKFTVKFPSRLTTEQKSGIKRMFSSS

SEQ ID NO: 139671 - DNA, 1050 bp, Arabidopsis thaliana
  CDS (1)..(1050)
atgggggtggattactacaatgttctgaaagtgaatcgaaatgctaacgaagatgatctgaagaagtcttaccggcgaatggctatgaaatggcaccctgataaaaaccctacgagcaagaaagaagctgaagctaagttcaagcagatctctgaagcttacgacgtcttgagcgatcctcagagacgtcagatctacgatcagtacggagaagaaggtcttaaatccaccgatttacctactgcggcggagacggcggcgcagcagcagcagcggagctactcttctagcaactctgagtttcggtattatccgcgtgatgctgaagatatctttgctgagtttttcggcgaatccggtgatgcttttggcggagggagtagcggaaggacacgtggagatggcggtgatggtggcggtcggagatttaaaagtgcagaagcagggagccaggctaatagaaagacgccgccgacgaacaaaaaaacgacgccgccggcgaataggaaggctccggctattgagagtaaattggcttgcacattggaggagctctacaaaggtgcaaagaagaagatgcgaatttctcgcgttgttcctgatgattttggaaagccaaagacagtccaagagatattgaagatagacataaaaccaggttggaagaaaggcacaaagatcacttttccagagaaaggcaaccaagaacctggtgtcactcctgcggatcttatattcgtggttgacgagaaaccgcattcggtattcaagagagacggtaacgatctgattctcgagaagaaagtctctcttatagatgctttaaccggtctcaccattagcgtaacgactctagacgggaggagcctaactatcccggtgctggatatcgtaaaaccgggtcaggagattgtgatcccgaatgagggaatgcctactaaagaccctttgaagagaggagaccttagagttacctttgaaatcttgttcccgtcaaggctaacgtcagaacagaagaatgacctcaagagagttcttggtggaagctga

SEQ ID NO: 139672 - protein, 349 aa, Arabidopsis thaliana
MGVDYYNVLKVNRNANEDDLKKSYRRMAMKWHPDKNPTSKKEAEAKFKQISEAYDVLSDPQRRQIYDQYGEEGLKSTDLPTAAETAAQQQQRSYSSSNSEFRYYPRDAEDIFAEFFGESGDAFGGGSSGRTRGDGGDGGGRRFKSAEAGSQANRKTPPTNKKTTPPANRKAPAIESKLACTLEELYKGAKKKMRISRVVPDDFGKPKTVQEILKIDIKPGWKKGTKITFPEKGNQEPGVTPADLIFVVDEKPHSVFKRDGNDLILEKKVSLIDALTGLTISVTTLDGRSLTIPVLDIVKPGQEIVIPNEGMPTKDPLKRGDLRVTFEILFPSRLTSEQKNDLKRVLGGS

SEQ ID NO: 139673 - DNA, 1371 bp, Arabidopsis thaliana; identical to SEQ ID NO: 63937
  CDS (1)..(1371)

SEQ ID NO: 139674 - protein, 456 aa, Arabidopsis thaliana; identical to SEQ ID NO: 63938

SEQ ID NO: 139675 - DNA, 1329 bp, Arabidopsis thaliana; identical to SEQ ID NO: 117811
  CDS (1)..(1329)

SEQ ID NO: 139676 - protein, 442 aa, Arabidopsis thaliana; identical to SEQ ID NO: 63940

SEQ ID NO: 139677 - DNA, 1170 bp, Drosophila melanogaster; identical to SEQ ID NO: 117813
  CDS (1)..(1170)

SEQ ID NO: 139678 - protein, 389 aa, Drosophila melanogaster; identical to SEQ ID NO: 117814

SEQ ID NO: 139679 - DNA, 1311 bp, Oryza sativa; identical to SEQ ID NO: 117815
  CDS (1)..(1311)

SEQ ID NO: 139680 - protein, 436 aa, Oryza sativa; identical to SEQ ID NO: 63944

SEQ ID NO: 139681 - DNA, 1257 bp, Daucus carota; identical to SEQ ID NO: 63947
  CDS (1)..(1257)

SEQ ID NO: 139682 - protein, 418 aa, Daucus carota; identical to SEQ ID NO: 63948

SEQ ID NO: 139683 - DNA, 1029 bp, Solanum lycopersicum; identical to SEQ ID NO: 117819
  CDS (1)..(1029)

SEQ ID NO: 139684 - protein, 342 aa, Solanum lycopersicum; identical to SEQ ID NO: 117820

SEQ ID NO: 139685 - DNA, 1386 bp, Arabidopsis thaliana; identical to SEQ ID NO: 63949
  CDS (1)..(1386)

SEQ ID NO: 139686 - protein, 461 aa, Arabidopsis thaliana; identical to SEQ ID NO: 63950

SEQ ID NO: 139687 - DNA, 1257 bp, Nicotiana tabacum; identical to SEQ ID NO: 63951
  CDS (1)..(1257)

SEQ ID NO: 139688 - protein, 418 aa, Nicotiana tabacum; identical to SEQ ID NO: 63952

SEQ ID NO: 139689 - DNA, 1317 bp, Arabidopsis thaliana; identical to SEQ ID NO: 63953
  CDS (1)..(1317)

SEQ ID NO: 139690 - protein, 438 aa, Arabidopsis thaliana; identical to SEQ ID NO: 63954

SEQ ID NO: 139691 - DNA, 1257 bp, Euphorbia esula; identical to SEQ ID NO: 63955
  CDS (1)..(1257)

SEQ ID NO: 139692 - protein, 418 aa, Euphorbia esula; identical to SEQ ID NO: 63956

SEQ ID NO: 139693 - DNA, 1260 bp, Solanum lycopersicum; identical to SEQ ID NO: 63957
  CDS (1)..(1260)

SEQ ID NO: 139694 - protein, 419 aa, Solanum lycopersicum; identical to SEQ ID NO: 63958

SEQ ID NO: 139695 - DNA, 1191 bp, Arabidopsis thaliana; identical to SEQ ID NO: 117831
  CDS (1)..(1191)

SEQ ID NO: 139696 - protein, 396 aa, Arabidopsis thaliana; identical to SEQ ID NO: 63960

SEQ ID NO: 139697 - DNA, 1029 bp, Nicotiana tabacum; identical to SEQ ID NO: 117833
  CDS (1)..(1029)

SEQ ID NO: 139698 - protein, 342 aa, Nicotiana tabacum; identical to SEQ ID NO: 117834

SEQ ID NO: 139699 - DNA, 1254 bp, Glycine max; identical to SEQ ID NO: 63963
  CDS (1)..(1254)

SEQ ID NO: 139700 - protein, 417 aa, Glycine max; identical to SEQ ID NO: 63964

SEQ ID NO: 139701 - DNA, 951 bp, Rhodothermus marinus
  CDS (1)..(951): transl_table=11
atggcacaggcagtgaaggattactacgagattctgggcgttccggaaaacgccaccgaggaggaaatcaagaaggcgtaccggaagctggcccgcgagtggcacccggaccgtaacccggacaagccgaacgccgaggagcgcttcaaggagatccaggaggcctacagcgtcctctcggatcccgagaagcgccggcaatacgacatgatgcgcaagaatccgttcggcgccttcggtgggttcggtccgggcaatggcagccggttctaccggacgccggaggggacgtacgttcatttcgagacaagcggcaacctggaagacctgctggacgaagagttcggcttcggcggtctgggcgacatcttcagtcgcttcttcggcgggttcgggcggaccggcacgcggcacgacccgtttgcgcgggcgcgtcgcccgcgcgacgtggaggtgcgtgtgcagttgcccttcgagcaggcgttgcgcggaggaaagaccgacattacgctgccggacggccagaaagtgcggattaatataccgaagggggtccgtccgggcttcaaaattcgcctgaaggatggagggccgacgattgcgggcgtgccgcagggcaatgtgtacatcatctttgaggtcgagccgcatccgcgcttccggcgggagggcgacgacctctacacgacgatcacgatcaacccgctggaggcgatgctgggcaccacgcgcgagatcgtggatgcctacggtcgtcggatcaaggtgcggatcccgccgggcacgcaaccgggcgagcggttgcgcatccgcggccacggcgtggagaccgacacgcatacgggcgacctctacgtcgaagtgcaactggaaatcccgcgcaacctctcggccgagcagcaacgcatcctgcgcgaagcagcagaaaaggccggcctgatccggtcgtaa

SEQ ID NO: 139702 - protein, 316 aa, Rhodothermus marinus
MAQAVKDYYEILGVPENATEEEIKKAYRKLAREWHPDRNPDKPNAEERFKEIQEAYSVLSDPEKRRQYDMMRKNPFGAFGGFGPGNGSRFYRTPEGTYVHFETSGNLEDLLDEEFGFGGLGDIFSRFFGGFGRTGTRHDPFARARRPRDVEVRVQLPFEQALRGGKTDITLPDGQKVRINIPKGVRPGFKIRLKDGGPTIAGVPQGNVYIIFEVEPHPRFRREGDDLYTTITINPLEAMLGTTREIVDAYGRRIKVRIPPGTQPGERLRIRGHGVETDTHTGDLYVEVQLEIPRNLSAEQQRILREAAEKAGLIRS

SEQ ID NO: 139703 - DNA, 1248 bp, Hevea brasiliensis; identical to SEQ ID NO: 63965
  CDS (1)..(1248)

SEQ ID NO: 139704 - protein, 415 aa, Hevea brasiliensis; identical to SEQ ID NO: 63966

SEQ ID NO: 139705 - DNA, 960 bp, Pseudomonas putida
  CDS (1)..(960): transl_table=11
atggacttcaaagactattacaagatactcggcgtagagcccactgcggacgaaaaggcgatcaaggccgcgtaccgcaaactggcgcgcaagtatcaccccgatgtcagtaaggagcgcgacgccgaggagaaattcaaggaggccaacgaggcctatgaggtgctgggcgacgcgcagaaacgtgccgagttcgatgaaatccgcaagtacggcggccagcatggccggccgttccaggcaccaccgggttgggaaagccgcggtggcggcggcggcttcgaaggcggcgacttctccgacttcttcagctcgatcttcggtgggcgcagtgcgggtggcaaccccttcggtggcgcccggcagcagcaacgcagtgctggcaggcgggggcaggacgtggagcttgaactggcagtgttccttgaagagaccctgagcaaggagtccaagcagatcagcttccaggtgccgcaaaccaatgccatgggccagcgcaccggcttcaccaccaaaaccttgaacgtgaggattccggctggggtgaccgacggcgagcgcatccgcctcaagggccagggcgcgcccggcagcggtggcggggccaacggtgacctgttcctgaccatccgcatggcaccgcacccgctgttcgatgtcgaaggtcatgacctgatcatcactgtgccgttggcaccgtgggaggcggccctgggcgccaaggtggcggttccgaccctggatggcaagatcaacctgaccatccgtcctgacagccagagcggccagcgcctgcgtgtaccgggcaagggcctggcgaacaaacagggagagcgcggcaacctttatgcgcagctcaaggtggtcatgccgcccgcgtcggacgaatctgcccgcgaactctggaccaagctttccgagaaagctgcgttcaacccgaggacacaatggagtaagtga

SEQ ID NO: 139706 - protein, 319 aa, Pseudomonas putida
MDFKDYYKILGVEPTADEKAIKAAYRKLARKYHPDVSKERDAEEKFKEANEAYEVLGDAQKRAEFDEIRKYGGQHGRPFQAPPGWESRGGGGGFEGGDFSDFFSSIFGGRSAGGNPFGGARQQQRSAGRRGQDVELELAVFLEETLSKESKQISFQVPQTNAMGQRTGFTTKTLNVRIPAGVTDGERIRLKGQGAPGSGGGANGDLFLTIRMAPHPLFDVEGHDLIITVPLAPWEAALGAKVAVPTLDGKINLTIRPDSQSGQRLRVPGKGLANKQGERGNLYAQLKVVMPPASDESARELWTKLSEKAAFNPRTQWSK

SEQ ID NO: 139707 - DNA, 945 bp, Pseudomonas syringae pv
  CDS (1)..(945): transl_table=11
atggatttcaaagactactacaagatacttgacgtagagccggctgctgacgacaaggcgatcaagaccgcctatcgcaaactggcgcgcaagtatcaccctgacgtcagcaaggaagccggcgccgaagacaagttcaaggaagcatccgaagcctatgaagtgctcagcagccctgaaaagcgcgccgagtacgacgaactgcgcaagtacggtcggcagggccgtccgttccagacgccacctggctggcaaagccgtgcaggcgcgggcgcaggcggattcgaagaaacagcggatttttccgagtttttcagttccatttttggtggccggccacagcagggcgggcgtacccgtaacccgggccgcaaggggcaggacgtggagatggaactggcggtctttctggaagaaaccctgtcaggcgagtccaagcaggtcagcttcaaggtgcctcagcacagccccaacgggcagcgcatgggtgatatcaccaagaccctgaacgtgaagattccggcgggtgtcgtcgatggcgagcgcattcgtctcaagggccagggcgcgccgggtataggcggtggtgccaatggcgatctgtacctgatcattcgcctggcgccgcacccgatgttcgaggtcgaaggccatgatctggtgattaccgtgccgctggccccgtgggaagccgcgctgggcaccaaagtggcggtgccgaccctgaccagcaggctcaacctgaccattcggcccgacagccagaacggtcagcgcttgcggatcaagggtaatggtttgatgaacaagagtggcgagcggggtgatctgtatgcccaactgaagatcgtcatgcccaaacagaccgatgaagcggcacgtgcgctctggcagaaactggccgacagcgctgcgttcgaccctcgggcgcagtggaagggctga

SEQ ID NO: 139708 - protein, 314 aa, Pseudomonas syringae pv
MDFKDYYKILDVEPAADDKAIKTAYRKLARKYHPDVSKEAGAEDKFKEASEAYEVLSSPEKRAEYDELRKYGRQGRPFQTPPGWQSRAGAGAGGFEETADFSEFFSSIFGGRPQQGGRTRNPGRKGQDVEMELAVFLEETLSGESKQVSFKVPQHSPNGQRMGDITKTLNVKIPAGVVDGERIRLKGQGAPGIGGGANGDLYLIIRLAPHPMFEVEGHDLVITVPLAPWEAALGTKVAVPTLTSRLNLTIRPDSQNGQRLRIKGNGLMNKSGERGDLYAQLKIVMPKQTDEAARALWQKLADSAAFDPRAQWKG

SEQ ID NO: 139709 - DNA, 1137 bp, Corynebacterium efficiens
  CDS (1)..(1137): transl_table=11
gtggcacgtgactattacggcatcctcggagttgaccgcaacgcaaccgactctgaaatcaagaaggcgtaccgcaagcttgcccgcaaataccaccctgatgtgaaccccagtgaggaggcggcggagaagttccgtgaggcctccgtggcccatgaggtgctcaccgatccggataagcgccggattgtggatatgggtggcgatcccatggagcagggtggtggtgccggacatccgggtggtttcggcagtggcggtctgggtgacatcttcgatgccttcttcggtggcggtgcgggttcccgtgggccacggtcgcgtgtacagcccggcagtgacaccctgtggcgcacctccatcaccctggaggaggcgttcaccggtgtgaagaaggatctcaccctggacacggctgtgctgtgttccaagtgtcatggttcgggttccgcctccaatgccaagccgaagacctgtggcacctgccatggttccggtgagatccaggaggtgcagcgcagtttcctgggcaatgtcatgacctcgcgtccgtgccacacgtgtaacggcaccggtgaggtcattcccgatccgtgtgatgagtgtgccggtgatggtcgtgtgcgtgcgcgccgtgacatcgtggccgatatcccggccggtatccagtcgggtatgcgcatccggatggcgggtcagggtgaggtcggcgccggtggtggacccgccggtgatctctacgtcgaggtgatggtccgtccgcatgcggtgttcacccgcgatggtgatgatctgcacgccagtatccgcgtgcccatgatcgatgcggcactggggtcggagcttgaggtggagtcgctgaccggtgaggagatcaccgtggtgatcccggccggcacgcagccgaaccaggttatcaccctggagggtgagggcatgccgcgtctgcgcgccgagggtcgcggggacctcatggcacatgtggacctgttcgtcccgaccgagatcgatgaccgcacccgtgagctgctggagcagatccgggattaccgcagggacaattcctcggtgcaccgtgagggtgaggagcatggcgggttgttcgataagctcaagagcaagttccgcaaccgctga

SEQ ID NO: 139710 - protein, 378 aa, Corynebacterium efficiens
MARDYYGILGVDRNATDSEIKKAYRKLARKYHPDVNPSEEAAEKFREASVAHEVLTDPDKRRIVDMGGDPMEQGGGAGHPGGFGSGGLGDIFDAFFGGGAGSRGPRSRVQPGSDTLWRTSITLEEAFTGVKKDLTLDTAVLCSKCHGSGSASNAKPKTCGTCHGSGEIQEVQRSFLGNVMTSRPCHTCNGTGEVIPDPCDECAGDGRVRARRDIVADIPAGIQSGMRIRMAGQGEVGAGGGPAGDLYVEVMVRPHAVFTRDGDDLHASIRVPMIDAALGSELEVESLTGEEITVVIPAGTQPNQVITLEGEGMPRLRAEGRGDLMAHVDLFVPTEIDDRTRELLEQIRDYRRDNSSVHREGEEHGGLFDKLKSKFRNR

SEQ ID NO: 139711 - DNA, 1149 bp, Corynebacterium glutamicum
  CDS (1)..(1149): transl_table=11
gtggcacgtgactattacggcattctcggcgtcgatcgcaatgcaaccgaatcagagatcaaaaaggcataccgaaagcttgcccgcaaataccacccggacgtaaacccaggtgaggaagcagcggagaaattccgcgaggcttctgttgcgcatgaggtactcactgatccggataagcgccgcattgttgatatgggcggtgacccaatggagcaaggcggcggagctggcgctggtggcttcggtggaggcttcggcggcagcggtggactgggcgatatcttcgatgccttcttcggcggtggcgcgggcggttcccgtggaccacgttcccgcgtgcagccaggcagtgacaccttgtggcgcacctccatcaccttggaagaggcttacaagggcgctaagaaagatctcacccttgacaccgcagtgctgtgtaccaagtgtcatggttctggatctgcatccgacaagaagcctgttacctgtggcacctgtaatggcgctggtgaaattcaggaagtgcagcgcagcttcctgggcaacgtcatgacgtcccgcccatgccacacctgcgatggcaccggtgagatcatcccagatccttgcactgagtgtgcaggagatggtcgtgtgcgtgctcgccgcgacatcgtggccaacatcccagctggcatccagtccggcatgcgcatccgcatggcaggccaaggtgaggttggcgctggtggcggtcctgcgggtgacctctacattgaagtcatggtgcgcccgcacgccatcttcacccgcgatggcgacgatctgcacgccagcatcaaggttccaatgttcgatgcagcgcttggcaccgaattggacgtggaatccctcaccggcgaagaggtgaaaattaccatccctgcaggtactcagcccaacgatgtgatcaccttggatggtgaaggcatgccgaagctgcgcgcagaaggccacggcaacctcatggcgcatgtcgatctatttgtgccaaccgatttggatgaccgcacccgcgaattgcttgaagaaatccgcaaccatcgcagcgacaacgcttccgtgcatcgcgaaggcggagaagaatccggtttctttgacaagctccgaaacaagttccgcaaataa

SEQ ID NO: 139712 - protein, 382 aa, Corynebacterium glutamicum
MARDYYGILGVDRNATESEIKKAYRKLARKYHPDVNPGEEAAEKFREASVAHEVLTDPDKRRIVDMGGDPMEQGGGAGAGGFGGGFGGSGGLGDIFDAFFGGGAGGSRGPRSRVQPGSDTLWRTSITLEEAYKGAKKDLTLDTAVLCTKCHGSGSASDKKPVTCGTCNGAGEIQEVQRSFLGNVMTSRPCHTCDGTGEIIPDPCTECAGDGRVRARRDIVANIPAGIQSGMRIRMAGQGEVGAGGGPAGDLYIEVMVRPHAIFTRDGDDLHASIKVPMFDAALGTELDVESLTGEEVKITIPAGTQPNDVITLDGEGMPKLRAEGHGNLMAHVDLFVPTDLDDRTRELLEEIRNHRSDNASVHREGGEESGFFDKLRNKFRK

SEQ ID NO: 139713 - DNA, 1005 bp, Drosophila melanogaster
  CDS (1)..(1005)
atgggcaaagacttctacaagattctgggcctcgagcgcaaggccagcgacgatgagatcaagaaggcctaccgcaaactggcactcaaataccatcccgacaagaacaagagcccacaggcggaggagcgcttcaaggagatcgccgaggcgtacgaggtgctgtcggacaaaaagaagcgcgacatcttcgacaattacggtgaggatggattgaagggcggacagccgggaccagatggcggcggtcagccgggagcgtacacttaccagttccacggcgatccgagggccacatttgcccagttctttggatcgtcggatccgtttggcgcgttctttaccggcggcgataacatgtttagtggcggtcagggcggcaataccaacgagatcttctggaacattggcggcgacgatatgtttgcctttaatgcccaggcacccagtcgcaagcgccagcaggatccgcccatcgagcatgatctgttcgtgtcgctggaggaagtggacaagggatgcatcaagaagatgaaaatctcacgcatggccaccggaagcaatgggccgtacaaggaggagaaggtgctgaggatcacagtgaagccgggctggaaggccggtaccaagattaccttcccccaagagggtgattcggcgccaaataagacgccagccgacatcgtcttcatcatacgggacaaaccgcattcgctgttcaaacgcgagggaatcgatctaaagtatacagcccagatcagtctgaagcaggccttgtgcggagcactggtcagtgtgcccacgctgcagggcagcaggatacaggtgaatccgaaccacgagatcatcaagcccaccacaacgcgccggatcaacggactgggtctgccggtgcccaaggagccatcgaggcgcggcgatctgatcgtctccttcgacattaagtttcccgacacactggcacccagtctgcagaatcagctgtccgagctgctgcccaactag

SEQ ID NO: 139714 - protein, 334 aa, Drosophila melanogaster
MGKDFYKILGLERKASDDEIKKAYRKLALKYHPDKNKSPQAEERFKEIAEAYEVLSDKKKRDIFDNYGEDGLKGGQPGPDGGGQPGAYTYQFHGDPRATFAQFFGSSDPFGAFFTGGDNMFSGGQGGNTNEIFWNIGGDDMFAFNAQAPSRKRQQDPPIEHDLFVSLEEVDKGCIKKMKISRMATGSNGPYKEEKVLRITVKPGWKAGTKITFPQEGDSAPNKTPADIVFIIRDKPHSLFKREGIDLKYTAQISLKQALCGALVSVPTLQGSRIQVNPNHEIIKPTTTRRINGLGLPVPKEPSRRGDLIVSFDIKFPDTLAPSLQNQLSELLPN

SEQ ID NO: 139715 - DNA, 1188 bp, Mycobacterium bovis; identical to SEQ ID NO: 117839
  CDS (1)..(1188): transl_table=11

SEQ ID NO: 139716 - protein, 395 aa, Mycobacterium bovis; identical to SEQ ID NO: 117840

SEQ ID NO: 139717 - DNA, 1155 bp, Nocardia farcinica
  CDS (1)..(1155): transl_table=11
gtggcacgggactactacggactgctcggcgtcgcgaggaacgcgaccgaccaggagatcaagcgcgcctaccggaagctggcgcgcgagctccatccggatgtcaacccggatgaggcggcgcaggccaggttcaaggaagtgtcgaccgcctacgaggtgctctccgatccggagaagcgccggatcgtcgacatgggcggcgacccgctcgagtccggcggcggcgccggcggcttctccggtgccggcttcggcggcctcggcgacgtgttcgaggcgttcttcggcgggatgagcggcgcgggcggcgggcagcgcaagccgcgcggccgcgtgcagcccggcgcggattcgctgctgcggacccggctcagcctcgccgagtgcgcggtcggcgtcaccaagcacctcaccgtcgacaccgcggtgctctgcgacgcgtgtcacggctccggcacccacggcaactccaagccggtccgctgcgagacctgcggcggcgcgggcgaagtgcagtcggtgcagcgctccttcctcggccaggtgctcacctcccggccctgccccacctgtcgcggcgccggggagaccatccccgatccctgccacaagtgcggcggcgacggccgggtgcgggcgcggcgcgagatcgccgcgccgatccccgccggtgtcgccaacggcatgcgggtgcggctggcggcgcagggcgaggtcggccccggcggcggcccgcccggtgacctgtacgtggagatcgtcgagcagccgcacgacgtgttcgtccgcgacggcgacgacctgcactgcaccatccgggtgccgatggtcgacgcggcactgggcaccaccgtcgtcatcgacaccatcctcgacggccccaccgaactgaccatcccgccgggcacgcagcccggcgaggtgtcggtgctgcgcgggcacggcatgccgaagctgcgttccggtgtgcgcggcgacctgctcgcgcacctggacatcgtcatccccaccaagctggacggcaagcagaccgagctgctgcgcaagtacaaggcgctgcgcgaccgcgaccgtgccgaggtgatgtcggcgcagtccgagcacaacagcggcctgttcgcccggctgcgggcctcgttcagcggacgctga

SEQ ID NO: 139718 - protein, 384 aa, Nocardia farcinica
MARDYYGLLGVARNATDQEIKRAYRKLARELHPDVNPDEAAQARFKEVSTAYEVLSDPEKRRIVDMGGDPLESGGGAGGFSGAGFGGLGDVFEAFFGGMSGAGGGQRKPRGRVQPGADSLLRTRLSLAECAVGVTKHLTVDTAVLCDACHGSGTHGNSKPVRCETCGGAGEVQSVQRSFLGQVLTSRPCPTCRGAGETIPDPCHKCGGDGRVRARREIAAPIPAGVANGMRVRLAAQGEVGPGGGPPGDLYVEIVEQPHDVFVRDGDDLHCTIRVPMVDAALGTTVVIDTILDGPTELTIPPGTQPGEVSVLRGHGMPKLRSGVRGDLLAHLDIVIPTKLDGKQTELLRKYKALRDRDRAEVMSAQSEHNSGLFARLRASFSGR

SEQ ID NO: 139719 - DNA, 1191 bp, Streptomyces avermitilis; identical to SEQ ID NO: 63969
  CDS (1)..(1191): transl_table=11

SEQ ID NO: 139720 - protein, 396 aa, Streptomyces avermitilis; identical to SEQ ID NO: 63970

SEQ ID NO: 139721 - DNA, 1200 bp, Streptomyces coelicolor; identical to SEQ ID NO: 117847
  CDS (1)..(1200): transl_table=11

SEQ ID NO: 139722 - protein, 399 aa, Streptomyces coelicolor; identical to SEQ ID NO: 117848

SEQ ID NO: 139723 - DNA, 1260 bp, Arabidopsis thaliana; identical to SEQ ID NO: 63971
  CDS (1)..(1260)

SEQ ID NO: 139724 - protein, 419 aa, Arabidopsis thaliana; identical to SEQ ID NO: 63972

SEQ ID NO: 139725 - DNA, 1188 bp, Corynebacterium glutamicum
  CDS (1)..(1188): transl_table=11
gtgaacaacagcgaatgggcaaataagaactattacgcagacctgggggtctcctcgtccgcttcagaagatgagatcaaaaaggcttaccgcaagctcgccagggaaaatcacccagataaaaatccaggtgacaaggccgctgaagatcgattcaaaaaagcggccgaggcatatgacgtacttggtgatgacaagaaacgaaaagaatacgacgagctcaaagcacttctagcttctggtggaatccgcggaggattcggaagcggaggtgcgggattccccggcgggtttcgcacgtcgacgggaggattcgacacctcagacctcttcggaggaggacaaggtggagggttttctacggacggcggtttgggcgatatcttcggtggccttttcaaccgcggcgctggttctcaccagtcagctaggccgacgcggggggcggatgtacaaaccgaaataactctctcgtttgttgaggcagcgaaaggcacgaccatcccagtggaactcaccggcgatgcgccctgcaacacctgccacggatcgggctccaaatcaggccaccccgcaaaatgtggaacctgtgatggaaccggattcacctctgagaacaagggtgctttcggattctccgctccatgtgcaacctgtggtggcactggtgaaataatcactgatccttgcgataactgccacggccgaggcaccgtccggaagtctcgttccatcaccgtgcgtatcccaactggtgtggaagatggacagaaagttcgtcttgcaggccaaggcgaagcaggaccaaatggcaaaccagcgggcgatctctttgtgaaagtccacgtgaaaaaggacgatgtgttcacacgcgacggcagcaacattttgatcaccattcccgtgagcttcagcgagctggctttgggtggcgctatttctgtgccaacgctcaacaagcctgtaaaactcaagctacctgcgggaacgccagatggtcgtactttgcgtgtacgcggtcgcggtatcgaagcacgtgattccactggtgatctgctggttacagtccaggtttctgtcccgaagaatctggatgacaacgctgcggaagctctccgcgcatatgctgaagcagaaactaattcaggttttgatccccgcgctaactgggcgggccagaaccgctag

SEQ ID NO: 139726 - protein, 395 aa, Corynebacterium glutamicum
MNNSEWANKNYYADLGVSSSASEDEIKKAYRKLARENHPDKNPGDKAAEDRFKKAAEAYDVLGDDKKRKEYDELKALLASGGIRGGFGSGGAGFPGGFRTSTGGFDTSDLFGGGQGGGFSTDGGLGDIFGGLFNRGAGSHQSARPTRGADVQTEITLSFVEAAKGTTIPVELTGDAPCNTCHGSGSKSGHPAKCGTCDGTGFTSENKGAFGFSAPCATCGGTGEIITDPCDNCHGRGTVRKSRSITVRIPTGVEDGQKVRLAGQGEAGPNGKPAGDLFVKVHVKKDDVFTRDGSNILITIPVSFSELALGGAISVPTLNKPVKLKLPAGTPDGRTLRVRGRGIEARDSTGDLLVTVQVSVPKNLDDNAAEALRAYAEAETNSGFDPRANWAGQNR

SEQ ID NO: 139727 - DNA, 1149 bp, Mycobacterium bovis
  CDS (1)..(1149): transl_table=11
gtggcacgcgattattacgggctgctcggcgtgagcaagaacgccagcgacgcggacatcaaacgcgcctaccgcaagctggcgcgcgagctgcatcccgacgtcaacccggacgaggctgcgcaggcgaaattcaaagaaatcagcgtcgcctacgaggtgctcagtgacccggacaaacgtcgcatcgtcgacctgggcggggatccgctggagagcgccgctgcgggcggcaatgggttcggtggcttcggcggcctcggcgacgtgttcgaggcgttctttggcgggggtttcggtgggggcgcggcgtcccgagggccgatcggccgggtccggccgggttcggactcgctgctacgaatgcggctggatctcgaagagtgcgcaacaggtgtcaccaagcaggtcaccgtcgataccgcggtgttgtgcgaccggtgccagggcaagggcaccaacggcgattcggttccgataccctgcgacacctgcggtggccgcggggaggtgcagaccgtgcagcgatcgctgttgggtcagatgttgacgtcgcggccgtgtcccacctgccgcggcgtcggggtggttatccccgacccgtgccagcaatgcatgggcgatggccggatccgggcccgtcgggagatcagcgtcaagatcccggccggtgtcggcgacgggatgcgagttcggctcgccgctcagggcgaggtcgggcccgggggagggccggcgggtgacctctacgtcgaggtccatgagcaggcgcacgacgtctttgtccgcgaaggtgaccatctgcattgcacggtttcggtgcccatggtcgacgcggcgctgggtgttacggtcacggtggacgccatcctggacggcctgagcgagatcaccattccacccggcacgcagccaggttcggtgatcacgctgcgcggtcgaggaatgccgcacctgcgttccaacacgcgtggcgacctgcacgttcacgtggaggtggtggtcccgacccggctggatcaccaggacatcgaactgctgcgcgagctgaagggtcgccgcgaccgcgaggtggccgaggtccgttcgacccacgccgccgccggcggactgttcagccggttgcgcgagaccttcaccgggcgctaa

SEQ ID NO: 139728 - protein, 382 aa, Mycobacterium bovis
MARDYYGLLGVSKNASDADIKRAYRKLARELHPDVNPDEAAQAKFKEISVAYEVLSDPDKRRIVDLGGDPLESAAAGGNGFGGFGGLGDVFEAFFGGGFGGGAASRGPIGRVRPGSDSLLRMRLDLEECATGVTKQVTVDTAVLCDRCQGKGTNGDSVPIPCDTCGGRGEVQTVQRSLLGQMLTSRPCPTCRGVGVVIPDPCQQCMGDGRIRARREISVKIPAGVGDGMRVRLAAQGEVGPGGGPAGDLYVEVHEQAHDVFVREGDHLHCTVSVPMVDAALGVTVTVDAILDGLSEITIPPGTQPGSVITLRGRGMPHLRSNTRGDLHVHVEVVVPTRLDHQDIELLRELKGRRDREVAEVRSTHAAAGGLFSRLRETFTGR

SEQ ID NO: 139729 - DNA, 1140 bp, Streptomyces albus G
  CDS (1)..(1140): transl_table=11
gtggccacggactactacgccgtactcggcgtgcgccgcgacgcttcccaggacgagatcaagaaggcgttccgcagactcgcccgcgagctgcacccggacgtcaacccggatccgaagacgcaggagcgcttcaaggagatcaacgccgcctacgaggtcctctccgacccgcagaagaagcaggtctacgacctcggcggggaccccctgtcgcagaacggcggaggtggcgcgggcggcttcggacagggcggcttcggcaacttctccgacatcatggacgccttcttcggcacggcgtcccagcgcggtccccgctcgcgcacccggcgcggccaggacgccatgatccggctcgacatcgagctggacgaggccgccttcggcaccaccaaggacatccaggtcgacacggccgtcgtctgcaacacctgcaacggcgagggcgccgcccccggcacctccgcgcagacctgcgacatgtgccgaggccgcggtgaggtctcccaggtcacccggtccttcctcggccaggtcatgacctcccgcccctgcccccagtgccagggcttcgcgaccgtggtgcccaccccctgccccgagtgcgccggggacggccgggtcccgtcgcgccgcacgctgacggtgaagatcccggccggcgtcgacaacggcacccgcatccagctcgcgggcgagggcgaggtcggccccggcggcggccccggcggtgacctctacgtggagatccacgagctgccgcactccgtcttccagcggcgcggcgacgacctgcactgcacggtcaccatcccgatgaccggcccgcggccctcggcaccaaggtgcctggagacgctggacggcatggaggagatcgacatccggcccggcacccagtccggccagtcggtgccgctgcacgggcggggcatcacgcacctgcgcggcggcggcggccgtgacctgatcgtgcacgtcgaggtgaccacgcccggcaagctcgacgccgagcaggagcacctgctgcgcgaactggccaagctgcgcggcgaggagcggcccaccggccagttccagcccggccagcagggcctgttctcccgcctcaaggacgcgttcaacggccgctcctga

SEQ ID NO: 139730 - protein, 379 aa, Streptomyces albus G
MATDYYAVLGVRRDASQDEIKKAFRRLARELHPDVNPDPKTQERFKEINAAYEVLSDPQKKQVYDLGGDPLSQNGGGGAGGFGQGGFGNFSDIMDAFFGTASQRGPRSRTRRGQDAMIRLDIELDEAAFGTTKDIQVDTAVVCNTCNGEGAAPGTSAQTCDMCRGRGEVSQVTRSFLGQVMTSRPCPQCQGFATVVPTPCPECAGDGRVPSRRTLTVKIPAGVDNGTRIQLAGEGEVGPGGGPGGDLYVEIHELPHSVFQRRGDDLHCTVTIPMTGPRPSAPRCLETLDGMEEIDIRPGTQSGQSVPLHGRGITHLRGGGGRDLIVHVEVTTPGKLDAEQEHLLRELAKLRGEERPTGQFQPGQQGLFSRLKDAFNGRS

SEQ ID NO: 139731 - DNA, 1137 bp, Streptomyces avermitilis; identical to SEQ ID NO: 117863
  CDS (1)..(1137): transl_table=11

SEQ ID NO: 139732 - protein, 378 aa, Streptomyces avermitilis; identical to SEQ ID NO: 117864

SEQ ID NO: 139733 - DNA, 1137 bp, Streptomyces coelicolor; identical to SEQ ID NO: 117865
  CDS (1)..(1137): transl_table=11

SEQ ID NO: 139734 - protein, 378 aa, Streptomyces coelicolor; identical to SEQ ID NO: 117866

SEQ ID NO: 139735 - DNA, 1263 bp, Arabidopsis thaliana; identical to SEQ ID NO: 63979
  CDS (1)..(1263)

SEQ ID NO: 139736 - protein, 420 aa, Arabidopsis thaliana; identical to SEQ ID NO: 63980

SEQ ID NO: 139737 - DNA, 999 bp, Synechocystis sp
  CDS (1)..(999): transl_table=11
atggcatcaacagatttcaaagactattaccaaattttgggagtgaccaaaaccgcttcagaagctgaaatcaaaaagcagtttcgtaaattagcactgaaatatcatcctgacaaaaatcctggggataaggcggcggaggaaaaatttaaggaaattagcgaagcctatgaggtgctttctgaccccgaaaaacgccagaaatatgaccaatttggccgctattggcaacaggctggcacggcaggacaacccagtggcagctacggccctggagtcggcgtggattttggtggctttgactttagccagtacggcaattttgacgaatttattaatgaactgttgggacgcttcaatacccccggtggcggcggtcagagaacttcctacagctattccaccggcggccctggctttaatgactttggtggttttggcaatgcccaggcccccgcaggcgatcgggaagcaaccctacagttaactttggcggaagcttttcggggagtggaaaaacgtctcaacttaggggaagaaatggtcactgtgcggattcccgccggagcgaaaaatggcagtcgagtacgggtgaggggcaaaggtatggccagtccttacggtcaaaggggggatttgtatctcaacttgcaactgaccccccatccatttttccaatttgaaggggataacctggtctgtgaattggcgatcgccccggacgaagcggtgttgggggccgatattagtgtaccgacccccgatggcatggtgcgaatgaaagtcccggcaggagtcaaatccggccaatccctgcggttaaaagggaaaggttggccgaaccctaaacagggccgtggtgaccagttagtacgcctaatcatcactgctccgaaaaatcccagcgccattgaacgggaatgctatgaaaaaattcaggcgcaacggacagaaaatccccgccaagcggtggaaaaatacgccaatttgttggcatag

SEQ ID NO: 139738 - protein, 332 aa, Synechocystis sp
MASTDFKDYYQILGVTKTASEAEIKKQFRKLALKYHPDKNPGDKAAEEKFKEISEAYEVLSDPEKRQKYDQFGRYWQQAGTAGQPSGSYGPGVGVDFGGFDFSQYGNFDEFINELLGRFNTPGGGGQRTSYSYSTGGPGFNDFGGFGNAQAPAGDREATLQLTLAEAFRGVEKRLNLGEEMVTVRIPAGAKNGSRVRVRGKGMASPYGQRGDLYLNLQLTPHPFFQFEGDNLVCELAIAPDEAVLGADISVPTPDGMVRMKVPAGVKSGQSLRLKGKGWPNPKQGRGDQLVRLIITAPKNPSAIERECYEKIQAQRTENPRQAVEKYANLLA

SEQ ID NO: 139739 - DNA, 1140 bp, Acetobacter aceti; identical to SEQ ID NO: 117869
  CDS (1)..(1140): transl_table=11

SEQ ID NO: 139740 - protein, 379 aa, Acetobacter aceti; identical to SEQ ID NO: 117870

SEQ ID NO: 139741 - DNA, 1110 bp, Acholeplasma laidlawii; identical to SEQ ID NO: 63981
  CDS (1)..(1110): transl_table=11

SEQ ID NO: 139742 - protein, 369 aa, Acholeplasma laidlawii; identical to SEQ ID NO: 63982

SEQ ID NO: 139743 - DNA, 1134 bp, Agrobacterium tumefaciens; identical to SEQ ID NO: 63987
  CDS (1)..(1134): transl_table=11

SEQ ID NO: 139744 - protein, 377 aa, Agrobacterium tumefaciens; identical to SEQ ID NO: 63988

SEQ ID NO: 139745 - DNA, 1140 bp, Agrobacterium tumefaciens; identical to SEQ ID NO: 117875
  CDS (1)..(1140): transl_table=11

SEQ ID NO: 139746 - protein, 379 aa, Agrobacterium tumefaciens; identical to SEQ ID NO: 117876

SEQ ID NO: 139747 - DNA, 1140 bp, Anaplasma marginale; identical to SEQ ID NO: 117877
  CDS (1)..(1140): transl_table=11

SEQ ID NO: 139748 - protein, 379 aa, Anaplasma marginale; identical to SEQ ID NO: 117878

SEQ ID NO: 139749 - DNA, 1131 bp, Anabaena sp; identical to SEQ ID NO: 117879
  CDS (1)..(1131): transl_table=11

SEQ ID NO: 139750 - protein, 376 aa, Anabaena sp; identical to SEQ ID NO: 117880

SEQ ID NO: 139751 - DNA, 1116 bp, Bacillus anthracis
  CDS (1)..(1116): transl_table=11
atgagtaaacgagactattatgaggtccttgggcttagcaagggtgcttcaaaagatgaaataaaaaaagcgtatcgtcgtttggctaaaaaataccatccagacgtaagtaaagaagaaaatgcaattgaaaagtttaaagaagtacaagaagcatatgaagtattaagcgacgatcaaaagcgtgcgcaatatgatcaatttggtcatgctggtgcaaatcaaggttttggtggctttggcggcggaggagacttcggcggtggcttcggttttgaagatatctttagttcattctttggcggcggtggcggcagacgtcgtgatccaaatgctccgcgtcaaggtgctgacttacaatatcaagtcactttagagtttgaagaagcgatttttggtaaagagttaaatgtcgaaattccagtagaagatccatgtgatacttgtaaaggtagcggagcaaaaccaggaacttcaaaagaaacatgtaaacattgttcagggtcaggtcaagtaagtgtagaacaaaatacaccgtttggtcgtatcgtaaaccgtcaagcttgtagtcattgttcaggaactggtcaaatgattaaagaaaaatgtacgacatgtcacggttctggtaaagtacgtaaacgtaaaaaaatcaacgttaaaatcccagcaggtattgataatggtcaacaaatccgtgtatctggaaaaggtgaagcgggcgtaaacggcggaccagcaggagatttatatgttgttgttcatgtaagaagtcatgaattctttgagcgtgaaggagatcacattatttgcgaaatgccattaacgtttgcgcaaatggcacttggtgctgaagtagaagttcctactgttcatggtaaagtgaagttgaaaattccagcaggaacacaaactggaacggaattccgattaaaaggaaaaggtgctccgaatgtacgtggatatggtcaaggagatcaatatgtagtcgttcgtgttgttgtaccgacgaaattaacttcacatcaaaaagatttattacgtgaatttgcagggcaagaagagcaggatgatagtttattcggaaagcttaaacgtgctttcaaaggggaataa

SEQ ID NO: 139752 - protein, 371 aa, Bacillus anthracis
MSKRDYYEVLGLSKGASKDEIKKAYRRLAKKYHPDVSKEENAIEKFKEVQEAYEVLSDDQKRAQYDQFGHAGANQGFGGFGGGGDFGGGFGFEDIFSSFFGGGGGRRRDPNAPRQGADLQYQVTLEFEEAIFGKELNVEIPVEDPCDTCKGSGAKPGTSKETCKHCSGSGQVSVEQNTPFGRIVNRQACSHCSGTGQMIKEKCTTCHGSGKVRKRKKINVKIPAGIDNGQQIRVSGKGEAGVNGGPAGDLYVVVHVRSHEFFEREGDHIICEMPLTFAQMALGAEVEVPTVHGKVKLKIPAGTQTGTEFRLKGKGAPNVRGYGQGDQYVVVRVVVPTKLTSHQKDLLREFAGQEEQDDSLFGKLKRAFKGE

SEQ ID NO: 139753 - DNA, 1116 bp, Bacillus cereus; identical to SEQ ID NO: 117881
  CDS (1)..(1116): transl_table=11

SEQ ID NO: 139754 - protein, 371 aa, Bacillus cereus; identical to SEQ ID NO: 117882

SEQ ID NO: 139755 - DNA, 1116 bp, Bacillus cereus
  CDS (1)..(1116): transl_table=11
atgagtaaacgagactattatgaggtccttggacttagcaagggcgcttcaacagatgaaataaaaaaagcgtatcgtcgtttggctaaaaaataccatccagacgtaagcaaagaagaaaatgcaattgaaaagtttaaagaagtacaagaagcatatgaagtgttaagtgatgatcaaaagcgtgcgcagtacgatcaatttggtcatgctggtgcaaatcaaggattcggtggatttggcggcggaggagacttcggcggtggcttcggttttgaagatatatttagttctttctttggcggtggcggcggcagacgtcgtgatccaaatgctccgcgccaaggtgctgacttacaatatcaagtcactttagattttgaagaagctatttttggtaaggaattaaatgtggaaattccagtagaagatccatgtgatacttgtaaaggtagtggagcaaaaccaggaacttcaaaagaaacatgtaaacattgttcaggttctggtcaagtgagtgttgaacaaaacacaccgtttggtcgtatcgtaaaccgtcaagcttgtggtcattgttcaggaactggacaaattattaaagaaaaatgtacgacatgtcacggttcaagtaaagttcgtaaacgtaaaaaaatcaatgttaaaattccagcgggtatcgataatggtcaacaaattcgagtgtctggaaaaggtgaagccggcgtaaatggcggaccagcaagagacttatatgttgtcgttcatgtaagaaatcatgaattcttcgagcgtgaaggagatcacattatttgcgaaatgccattaacatttgcgcaaatggcgcttggtgatgaagtggaagttcctactgttcatggtaaagtgaagctgaaaattccagcaggaacacaaactggaacagaattccgcttaaaaggaaaaggtgctccgaatgtacgtggatacggccaaggagatcaatatgtagtcgttcgtgttgttgtaccgacgaaattgacttcacagcaaaaagatttattacgtgaatttgcaggacaagaagagcaggatgatagtttattcggaaagcttaaacgtgctttcaaaggggaataa

SEQ ID NO: 139756 - protein, 371 aa, Bacillus cereus
MSKRDYYEVLGLSKGASTDEIKKAYRRLAKKYHPDVSKEENAIEKFKEVQEAYEVLSDDQKRAQYDQFGHAGANQGFGGFGGGGDFGGGFGFEDIFSSFFGGGGGRRRDPNAPRQGADLQYQVTLDFEEAIFGKELNVEIPVEDPCDTCKGSGAKPGTSKETCKHCSGSGQVSVEQNTPFGRIVNRQACGHCSGTGQIIKEKCTTCHGSSKVRKRKKINVKIPAGIDNGQQIRVSGKGEAGVNGGPARDLYVVVHVRNHEFFEREGDHIICEMPLTFAQMALGDEVEVPTVHGKVKLKIPAGTQTGTEFRLKGKGAPNVRGYGQGDQYVVVRVVVPTKLTSQQKDLLREFAGQEEQDDSLFGKLKRAFKGE

SEQ ID NO: 139757 - DNA, 1185 bp, Bacteroides fragilis; identical to SEQ ID NO: 63989
  CDS (1)..(1185): transl_table=11

SEQ ID NO: 139758 - protein, 394 aa, Bacteroides fragilis; identical to SEQ ID NO: 63990

SEQ ID NO: 139759 - DNA, 1113 bp, Bacillus halodurans
  CDS (1)..(1113): transl_table=11
atgagcaaacgggattactatgaagtccttggtgttgatcgtaacgcgtccgcggatgaagtgaaaaaagcgtaccgtaaattggcacgtaaataccatcctgacgtgaacaaggcacccgatgcagaggataaatttaaggaagtaaaagaagcgttcgatacactaagtgatccgcagaaaaaagcccattatgaccaatttggccatacggatccgaaccaaggatttggcggtggcggtgctggtgacttcggtggttttagtgacatttttgatatgttctttggtggcggcgggggtagacgcaatccgaatgcacctcgtcaaggtgcggatctgcaatatacgatgacccttgaatttaaggaagctgttttcggtaaagaaacgacgattgaaatcccgcgggaagagacctgtcatacgtgttcaggctctggtgcaaagcctgggacgaagccggaatcttgtccgcattgcggtggctccggtcagcttaatattgagcaaaatacgccgtttggccgcgtcgttaatcgccgagtttgtcaccattgtgagggaacaggaaaatatattaagcataaatgtgcaacatgcggaggaaaaggaaaagtacgtaaacggaaaaaaatcaatgtcaaagtaccggcaggcattgatcacggtcaacaaataaggctctctggccaaggggaagctggagttaacggaggacctgctggagatttatatattgtgtttaatgtgaagccccatgagttttttgagcgtgatggcgatgacatttattgtgaaatgccgttaacctttgtccaagtagccctaggcgatgagattgaagtcccaacattgaatgggaaagttaagctaaaaatcccagcagggacgcaaacgggtacgagttttcgcttgcgcggaaaaggagttccgaacgtacacggtcgcgggcaaggagatcagcatgttcaagttcgcgtcattacgccgaagcagctctctgaaaaagaaaaagagctacttcgtgagtttgcacaaatgtcaggcggtcgccccgacgagcaagacgattccttttttgcaaaagtgaagcgagcgtttaaagggtaa

SEQ ID NO: 139760 - protein, 370 aa, Bacillus halodurans
MSKRDYYEVLGVDRNASADEVKKAYRKLARKYHPDVNKAPDAEDKFKEVKEAFDTLSDPQKKAHYDQFGHTDPNQGFGGGGAGDFGGFSDIFDMFFGGGGGRRNPNAPRQGADLQYTMTLEFKEAVFGKETTIEIPREETCHTCSGSGAKPGTKPESCPHCGGSGQLNIEQNTPFGRVVNRRVCHHCEGTGKYIKHKCATCGGKGKVRKRKKINVKVPAGIDHGQQIRLSGQGEAGVNGGPAGDLYIVFNVKPHEFFERDGDDIYCEMPLTFVQVALGDEIEVPTLNGKVKLKIPAGTQTGTSFRLRGKGVPNVHGRGQGDQHVQVRVITPKQLSEKEKELLREFAQMSGGRPDEQDDSFFAKVKRAFKG

SEQ ID NO: 139761 - DNA, 1128 bp, Bacillus licheniformis; identical to SEQ ID NO: 117889
  CDS (1)..(1128): transl_table=11

SEQ ID NO: 139762 - protein, 375 aa, Bacillus licheniformis; identical to SEQ ID NO: 117890

SEQ ID NO: 139763 - DNA, 1119 bp, Bacillus subtilis; identical to SEQ ID NO: 117895
  CDS (1)..(1119): transl_table=11

SEQ ID NO: 139764 - protein, 372 aa, Bacillus subtilis; identical to SEQ ID NO: 117896

SEQ ID NO: 139765 - DNA, 1191 bp, Bacteroides thetaiotaomicron; identical to SEQ ID NO: 63991
  CDS (1)..(1191): transl_table=11

SEQ ID NO: 139766 - protein, 396 aa, Bacteroides thetaiotaomicron; identical to SEQ ID NO: 63992

SEQ ID NO: 139767 - DNA, 1143 bp, Bacillus thermoglucosidasius; identical to SEQ ID NO: 63993
  CDS (1)..(1143): transl_table=11

SEQ ID NO: 139768 - protein, 380 aa, Bacillus thermoglucosidasius; identical to SEQ ID NO: 63994

SEQ ID NO: 139769 - DNA, 1146 bp, Bartonella henselae; identical to SEQ ID NO: 117901
  CDS (1)..(1146): transl_table=11

SEQ ID NO: 139770 - protein, 381 aa, Bartonella henselae; identical to SEQ ID NO: 117902

SEQ ID NO: 139771 - DNA, 1143 bp, Bartonella quintana; identical to SEQ ID NO: 117903
  CDS (1)..(1143): transl_table=11

SEQ ID NO: 139772 - protein, 380 aa, Bartonella quintana; identical to SEQ ID NO: 117904

SEQ ID NO: 139773 - DNA, 1116 bp, Bdellovibrio bacteriovorus; identical to SEQ ID NO: 117905
  CDS (1)..(1116): transl_table=11

SEQ ID NO: 139774 - protein, 371 aa, Bdellovibrio bacteriovorus; identical to SEQ ID NO: 117906

SEQ ID NO: 139775 - DNA, 1146 bp, Bifidobacterium longum
  CDS (1)..(1146): transl_table=11
gtggcagattattacgagacgctgggtgtggaacgcggcgccagtgacgacgagatcaagaaggcataccgcaagctcagccgtaagtaccaccccgacatcgcgggccctgagttcgaggacaagttcaaggaagtgaacaacgcctacgatgtgctgtccaatccggacaaacgccgtatgtatgattcgggagtcgacccgaacaacccgaacgccggtgccggcggcttctccggggcgggcttcggcgatatgagcgacgtgttctccacgttcttcggttccgcgttcggcggtggctcacagggcccggtgccgcgtacccagcccggccgcgatgccttggcctcggcgtccatcgatttgaagacggcggtgttcggcggcaccgcgcatgtcaagatcaatacgttctccctgtgccaggagtgcggtggctccggtgcccagggcggcgcacagccggtcacctgccccgactgccacggacagggattcatgcagaaggtcgtgcgcaccatgctcggccagatgatgacctccgccccctgtgaacgttgcgagggccacggtaccatcatccagaacccgtgccccagctgcatgggccacggccgtgtgcgcaccacgcgtaccgtgggcgttaccgtgcccgccggcatcaacgacaacgcgcgtctgcggttggccaaccagggcgaagtgggtgagggcggcggcgctgccggcgacctgtacatcgacatccgcatcaaggcggataagcagttcacccgcgatggcgacgacctgcactgctggattcaggtgccgatgagctgggccgtgcttggccacgatctgtccattgatacgttcgatggtgagaagaccgtgtccatcccggccggctgccagactgaggacacggtgacgctgaagggactgggcgtcacgaacatccgcaacaaggacgagcgcggcaacctcatcgcccacgtcaatgtgcttatccccaccaagctcaacgaaaccgagcgtggcctcatcgaacagttcgccgcctcgcacgattcaggcgccacgcacgtctcccaggcatcccgtccacaggccggtcaaaagaaaggtttcttcagcaagttgaaggacgcactgagctga

SEQ ID NO: 139776 - protein, 381 aa, Bifidobacterium longum
MADYYETLGVERGASDDEIKKAYRKLSRKYHPDIAGPEFEDKFKEVNNAYDVLSNPDKRRMYDSGVDPNNPNAGAGGFSGAGFGDMSDVFSTFFGSAFGGGSQGPVPRTQPGRDALASASIDLKTAVFGGTAHVKINTFSLCQECGGSGAQGGAQPVTCPDCHGQGFMQKVVRTMLGQMMTSAPCERCEGHGTIIQNPCPSCMGHGRVRTTRTVGVTVPAGINDNARLRLANQGEVGEGGGAAGDLYIDIRIKADKQFTRDGDDLHCWIQVPMSWAVLGHDLSIDTFDGEKTVSIPAGCQTEDTVTLKGLGVTNIRNKDERGNLIAHVNVLIPTKLNETERGLIEQFAASHDSGATHVSQASRPQAGQKKGFFSKLKDALS

SEQ ID NO: 139777 - DNA, 1122 bp, Bordetella bronchiseptica; identical to SEQ ID NO: 117909
  CDS (1)..(1122): transl_table=11

SEQ ID NO: 139778 - protein, 373 aa, Bordetella bronchiseptica; identical to SEQ ID NO: 117910

SEQ ID NO: 139779 - DNA, 1095 bp, Borrelia garinii
  CDS (1)..(1095): transl_table=11
gtgaaaaaagattattatgaaattttggggctctcaaaaggagcctcaaaagatgaaataaaaaaagcttatagaaaaatagcaattaaatatcaccccgacagaaatcaaggaaatgaagaggccgcttctatctttaaagaagctactcaagcttacgaagttttaatagacgataataaaaaagccaaatacgacagatttgggcattcggcttttgaaggagggggttttgagggattttcaggtggatttagtggattttcagacatcttcgaagattttggcgatatttttgattcatttttcactggaaacaaaggacaagaaagaaatagaaaacatgcaagaggtgaagacttaggatacaatatagaaatatcccttgaaaatgcatactttggttacaaaaataatataaacataacaagacaaatactctgccattcttgtcttgggaaaaaatccgaaaaagggacaagtccttcaatatgtaatatgtgtaacggtagcggcagagtagtacaaggcggaggatttttcagagttacaacaacatgttccaaatgctacggtgagggtaaaacaatatcaaacccttgtaaatcttgtaaggggaaagggcgtattacaaatcaagaaactattcaattaaacattccttcagggattgataataaccaacaaataaaaatgaaagggaaagggaatgttaatccagacaaccaagaatatggtgatctttatgtaaaaatattaataagatctcataaaatatttaaaagaaatggcaaagatctctacgcaatgcttccaataagctttactcaagcagcccttggaaaagaagtaagaataaaaacaatagcttcaaaagaaattaaaatacaaattccaaaaggaatagaaaatgaagaacaaattatagttaaaggcgcaggaatgccaattcttcaaaccgaaaagtttggaaacttaatattaatcactaaaataaaaacacctaaaaatttaaattctaatgctatcaaactttttgaaaacttaagtaaagaattaagagatggtgatgaaatagatttactcaaagtataa

SEQ ID NO: 139780 - protein, 364 aa, Borrelia garinii
MKKDYYEILGLSKGASKDEIKKAYRKIAIKYHPDRNQGNEEAASIFKEATQAYEVLIDDNKKAKYDRFGHSAFEGGGFEGFSGGFSGFSDIFEDFGDIFDSFFTGNKGQERNRKHARGEDLGYNIEISLENAYFGYKNNINITRQILCHSCLGKKSEKGTSPSICNMCNGSGRVVQGGGFFRVTTTCSKCYGEGKTISNPCKSCKGKGRITNQETIQLNIPSGIDNNQQIKMKGKGNVNPDNQEYGDLYVKILIRSHKIFKRNGKDLYAMLPISFTQAALGKEVRIKTIASKEIKIQIPKGIENEEQIIVKGAGMPILQTEKFGNLILITKIKTPKNLNSNAIKLFENLSKELRDGDEIDLLKV

SEQ ID NO: 139781 - DNA, 1134 bp, Bordetella parapertussis; identical to SEQ ID NO: 117911
  CDS (1)..(1134): transl_table=11

SEQ ID NO: 139782 - protein, 377 aa, Bordetella parapertussis; identical to SEQ ID NO: 117912

SEQ ID NO: 139783 - DNA, 1158 bp, Bordetella pertussis
  CDS (1)..(1158): transl_table=11
atggcaaaacgcgattactacgaagtactgggtgtggcgaagaatgccagcgacgaagacctgaagaaggcctatcgcaagctggccatgaagtaccacccggaccgcaacccggacagcaaggaagccgaggaaaagttcaaggaagccaaggaggcctacgaggtcctgggtgacgagcagaagcgcgccgcctacgaccgctatggccatgccggggtcgacccgaacgccgccggcatgggcggcggcatgggcggcggcatgggcggcggcatgggcggcggcatgggcggcggcttcgccgatgctttcggcgatatctttggcgagatcttcggcgcgggtcggcgcgggggcggcgggccgcaggtatatcgcggcgccgacctgaagtacgcgctggaaatcacgctggagcaggccgccagcggttttgacaccgagatccgcgttcccagctgggaaaactgcgatacctgccacggcagcggcgccaaggccggcacctcgcccaagacttgccggacttgcggcggttcgggcgcggtgcgcatgcagcagggctttttcagcgtccagcagacctgcccgacctgccacggcaccggcaaggaaatcaccgacccctgcccgtcgtgcgacggcgtgggccgtacgcgtcgcaacaagacgctgcaggtcaagatcccggccggcatcgacgacggcatgcgcatccgctccagcggcaacggcgagcccggcatcaacggcggcccgccgggcgacctgtatgtcgagatccatatcaagcagcacaagatcttccagcgcgatggcgacgatctgcactgcgagctgaccatcccgttcaccacggcggcgctgggcggcgagctgcaggtgccgaccctgggcggcaaggccgagatctcgattccggaaggcacgcagtcgggcaagaccttccgcctgcgcgccaagggcatccgcggggtgcgcggcagttatccgggcgacctctactgccacgtggtggtcgagacgccggtgcgcctgagcgacgagcagaaggccatcctgcgccagttcgaggcttcgctcaacgacggcggcgaccgccattcgccgcagagcaagtcctggaccgaccgcgtcaaggagttcttcagctga

SEQ ID NO: 139784 - protein, 385 aa, Bordetella pertussis
MAKRDYYEVLGVAKNASDEDLKKAYRKLAMKYHPDRNPDSKEAEEKFKEAKEAYEVLGDEQKRAAYDRYGHAGVDPNAAGMGGGMGGGMGGGMGGGMGGGFADAFGDIFGEIFGAGRRGGGGPQVYRGADLKYALEITLEQAASGFDTEIRVPSWENCDTCHGSGAKAGTSPKTCRTCGGSGAVRMQQGFFSVQQTCPTCHGTGKEITDPCPSCDGVGRTRRNKTLQVKIPAGIDDGMRIRSSGNGEPGINGGPPGDLYVEIHIKQHKIFQRDGDDLHCELTIPFTTAALGGELQVPTLGGKAEISIPEGTQSGKTFRLRAKGIRGVRGSYPGDLYCHVVVETPVRLSDEQKAILRQFEASLNDGGDRHSPQSKSWTDRVKEFFS

SEQ ID NO: 139785 - DNA, 1134 bp, Bradyrhizobium japonicum; identical to SEQ ID NO: 63995
  CDS (1)..(1134): transl_table=11

SEQ ID NO: 139786 - protein, 377 aa, Bradyrhizobium japonicum; identical to SEQ ID NO: 63996

SEQ ID NO: 139787 - DNA, 1128 bp, Brevibacillus choshinensis; identical to SEQ ID NO: 117913
  CDS (1)..(1128): transl_table=11

SEQ ID NO: 139788 - protein, 375 aa, Brevibacillus choshinensis; identical to SEQ ID NO: 117914

SEQ ID NO: 139789 - DNA, 1134 bp, Brucella melitensis; identical to SEQ ID NO: 63997
  CDS (1)..(1134): transl_table=11

SEQ ID NO: 139790 - protein, 377 aa, Brucella melitensis; identical to SEQ ID NO: 63998

SEQ ID NO: 139791 - DNA, 1131 bp, Burkholderia cepacia
  CDS (1)..(1131): transl_table=11
atggcgaaacgggattactacgaggttctgggcgtcgcgaagaacgcgagcgacgacgaaatcaagaaggcgtatcgcaagctggcgatgaagtaccacccggaccgcaatccggacaacaaggatgcggaagagcatttcaaggaggtgaaggaagcctatgaaatgctgtcggacagccagaagcgggccgcgtacgaccagtacggccacgcgggcgtcgacccgaacatgggcggtgcgggcgcacagggcttcggcggcttcgcggacgcgttcggcgacatcttcggcgacatcttcggtcaggccgcgggcggtcgaggcggccgcggcggcccgcaggtgtatcgcggcgccgacctgcgctacagcatggaaatcacgctggagcaggccgcgcacggctacgacacgcagatccgcgtgccgagctgggtatcgtgcgaagtctgtcacggctcgggcgcgaagccgggcacgaagcccgaaacctgcccgacctgtcatggccagggcaccgtgcgcatgtcgcagggcttcttcagcatccagcagacctgcccgaagtgtcacggcaccggcacctacatcccggagccgtgcgcgcactgccacggctcgggcaaggtgaaggaaaccaagacgctcgaagtgaagatcccggccgggatcgacgacgggatgcggatccgttcggccggcaacggcgagccgggcatcaacggcgggccgccgggcgacctctacgtcgagatccacatcaagccgcacgcggtcttcgagcgcgacggcgacgatctgcactgccagatgccgatcccgttcacgacggcggcgctcggcggcgagatcgaggtgccgacgctggccggtcgcgcgacgttcccggtgccggaaggcacgcagtcgggcaagacgttccgtctgcgcggcaagggcatcaaggggctgcgctcgagcattgccggcgatctgtacgtgcacgtccaggtcgagacgccggtgaagctgaccgagcaccagcgcgatctgctcaagcagttcgagaagtcgctggccgaaggcggtgcgcgtcacagcccgcagagcaagagctggttcgaccgcgtgaagagcttcttcgagtaa

SEQ ID NO: 139792 - protein, 376 aa, Burkholderia cepacia
MAKRDYYEVLGVAKNASDDEIKKAYRKLAMKYHPDRNPDNKDAEEHFKEVKEAYEMLSDSQKRAAYDQYGHAGVDPNMGGAGAQGFGGFADAFGDIFGDIFGQAAGGRGGRGGPQVYRGADLRYSMEITLEQAAHGYDTQIRVPSWVSCEVCHGSGAKPGTKPETCPTCHGQGTVRMSQGFFSIQQTCPKCHGTGTYIPEPCAHCHGSGKVKETKTLEVKIPAGIDDGMRIRSAGNGEPGINGGPPGDLYVEIHIKPHAVFERDGDDLHCQMPIPFTTAALGGEIEVPTLAGRATFPVPEGTQSGKTFRLRGKGIKGLRSSIAGDLYVHVQVETPVKLTEHQRDLLKQFEKSLAEGGARHSPQSKSWFDRVKSFFE

SEQ ID NO: 139793 - DNA, 1131 bp, Burkholderia pseudomallei
  CDS (1)..(1131): transl_table=11
atggcgaaacgggattactacgaggttctgggcgtcgcgaagaacgcgagcgacgacgaaatcaagaaggcatatcgcaagctcgcgatgaagtaccatcccgaccgcaatccggacagcaaggatgcggaggagcatttcaaggaagcgaaggaagcctatgaaatgctgtcggacggccagaagcgggccgcgtacgaccagtacggccacgcgggcgtcgatccgaacgtgggggcggcgggcgcgcaaggcttcggcggctttgccgatgcgttcggcgacatcttcggcgacatcttcggccaggcggcgggcggcggtcgcgcgcgcggcggcccgcaggtgtatcgcggcgcggacctgcgctacagcatggaaatcacgctcgagcaggcggcgcacggctacgacacgcaaatccgcgtgccgagctgggccgcgtgcggcgtgtgccacggctcgggcgcgaagccgggcacgaagccggaaacctgcccgacctgtcacggccagggcacggtgcggatgtcgcagggcttcttcagcatccagcagacctgcccgaagtgccacggcaccggcacctacattccggagccatgcgtgcactgccacggctcgggcaaggtgaaggaaaccaagacgctcgaagtgaagatcccggcgggcatcgacgacggcatgcggatccgctcggccggcaacggcgagccgggcatcaacggcgggccgtccggcgatctgtacgtcgagatccatatcaagccgcacgcggtgttcgagcgcgacggcgacgatctgcactgccagatgccgattccgttcacgacggccgcgctgggcggcgagatcgaagtgccgacgctcgccggacgcgcgtcgttcacggtgcccgaaggcacgcagtcgggcaagacgttccgcctgcgcggcaagggcatcaaggggctgcgctcgagcatcgcgggcgatctgtacgtgcacgtgcaggtcgagacgcccgtgaagctcaccgatcagcagcgcgatctgctcaagcagttcgagaagtcgctcgcggaaggcggcccgcgtcacagcccgcagagcaagagctggttcgaccgcgtgaagagcttcttcgagtga

SEQ ID NO: 139794 - protein, 376 aa, Burkholderia pseudomallei
MAKRDYYEVLGVAKNASDDEIKKAYRKLAMKYHPDRNPDSKDAEEHFKEAKEAYEMLSDGQKRAAYDQYGHAGVDPNVGAAGAQGFGGFADAFGDIFGDIFGQAAGGGRARGGPQVYRGADLRYSMEITLEQAAHGYDTQIRVPSWAACGVCHGSGAKPGTKPETCPTCHGQGTVRMSQGFFSIQQTCPKCHGTGTYIPEPCVHCHGSGKVKETKTLEVKIPAGIDDGMRIRSAGNGEPGINGGPSGDLYVEIHIKPHAVFERDGDDLHCQMPIPFTTAALGGEIEVPTLAGRASFTVPEGTQSGKTFRLRGKGIKGLRSSIAGDLYVHVQVETPVKLTDQQRDLLKQFEKSLAEGGPRHSPQSKSWFDRVKSFFE

SEQ ID NO: 139795 - DNA, 1158 bp, Caulobacter crescentus; identical to SEQ ID NO: 117923
  CDS (1)..(1158): transl_table=11

SEQ ID NO: 139796 - protein, 385 aa, Caulobacter crescentus; identical to SEQ ID NO: 117924

SEQ ID NO: 139797 - DNA, 1176 bp, Chlamydophila abortus; identical to SEQ ID NO: 117925
  CDS (1)..(1176): transl_table=11

SEQ ID NO: 139798 - protein, 391 aa, Chlamydophila abortus; identical to SEQ ID NO: 117926

SEQ ID NO: 139799 - DNA, 1179 bp, Chlamydophila caviae; identical to SEQ ID NO: 117927
  CDS (1)..(1179): transl_table=11

SEQ ID NO: 139800 - protein, 392 aa, Chlamydophila caviae; identical to SEQ ID NO: 117928

SEQ ID NO: 139801 - DNA, 1179 bp, Chlamydia muridarum; identical to SEQ ID NO: 117929
  CDS (1)..(1179): transl_table=11

SEQ ID NO: 139802 - protein, 392 aa, Chlamydia muridarum; identical to SEQ ID NO: 117930

SEQ ID NO: 139803 - DNA, 1179 bp, Chlamydia pneumoniae; identical to SEQ ID NO: 64001
  CDS (1)..(1179): transl_table=11

SEQ ID NO: 139804 - protein, 392 aa, Chlamydia pneumoniae; identical to SEQ ID NO: 64002

SEQ ID NO: 139805 - DNA, 1212 bp, Chlorobium tepidum; identical to SEQ ID NO: 117933
  CDS (1)..(1212): transl_table=11

SEQ ID NO: 139806 - protein, 403 aa, Chlorobium tepidum; identical to SEQ ID NO: 117934

SEQ ID NO: 139807 - DNA, 1179 bp, Chlamydia trachomatis; identical to SEQ ID NO: 117935
  CDS (1)..(1179): transl_table=11

SEQ ID NO: 139808 - protein, 392 aa, Chlamydia trachomatis; identical to SEQ ID NO: 117936

SEQ ID NO: 139809 - DNA, 1128 bp, Chromobacterium violaceum; identical to SEQ ID NO: 117937
  CDS (1)..(1128): transl_table=11

SEQ ID NO: 139810 - protein, 375 aa, Chromobacterium violaceum; identical to SEQ ID NO: 117938

SEQ ID NO: 139811 - DNA, 1125 bp, Clostridium acetobutylicum; identical to SEQ ID NO: 64003
  CDS (1)..(1125): transl_table=11

SEQ ID NO: 139812 - protein, 374 aa, Clostridium acetobutylicum; identical to SEQ ID NO: 64004

SEQ ID NO: 139813 - DNA, 1164 bp, Clostridium perfringens
  CDS (1)..(1164): transl_table=11
gtggctaaaagagattactatgaagtgcttggacttcaaaagggtgcttcagatgatgagataaaaagagcttttagaaaaatggctatgaaatatcacccggatagaaatcctggagataaggaagcggaagaaaactttaaagaagtaaatgaagcatatgatgttttaaaagaccctgataaaaaagctaaatatgatcaatttggtcatgctgctttcgatggaagcggtggctttggtggtggcggatttggtggctttgatgctggtggattcgacttctcagaaatgggcggatttggagatatttttgaatcattctttggtggaggatttggtggcggatcatctagaagaagaaatgctccacaaagaggtgctgatttagaatatagattaaatataacatttgaagaagcagtatttggatgtgaaaaagaaatatctataactagaactgaaaattgtgaaacttgtcatggtacaggtgctaaagcaggcacatctcctaagacttgtccaaaatgtaatggttcaggtcaaataagagttcaaagacaaactcctttaggaagctttgtatctacaacaacttgtgatcaatgtggtggaacaggtaaagtgattgaagatccatgtccagattgtaagggtaaaggaactgttagaaagaatagaaagataacagttaagataccagcaggtgtagatactggaaacataatacctttaagaggacaaggtgagcaaggtgctaataatggtcctgcaggagatttatatataagagtaaatgttgctccatctaagatatttagaagagaaggttcagatatttactatgattacaagataagtatggctaaggctgcattaggagcagaaataactgttccaactgtagatggaaatgttaaatataaggttccagcaggtactcaaccaggaactaagtttagattaaaaggaaaaggtgttcctcacgttaatggtggaggaagaggaaaccaatacgttcatatggtagtagaggttccaaaacatctaaataaagagcaagaagaagcattaaaagcctttatgaaggcatctggggaatcagttgatgatatagatgaaaaagatgaaggattcttctcaaaatttaaaaagaaaaaatag

SEQ ID NO: 139814 - protein, 387 aa, Clostridium perfringens
MAKRDYYEVLGLQKGASDDEIKRAFRKMAMKYHPDRNPGDKEAEENFKEVNEAYDVLKDPDKKAKYDQFGHAAFDGSGGFGGGGFGGFDAGGFDFSEMGGFGDIFESFFGGGFGGGSSRRRNAPQRGADLEYRLNITFEEAVFGCEKEISITRTENCETCHGTGAKAGTSPKTCPKCNGSGQIRVQRQTPLGSFVSTTTCDQCGGTGKVIEDPCPDCKGKGTVRKNRKITVKIPAGVDTGNIIPLRGQGEQGANNGPAGDLYIRVNVAPSKIFRREGSDIYYDYKISMAKAALGAEITVPTVDGNVKYKVPAGTQPGTKFRLKGKGVPHVNGGGRGNQYVHMVVEVPKHLNKEQEEALKAFMKASGESVDDIDEKDEGFFSKFKKKK

SEQ ID NO: 139815 - DNA, 1128 bp, Clostridium tetani; identical to SEQ ID NO: 117941
  CDS (1)..(1128): transl_table=11

SEQ ID NO: 139816 - protein, 375 aa, Clostridium tetani; identical to SEQ ID NO: 117942

SEQ ID NO: 139817 - DNA, 1140 bp, Colwellia maris; identical to SEQ ID NO: 117943
  CDS (1)..(1140): transl_table=11

SEQ ID NO: 139818 - protein, 379 aa, Colwellia maris; identical to SEQ ID NO: 117944

SEQ ID NO: 139819 - DNA, 1263 bp, Deinococcus radiodurans; identical to SEQ ID NO: 139207
  CDS (133)..(1263): transl_table=11
  misc_feature (364)..(364): y is t or c

SEQ ID NO: 139820 - protein, 376 aa, Deinococcus radiodurans
  misc_feature (78)..(78): The Xaa at location 78 stands for Pro, or Ser.
MDYYELLGVSRTASADEIKSAYRKLALKLHPDRNKEEGAAEKFAQVSEAYSVLSDTEKRAHYDRFGSAPGAGMPGGDXFGGMGGMGGVGFDPMDIFEQLFGGAAGMGGRGRRGPARGDDLETEVRITLEQARAGEEVEVTVDRLTECEHCHGTRTEPGGKPPVTCSTCNGSGAVRGQARTIFGVVETQQVCPTCKGDGKMVVDPCTVCHGRGRTLKSEPVKVKLPKGIDEGYRIRVAGQGNEGPGGNGDLYVHIEMEPHPELHRQDENLIFPARIGFATAALGGRIQVPTLDGPQEVEVKPGTQHGELHRLRGQGMPRLQGAGTGDLIVDYEIVVPKHLNAEAKDALQAYARAVGDEVPEEHEGLFGKIGKLFGRD

SEQ ID NO: 139821 - DNA, 1122 bp, Desulfotalea psychrophila
  CDS (1)..(1122): transl_table=11
atgactattgattattacgaaacattatctgttgaacgagatgcggatcagggcactataaaaaaggcctaccgcaagttggcaatgaagtatcacccggatcgcaatcaaggggacaaggaagctgagactctttttaaagagtgtactgaggcctatgaagtacttcgtgatgaaagtaaacgccgaatatatgatacctatggtcacgaagggttaaagaataatggccagcgtgatacgggcggtgccggtgatattttctctcattttggcgatttatttggctttggtggcggtggtggaagatctcaggcgcgtcgaaatgggccgattgagggaaatgatctgcgttacgatgtctctatctcttttatggagtcgatacaaggtgtctccaaagaggtgaagctttctcgtcgtgaaacctgttggacctgcgagggaacaggaagtcggccgggctatcagcctcagacctgtcccacctgtaatggtcgtggccaggttcttcgttcgcaaggattttttcaggtcagtacaacctgcccggaatgtgagggcgagggccaggtgattaaagagccatgtaatgactgtcatggtgaaggtctggtcaaaaagactaagactgttgctatcaaaattcctgccggagttgatacgggcgctcgtatgcgtttgcgtggtgagggtgaaggcggacgtcgtggtggtccctccggtgatctcttcgtcatagtccatgtatcatcccatgaattttttgaacgtgatggtgacacaatttactgtcgtttgcctgtgtcaatgaccacggcagctcttggtgatacggttgatgttcccactgttcatggcaagaaaaatttgaaaatacctgctggtagccaatccggagagcgattcactctgcgtggtgaaggtgtcccctctcttagaggtcggggtaacggtgatatggtggttgagcttcatgtggaaacccccaccggtctttgtgaagagcagaagaaaatgcttcgggattttcactctttttgtgaggaacatggccagcacgaaaaaacgaagggcttttttgcaaaactttttgatgaagttcttggaaaaaacaaataa

SEQ ID NO: 139822 - protein, 373 aa, Desulfotalea psychrophila
MTIDYYETLSVERDADQGTIKKAYRKLAMKYHPDRNQGDKEAETLFKECTEAYEVLRDESKRRIYDTYGHEGLKNNGQRDTGGAGDIFSHFGDLFGFGGGGGRSQARRNGPIEGNDLRYDVSISFMESIQGVSKEVKLSRRETCWTCEGTGSRPGYQPQTCPTCNGRGQVLRSQGFFQVSTTCPECEGEGQVIKEPCNDCHGEGLVKKTKTVAIKIPAGVDTGARMRLRGEGEGGRRGGPSGDLFVIVHVSSHEFFERDGDTIYCRLPVSMTTAALGDTVDVPTVHGKKNLKIPAGSQSGERFTLRGEGVPSLRGRGNGDMVVELHVETPTGLCEEQKKMLRDFHSFCEEHGQHEKTKGFFAKLFDEVLGKNK

SEQ ID NO: 139823 - DNA, 1131 bp, Desulfovibrio vulgaris; identical to SEQ ID NO: 117947
  CDS (1)..(1131): transl_table=11

SEQ ID NO: 139824 - protein, 376 aa, Desulfovibrio vulgaris; identical to SEQ ID NO: 117948

SEQ ID NO: 139825 - DNA, 1131 bp, Escherichia coli O157; identical to SEQ ID NO: 117949
  CDS (1)..(1131): transl_table=11

SEQ ID NO: 139826 - protein, 376 aa, Escherichia coli O157; identical to SEQ ID NO: 117950

SEQ ID NO: 139827 - DNA, 1131 bp, Escherichia coli
  CDS (1)..(1131): transl_table=11
atggctaagcaagattattacgagattttaggcgtttccaaaacagcggaagagcgtgaaatcagaaaggcctacaaacgcctggccatgaaataccacccggaccgtaaccagggtgacaaagaggccgaggcgaaatttaaagagatcaaggaagcttatgaagttctgaccgactcgcaaaaacgtgcggcatacgatcagtatggtcatgctgcgtttgagcaaggtggcatgggcggcggcggttttggcggcggcgcagacttcagcgatatttttggtgacgttttcggcgatatttttggcggcggacgtggtcgtcaacgtgcggcgcgcggtgctgatttacgctataacatggagctcaccctcgaagaagctgtacgtggcgtgaccaaagagatccgcattccgactctggaagagtgtgacgtttgccacggtagcggtgcaaaaccaggtacacagccgcagacttgtccgacctgtcatggttctggtcaggtgcagatgcgccagggattcttcgctgtacagcagacctgtccacactgtcagggccgcggtacgctgatcaaagatccgtgcaacaaatgtcatggtcatggtcgtgttgagcgcagcaaaacgctgtccgttaaaatcccggcaggggtggacactggagaccgcatccgtcttgcgggcgaaggtgaagcgggcgagcatggcgcaccggcaggcgatctgtacgttcaggttcaggttaaacagcacccgattttcgagcgtgaaggcaacaacctgtattgcgaagtcccgatcaacttcgctatggcggcgctgggtggcgaaatcgaagtaccgacccttgatggtcgcgtcaaactgaaagtgcctggcgaaacccagaccggtaagctattccgtatgcgcggtaaaggcgtcaagtctgtccgcggtggcgcacagggtgatttgctgtgccgcgttgtcgtcgaaacaccggtaggcctgaacgaaaggcagaaacagctgctgcaagagctgcaagaaagcttcggtggcccaaccggcgagcacaacagcccgcgctcaaagagcttctttgatggtgtgaagaagttttttgacgacctgacccgctaa

SEQ ID NO: 139828 - protein, 376 aa, Escherichia coli
MAKQDYYEILGVSKTAEEREIRKAYKRLAMKYHPDRNQGDKEAEAKFKEIKEAYEVLTDSQKRAAYDQYGHAAFEQGGMGGGGFGGGADFSDIFGDVFGDIFGGGRGRQRAARGADLRYNMELTLEEAVRGVTKEIRIPTLEECDVCHGSGAKPGTQPQTCPTCHGSGQVQMRQGFFAVQQTCPHCQGRGTLIKDPCNKCHGHGRVERSKTLSVKIPAGVDTGDRIRLAGEGEAGEHGAPAGDLYVQVQVKQHPIFEREGNNLYCEVPINFAMAALGGEIEVPTLDGRVKLKVPGETQTGKLFRMRGKGVKSVRGGAQGDLLCRVVVETPVGLNERQKQLLQELQESFGGPTGEHNSPRSKSFFDGVKKFFDDLTR

SEQ ID NO: 139829 - DNA, 1149 bp, Ehrlichia ruminantium; identical to SEQ ID NO: 117951
  CDS (1)..(1149): transl_table=11

SEQ ID NO: 139830 - protein, 382 aa, Ehrlichia ruminantium; identical to SEQ ID NO: 117952

SEQ ID NO: 139831 - DNA, 1170 bp, Enterococcus faecalis; identical to SEQ ID NO: 64007
  CDS (1)..(1170): transl_table=11

SEQ ID NO: 139832 - protein, 389 aa, Enterococcus faecalis; identical to SEQ ID NO: 64008

SEQ ID NO: 139833 - DNA, 1140 bp, Erwinia carotovora subsp; identical to SEQ ID NO: 64009
  CDS (1)..(1140): transl_table=11

SEQ ID NO: 139834 - protein, 379 aa, Erwinia carotovora subsp; identical to SEQ ID NO: 64010

SEQ ID NO: 139835 - DNA, 1113 bp, Erysipelothrix rhusiopathiae; identical to SEQ ID NO: 64011
  CDS (1)..(1113): transl_table=11

SEQ ID NO: 139836 - protein, 370 aa, Erysipelothrix rhusiopathiae; identical to SEQ ID NO: 64012

SEQ ID NO: 139837 - DNA, 1179 bp, Fusobacterium nucleatum subsp
  CDS (1)..(1179): transl_table=11
atggcaaaaagagactattatgaagtccttggaatagataaaagtgcaagtgaaaatgatataaagaaggcatatagaaaagcagctatgaagtatcaccctgataagtttgcaaatgcaagtgatgcagaaaagaaagatgcagaagaaaagtttaaggaaataaatgaggcttatcaaattctttctgatagccaaaagaaacaacaatatgatcaatttggacatgctgcttttgaacaaggtggagcaggttttggtggtggcttcaatgcaggaggttttgactttggagatatttttggagatatcttcggtggtggaggctttggaggttttgaaggttttagtggttttggtggctcttcaagaagaagttatgttgagcctggaaatgatttaagatataatcttgaaataactttggaagaagctgcaaaaggtgtagaaaaaactattaaatacaagagaactggaaaatgtgaaaattgtcatggaacaggtggagaagatgataaaatgaaaacttgtcctacttgtaatgggcaaggaacaatcagaactcaacaaagaactatattaggtgtaatgcaatctcaatcagtttgtcctgactgtcatggaacaggaaaagtacctgaaaagaaatgtaaacactgtcatggaacaggaactgcaaaagaaactgttgaaaagaaagttaatgtgccagctggtatagatgatggacaaaaattaaaatatgcaggtttaggagaagctagtcaaaatggaggacctaatggagatttgtatgtagttattagaattaaatctcatgatatttttgtaagagatggagaaaacttatattgtgaagtacctatttcatattcaactgctgtattaggtggagaagttgaaattccaactttaaatggtaaaaaaatgattaaagttccagaaggaacagaaagtggaaaattgcttaaagttaaaggtgaaggaataaaatcccttagaggttatggacaaggggatataattgtaaaaatcacaatagaaactccaaagaaattaactgataaacaaaaagaattattacaaaaatttgaagaaagtttaaatgaaaaaaattatgaacaaaaatctagttttatgaaaaaagtaaaaaaattctttaaagatataattgattga

SEQ ID NO: 139838 - protein, 392 aa, Fusobacterium nucleatum subsp
MAKRDYYEVLGIDKSASENDIKKAYRKAAMKYHPDKFANASDAEKKDAEEKFKEINEAYQILSDSQKKQQYDQFGHAAFEQGGAGFGGGFNAGGFDFGDIFGDIFGGGGFGGFEGFSGFGGSSRRSYVEPGNDLRYNLEITLEEAAKGVEKTIKYKRTGKCENCHGTGGEDDKMKTCPTCNGQGTIRTQQRTILGVMQSQSVCPDCHGTGKVPEKKCKHCHGTGTAKETVEKKVNVPAGIDDGQKLKYAGLGEASQNGGPNGDLYVVIRIKSHDIFVRDGENLYCEVPISYSTAVLGGEVEIPTLNGKKMIKVPEGTESGKLLKVKGEGIKSLRGYGQGDIIVKITIETPKKLTDKQKELLQKFEESLNEKNYEQKSSFMKKVKKFFKDIID

SEQ ID NO: 139839 - DNA, 1185 bp, Fusobacterium nucleatum subsp
  CDS (1)..(1185): transl_table=11
atggcaaaaagagactattatgaagtccttggagtagataaaaatgcaagtgaaaatgatataaaaaaggcatatagaaaagctgctatgaagtatcaccctgataagtttgcaaatgcaactgatgcagaaaagaaagatgcagaagaaaagtttaaagaaattaatgaagcttatcaagtcctttcagataatgaaaagaagcaacaatatgaccaatttggacatgctgcatttgaacaaggtggagcaggttttggtggtggtttcaatgcaggaggctttgactttggagatatttttggagataatatctttgggggtggaggtggctttggaggttttgaaggatttagtggatttggtggttcttcaagaagaagctatgttgagcctggaaatgatttaagatataatcttgaaataactttggaagaagcagcaaaaggcgtagaaaaaactattaaatataagagaactggtaaatgtgaacattgtcatggaacaggtgcagaagatgataaaatgaagacttgtcctacttgtaatgggcaaggaactatcaaaactcaacaaagaactatattaggagtaatgcaatctcaatcagtttgtcctgactgccatggaacaggaaaagtacctgaaaagaaatgtaaacattgtcgtggaacaggaactgcaaaagaaactgttgaaaagaaaattaatgtaccagctggtatagatgatgggcaaaaattgaaatatgcaggtttaggtgaagctagtcaaagtggtggacctaatggtgatttatatatagttattagaattaaacctcatgatatttttataaggcaaggggacaatttatattgtgaagtacctatttcctattcaacagccgttttaggtggagaagtagaagttccaactttaaatggaaagaagactgtaaaagtaccagaaggaacagaaagtggaaaattacttaaagtcagtggagaaggaataaaatctcttaaaggttatggaaagggagatataattgttaaatttacaatagaaactccaaagaaattaactgataaacaaaaagaattattacaaaaatttgaagaaagtttaaatgataaaaattatgaacaaaaaacaagttttatgaaaagattaaaaaaaatttttaaagatataattgattga

SEQ ID NO: 139840 - protein, 394 aa, Fusobacterium nucleatum subsp
MAKRDYYEVLGVDKNASENDIKKAYRKAAMKYHPDKFANATDAEKKDAEEKFKEINEAYQVLSDNEKKQQYDQFGHAAFEQGGAGFGGGFNAGGFDFGDIFGDNIFGGGGGFGGFEGFSGFGGSSRRSYVEPGNDLRYNLEITLEEAAKGVEKTIKYKRTGKCEHCHGTGAEDDKMKTCPTCNGQGTIKTQQRTILGVMQSQSVCPDCHGTGKVPEKKCKHCRGTGTAKETVEKKINVPAGIDDGQKLKYAGLGEASQSGGPNGDLYIVIRIKPHDIFIRQGDNLYCEVPISYSTAVLGGEVEVPTLNGKKTVKVPEGTESGKLLKVSGEGIKSLKGYGKGDIIVKFTIETPKKLTDKQKELLQKFEESLNDKNYEQKTSFMKRLKKIFKDIID

SEQ ID NO: 139841 - DNA, 1149 bp, Geobacillus kaustophilus; identical to SEQ ID NO: 117959
  CDS (1)..(1149): transl_table=11

SEQ ID NO: 139842 - protein, 382 aa, Geobacillus kaustophilus; identical to SEQ ID NO: 117960

SEQ ID NO: 139843 - DNA, 1122 bp, Geobacter sulfurreducens; identical to SEQ ID NO: 117961
  CDS (1)..(1122): transl_table=11

SEQ ID NO: 139844 - protein, 373 aa, Geobacter sulfurreducens; identical to SEQ ID NO: 117962

SEQ ID NO: 139845 - DNA, 1152 bp, Gloeobacter violaceus; identical to SEQ ID NO: 117963
  CDS (1)..(1152): transl_table=11

SEQ ID NO: 139846 - protein, 383 aa, Gloeobacter violaceus; identical to SEQ ID NO: 117964

SEQ ID NO: 139847 - DNA, 1134 bp, Haemophilus ducreyi; identical to SEQ ID NO: 64017
  CDS (1)..(1134): transl_table=11

SEQ ID NO: 139848 - protein, 377 aa, Haemophilus ducreyi; identical to SEQ ID NO: 64018

SEQ ID NO: 139849 - DNA, 1155 bp, Haloarcula marismortui; identical to SEQ ID NO: 117967
  CDS (1)..(1155): transl_table=11

SEQ ID NO: 139850 - protein, 384 aa, Haloarcula marismortui; identical to SEQ ID NO: 117968

SEQ ID NO: 139851 - DNA, 1176 bp, Halobacterium salinarium; identical to SEQ ID NO: 117971
  CDS (1)..(1176): transl_table=11

SEQ ID NO: 139852 - protein, 391 aa, Halobacterium salinarium; identical to SEQ ID NO: 117972

SEQ ID NO: 139853 - DNA, 1155 bp, Idiomarina loihiensis; identical to SEQ ID NO: 64021
  CDS (1)..(1155): transl_table=11

SEQ ID NO: 139854 - protein, 384 aa, Idiomarina loihiensis; identical to SEQ ID NO: 64022

SEQ ID NO: 139855 - DNA, 1167 bp, Lactobacillus johnsonii; identical to SEQ ID NO: 64023
  CDS (1)..(1167): transl_table=11

SEQ ID NO: 139856 - protein, 388 aa, Lactobacillus johnsonii; identical to SEQ ID NO: 64024

SEQ ID NO: 139857 - DNA, 1140 bp, Lactococcus lactis subsp
  CDS (1)..(1140): transl_table=11
atgaataatactgaatattatgaacgactgggtgttgataaaaatgccagtcaagatgaaataaaaaaagcttatcgtaaaatgtccaaaaaatatcaccccgatttaaataaagaagagggtgctgaggataagtacaaagaggttcaagaagcttacgaaacgctttctgatgaacaaaaacgagcagcctatgaccaatatggtgaagcgggacgtaatggtggctttggcggcggcggtttcggtggagcttctggattctcaggctttggcggacgttctggcggtttcggtggttttgaggatatcttctcaagtttctttggtggcggaggagcgcaagttaatccaaatgcaccacgtcagggtgatgatttacaatatcgaatcaatttaaaatttgaagaggctattttcggcgttgaaaagcaagtgaagtataatcgtgaagaactctgtcatacttgtggtggctcaggagcgaaagctggaacgcatccggaaacgtgtcataagtgtggaggtcgtggacaaattaatgttgttcgtgatacaccgcttggtcggatgcaaactcaaacaacttgtgatgtctgtcatggaacaggtaaggaaattaaagaaaaatcgacaacttgtcatggttcaggtcatgaaaaagttgcacatactgttaaagtgactgtacctgctggtgttgaaactggtcaaaaaatgcgtttacaaggccaaggggatgcaggtgtaaatggtggtccttacggtgatttgtatgttgtcttccaagtagaagcttcagataaatttgaacgcgatggcgcggaaatctactataagatgccaatggactttgttcaagcggccttaggggatgaagttgaagttccaaccgtacacggtaatgtgaaattaaaaattcctgcgggaacacaaactggcgctaatttccgtctaaaaggaaaaggagctccaaaactccgtggttctggtaatggtgatcaatatgtaattattaatattgtcactcctaagaacatgaaccaagctcaaaaagaagctcttcaagcttttgccaaggcaagtggtattgaagtttctggttctggtcaaaaaggattctttgataagtttaaataa

SEQ ID NO: 139858 - protein, 379 aa, Lactococcus lactis subsp
MNNTEYYERLGVDKNASQDEIKKAYRKMSKKYHPDLNKEEGAEDKYKEVQEAYETLSDEQKRAAYDQYGEAGRNGGFGGGGFGGASGFSGFGGRSGGFGGFEDIFSSFFGGGGAQVNPNAPRQGDDLQYRINLKFEEAIFGVEKQVKYNREELCHTCGGSGAKAGTHPETCHKCGGRGQINVVRDTPLGRMQTQTTCDVCHGTGKEIKEKSTTCHGSGHEKVAHTVKVTVPAGVETGQKMRLQGQGDAGVNGGPYGDLYVVFQVEASDKFERDGAEIYYKMPMDFVQAALGDEVEVPTVHGNVKLKIPAGTQTGANFRLKGKGAPKLRGSGNGDQYVIINIVTPKNMNQAQKEALQAFAKASGIEVSGSGQKGFFDKFK

SEQ ID NO: 139859 - DNA, 1143 bp, Lactobacillus plantarum; identical to SEQ ID NO: 64027
  CDS (1)..(1143): transl_table=11

SEQ ID NO: 139860 - protein, 380 aa, Lactobacillus plantarum; identical to SEQ ID NO: 64028

SEQ ID NO: 139861 - DNA, 1152 bp, Lactobacillus sakei; identical to SEQ ID NO: 64029
  CDS (1)..(1152): transl_table=11

SEQ ID NO: 139862 - protein, 383 aa, Lactobacillus sakei; identical to SEQ ID NO: 64030

SEQ ID NO: 139863 - DNA, 1131 bp, Listeria innocua; identical to SEQ ID NO: 64031
  CDS (1)..(1131): transl_table=11

SEQ ID NO: 139864 - protein, 376 aa, Listeria innocua; identical to SEQ ID NO: 64032

SEQ ID NO: 139865 - DNA, 1131 bp, Listeria monocytogenes serotype 4b
  CDS (1)..(1131): transl_table=11
atggcaaaacgagattactatgaagtgcttggtgtttccaaaagcgcctcagcggacgaaataaaaaaagcttaccggaaactgtccaaacagtatcatccggacataaataaagaagcaggcgctgatgaaaaatttaaagaaatatcagaggcatatgaagcattaagtgacccacaaaaacgtgcgcaatatgatcaatatggacacgtagatccaaaccaaggcttcggcggcggtgctggtggcggatttagcggtggaggattctctggatttgaagatatctttgacacattctttggtggcggtggacgtcaacaagatccaaatgccccaagacaaggtagcgatttacaatatactatgcgtcttaaattcaaagaagctatttttggtaaagatgcagaaatcgaaattcctcgcgaggaaaactgtgacacatgtcatggttccggtgcaaaaccagggacaacacctgaaaaatgtagccattgtggtggtaaaggttccattaacgtggaacaaaataccccatttggtcgtgtagttaacaagcggacatgtcaatactgtaatggtactggtaaagaaatcaaagaaaaatgcccaacttgtcacggtaaaggccgtgtaactaaaacgaaaaaaatcaaagtgaaagttccagctggcgtgaacgacgggcaacaaatgcgtgtatctggtgaaggagaagctggcattaacggcggacctaacggcgatttatatgtggtatttgtcgtaattccagatgagtttttcgaacgcgaagcagatgatatttacgtagaagtcccaatcacattcgtacaagctacattaggtgacgaaattgatgttccaactgttcacggcaaagttcgtttgaaaattccaagtggtactcaaacaggaacaactttccgcttacgtggtaaaggtgtgccacatcttcgaggaaatggaactggcgatcaacatgtaatcgtcaaagtcattgttccgaaaaaactagatgataaacaaaaagaaatcttgcgagaatttgcttccactactggagacaaagtagacgaacaaacatccggattttttgacaaaatgaaacgagcttttaaaggcgattga

SEQ ID NO: 139866 - protein, 376 aa, Listeria monocytogenes serotype 4b
MAKRDYYEVLGVSKSASADEIKKAYRKLSKQYHPDINKEAGADEKFKEISEAYEALSDPQKRAQYDQYGHVDPNQGFGGGAGGGFSGGGFSGFEDIFDTFFGGGGRQQDPNAPRQGSDLQYTMRLKFKEAIFGKDAEIEIPREENCDTCHGSGAKPGTTPEKCSHCGGKGSINVEQNTPFGRVVNKRTCQYCNGTGKEIKEKCPTCHGKGRVTKTKKIKVKVPAGVNDGQQMRVSGEGEAGINGGPNGDLYVVFVVIPDEFFEREADDIYVEVPITFVQATLGDEIDVPTVHGKVRLKIPSGTQTGTTFRLRGKGVPHLRGNGTGDQHVIVKVIVPKKLDDKQKEILREFASTTGDKVDEQTSGFFDKMKRAFKGD

SEQ ID NO: 139867 - DNA, 1134 bp, Listeria monocytogenes; identical to SEQ ID NO: 64033
  CDS (1)..(1134): transl_table=11

SEQ ID NO: 139868 - protein, 377 aa, Listeria monocytogenes; identical to SEQ ID NO: 64034

SEQ ID NO: 139869 - DNA, 1170 bp, Mannheimia succiniciproducens; identical to SEQ ID NO: 64035
  CDS (40)..(1170): transl_table=11

SEQ ID NO: 139870 - protein, 376 aa, Mannheimia succiniciproducens; identical to SEQ ID NO: 64036

SEQ ID NO: 139871 - DNA, 1125 bp, Mesoplasma florum; identical to SEQ ID NO: 64037
  CDS (1)..(1125): transl_table=4

SEQ ID NO: 139872 - protein, 374 aa, Mesoplasma florum; identical to SEQ ID NO: 64038

SEQ ID NO: 139873 - DNA, 1134 bp, Methylococcus capsulatus; identical to SEQ ID NO: 117993
  CDS (1)..(1134): transl_table=11

SEQ ID NO: 139874 - protein, 377 aa, Methylococcus capsulatus; identical to SEQ ID NO: 117994

SEQ ID NO: 139875 - DNA, 1170 bp, Methanosarcina mazei; identical to SEQ ID NO: 117995
  CDS (1)..(1170): transl_table=11

SEQ ID NO: 139876 - protein, 389 aa, Methanosarcina mazei; identical to SEQ ID NO: 117996

SEQ ID NO: 139877 - DNA, 1116 bp, Methylovorus sp
  CDS (1)..(1116): transl_table=11
atggcaaaaaaagattactacgaagtcctgggtgtgaatcgcgatgccagcgatgaggaaattaaaaagtcctatcgcaagctggcgatgaaataccacccggatcgcaacccggataatcccaaagcggaagaaagcttcaaggaggcgaaagaagcctatgaagtcttgtctgacgagcaaaagcgtgccgcttacgaccaatacggccatgctggcgtagacccaagcgccgggcctggcccgcgtcagggctttggcaactttgccgatgcctttggcgacatctttggcgacatcttcggcggtggcggtggcaatcgccgctccaatgtctaccgcggggccgacctgcgttacaacatggaaatttcgctggaagacgccgcccgccggaccgaaaccaagatccgcatcccggtcatgtccgaatgcgaaacctgccatggctccggcgcccgtcccggcacgcagcctgtcacctgcaccacctgcggcggtcacggccaggtacgcatgcagcagggctttttctcagtgcagcaaacctgccccaagtgccatggcagcggcaagatggtgaaagaaccatgcccgagctgtcagggtgctggccgcgtcaagaagcacaaaacgctgtcggtgaagatacccgccggtgtagatgaaggtgaccgcatccgcttgtccggcgaaggcgaacgcgtcaatggtggcccaccgcgggatctgtatgtggtagtgcacctcaagcagcacgatattttccagcgcgatggcggtaatctgcattgcgaaatgccgatcagctttaccaccgctgcgctgggcggcgaaatcgaaatccctacgctggatggtcacgccaagatgaagatcccaccggaaacgcaaaccggcgccaccttccgcctgcgtggcaaaggtatcaagcctttgcgcacgaatgacccaggcgatctgatgtgccatgtggtggtcgagacgccgatcaagctgaccgaacgccagaaagaactgttgcgtgagatggaagaaatcaacctgcaagactctgacaagcacagcccgcgtgccaagggctggatggacaaggtcaaggatttctttcagtaa

SEQ ID NO: 139878 - protein, 371 aa, Methylovorus sp
MAKKDYYEVLGVNRDASDEEIKKSYRKLAMKYHPDRNPDNPKAEESFKEAKEAYEVLSDEQKRAAYDQYGHAGVDPSAGPGPRQGFGNFADAFGDIFGDIFGGGGGNRRSNVYRGADLRYNMEISLEDAARRTETKIRIPVMSECETCHGSGARPGTQPVTCTTCGGHGQVRMQQGFFSVQQTCPKCHGSGKMVKEPCPSCQGAGRVKKHKTLSVKIPAGVDEGDRIRLSGEGERVNGGPPRDLYVVVHLKQHDIFQRDGGNLHCEMPISFTTAALGGEIEIPTLDGHAKMKIPPETQTGATFRLRGKGIKPLRTNDPGDLMCHVVVETPIKLTERQKELLREMEEINLQDSDKHSPRAKGWMDKVKDFFQ

SEQ ID NO: 139879 - DNA, 1164 bp, Methanosarcina thermophila; identical to SEQ ID NO: 117997
  CDS (1)..(1164): transl_table=11

SEQ ID NO: 139880 - protein, 387 aa, Methanosarcina thermophila; identical to SEQ ID NO: 117998

SEQ ID NO: 139881 - DNA, 1122 bp, Neisseria gonorrhoeae; identical to SEQ ID NO: 118007
  CDS (1)..(1122): transl_table=11

SEQ ID NO: 139882 - protein, 373 aa, Neisseria gonorrhoeae; identical to SEQ ID NO: 118008

SEQ ID NO: 139883 - DNA, 1122 bp, Neisseria meningitidis serogroup A; identical to SEQ ID NO: 64043
  CDS (1)..(1122): transl_table=11

SEQ ID NO: 139884 - protein, 373 aa, Neisseria meningitidis serogroup A; identical to SEQ ID NO: 64044

SEQ ID NO: 139885 - DNA, 1110 bp, Nitrosomonas europaea
  CDS (1)..(1110): transl_table=11
atgagtcagagtgattattatgaagtgctcggtgtaggccgggatgcggatgagaacgagctgaaaaaggcataccggaaactggcgatgaaatatcatcccgaccggaacgccggtgataccaaggcggaggaacgattcaagaacatcaaagaagcttatgaaatcctgtccgatccgaataaacgggctgcctacgatcagtttggccacgctggtttgaatggcgggatgggcggggcgggtgcacagggattcagtgatgccttcagcgatattttcagcgatcttttcggaatgcgtggaggaggacgctccagtgttcatcgcggagccgatctgcgctataacctggaaattacactggaacaggcagcccgtggtgccgaaacccagattcgtatccccaggcaggaagtgtgtgatacctgtcatggcagtggtgcaaaacctggtacttctcctaaaacctgtcctacttgtaatgggcatggtcagattcgcatgcaacaaggctttttctcgattcagcagacctgttcacattgtcagggtagcggtaaggtcgtctcagacccttgcggggattgtcatggggcgggatgggtcaaacgccagaaaacactgtcagtcaggattcctgctggtgtggatgaaggcgacagcatccggctgacaggagaaggtgaagcaggagcaaatggcgggcaggctggcgatctgtatatcgtcattcatcttgccagccatccggtctttcagagggaaggcaatcatttacattgcgaaataccgatcagttttacagtagccgctttgggtggagaaatcgaagtacctacgctcgatggtcatgcccgcatcaaggtgccggccggaacccagaccggaaaaattttccgtttgcgcagcaagggaataaccggtgtacgcaaccaatccacgggtgatctgctttgtcatgttgcggtggaaacaccagtcgatttgacggcgcgtcagaaagagctgctggaggaattcgaatcgatcagccagaaagatggttcacgtcaccatccgcgtgcaaaatcctggatggaaaaggcacgtgaatttttcgctgaatga

SEQ ID NO: 139886 - protein, 369 aa, Nitrosomonas europaea
MSQSDYYEVLGVGRDADENELKKAYRKLAMKYHPDRNAGDTKAEERFKNIKEAYEILSDPNKRAAYDQFGHAGLNGGMGGAGAQGFSDAFSDIFSDLFGMRGGGRSSVHRGADLRYNLEITLEQAARGAETQIRIPRQEVCDTCHGSGAKPGTSPKTCPTCNGHGQIRMQQGFFSIQQTCSHCQGSGKVVSDPCGDCHGAGWVKRQKTLSVRIPAGVDEGDSIRLTGEGEAGANGGQAGDLYIVIHLASHPVFQREGNHLHCEIPISFTVAALGGEIEVPTLDGHARIKVPAGTQTGKIFRLRSKGITGVRNQSTGDLLCHVAVETPVDLTARQKELLEEFESISQKDGSRHHPRAKSWMEKAREFFAE

SEQ ID NO: 139887 - DNA, 1128 bp, Oceanobacillus iheyensis; identical to SEQ ID NO: 64045
  CDS (1)..(1128): transl_table=11

SEQ ID NO: 139888 - protein, 375 aa, Oceanobacillus iheyensis; identical to SEQ ID NO: 64046

SEQ ID NO: 139889 - DNA, 1161 bp, Protochlamydia amoebophila; identical to SEQ ID NO: 118013
  CDS (1)..(1161): transl_table=11

SEQ ID NO: 139890 - protein, 386 aa, Protochlamydia amoebophila; identical to SEQ ID NO: 118014

SEQ ID NO: 139891 - DNA, 1119 bp, Pasteurella multocida; identical to SEQ ID NO: 118017
  CDS (1)..(1119): transl_table=11

SEQ ID NO: 139892 - protein, 372 aa, Pasteurella multocida; identical to SEQ ID NO: 118018

SEQ ID NO: 139893 - DNA, 1119 bp, Photorhabdus luminescens subsp
  CDS (1)..(1119): transl_table=11
atggcgaaaagagattattacgaggttttgggggtttccaaaacagcgagcgaaaaagagattaaaaaagcctataagcggctggcgatgaaatatcatcctgatcgtaatcagggcgataaagaggcagaaagccaattcaaagaagttaaagaagcttatgaaattctgacggatgaccagaaacgggctgcttatgatcaatatggtcatgctgcttttgaacaaggcggcatgggcggcggcggagctgattttagcgatatctttggtgacgttttcggtgatattttcggtggtggtcgtcgtcaacagcgtccaagccgcggtgctgatttgcgttacagcatggagttgacgctggaagaagcggttcgtggtgtgaccaaagagatccgtatcccgacactggaaacttgtgatatctgtcatggtagcggcgctaaagcaggaaccagccctgtaacctgttcaacctgtcaaggtgctggtcaggttcatatgcgtcagggatttttcaccgttcagcaaccttgcccacactgtcatggccgtggtcagattatcaaagattcttgccataaatgtcatggtcatgggcgagttgaaagatacaaaaccctgtctgtcaaaatcccggcgggtgtggataccggtgaccgtgttcgtttgagtggtgagggtgaagcgggggctaaaggcgcacccgcaggtgatttgtatgttcaggtacaggtgaaatcacaccatatttttgagcgtcaagaaagtaatctctattgtgaagtgccggttaactttgcaatggcggcactgggtggagaaatcgaagttccaactctcgatggccgtgtgaaactgaaaatacctgcggaaacccagacaggtaaaatgttccgcatgaaaggcaaaggtgttaaatctgtccgcggtggtgttcagggtgatttattgtgccgggtagtggtagaaacgccggttaaattaaatgaaagacagaaagaattactgcgcgaattgggtgaatctttcggtggggccggcgaagaaacgaatagcccacgttctaaaagtttcttcgatggcgtaaagaaattttttgatgatttgaccaagtaa

SEQ ID NO: 139894 - protein, 372 aa, Photorhabdus luminescens subsp
MAKRDYYEVLGVSKTASEKEIKKAYKRLAMKYHPDRNQGDKEAESQFKEVKEAYEILTDDQKRAAYDQYGHAAFEQGGMGGGGADFSDIFGDVFGDIFGGGRRQQRPSRGADLRYSMELTLEEAVRGVTKEIRIPTLETCDICHGSGAKAGTSPVTCSTCQGAGQVHMRQGFFTVQQPCPHCHGRGQIIKDSCHKCHGHGRVERYKTLSVKIPAGVDTGDRVRLSGEGEAGAKGAPAGDLYVQVQVKSHHIFERQESNLYCEVPVNFAMAALGGEIEVPTLDGRVKLKIPAETQTGKMFRMKGKGVKSVRGGVQGDLLCRVVVETPVKLNERQKELLRELGESFGGAGEETNSPRSKSFFDGVKKFFDDLTK

SEQ ID NO: 139895 - DNA, 1143 bp, Photobacterium profundum; identical to SEQ ID NO: 118019
  CDS (1)..(1143): transl_table=11

SEQ ID NO: 139896 - protein, 380 aa, Photobacterium profundum; identical to SEQ ID NO: 118020

SEQ ID NO: 139897 - DNA, 1152 bp, Porphyromonas gingivalis; identical to SEQ ID NO: 64049
  CDS (1)..(1152): transl_table=11

SEQ ID NO: 139898 - protein, 383 aa, Porphyromonas gingivalis; identical to SEQ ID NO: 64050

SEQ ID NO: 139899 - DNA, 1137 bp, Prochlorococcus marinus; identical to SEQ ID NO: 118025
  CDS (1)..(1137): transl_table=11

SEQ ID NO: 139900 - protein, 378 aa, Prochlorococcus marinus; identical to SEQ ID NO: 118026

SEQ ID NO: 139901 - DNA, 1137 bp, Prochlorococcus marinus; identical to SEQ ID NO: 118027
  CDS (1)..(1137): transl_table=11

SEQ ID NO: 139902 - protein, 378 aa, Prochlorococcus marinus; identical to SEQ ID NO: 118028

SEQ ID NO: 139903 - DNA, 1125 bp, Prochlorococcus marinus subsp; identical to SEQ ID NO: 64051
  CDS (1)..(1125): transl_table=11

SEQ ID NO: 139904 - protein, 374 aa, Prochlorococcus marinus subsp; identical to SEQ ID NO: 64052

SEQ ID NO: 139905 - DNA, 1134 bp, Pseudomonas aeruginosa
  CDS (1)..(1134): transl_table=11
atggcgaaacgagacttttacgaggttctgggggttgagcgtggcgccagcgaggcggacctgaagaaggcctaccgccgcctggcgatgaaataccacccggaccgcaatcctggcgacaaggaagccgaggacaagttcaaggaggccaacgaggcctacgaggtcctctccgatgccagcaagcgggcggcctacgaccagtacggccatgccggcgtcgatccgaatatgggtgggggcgctggcgccggtttcggcggggcgagcttctccgacatcttcggcgatgtgttcagcgatttcttcggtggcggcggtgcccgcggtggctcgcgcggcggcgcgcagcgcggcgcggacctgcgctacaccctggacctcgacctggaggaggcggtacgtggcaccaccgtcaccatccgcgtgccgaccctggtcggttgcaagacctgcaacggcagcggcgccaagcccggcaccacaccggtcacctgcaccacttgcggcggtatcggccaggtgcgcatgcagcagggcttcttctcggtccagcagacctgcccgcgctgccacggcaccggcaagatgatttccgatccctgtggctcctgccatgggcaggggcgcgtggaagagcagaagaccctgtcggtgaaggtgccggccggcgtcgacaccggcgaccgcatccgcctcaccggcgaaggcgaggccggcagcatgggtggtccggcgggcgacctgtacgtggtggtcaatgtgcgcgagcacccgatcttccagcgcgacggcaagcatctgtactgcgaagtgccgatcagtttcgccgacgctgcgttgggtggcgagctggaagtgccgaccctggatggccgggtcaagctgaagattccggaaagcacccagaccggcaagctgttccgcctgcgcggcaagggcgtggccccggtgcgcggcggcggcgccggcgacctgatgtgcaaggtggtggtggaaaccccggtgaacctggacaagcgccagcgcgagctgctcgaggagttccgcaagtcgttgcagagcgacacctcgcattcgcccaaggccagtggctggttcgaaggcatgaagcgtttcttcgacgatctataa

SEQ ID NO: 139906 - protein, 377 aa, Pseudomonas aeruginosa; identical to SEQ ID NO: 118030

SEQ ID NO: 139907 - DNA, 1128 bp, Pseudomonas putida; identical to SEQ ID NO: 64053
  CDS (1)..(1128): transl_table=11

SEQ ID NO: 139908 - protein, 375 aa, Pseudomonas putida; identical to SEQ ID NO: 64054

SEQ ID NO: 139909 - DNA, 1131 bp, Pseudomonas stutzeri; identical to SEQ ID NO: 118033
  CDS (1)..(1131): transl_table=11

SEQ ID NO: 139910 - protein, 376 aa, Pseudomonas stutzeri; identical to SEQ ID NO: 118034

SEQ ID NO: 139911 - DNA, 1143 bp, Ralstonia solanacearum; identical to SEQ ID NO: 118035
  CDS (1)..(1143): transl_table=11

SEQ ID NO: 139912 - protein, 380 aa, Ralstonia solanacearum; identical to SEQ ID NO: 118036

SEQ ID NO: 139913 - DNA, 1131 bp, Rhizobium loti; identical to SEQ ID NO: 118037
  CDS (1)..(1131): transl_table=11

SEQ ID NO: 139914 - protein, 376 aa, Rhizobium loti; identical to SEQ ID NO: 118038

SEQ ID NO: 139915 - DNA, 1140 bp, Rhizobium meliloti; identical to SEQ ID NO: 118039
  CDS (1)..(1140): transl_table=11

SEQ ID NO: 139916 - protein, 379 aa, Rhizobium meliloti; identical to SEQ ID NO: 118040

SEQ ID NO: 139917 - DNA, 1176 bp, Rhodopirellula baltica; identical to SEQ ID NO: 118041
  CDS (1)..(1176): transl_table=11

SEQ ID NO: 139918 - protein, 391 aa, Rhodopirellula baltica; identical to SEQ ID NO: 118042

SEQ ID NO: 139919 - DNA, 1155 bp, Rhodobacter capsulatus
  CDS (1)..(1155): transl_table=11
atggcgaaggtggatttctacgaggttctgggggtgtccaagggcgcctcggccgaggagatcaagaaggcctatcgcagcaaggcgaaggaactgcaccccgaccgcaatcagggacaatccgcagccgaggcccagttcaaggaagtgaacggagcctatgacgtgctgaaggatggcgacaagaaggccgcctatgaccgctacggtcacgcggctttcgagggcggcatgggcggcggcggtccgcgcggaccctatggtcagggcgcggatttctcctcggctttctcggatgtgttcgaggatctgttcggcgatttcatgggcgggcgcggcggtccgggcggcggtggccgtcgcgtgcgacgccgcggctcggacctgcgctacaacatgcgggtgacgctggaagaggcgttcaagggcgcgcaaaaaacgatcaccgttcccggctcggccgcttgcggctcgtgcaacggcaccggggccgagggcggcgcggaaccgcaaacctgtccgacctgttcgggtctgggcaaggtgcgggcgcagaacggctttttcaccgtcgaacgcacctgccccacctgtggcgggcagggtcaggtggtgaaaaacccctgccgcgtctgtcatggttcgggccggatcgagaaggaacggacgctgtcggtgaacatccccgcgggggtggagaccggcacccggatccgtctggcgggcgagggcgaggccgggatgcgcggcgggccttcgggcgacctttatatcttcatcgaggtccgcgaacatgcgatcttccagcgcgacggggtgaacctgttctgccgggtgccggtcagcatggtctcggcggcccttggtggcgaggtcgaggtgccgacgatcgatggcggccggtccaaggtcaaggtgccggtgggcagccaatccggtcggcagatgcgtctgcgcggcaagggcatgcctgccctgcgcggtggcggcatcggcgacatggtgatcgaactggccgtcgaaaccccggtgaacctgaccgcgcggcaaaaggagctgctggatgaattccagcgcatccaggccgagaacaacccggaaggggcgtctttcttccagaaggtgaaaagcttctgggacgggatgaagggctga

SEQ ID NO: 139920 - protein, 384 aa, Rhodobacter capsulatus
MAKVDFYEVLGVSKGASAEEIKKAYRSKAKELHPDRNQGQSAAEAQFKEVNGAYDVLKDGDKKAAYDRYGHAAFEGGMGGGGPRGPYGQGADFSSAFSDVFEDLFGDFMGGRGGPGGGGRRVRRRGSDLRYNMRVTLEEAFKGAQKTITVPGSAACGSCNGTGAEGGAEPQTCPTCSGLGKVRAQNGFFTVERTCPTCGGQGQVVKNPCRVCHGSGRIEKERTLSVNIPAGVETGTRIRLAGEGEAGMRGGPSGDLYIFIEVREHAIFQRDGVNLFCRVPVSMVSAALGGEVEVPTIDGGRSKVKVPVGSQSGRQMRLRGKGMPALRGGGIGDMVIELAVETPVNLTARQKELLDEFQRIQAENNPEGASFFQKVKSFWDGMKG

SEQ ID NO: 139921 - DNA, 1140 bp, Rhodopseudomonas palustris; identical to SEQ ID NO: 118043
  CDS (1)..(1140): transl_table=11

SEQ ID NO: 139922 - protein, 379 aa, Rhodopseudomonas palustris; identical to SEQ ID NO: 118044

SEQ ID NO: 139923 - DNA, 1122 bp, Rickettsia conorii
  CDS (1)..(1122): transl_table=11
atgtcacaaaattattaccaaatactaggggttagtaaaacagctagccaagctgaccttaaaaaagcctacctcaagctagccaagcaatatcaccctgatactactgatgctaaagatgctgaaaagaaatttaaagaaatcaatgccgcttatgatgttctaaaagatgagcaaaaaagagctgcttatgaccgtttgggacacgatgcttttcaaaatcaacaatcacgagggggaggaggaaatcatggcggttttcaccctgatattaacgacatattcggtgacttctttagcgactttatgggaggcagcagaagatcatcacgcccaacttcagctaaagttagaggctcagatttaaaatataatctgacaattaacctagaggaagcatttcacggtatagaaaaaaatattagcttttctagcgcagtaaaatgcgatacttgtcacggtagcggttctgaaaaaggtgaaaccgtaactacttgcgatgcttgcagcggtgttggagcgactagaatgcagcaaggattctttacgatcgaacaagcttgtcataaatgccaaggtaacggacacattataaaaaatccttgcaagaaatgtcatggcatgggacgttaccataaacaacgaaatttatcggtaaacattcctgccggtgttgaaaacggtactagaataagacataccggagaaggggaagcaggcattagaggcggtaatagcggtgatttatatgttgatataacaataaaaccacatgatatttataaagtagacggagcaaatctacattgtaaactacctattagttttgtgaatgctgctcttggaggagagatagaagtaccggtaattgaaggcggaaaagtaaacttaacaattcctgcaggcacacaaaacggtgatcaattaaggctacgcagcaaaggtatgtctaaaatgagatcaactattaggggtgatatgcttacgcatattcatgtcgaagtacctaaaaatttatctaaaagacaacgtgaattactagaagaattcaaaaaagaatccataaatgagaaagaaaatgacggcagcttttttaataaaatgaaaagtctgtggtcgtaa

SEQ ID NO: 139924 - protein, 373 aa, Rickettsia conorii
MSQNYYQILGVSKTASQADLKKAYLKLAKQYHPDTTDAKDAEKKFKEINAAYDVLKDEQKRAAYDRLGHDAFQNQQSRGGGGNHGGFHPDINDIFGDFFSDFMGGSRRSSRPTSAKVRGSDLKYNLTINLEEAFHGIEKNISFSSAVKCDTCHGSGSEKGETVTTCDACSGVGATRMQQGFFTIEQACHKCQGNGHIIKNPCKKCHGMGRYHKQRNLSVNIPAGVENGTRIRHTGEGEAGIRGGNSGDLYVDITIKPHDIYKVDGANLHCKLPISFVNAALGGEIEVPVIEGGKVNLTIPAGTQNGDQLRLRSKGMSKMRSTIRGDMLTHIHVEVPKNLSKRQRELLEEFKKESINEKENDGSFFNKMKSLWS

SEQ ID NO: 139925 - DNA, 1140 bp, Salmonella choleraesuis; identical to SEQ ID NO: 118049
  CDS (1)..(1140): transl_table=11

SEQ ID NO: 139926 - protein, 379 aa, Salmonella choleraesuis; identical to SEQ ID NO: 118050

SEQ ID NO: 139927 - DNA, 1128 bp, Salmonella paratyphi
  CDS (1)..(1128): transl_table=11
atggcgaaaagagattactacgagattttaggcgtttccaaaacagcggaagagcgtgaaatcaaaaaggcgtataagcgcctggccatgaaatatcatccggaccgcaatcagggtgataaagaggccgaagctaaatttaaagagattaaagaagcctacgaagtgctgaccgatgcgcaaaaacgcgcagcctacgatcagtatggtcacgccgcgtttgaacaaggcgggatgggcggcggctttaatggcggcgctgatttcagtgatatctttggtgacgtttttggcgatatctttggcggcgggcgtggtcgccaacgtgcggcgcgtggggctgatttgcgttataacatggatctcaccctggaagaagcggtgcgtggcgtgaccaaagagatccgtattccgacgctggaggagtgcgacgtttgccacggcagcggcgcgaaagctggtacgcaaccgcaaacctgtccaacctgtcatggttctggtcaggtacagatgcgccagggattctttgctgtacagcagacctgcccacactgtcagggccgcggtacgctgatcaaagatccgtgccataaatgtcacggtcatgggcgtgttgaaaagagtaaaactctgtccgttaaaatcccggcgggcgtggataccggcgatcgtattcgtctggcaggcgagggcgaagcgggcgagcatggcgcaccggcaggcgacttgtacgttcaggtccaggtgaaacaacaccctattttcgagcgtgaaggcaataatctttattgcgaagtgccgatcaactttgcgatggcggcgctcggtggtgaaattgaagtgccgacgttagatggtcgcgtgatgctgaaagtaccgagcgaaacacaaacgggcaagctgttccgtatgcgcggcaaaggcgtgaagtccgtacgtggtggcgcgcagggcgatttgctgtgccgtgtggtagttgaaacgccggtcggtctgagcgaaaaacagaagcaattgctaaaagatcttcaggaaagttttggcggcccgacgggagagaaaaacagcccgcgttcaaaaagcttctttgacggcgtgaaaaaattctttgacgatttgactcgctaa

SEQ ID NO: 139928 - protein, 375 aa, Salmonella paratyphi
MAKRDYYEILGVSKTAEEREIKKAYKRLAMKYHPDRNQGDKEAEAKFKEIKEAYEVLTDAQKRAAYDQYGHAAFEQGGMGGGFNGGADFSDIFGDVFGDIFGGGRGRQRAARGADLRYNMDLTLEEAVRGVTKEIRIPTLEECDVCHGSGAKAGTQPQTCPTCHGSGQVQMRQGFFAVQQTCPHCQGRGTLIKDPCHKCHGHGRVEKSKTLSVKIPAGVDTGDRIRLAGEGEAGEHGAPAGDLYVQVQVKQHPIFEREGNNLYCEVPINFAMAALGGEIEVPTLDGRVMLKVPSETQTGKLFRMRGKGVKSVRGGAQGDLLCRVVVETPVGLSEKQKQLLKDLQESFGGPTGEKNSPRSKSFFDGVKKFFDDLTR

SEQ ID NO: 139929 - DNA, 1137 bp, Shewanella oneidensis; identical to SEQ ID NO: 118051
  CDS (1)..(1137): transl_table=11

SEQ ID NO: 139930 - protein, 378 aa, Shewanella oneidensis; identical to SEQ ID NO: 118052

SEQ ID NO: 139931 - DNA, 1131 bp, Shigella flexneri
  CDS (1)..(1131): transl_table=11
atggctaagcaagattattacgagattttaggcgtttccaaaacagcggaagagcgtgaaatcagaaaggcctacaaacgcctggccatgaaataccacccggaccgtaaccagggtgacaaagaggccgaggcgaaatttaaagagatcaaggaagcttatgaagttctgaccgactcgcaaaaacgtgcggcatacgatcagtatggtcatgctgcgtttgagcaaggaggcatgggcggcggtggttttggcggcggcgcagacttcagcgatatttttggtgacgttttcggcgatatttttggcggcggacgtggtcgtcaacgtgcggcgcgcggtgctgatttacgctataacatggagctcaccctcgaagaagctgtacgtggcgtgaccaaagagatccgcattccgactctggaagagtgtgacgtttgccacggtagcggtgcaaaaccaggtacacagccgcagacctgtccgacctgtcatggttctggtcaggtgcagatgcgccagggattcttcgctgtacagcagacctgtccacactgtcagggccgcggtacgctgatcaaagatccgtgcaacaaatgtcatggtcatggtcgtgttgagcgcagcaaaacgctgtccgttaaaatcccggcaggggtggacactggagaccgcatccgtcttgcgggcgaaggtgaagcgggcgagcatggcgcaccggcaggcgatctgtacgttcaggttcaggttaaacagcacccgattttcgagcgtgaaggcaacaacctgtattgcgaagtcccgatcaacttcgctatggcggcgctgggtggcgaaatcgaagtaccgacccttgatggtcgcgtcaaactgaaagtgcctggcgaaacccagaccggtaagctattccgtatgcgcggtaaaggcgtcaagtctgtccgcggtggcgcacagggtgatttgctgtgccgcgttgtcgtcgaaacacaaataggcctggacgaaaaggacaaacagctgctgcacgagctgcacgaaagctacggtggcccaaccggcgagcacaacagcccgcgctcaaagagcttctttgatggtgtgaagaagttttttgacgacctgacccgctaa

SEQ ID NO: 139932 - protein, 376 aa, Shigella flexneri
MAKQDYYEILGVSKTAEEREIRKAYKRLAMKYHPDRNQGDKEAEAKFKEIKEAYEVLTDSQKRAAYDQYGHAAFEQGGMGGGGFGGGADFSDIFGDVFGDIFGGGRGRQRAARGADLRYNMELTLEEAVRGVTKEIRIPTLEECDVCHGSGAKPGTQPQTCPTCHGSGQVQMRQGFFAVQQTCPHCQGRGTLIKDPCNKCHGHGRVERSKTLSVKIPAGVDTGDRIRLAGEGEAGEHGAPAGDLYVQVQVKQHPIFEREGNNLYCEVPINFAMAALGGEIEVPTLDGRVKLKVPGETQTGKLFRMRGKGVKSVRGGAQGDLLCRVVVETQIGLDEKDKQLLHELHESYGGPTGEHNSPRSKSFFDGVKKFFDDLTR

SEQ ID NO: 139933 - DNA, 1146 bp, Silicibacter pomeroyi; identical to SEQ ID NO: 64055
  CDS (1)..(1146): transl_table=11

SEQ ID NO: 139934 - protein, 381 aa, Silicibacter pomeroyi; identical to SEQ ID NO: 64056

SEQ ID NO: 139935 - DNA, 1140 bp, Staphylococcus aureus
  CDS (1)..(1140): transl_table=11
gtggccaaaagagactattatgaagttttaggcattagtaaagatgcttcaaaagatgaaatcaaaaaagcgtatcgaaagctttcgaaaaaatatcatccagatattaacaaagaagaaggtgcagatgaaaagtttaaagaaatttctgaagcctatgaagttttaagtgatgataataaacgcgcaagctatgatcaatttggacatgacgggccacaaggttttggtggacaaggattcaatggctctgactttggcggttttagtggcttcggtggcggcggttttgaagatatctttagctctttcttcggtggcggcagacaaagagatccaaatgcaccgcaaaaaggtgatgatcttcagtacacaatgacattgacatttgaagaagcggtatttggtacaacaaaagaaatttcaatccgtaaagatgtaacatgcgaaacatgtcatggtgatggtgcaaagcctggaacaagtaaaaagacttgtagttactgtaatggcgctggtcatgtagctgtagaacaaaatacaattttaggtagagttcgcactgaacaagtttgtcctaaatgtaatggaagtggtcaagaatttgaagaagcttgtccaacatgtcacggaaaaggtactgaaaataaaacggttaaattagaagtgaaagtacctgaaggtgtcgacaatgaacaacaaattagattagctggtgaaggctctccaggcgtgaatggaggacctgctggtgatttatacgtagtatttagagttaaaccatctgaaacatttaaacgtgatggtgatgatatttattacaaattaaatgttagcttcccacaagcagctttaggcgatgaaataaaaataccaacattaaataatgaagttatgttaacaatcccagctggtacacaaacaggtaagcaattccgcttaaaagaaaagggtataaaaaatgttcatggctatggatacggagatttatatgttgatattaaagtagtaacacctactaaattaacagatagacaaaaagaactaatgaaagaatttgcccaattaaatggtgaagaaattaatgatcaaccttcgaattttaaagatagagcaaaaagattctttaagggagaataa

SEQ ID NO: 139936 - protein, 379 aa, Staphylococcus aureus
MAKRDYYEVLGISKDASKDEIKKAYRKLSKKYHPDINKEEGADEKFKEISEAYEVLSDDNKRASYDQFGHDGPQGFGGQGFNGSDFGGFSGFGGGGFEDIFSSFFGGGRQRDPNAPQKGDDLQYTMTLTFEEAVFGTTKEISIRKDVTCETCHGDGAKPGTSKKTCSYCNGAGHVAVEQNTILGRVRTEQVCPKCNGSGQEFEEACPTCHGKGTENKTVKLEVKVPEGVDNEQQIRLAGEGSPGVNGGPAGDLYVVFRVKPSETFKRDGDDIYYKLNVSFPQAALGDEIKIPTLNNEVMLTIPAGTQTGKQFRLKEKGIKNVHGYGYGDLYVDIKVVTPTKLTDRQKELMKEFAQLNGEEINDQPSNFKDRAKRFFKGE

SEQ ID NO: 139937 - DNA, 1140 bp, Staphylococcus aureus
  CDS (1)..(1140): transl_table=11
gtggccaaaagagactattatgaagttttaggcattagtaaagatgcttcaaaagatgaaatcaaaaaagcgtatcgaaagctttcgaaaaaatatcatccagatattaacaaagaagaaggtgcagatgaaaagtttaaagaaatttctgaagcctatgaagttttaagtgatgataataaacgcgcaactattgatcaatttggacatgatggtccacaaggttttggtggacaaggattcaatggctctgactttggcggttttagtggcttcggtggcggcggttttgaagatatctttagctctttcttcggtggcggcagccaaagagatccaaatgcaccgcaaaaaggtgatgatcttcagtatacaatgacattaacatttgaagaagcggtatttggtacaacaaaagaaatttcaatccgtaaagatgtaacatgcgaaacatgtcatggtgatggtgcaaagcctggaacaagtaaaaagacttgtagttactgtaatggcgctggtcatgtagctgtagaacaaaacacaattttaggtagagttcgtactgaacaagtttgtcctaaatgtaatggaagtggtcaagaatttgaagaagcttgtccaacatgtcacggaaaaggtactgaaaataaaacagttaaattagaagtgaaagtacctgaaggtgtcgacaatgaacaacaaattagattagctggtgaaggctctccaggcgtgaatggaggacctgctggtgatttatacgtagtatttagagttaaaccatctgaaacatttaaacgtgatggtgatgatatttattacaaattaaatgttagcttcccacaagcagctttaggcgatgaaataaaaataccaacattaaataatgaagttatgttaacaatccctgctggtacacaaacaggtaagcaattccgcttaaaagaaaagggtataaaaaatgttcatggctatggatacggagatttatatgttgatattaaagtagtaacgcctactaaattaacagatagacaaaaagaactaatgaaagaatttgcccaattaaatggtgaagaaattaatgaacaaccttcgaattttaaagatagagcaaaaagattctttaagggagaataa

SEQ ID NO: 139938 - protein, 379 aa, Staphylococcus aureus
MAKRDYYEVLGISKDASKDEIKKAYRKLSKKYHPDINKEEGADEKFKEISEAYEVLSDDNKRATIDQFGHDGPQGFGGQGFNGSDFGGFSGFGGGGFEDIFSSFFGGGSQRDPNAPQKGDDLQYTMTLTFEEAVFGTTKEISIRKDVTCETCHGDGAKPGTSKKTCSYCNGAGHVAVEQNTILGRVRTEQVCPKCNGSGQEFEEACPTCHGKGTENKTVKLEVKVPEGVDNEQQIRLAGEGSPGVNGGPAGDLYVVFRVKPSETFKRDGDDIYYKLNVSFPQAALGDEIKIPTLNNEVMLTIPAGTQTGKQFRLKEKGIKNVHGYGYGDLYVDIKVVTPTKLTDRQKELMKEFAQLNGEEINEQPSNFKDRAKRFFKGE

SEQ ID NO: 139939 - DNA, 1122 bp, Staphylococcus epidermidis; identical to SEQ ID NO: 118053
  CDS (1)..(1122): transl_table=11

SEQ ID NO: 139940 - protein, 373 aa, Staphylococcus epidermidis; identical to SEQ ID NO: 118054

SEQ ID NO: 139941 - DNA, 1122 bp, Staphylococcus epidermidis; identical to SEQ ID NO: 64057
  CDS (1)..(1122): transl_table=11

SEQ ID NO: 139942 - protein, 373 aa, Staphylococcus epidermidis; identical to SEQ ID NO: 64058

SEQ ID NO: 139943 - DNA, 1140 bp, Streptococcus agalactiae serotype III; identical to SEQ ID NO: 64059
  CDS (1)..(1140): transl_table=11

SEQ ID NO: 139944 - protein, 379 aa, Streptococcus agalactiae serotype III; identical to SEQ ID NO: 64060

SEQ ID NO: 139945 - DNA, 1134 bp, Streptococcus mutans; identical to SEQ ID NO: 64061
  CDS (1)..(1134): transl_table=11

SEQ ID NO: 139946 - protein, 377 aa, Streptococcus mutans; identical to SEQ ID NO: 64062

SEQ ID NO: 139947 - DNA, 1137 bp, Streptococcus pyogenes; identical to SEQ ID NO: 118059
  CDS (1)..(1137): transl_table=11

SEQ ID NO: 139948 - protein, 378 aa, Streptococcus pyogenes; identical to SEQ ID NO: 118060

SEQ ID NO: 139949 - DNA, 1119 bp, Streptococcus pneumoniae; identical to SEQ ID NO: 118061
  CDS (1)..(1119): transl_table=11

SEQ ID NO: 139950 - protein, 372 aa, Streptococcus pneumoniae; identical to SEQ ID NO: 118062

SEQ ID NO: 139951 - DNA, 1161 bp, Symbiobacterium thermophilum
  CDS (1)..(1161): transl_table=11
gtggaccgactggccaagcgcgactactacgagatccttggcgttccccggaacgccaccgaggccgagatcaagaaggcctttcggaacctcgcccgcaagtaccaccctgacgccaacaaggacgaccccgacgcggccgagaaattcaaggagatcaacgaggcctaccaggtcctctctgacccggaaaagcgggcccgctacgaccagttcggtcacgcggcggagcagatgggcggggccggcggcaaccccttcgagggcttcgggggcttcggcgatttcgggggattcagcgacatctttgagatgttcttcggtggcgccggtcggcagcggaacccccgcggaccggtccggggcgccgatctggagtacgaactggagctgaccctgaaagaggcggccttcggctgcaccaaggagctgcgggtgccgcgcgtcgaggactgcgacacctgccacggttccggcgcacggccgggcacccagccggtgacctgccccaagtgcggcggcacgggccaggtccagatgacccagcacaccgtcttcggccggttcgtcaacgtgatgacctgcgatcggtgccgcggcgagggcaagatcgtcgagtcgccctgccccacctgccgtggccgggggcgcgtgcagaagacccagcgggtggaggtcaaggtgcctggcggcgtggagaccggcacgcggctgcgcatgccgggttacggcgaggccggcgaacgcggcggccccccgggagacctgttcatcgtcatgcgggtccgccccgaccggcggttccggcgggagggcgacgacctgttcaccaccaccgagatttccttcatccaggccgcgctgggcaccgaaatcgaggtggagaccctggacggccccgagctcatcaagatccctgagggcacgcagccgggggacaccatccggctgaagggcaaggggacccaccgcttgcggggatccggccgcggcgacctgcacgtggtcatcagcgtgaagacgcccgggcggctctccgagagggaacgggagctgctgttggaggtggctgccctgcgcggcgagcgggtcgccggaatgacggagaacaaggagaaaagctttctgaagaagatgaaggacgccctcggcggccgctga

SEQ ID NO: 139952 - protein, 386 aa, Symbiobacterium thermophilum
MDRLAKRDYYEILGVPRNATEAEIKKAFRNLARKYHPDANKDDPDAAEKFKEINEAYQVLSDPEKRARYDQFGHAAEQMGGAGGNPFEGFGGFGDFGGFSDIFEMFFGGAGRQRNPRGPVRGADLEYELELTLKEAAFGCTKELRVPRVEDCDTCHGSGARPGTQPVTCPKCGGTGQVQMTQHTVFGRFVNVMTCDRCRGEGKIVESPCPTCRGRGRVQKTQRVEVKVPGGVETGTRLRMPGYGEAGERGGPPGDLFIVMRVRPDRRFRREGDDLFTTTEISFIQAALGTEIEVETLDGPELIKIPEGTQPGDTIRLKGKGTHRLRGSGRGDLHVVISVKTPGRLSERERELLLEVAALRGERVAGMTENKEKSFLKKMKDALGGR

SEQ ID NO: 139953 - DNA, 1131 bp, Synechococcus sp; identical to SEQ ID NO: 118063
  CDS (1)..(1131): transl_table=11

SEQ ID NO: 139954 - protein, 376 aa, Synechococcus sp; identical to SEQ ID NO: 118064

SEQ ID NO: 139955 - DNA, 1134 bp, Synechococcus sp; identical to SEQ ID NO: 118065
  CDS (1)..(1134): transl_table=11

SEQ ID NO: 139956 - protein, 377 aa, Synechococcus sp; identical to SEQ ID NO: 118066

SEQ ID NO: 139957 - DNA, 1161 bp, Tetragenococcus halophilus; identical to SEQ ID NO: 118067
  CDS (1)..(1161): transl_table=11

SEQ ID NO: 139958 - protein, 386 aa, Tetragenococcus halophilus; identical to SEQ ID NO: 118068

SEQ ID NO: 139959 - DNA, 1146 bp, Vibrio cholerae
  CDS (1)..(1146): transl_table=11
atgtcaaaacgtgatttttacgaagtattaggcgtaggccgtgacgcctccgagcgtgatattaaaaaggcatacaaacgccttgcgatgaaataccacccggaccgcaactcgggagatgctggtgcggcggaaaagtttaaagaagtcaaagaagcgtatgaaattctgaccgatgcgcagaagaaagcagcttatgaccaatacggccatgcggcatttgagcaaggcgcgggtggttttggtggcggcggcttcggcggtggcggtgctgattttggcgatattttcggtgacgtgtttggtgatattttcggtggtggtcgccgtggcggcggtccaagagcacagcgtggctccgatctacgttacaacatggaactgagccttgaagaagcggttcgcggctgctcgaaagagattgaagtaccgacattagtacactgtgacgcttgcgatggatcaggtgcgaaaaaaggcacctcagcacaaacttgtggaacctgtcacggtcatggccaagtccagatgcgtcagggcttctttgcggtgcagcaaacctgtccaacttgtcatggtaaaggcaagatcatcaaagatccttgtaacgtctgtcatggccaaggtcgcaagcaaaagaccaagacactcaatgtgaaaattccagcgggtgtggataccggcgatcgcattcgtctttccggtgaaggagaagcgggagaaatgggcgcgccagcaggggatttgtacgtacaagtgcatgtcaaagagcaccacattttcgagcgtgatggcaataacttgtactgtgaagtaccagtgagcttcgcaatggcggctctgggcggtgaagtagaagtaccgacactcgatggtcgcgtgagcttgaaagtgcctgcggaaacccaaacgggtcgcatgttccgcatgcgcggtaaaggtgtgaaaggcgttcgctctgcagcactgggcgatctgattgtcaaacttgtggtcgaaaccccagtcaatttgagtgctcgtcagaaagagctgctgaaagagtttgaagagtcttgtggcggcgaagcggcgacgaaacacaagccgaaagccgaaggcttctttaatggtgtgaagaagttttttgatgacttaaccagttaa

SEQ ID NO: 139960 - protein, 381 aa, Vibrio cholerae; identical to SEQ ID NO: 118076

SEQ ID NO: 139961 - DNA, 1158 bp, Vibrio harveyi; identical to SEQ ID NO: 64065
  CDS (1)..(1158): transl_table=11

SEQ ID NO: 139962 - protein, 385 aa, Vibrio harveyi; identical to SEQ ID NO: 64066

SEQ ID NO: 139963 - DNA, 1146 bp, Vibrio parahaemolyticus; identical to SEQ ID NO: 64067
  CDS (1)..(1146): transl_table=11

SEQ ID NO: 139964 - protein, 381 aa, Vibrio parahaemolyticus; identical to SEQ ID NO: 64068

SEQ ID NO: 139965 - DNA, 1146 bp, Vibrio vulnificus
  CDS (1)..(1146): transl_table=11
atgtcaaaacgtgatttttacgaagtattaggcgttagccgcgatgcctcagagcgagacatcaaaaaggcgtataagcgcttggctatgaaatttcacccagatcgcaatcagggtgacgagtctgctgcggataagtttaaagaagtaaaagaagcgtacgaaattctgaccgatccacagaaaaaagcagcttacgatcaatatggccacgctgcatttgaacaaggcggtggcggcttcggcggtggttttggtggcggtggtgctgactttggtgacatcttcggcgacgtttttggcgatatttttggtggtggtcgccgtggtggtggtcacgctcgtccacagcgtggtgccgatctgcgctacaacatggaactgtcgctagaagaagccgtacgtggcgtctcgaaggaaattgaagttccgacattggttcattgtgacacttgtgaaggcacgggggcgaagaaaggcacttcagctgaaacctgtggtacctgtcatggccatggtcaggttcagatgcgccaaggtttcttcgctgtacagcaaacctgtccaacctgtcacggcaaaggcaagatcatcaaagacccatgtaatgtgtgtcatggtcaaggccgcaagcagaaaaccaaaacgctcaatgttaagattccagcaggggttgacacaggcgatcgcattcgtctctctggtgaaggggaagcgggtgagcgcggcgccccagcgggagatttgtatgtacaagtacacgtaagagagcaccacatctttgaacgtgaaggcaacaacctttactgtgaagtgccagtaagttttgctatggcggcactgggtggcgaagtggaagtgccgacactcgatggccgtgtgaatttgaaagtaccatcagagacccaaacgggccgcatgttccgtatgcgtggcaaaggcgtaaaaggcgttcgcggcggcgcaatcggtgatttgattgtgaaacttgtggtcgagacgccagtgaacttgagttcacgtcaaaaagagttgctgaaagagtttgaagagtcttgctgtggtgaagcggccaccaagcacaaaccaaaatcagaaggcttctttaatggtgttaagaagttctttgacgatttgaccagctag

SEQ ID NO: 139966 - protein, 381 aa, Vibrio vulnificus
MSKRDFYEVLGVSRDASERDIKKAYKRLAMKFHPDRNQGDESAADKFKEVKEAYEILTDPQKKAAYDQYGHAAFEQGGGGFGGGFGGGGADFGDIFGDVFGDIFGGGRRGGGHARPQRGADLRYNMELSLEEAVRGVSKEIEVPTLVHCDTCEGTGAKKGTSAETCGTCHGHGQVQMRQGFFAVQQTCPTCHGKGKIIKDPCNVCHGQGRKQKTKTLNVKIPAGVDTGDRIRLSGEGEAGERGAPAGDLYVQVHVREHHIFEREGNNLYCEVPVSFAMAALGGEVEVPTLDGRVNLKVPSETQTGRMFRMRGKGVKGVRGGAIGDLIVKLVVETPVNLSSRQKELLKEFEESCCGEAATKHKPKSEGFFNGVKKFFDDLTS

SEQ ID NO: 139967 - DNA, 1125 bp, Wigglesworthia glossinidia brevipalpis; identical to SEQ ID NO: 118081
  CDS (1)..(1125): transl_table=11

SEQ ID NO: 139968 - protein, 374 aa, Wigglesworthia glossinidia brevipalpis; identical to SEQ ID NO: 118082

SEQ ID NO: 139969 - DNA, 1140 bp, Yersinia pestis; identical to SEQ ID NO: 118091
  CDS (1)..(1140): transl_table=11

SEQ ID NO: 139970 - protein, 379 aa, Yersinia pestis; identical to SEQ ID NO: 118092

SEQ ID NO: 139971 - DNA, 1128 bp, Zymomonas mobilis; identical to SEQ ID NO: 118093
  CDS (1)..(1128): transl_table=11

SEQ ID NO: 139972 - protein, 375 aa, Zymomonas mobilis; identical to SEQ ID NO: 118094

SEQ ID NO: 139973 - DNA, 1509 bp, Allium porrum; identical to SEQ ID NO: 64071
  CDS (81)..(1337)

SEQ ID NO: 139974 - protein, 418 aa, Allium porrum; identical to SEQ ID NO: 64072

SEQ ID NO: 139975 - DNA, 1254 bp, Atriplex nummularia; identical to SEQ ID NO: 64073
  CDS (1)..(1254)

SEQ ID NO: 139976 - protein, 417 aa, Atriplex nummularia; identical to SEQ ID NO: 64074

SEQ ID NO: 139977 - DNA, 1242 bp, Cucumis sativus; identical to SEQ ID NO: 64075
  CDS (1)..(1242)

SEQ ID NO: 139978 - protein, 413 aa, Cucumis sativus; identical to SEQ ID NO: 64076

SEQ ID NO: 139979 - DNA, 1230 bp, Saccharomyces cerevisiae; identical to SEQ ID NO: 117495
  CDS (1)..(1230)

SEQ ID NO: 139980 - protein, 409 aa, Saccharomyces cerevisiae; identical to SEQ ID NO: 117496

SEQ ID NO: 139981 - DNA, 1536 bp, Saccharomyces cerevisiae; identical to SEQ ID NO: 63807
  CDS (1)..(1536)

SEQ ID NO: 139982 - protein, 511 aa, Saccharomyces cerevisiae; identical to SEQ ID NO: 63808

SEQ ID NO: 139983 - DNA, 1140 bp, Schizosaccharomyces pombe
  CDS (1)..(1140)
atggtagcagataccaaattatacgattgtttggaggtccgccccgaggcctctgaggcagagttaaagaaggcatatcgaaaacttgcacttaaataccatccagacaaaaatcctaatggtgagaagaaatttaaagaaatttctcttgcttacgaagtattgagcgatccccagcgccgtaagctttatgaccaatacggtatcacagaagggaatgctgctccaccaccaccgggtgctgaaggtggccctggtgcaggctttggcggcttcccaggcgccggacctggtggagctcgaacattccactttaatatgggtggcccaggtggagctcaatttttcagtgccagtgatccgaacgacatttttgaaagagtatttggtcatgcctttgctggcggtggaggcatgggcggaggaatgggtggaatgggtggtatggacgatgatatggacatggatggaggttttggtacgcggactcgtggaggtggtatgcctggcggattcgctaatatgtttggcggtggtggagcaggtcctcacgccagacgtagccatccatcttttggtggatcccgtcctagtcaaccccccgctcaaaacgaggttatcactcgaccccttaacgtgagcctggaggatctatttaccggatgtaccaagaagatgaaaatatctagacacataattgatgcttctggtcaatcggtgaaagcggaccgaattttggagatcaaagtaaagcctggatggaaagctggcactaaaatcaagtttgctggtgagggtgatgagaaaccggacggaactgttcaagacattcagttcgtgctagctgaaaaacctcatcctgttttcacacgctctggtgatgatctccgtatgcaagtagagctatccttgaaggaagcacttctgggcttttcaaagcaaatttcaactattgatggaaagaagcttaaagtatcttcgtctttaccaactcaacctggttatgaaattacgtatcctggattcggtatgcccttgccaaagaatccttctcaacgtggtaatatgatcattgagtgcaaggttaaatttcctaccgaacttacgcctgctcaaaagactgctgcagaagccttttaa

SEQ ID NO: 139984 - protein, 379 aa, Schizosaccharomyces pombe
MVADTKLYDCLEVRPEASEAELKKAYRKLALKYHPDKNPNGEKKFKEISLAYEVLSDPQRRKLYDQYGITEGNAAPPPPGAEGGPGAGFGGFPGAGPGGARTFHFNMGGPGGAQFFSASDPNDIFERVFGHAFAGGGGMGGGMGGMGGMDDDMDMDGGFGTRTRGGGMPGGFANMFGGGGAGPHARRSHPSFGGSRPSQPPAQNEVITRPLNVSLEDLFTGCTKKMKISRHIIDASGQSVKADRILEIKVKPGWKAGTKIKFAGEGDEKPDGTVQDIQFVLAEKPHPVFTRSGDDLRMQVELSLKEALLGFSKQISTIDGKKLKVSSSLPTQPGYEITYPGFGMPLPKNPSQRGNMIIECKVKFPTELTPAQKTAAEAF

SEQ ID NO: 139985 - DNA, 1134 bp, Saccharomyces cerevisiae
  CDS (1)..(1134)
atgattccaaaattatatatacatttgatactatctttattgttgttgccgctaattttggcgcaggattattatgcaatactagagatagacaaagatgccactgagaaggaaatcaaatcagcgtacagacaattgtctaagaagtaccatccggataaaaatgctgggagcgaagaagcccatcaaaaattcattgaagtcggcgaggcatacgatgtattgagcgatcctgaaaagaaaaagatttatgaccagtttggtgcagatgctgtaaagaatggcggtggcggtggcggtccaggaggccctggcgcaggtggattccacgatccgtttgacatattcgaacggatgtttcaaggaggtcatggaggtcctggcggcggatttggccagagacagaggcagcgtggtccaatgatcaaggtccaggaaaaactatctttaaagcagttttattccgggtcctcgatagaatttactttaaacctaaacgatgaatgtgatgcatgccatggtagtggctctgcagatggtaagctggcccaatgtcccgattgtcaaggtcgtggggttataatacaagtgctgcgcatgggtattatgacgcagcagattcaacagatgtgtggtaggtgtggtggtacgggacaaattatcaaaaatgaatgcaaaacatgtcacggcaaaaaagttaccaaaaagaacaagttcttccacgttgacgttccaccaggcgcaccaagaaactacatggacacaagagtcggcgaggctgaaaaagggcctgactttgacgccggtgacttggtcatagaattcaaggaaaaggatactgagaacatgggttacagaagaagaggcgacaatctgtacagaacagaagttctttctgctgcggaagcgctatacggcggatggcaaagaacgatagaattccttgatgagaacaagcccgttaagttatctagacccgctcatgtagttgtctccaatggcgaagttgaagtcgtgaagggattcggcatgcccaagggtagcaagggttacggtgatttgtacatagactacgtcgttgtcatgccaaagactttcaaatctgggcaaaatatgctcaaagatgagttgtag

SEQ ID NO: 139986 - protein, 377 aa, Saccharomyces cerevisiae
MIPKLYIHLILSLLLLPLILAQDYYAILEIDKDATEKEIKSAYRQLSKKYHPDKNAGSEEAHQKFIEVGEAYDVLSDPEKKKIYDQFGADAVKNGGGGGGPGGPGAGGFHDPFDIFERMFQGGHGGPGGGFGQRQRQRGPMIKVQEKLSLKQFYSGSSIEFTLNLNDECDACHGSGSADGKLAQCPDCQGRGVIIQVLRMGIMTQQIQQMCGRCGGTGQIIKNECKTCHGKKVTKKNKFFHVDVPPGAPRNYMDTRVGEAEKGPDFDAGDLVIEFKEKDTENMGYRRRGDNLYRTEVLSAAEALYGGWQRTIEFLDENKPVKLSRPAHVVVSNGEVEVVKGFGMPKGSKGYGDLYIDYVVVMPKTFKSGQNMLKDEL

SEQ ID NO: 139987 - DNA, 1146 bp, Schizosaccharomyces pombe
  CDS (1)..(1146)
atgttcactaacaacttctctcaaaaacagatccttggagtcagtaaagatgcatctgaatctgagattcgcaaagcatatagacaattgacgaaacaatggcaccctgacaaaaatccaggtaatgaagaagcacaggagaagtttattgaaattaacaaggcccatgaagtcctttctgatcctgagcaacgtaagatttatgatgcttatggagaagaaggattaaacggtcaacctggtggtcctggtggtggtccaggtgaaggattcccaggtggaggtttcggatttgatccatttggtgatatattcgataacatatttggcggacgtagacgtcaaaatgccgttcgcagaggacctagcatggagcaaatagttcaaattcatctttcatctttttacaccggaggcagttttaccttggaaattccggtgaagagaacttgcagtgtttgtagtggtcagggctttaatcctaaatactccgctgataaagctatcgaaagttgccctgtttgcggtggttcagggttcagagtcattgaacacatgatcgctccaggttttcgtcagcaaatgcgtatgccatgtaacgcttgtaatggaaatggacgtacgatcaagcataaatgccctcgctgcaaaggtgagcgtgttgctgaagttgttgaaagctttgacattaaagtaccagctggtgctcctgaaggttaccgtatcggttttcgtggtaaagctgatgaaattcctggtatggaagctggagatatcatcgttatccttgaggctgctggtggtgattatggatggactagaaaagataatgatctatatagaaaggaaactatttcggttagggaagctttactcggaaattggaaacgtaaaatacaaaaactggatggatcctttatggaggttaagcggtcagctggcgaagttgtgcatcctggggaaacggagagagtgaaaaatcaaggaatgccaatttacaaccttcataaaggaaaaaccacttctgcacatggaagtgcttatatagagtgggaggtcaaatttcctaaaaagttgaaaggaaagtttttgaaagacctcaataacttatttgaaaagtatgataacgaatttgatgagctttaa

SEQ ID NO: 139988 - protein, 381 aa, Schizosaccharomyces pombe
MFTNNFSQKQILGVSKDASESEIRKAYRQLTKQWHPDKNPGNEEAQEKFIEINKAHEVLSDPEQRKIYDAYGEEGLNGQPGGPGGGPGEGFPGGGFGFDPFGDIFDNIFGGRRRQNAVRRGPSMEQIVQIHLSSFYTGGSFTLEIPVKRTCSVCSGQGFNPKYSADKAIESCPVCGGSGFRVIEHMIAPGFRQQMRMPCNACNGNGRTIKHKCPRCKGERVAEVVESFDIKVPAGAPEGYRIGFRGKADEIPGMEAGDIIVILEAAGGDYGWTRKDNDLYRKETISVREALLGNWKRKIQKLDGSFMEVKRSAGEVVHPGETERVKNQGMPIYNLHKGKTTSAHGSAYIEWEVKFPKKLKGKFLKDLNNLFEKYDNEFDEL

SEQ ID NO: 139989 - DNA, 1254 bp, Oryza sativa; identical to SEQ ID NO: 118107
  CDS (1)..(1254)

SEQ ID NO: 139990 - protein, 417 aa, Oryza sativa; identical to SEQ ID NO: 118108

SEQ ID NO: 139991 - DNA, 1017 bp, Brassica napus; identical to SEQ ID NO: 118121
  CDS (1)..(1017)

SEQ ID NO: 139992 - protein, 338 aa, Brassica napus; identical to SEQ ID NO: 118122

SEQ ID NO: 139993 - DNA, 1041 bp, Brassica napus; identical to SEQ ID NO: 118123
  CDS (1)..(1041)

SEQ ID NO: 139994 - protein, 346 aa, Brassica napus; identical to SEQ ID NO: 118124

SEQ ID NO: 139995 - DNA, 963 bp, Brassica napus
  CDS (1)..(963)
atgggtgttgattactacaatgtcctaaaggtgaggcgagacgctaacgacgatgatctcaagaagtcttaccgaagactcgccatgaagtaccaccccgacaagaaccccacgagcaagaaagaagccgaagccaagttcaagcagatctccgaagcttacgacgtcctcagcgatcctcgcagacgtcagatctacgatcagcacggcgaagaagggctgaagtcttcagatttgccttctgcagcggagacggcgtcggcgtcggcggcagcgaagcagaggagttactcgtcgcgtcgtgacgactccgagtttcggtattatccgcgtgacgcggaagatatattcggggagttcttcggaacgtcgccggcgaagacgtcgccggcgaacaagaaggcggcgccggcgaataggaaggcggcggatatagagagcgcattgccttgcacgttggaggagctctacaaaggtgggaagaagaagatgcgaatctctcgccttgttcctgatgagtttgggaagccaaagacagtgcaagagatcttgaagatagatataaaaccgggttggaagaaaggaacaaagatcacattccctgagaaaggcaaccaagaacctggtgtcactccagctgatctcaccttcgttgtggacgagaagcctcatccggtttacacaagagacggtcacgatctgatttttgagaagaaagtctctttgatagatgctttaaccggagtcaccgttagcttaacgactcttgacgggaggaatttgactataccggttttggatattgttaaaccgggtcaggagattgtgatcccaaacgaagggatgcctactaaagagcctttgaaaagaggagacttaagagtcaggtttgagatcttgttcccttcgaggcttacttcggagcagaagagtgaccttaagagagttcttggtggaagttga

SEQ ID NO: 139996 - protein, 320 aa, Brassica napus
MGVDYYNVLKVRRDANDDDLKKSYRRLAMKYHPDKNPTSKKEAEAKFKQISEAYDVLSDPRRRQIYDQHGEEGLKSSDLPSAAETASASAAAKQRSYSSRRDDSEFRYYPRDAEDIFGEFFGTSPAKTSPANKKAAPANRKAADIESALPCTLEELYKGGKKKMRISRLVPDEFGKPKTVQEILKIDIKPGWKKGTKITFPEKGNQEPGVTPADLTFVVDEKPHPVYTRDGHDLIFEKKVSLIDALTGVTVSLTTLDGRNLTIPVLDIVKPGQEIVIPNEGMPTKEPLKRGDLRVRFEILFPSRLTSEQKSDLKRVLGGS

SEQ ID NO: 139997 - DNA, 1014 bp, Brassica napus; identical to SEQ ID NO: 118125
  CDS (1)..(1014)

SEQ ID NO: 139998 - protein, 337 aa, Brassica napus; identical to SEQ ID NO: 118126

SEQ ID NO: 139999 - DNA, 1053 bp, Brassica napus; identical to SEQ ID NO: 118127
  CDS (1)..(1053)

SEQ ID NO: 140000 - protein, 350 aa, Brassica napus; identical to SEQ ID NO: 118128

SEQ ID NO: 140001 - DNA, 1506 bp, Brassica napus; identical to SEQ ID NO: 64083
  CDS (1)..(1506)

SEQ ID NO: 140002 - protein, 501 aa, Brassica napus; identical to SEQ ID NO: 64084

SEQ ID NO: 140003 - DNA, 1056 bp, Glycine max
  CDS (1)..(1056)
atgggcatggactactacaacatactcaaagtgaatcgcaacgccagcgacgacgatttgaagaaggcttacaagagactcgcgcgtatatggcaccccgacaagaatcccgtcaacaacaccgaagcggaggccaaattcaaacgaatctccgaagcctacgacgttctcagcgacccgcagaagcgccagatctacgatctctacggcgaagaggcactcaaatctgggcagtttccgccgccgcactcctcctcctcctcgtcgtcctcgcgcgccttccaccaccgtcagaacaacaacaacaacaacaacaacaacaacaacaacaaaaacaacagcaaccctcccccggccgcctcgtcgttccgattcaacccgcgcgatgccgacgacatttacgccgagtttttcggcccggaggacatcggcgccggcggccccgacgccttcttccggacctccaacggcggtggcgcgttcggcgcctccgctgcggcgggacggaaggctgccgcggtggagaacgcgctcccgtgcagcttggaggacctctacaaaggcgtcaagaagaagatgaagatttccaggaacgtctacgatgcctttggcaaatgtcggaacatggaggagattttgactattgagataaaacctggctggaagaaaggaacaaagattaccttcccagagaaaggtaaccatgagccaggtgtcatcccagcagatcttatttttgtgatagatgagaaaccgcatgctctttatagaagggatggtaatgatttggtgatcaaccaagagataacccttcttgaggcccttactggtaaaacattggatctcaccaccttggacggaaggagtctcatgatcccattgacagatattgtcagacctggtgctgaggttgttgtccctaatgaaggaatgcctatatcaaaagagcctgggaggaaggggaatttgagaattaagctcgacgtcaagtatccttcaaggctaactccagagcagaagtctgatctgagaagagttttaggtggaatctcataa

SEQ ID NO: 140004 - protein, 351 aa, Glycine max
MGMDYYNILKVNRNASDDDLKKAYKRLARIWHPDKNPVNNTEAEAKFKRISEAYDVLSDPQKRQIYDLYGEEALKSGQFPPPHSSSSSSSSRAFHHRQNNNNNNNNNNNNKNNSNPPPAASSFRFNPRDADDIYAEFFGPEDIGAGGPDAFFRTSNGGGAFGASAAAGRKAAAVENALPCSLEDLYKGVKKKMKISRNVYDAFGKCRNMEEILTIEIKPGWKKGTKITFPEKGNHEPGVIPADLIFVIDEKPHALYRRDGNDLVINQEITLLEALTGKTLDLTTLDGRSLMIPLTDIVRPGAEVVVPNEGMPISKEPGRKGNLRIKLDVKYPSRLTPEQKSDLRRVLGGIS

SEQ ID NO: 140005 - DNA, 1023 bp, Glycine max; identical to SEQ ID NO: 118131
  CDS (1)..(1023)

SEQ ID NO: 140006 - protein, 340 aa, Glycine max; identical to SEQ ID NO: 118132

SEQ ID NO: 140007 - DNA, 1032 bp, Glycine max; identical to SEQ ID NO: 118133
  CDS (1)..(1032)

SEQ ID NO: 140008 - protein, 343 aa, Glycine max; identical to SEQ ID NO: 118134

SEQ ID NO: 140009 - DNA, 966 bp, Brassica napus; identical to SEQ ID NO: 118135
  CDS (1)..(966)

SEQ ID NO: 140010 - protein, 321 aa, Brassica napus; identical to SEQ ID NO: 118136

SEQ ID NO: 140011 - DNA, 1017 bp, Zea mays; identical to SEQ ID NO: 118139
  CDS (1)..(1017)

SEQ ID NO: 140012 - protein, 338 aa, Zea mays; identical to SEQ ID NO: 118140

SEQ ID NO: 140013 - DNA, 1047 bp, Zea mays; identical to SEQ ID NO: 118141
  CDS (1)..(1047)

SEQ ID NO: 140014 - protein, 348 aa, Zea mays; identical to SEQ ID NO: 118142

SEQ ID NO: 140015 - DNA, 1266 bp, Linum usitatissimum; identical to SEQ ID NO: 64087
  CDS (1)..(1266)

SEQ ID NO: 140016 - protein, 421 aa, Linum usitatissimum; identical to SEQ ID NO: 64088

SEQ ID NO: 140017 - DNA, 1011 bp, Zea mays; identical to SEQ ID NO: 118145
  CDS (1)..(1011)

SEQ ID NO: 140018 - protein, 336 aa, Zea mays; identical to SEQ ID NO: 118146

SEQ ID NO: 140019 - DNA, 1002 bp, Helianthus annuus
  CDS (1)..(1002)
atgggcgtcgattactacaacatcctgaaagtgaatcgaactgtaaccgatgaagatctgaagaaatcatacaaaaaactcgcgatgaaatggcatccagacaagaacatcgcatcatcaaccgatgataaagtcgctgaatcgaagtttaaacagatctccgaagcgtattacgttctatcggatccgaaaaagcgtcagatctatgatatgtacggtgaagaaggtttgaaatctggagtttatgatgaatcgatgttgtcaccgacggtttctagtggtacgaataagagtagatctggtgcgaggtttaggtttgatccgagagatgcagatgagatatttgcggagtttttttacggaccggaaggtagggtttcggatggagttgtgaagagtgagaagaagaagatgagtgagaagacgaagagtgagaggaaggcggagacggtggagaataagttgagttgtagtttggaggagttgtatagaggatccaagaggaaaatgcagatttcgaggattgtgcttgatgataacggaaaacccgggactctggaagaaatcctaacaatacacatcaaacccggttggaaaaaaggaacgaaaatcacattccccgagaaaggaaaccaagaacccggagcagccgcaggcgacctaatattcgtaatcgacgaaaagccacacgacacattcaaacgcgacggtaacgatttagttttcacaaaacgaatcactctcttagaagctctcaccgggaaaacagtcaaggtgacgacattagacggtagaaatctcgtgattccgatcaccgacatcatcaaaccgggccacgaagaagtgattcagaacgaagggatgccgatttcgaaagaacccggaaagaaaggtaacttgaggatcaagattgatattaagtttccgtcgagattaacgggtgaacagaaattggatcttaaacgggttttgggtgccggaagagttgttgtcgaagactag

SEQ ID NO: 140020 - protein, 333 aa, Helianthus annuus
MGVDYYNILKVNRTVTDEDLKKSYKKLAMKWHPDKNIASSTDDKVAESKFKQISEAYYVLSDPKKRQIYDMYGEEGLKSGVYDESMLSPTVSSGTNKSRSGARFRFDPRDADEIFAEFFYGPEGRVSDGVVKSEKKKMSEKTKSERKAETVENKLSCSLEELYRGSKRKMQISRIVLDDNGKPGTLEEILTIHIKPGWKKGTKITFPEKGNQEPGAAAGDLIFVIDEKPHDTFKRDGNDLVFTKRITLLEALTGKTVKVTTLDGRNLVIPITDIIKPGHEEVIQNEGMPISKEPGKKGNLRIKIDIKFPSRLTGEQKLDLKRVLGAGRVVVED

SEQ ID NO: 140021 - DNA, 1272 bp, Brassica napus; identical to SEQ ID NO: 64089
  CDS (1)..(1272)

SEQ ID NO: 140022 - protein, 423 aa, Brassica napus; identical to SEQ ID NO: 64090

SEQ ID NO: 140023 - DNA, 1266 bp, Brassica napus; identical to SEQ ID NO: 64091
  CDS (1)..(1266)

SEQ ID NO: 140024 - protein, 421 aa, Brassica napus; identical to SEQ ID NO: 64092

SEQ ID NO: 140025 - DNA, 1017 bp, Brassica napus; identical to SEQ ID NO: 118151
  CDS (1)..(1017)

SEQ ID NO: 140026 - protein, 338 aa, Brassica napus; identical to SEQ ID NO: 118152

SEQ ID NO: 140027 - DNA, 1008 bp, Brassica napus
  CDS (1)..(1008)
atgggtgtggattactacaacatactgaaggtgaatcacaacgcgacggaggatgatctaaagaaagcttacaagcgtctcgccatgatctggcatcccgacaagaacccttccgcaaggagagacgaaaccgaggccaaattcaaacggatctccgaggcctacgacgttctctccgaccctcagaagcgccagatctacgacctctacggcgaggaaggcctcaaatctggcaaaatccccaactcttcctcggacgaggcttcttcctcctcctcgagaacgccgcactttcaccaccaccacaggcagcatccgccgaacgccgcctccttccgtttcaaccctagagacgcagatgatatctacgccgagatctttggttctgaaggcggaggaggaggacacagaacgttcaggaacggtcatttcaacacgggtcgtagcagtgagcttaggaaagctccagccgttgagaatccattgccctgtagtttggaggatctctgcaaaggtgccaagaagaagatgcgcttatccagaaacgtttacgatgcttctggtaaaatgagggtcgtagaggaaatattgcccatagaaataaaaccagggtggaagaaaggcacaaagctcactttccctaagaaaggcaatgaagagcctggaatcataccagcagatatcatcttcgtggttgaagagaagccacatcctctttacaagagagacggaaacgaccttgtgttcagtcaggagatcactctacttgaagcactcactggtaagactattgacctgatcacgcttgatggaaggaccctcatgatcccactaaccgatatcatcaaccccgatcacgagattgtggttccgaacgaaggaatgcctatctctaaagaacctgggagaaaaggtaacctgagattgaagcttaacgtgagatatccgtccaagctgacggcggaacagaaatccgagctgaagagagttcttggtggggttttatga

SEQ ID NO: 140028 - protein, 335 aa, Brassica napus
MGVDYYNILKVNHNATEDDLKKAYKRLAMIWHPDKNPSARRDETEAKFKRISEAYDVLSDPQKRQIYDLYGEEGLKSGKIPNSSSDEASSSSSRTPHFHHHHRQHPPNAASFRFNPRDADDIYAEIFGSEGGGGGHRTFRNGHFNTGRSSELRKAPAVENPLPCSLEDLCKGAKKKMRLSRNVYDASGKMRVVEEILPIEIKPGWKKGTKLTFPKKGNEEPGIIPADIIFVVEEKPHPLYKRDGNDLVFSQEITLLEALTGKTIDLITLDGRTLMIPLTDIINPDHEIVVPNEGMPISKEPGRKGNLRLKLNVRYPSKLTAEQKSELKRVLGGVL

SEQ ID NO: 140029 - DNA, 966 bp, Brassica napus
  CDS (1)..(966)
atgggtttggattattacaccatattgaaggttgacaagaatgcaacggaggatgatctcaagaaatcttaccgaaaattggctatgaaatggcatcctgataaaaaccctaccaccaaaaccgaagctgaagccaaattcaaacagatctccgaggcttatgaggttctgagtgatcctcagaagcgagcagtatatgatcaatacggagaagaaggactaaccgatatgccccctccagggagcacaggaaacaacggaagagcaaacgggtttaaccctagaaatgcagaagacatattcgcagagttctttggaagcagcccatttgatttcggatcagctggaagatccatgaggtttcaatccgacggaggaggaatgtttggaggaagaacgtacagcgatggcactgtgcctaagaaaccaccacccgttgagagcaaactgccttgtacccttgaagagctctacactggatcaacaaggaaaatgaagatctctagaaccattattgacaccaacgggagacaagcgcaagagacagaggttctaacgattgatgtgaaaccaggatggaagaaagggaccaagatcaagtttccagacaaaggaaacgagaaagtgaatcagttaccagctgatttggtgtttgtgatagacgagaagccgcacgatttgttcaagagagatgggaatgatctcatcacaagcacaaaagtgacgcttgcggaagctataggaggaacaactgtgagcatcaacacgctagatgggaggaatctacccgttggtgtcacggacataatcagtccagaccatgagcatgtggttactggagaagggatgccgatagctaaagaaaaaagaaacaaaggtgacctaaaaataaaattcgatgttcagttcccgacaagattgacaacggaccagaagtccgcactcaagcgcgtcttagcaggttga

SEQ ID NO: 140030 - protein, 321 aa, Brassica napus
MGLDYYTILKVDKNATEDDLKKSYRKLAMKWHPDKNPTTKTEAEAKFKQISEAYEVLSDPQKRAVYDQYGEEGLTDMPPPGSTGNNGRANGFNPRNAEDIFAEFFGSSPFDFGSAGRSMRFQSDGGGMFGGRTYSDGTVPKKPPPVESKLPCTLEELYTGSTRKMKISRTIIDTNGRQAQETEVLTIDVKPGWKKGTKIKFPDKGNEKVNQLPADLVFVIDEKPHDLFKRDGNDLITSTKVTLAEAIGGTTVSINTLDGRNLPVGVTDIISPDHEHVVTGEGMPIAKEKRNKGDLKIKFDVQFPTRLTTDQKSALKRVLAG

SEQ ID NO: 140031 - DNA, 1011 bp, Brassica napus; identical to SEQ ID NO: 118153
  CDS (1)..(1011)

SEQ ID NO: 140032 - protein, 336 aa, Brassica napus; identical to SEQ ID NO: 118154

SEQ ID NO: 140033 - DNA, 1008 bp, Brassica napus
  CDS (1)..(1008)
atgggggtcgattattacaaggttcttcaagtggatcggagcgctaaagatgacgatttgaagaaagcttatcgcaaactcgccatgaaatggcatcccgacaagaaccctaacaccaaaaaagaagccgaagccaaattcaaacagatctccgaagcttacgatgtattgagcgatcctcagaagagagcaatctacgatcaatacggagaagaaggtctaaacagccaagctccgcctcctggctccggcggttttcccggtggttcggacggaggagcttcgttccggttcaacggtagaagcgctgacgacatcttctcggagttctttggcttcgcgagaccgtttggtgacacacgtggtgcgggaccctctggtggtgggttcactttcgctgaggaagttttctcttcttataggtcggctaatggagaagcctctaacgctgctccaccgaggaaagctgctcctatagagagacaacttccttgtagtttggaggatttgtataaaggaaccactaagaagatgaaaatctctcgggacgttattgattccttcgggagaccctcaacggtcgaagagatcttgacgatagaaatcaaaccgggatggaagaaagggacaaagataaccttccctgagaaaggaaacgagcagcgaggaatcataccatcagatcttgtattcatagtcgatgagaagccacacgctgtgttcaagagagacgggaacgaccttgtgatcacgcaaaagatccctctcgtggaagcactcacgggctacactgctcaggtcacgactttggatgggagaacgctaacggttccggtcaacaacgtgatcagcccttcctatgaagaggttgtgaaaggcgaaggcatgccgattcctaaagacccgtcgagaaaagggaacttgagaatcaagtttaacgttaagttcccttcgaggctaacgacagagcagaaaactggaatcaaacggatgttttcgtcttcttag

SEQ ID NO: 140034 - protein, 335 aa, Brassica napus
MGVDYYKVLQVDRSAKDDDLKKAYRKLAMKWHPDKNPNTKKEAEAKFKQISEAYDVLSDPQKRAIYDQYGEEGLNSQAPPPGSGGFPGGSDGGASFRFNGRSADDIFSEFFGFARPFGDTRGAGPSGGGFTFAEEVFSSYRSANGEASNAAPPRKAAPIERQLPCSLEDLYKGTTKKMKISRDVIDSFGRPSTVEEILTIEIKPGWKKGTKITFPEKGNEQRGIIPSDLVFIVDEKPHAVFKRDGNDLVITQKIPLVEALTGYTAQVTTLDGRTLTVPVNNVISPSYEEVVKGEGMPIPKDPSRKGNLRIKFNVKFPSRLTTEQKTGIKRMFSSS

SEQ ID NO: 140035 - DNA, 1014 bp, Glycine max
  CDS (1)..(1014)
atgggtgtggactattacaaacttcttcaggtggatcgtaatgccagtgatgaggatctcaagaaagcctatcgcaagcttgctatgaagtggcaccctgataagaaccctaacaacaaaagagacgctgaagccaaattcaagcaaatctcagaagcctatgatgttttgagtgatccgcaaaagaggggtgtgtatgatcagtatggtgaggagggactgaaagggcaggtgccacccccaggtgctggtggtttttccggtggcagtgatggcggaccgacgatgttccggttcaacccgagaagtgcagatgatatattctcggagttttttggattttcaagtccctatggaatgggggatatgggtggccgtgctggcccatctggctatcccagatttgcggatgacctttttgcttcttttagtaggagtgcggctggagaaggctccagcaatgtgccaaggaaaggtgcgccgattgagaaaacattgcaatgcagtttggaggatttgtacaaagggactaccaaaaaaatgaagatttccagggatgtgattgattccagtgggaggcccaccactgtagaggaaattctaaccattgagatcaagccgggctggaagaaaggaacaaaaataacttttcccgagaagggaaatgaacaaagaggagttataccatctgatcttgtttttatcattgatgagaaacctcatggtgtcttcaaaagggatggcaatgatcttgttgtcacacagaagatatctcttgttgaagctctgactagttacacaggacagctgacgacacttgatgggaggaatcttacagtctccaccaactccgtcattagtccgatatacgaagaagttattaaaggagagggtatgccaattcccaaggaaccttccaaaaagggaaacttgaggatcaagttcaatatcaagttcccctctagactcacatccgagcagaaaactggcattaaacgattattgacatcttaa

SEQ ID NO: 140036 - protein, 337 aa, Glycine max
MGVDYYKLLQVDRNASDEDLKKAYRKLAMKWHPDKNPNNKRDAEAKFKQISEAYDVLSDPQKRGVYDQYGEEGLKGQVPPPGAGGFSGGSDGGPTMFRFNPRSADDIFSEFFGFSSPYGMGDMGGRAGPSGYPRFADDLFASFSRSAAGEGSSNVPRKGAPIEKTLQCSLEDLYKGTTKKMKISRDVIDSSGRPTTVEEILTIEIKPGWKKGTKITFPEKGNEQRGVIPSDLVFIIDEKPHGVFKRDGNDLVVTQKISLVEALTSYTGQLTTLDGRNLTVSTNSVISPIYEEVIKGEGMPIPKEPSKKGNLRIKFNIKFPSRLTSEQKTGIKRLLTS

SEQ ID NO: 140037 - DNA, 1314 bp, Glycine max; identical to SEQ ID NO: 64093
  CDS (1)..(1314)

SEQ ID NO: 140038 - protein, 437 aa, Glycine max; identical to SEQ ID NO: 64094

SEQ ID NO: 140039 - DNA, 1332 bp, Glycine max; identical to SEQ ID NO: 64095
  CDS (1)..(1332)

SEQ ID NO: 140040 - protein, 443 aa, Glycine max; identical to SEQ ID NO: 64096

SEQ ID NO: 140041 - DNA, 1260 bp, Zea mays; identical to SEQ ID NO: 64097
  CDS (1)..(1260)

SEQ ID NO: 140042 - protein, 419 aa, Zea mays; identical to SEQ ID NO: 64098

SEQ ID NO: 140043 - DNA, 1254 bp, Zea mays; identical to SEQ ID NO: 64099
  CDS (1)..(1254)

SEQ ID NO: 140044 - protein, 417 aa, Zea mays; identical to SEQ ID NO: 64100

SEQ ID NO: 140045 - DNA, 1011 bp, Zea mays; identical to SEQ ID NO: 118163
  CDS (1)..(1011)

SEQ ID NO: 140046 - protein, 336 aa, Zea mays; identical to SEQ ID NO: 118164

SEQ ID NO: 140047 - DNA, 1290 bp, Zea mays; identical to SEQ ID NO: 64101
  CDS (1)..(1290)

SEQ ID NO: 140048 - protein, 429 aa, Zea mays; identical to SEQ ID NO: 64102

SEQ ID NO: 140049 - DNA, 1269 bp, Zea mays; identical to SEQ ID NO: 64103
  CDS (1)..(1269)

SEQ ID NO: 140050 - protein, 422 aa, Zea mays; identical to SEQ ID NO: 64104

SEQ ID NO: 140051 - DNA, 1050 bp, Glycine max; identical to SEQ ID NO: 118169
  CDS (1)..(1050)

SEQ ID NO: 140052 - protein, 349 aa, Glycine max; identical to SEQ ID NO: 118170

SEQ ID NO: 140053 - DNA, 1032 bp, Glycine max
  CDS (1)..(1032)
atggcgcatcgaggagccacgctgttcttccttctattcgctatctgctattctctcatcgccattgctggaaagagctattacgatatacttcaactgtcgaagggtgcatcggacgagcagataaagagggcgtataggaagctagcattgaagtaccatcctgataagaaccccggcaatgaagaagctaataagaaatttgctgagattagcaatgcgtatgaagtgttgtcggatagcgagaagaggaatatttacgataggtatggtgaggaaggtttgaagcagcatgctgctagtggaggcagaggtggtggaatgaacttccaagatatttttggctctttctttggtgggggacaaatggaagaagaagagaaaattgtaaaaggagatgacgtggttgttgatttggatgcaacacttgaagatttgtacatgggaggtaccttgaaggtttggagggaaaagaatgtactaaagcctgctcctgggaaaagacgctgtaactgtagaaatgaggtttatcacaagcaaattgggcctgggatgtttcaacagatgacagagcaggtctgtgagcaatgtcctaacgtcaaatacgtaagggaggggtatttcatcactgttgatattgagaaaggcatgcaagatgggcaggaggtgctattctatgaggatggagagcccataattgatggggaatctggagatttaaggtttcgtatccgaactgcacctcatgacgtcttcagaagagaaggcaatgacttgcactctactgtcactataactcttgttcaagcccttgttggttttgagaagaccattaaacacctagatgagcatctggtggacataagcacaaaggaaatcacaaagccaaagcaggtgaggaagttcaaaggggagggtatgccattgcatatgagcaacaaaaaaggagatctttacgtcacttttgaggttctatttcccacgtctctaagggaggagcagaaaacaaagataaaagcaattcttggttag

SEQ ID NO: 140054 - protein, 343 aa, Glycine max
MAHRGATLFFLLFAICYSLIAIAGKSYYDILQLSKGASDEQIKRAYRKLALKYHPDKNPGNEEANKKFAEISNAYEVLSDSEKRNIYDRYGEEGLKQHAASGGRGGGMNFQDIFGSFFGGGQMEEEEKIVKGDDVVVDLDATLEDLYMGGTLKVWREKNVLKPAPGKRRCNCRNEVYHKQIGPGMFQQMTEQVCEQCPNVKYVREGYFITVDIEKGMQDGQEVLFYEDGEPIIDGESGDLRFRIRTAPHDVFRREGNDLHSTVTITLVQALVGFEKTIKHLDEHLVDISTKEITKPKQVRKFKGEGMPLHMSNKKGDLYVTFEVLFPTSLREEQKTKIKAILG

SEQ ID NO: 140055 - DNA, 1263 bp, Glycine max; identical to SEQ ID NO: 64105
  CDS (1)..(1263)

SEQ ID NO: 140056 - protein, 420 aa, Glycine max; identical to SEQ ID NO: 64106

SEQ ID NO: 140057 - DNA, 1050 bp, Glycine max; identical to SEQ ID NO: 118173
  CDS (1)..(1050)

SEQ ID NO: 140058 - protein, 349 aa, Glycine max; identical to SEQ ID NO: 118174

SEQ ID NO: 140059 - DNA, 1263 bp, Glycine max; identical to SEQ ID NO: 64107
  CDS (1)..(1263)

SEQ ID NO: 140060 - protein, 420 aa, Glycine max; identical to SEQ ID NO: 64108

SEQ ID NO: 140061 - DNA, 1233 bp, Glycine max; identical to SEQ ID NO: 64109
  CDS (1)..(1233)

SEQ ID NO: 140062 - protein, 410 aa, Glycine max; identical to SEQ ID NO: 64110

SEQ ID NO: 140063 - DNA, 1041 bp, Glycine max
  CDS (1)..(1041)
atgggcgtggactactacaagattcttcaggtagatagaagtgccaaagatgaggatctcaagaaagcatatcgaaggctagccatgaagtggcaccctgataagaaccctaacaacaagaaagaggctgaagctaaattcaagcaaatctccgaagcttatgatgttttgagtgatccacagaagcgaggaatttatgatcagtatggtgaggaggggttgaatggggtgccgccaggcgcaggtggttttcctggtggtggcggcggcggcagcagcggtgacggtggaccgacgtcattccggttcaaccccagaagtgcagatgatatattttccgagtttttcgggttttcgagaccctttggtggtggaatgccggacatgggtggccgagctggtggctctggattttccaggggtggaccgtttggtgaggatatctttgctcaatttaggagtgcagctggggagggctctggacatatgccaaggaaaggtgcagccattgagagacaattgccttgtagcttggaggatttgtataaaggaactaccaagaaaatgaagatttcaagggatgttagtgatgccagtgggagaccctccacagtagaggaaatacttacaattgagatcaagccaggttggaagaaaggaacaaaaataacttttcctgaaaagggaaatgagcagagaggagttatcccttcagaccttgtctttattattgatgagaaacctcatagtctctttaaaagggatggcaatgatcttgttgtcacccagaagatatcgcttgtagaagccttgacaggttacacagtgcagctgacaacccttgatgggcggaatcttacattccccattaactccactattagtccaacatatgaagaagttgtcaaaggagagggtatgcccattccaaaagaaccttccaagaagggaaacttaagaatcaagttcaatatcaagtttccctccaggcttacatccgaacagaaaagtggcatcaagcgattattgacatctccttaa

SEQ ID NO: 140064 - protein, 346 aa, Glycine max
MGVDYYKILQVDRSAKDEDLKKAYRRLAMKWHPDKNPNNKKEAEAKFKQISEAYDVLSDPQKRGIYDQYGEEGLNGVPPGAGGFPGGGGGGSSGDGGPTSFRFNPRSADDIFSEFFGFSRPFGGGMPDMGGRAGGSGFSRGGPFGEDIFAQFRSAAGEGSGHMPRKGAAIERQLPCSLEDLYKGTTKKMKISRDVSDASGRPSTVEEILTIEIKPGWKKGTKITFPEKGNEQRGVIPSDLVFIIDEKPHSLFKRDGNDLVVTQKISLVEALTGYTVQLTTLDGRNLTFPINSTISPTYEEVVKGEGMPIPKEPSKKGNLRIKFNIKFPSRLTSEQKSGIKRLLTSP

SEQ ID NO: 140065 - DNA, 1014 bp, Glycine max
  CDS (1)..(1014)
atgggtgtggactattacaaacttcttcaggtggatcgtaatgccagtgatgaggatctcaagaaagcctatcgcaagcttgctatgaagtggcaccctgataagaaccctaacaacaaaagagacgctgaagccaaattcaagcaaatctcagaagcctatgatgttttgagtgatccgcaaaagaggggtgtgtatgatcagtatggtgaggagggactgaaagggcaggtgccacccccaggtgctggtggtttttccggtggcagtgatggcggaccgacgatgttccggttcaacccgagaagtgcagatgatatattctcggagttttttgggttttcaagtccctatggaatgggggatatgggtggccgtgctggcccatctggctatcccagatttgcggatgacctttttgcttcttttagtaggagtgcggctggagaaggctccagcaatgtgccaaggaaaggtgcgccgattgagaaaacattgcaatgcagtttggaggatttgtacaaagggactaccaaaaaaatgaagatttccagggatgtgattgattccagtgggaggcccaccactgtagaggaaattctaaccattgagatcaagccgggctggaagaaaggaacaaaaataacttttcctgagaagggaaatgaacaaagaggagttataccatctgatcttgtttttatcattgatgagaaacctcatggtgtcttcaaaagggatggcaatgatcttgttatcacacagaagatatctctagttgaagctctgaccggttacacagcacaactgacgacacttgatgggaggaatcttacagtctccaccaattccatcatcagtccgacatacgaagaagttattaaaggagagggtatgccaattcccaaggaaccttccaaaaagggaaacttgaggatcaagttcaatatcaagttcccctctagactcacatcagagcagaaaaccggcattaaacgattattgacatcataa

SEQ ID NO: 140066 - protein, 337 aa, Glycine max
MGVDYYKLLQVDRNASDEDLKKAYRKLAMKWHPDKNPNNKRDAEAKFKQISEAYDVLSDPQKRGVYDQYGEEGLKGQVPPPGAGGFSGGSDGGPTMFRFNPRSADDIFSEFFGFSSPYGMGDMGGRAGPSGYPRFADDLFASFSRSAAGEGSSNVPRKGAPIEKTLQCSLEDLYKGTTKKMKISRDVIDSSGRPTTVEEILTIEIKPGWKKGTKITFPEKGNEQRGVIPSDLVFIIDEKPHGVFKRDGNDLVITQKISLVEALTGYTAQLTTLDGRNLTVSTNSIISPTYEEVIKGEGMPIPKEPSKKGNLRIKFNIKFPSRLTSEQKTGIKRLLTS

SEQ ID NO: 140067 - DNA, 1041 bp, Glycine max
  CDS (1)..(1041)
atgggcgtggactactacaagattcttcaggtagatagaagtgccaaagatgaggatctcaagaaagcatatcgaaggctagccatgaagtggcaccctgataagaaccctaacaacaagaaagaggctgaagctaaattcaagcaaatctccgaagcttatgatgttttgagtgatccacagaagcgaggaatttatgatcagtatggtgaggaggggctgaatggggtgccgatgggcgcaggtggttttcctggtggtggcggcggcggcagcagcggtgacggtggagcgacgtcattccggttcaaccccagaagtgcagatgatatattttcggagtttttcgggttttcgagaccctttggtggtggaatgccggacatgggtggccgagctggtggctctggattttccaggggtggaccgtttggtgaggatatctttgctcaatttaggagtgcagctggggagggctctggacatatgccaaggaaaggtgcagccattgagagacaattgccttgtagcttggaggatttgtataaaggaactaccaagaaaatgaagatttcaagggatgttagtgatgccagtgggagaccctccacagtagaggaaatccttacaattgagataaagccaggttggaagaaaggaacaaaaataacttttccggaaaagggaaatgagcagagaggagttatcccttcagaccttgtctttattattgatgagaagcctcatagtctctttaaaagggatggcaatgatcttgttgtcacccagaagatatcgcttgtagaagccttgacaggttacacagtgcagctgacaacccttgatgggcggaatcttacattccccattaactccactattagtccaacatatgaagaagttgtcaaaggagagggtatgcccattccaaaagaaccttccaagaaaggaaacttaagaatcaagttcaatatcaagtttgcctcccggcttacataccaacagaaaagtggcatcaagcgattattgacatctgcttaa

SEQ ID NO: 140068 - protein, 346 aa, Glycine max
MGVDYYKILQVDRSAKDEDLKKAYRRLAMKWHPDKNPNNKKEAEAKFKQISEAYDVLSDPQKRGIYDQYGEEGLNGVPMGAGGFPGGGGGGSSGDGGATSFRFNPRSADDIFSEFFGFSRPFGGGMPDMGGRAGGSGFSRGGPFGEDIFAQFRSAAGEGSGHMPRKGAAIERQLPCSLEDLYKGTTKKMKISRDVSDASGRPSTVEEILTIEIKPGWKKGTKITFPEKGNEQRGVIPSDLVFIIDEKPHSLFKRDGNDLVVTQKISLVEALTGYTVQLTTLDGRNLTFPINSTISPTYEEVVKGEGMPIPKEPSKKGNLRIKFNIKFASRLTYQQKSGIKRLLTSA

SEQ ID NO: 140069 - DNA, 1053 bp, Glycine max; identical to SEQ ID NO: 118179
  CDS (1)..(1053)

SEQ ID NO: 140070 - protein, 350 aa, Glycine max; identical to SEQ ID NO: 118180

SEQ ID NO: 140071 - DNA, 1464 bp, Zea mays; identical to SEQ ID NO: 64111
  CDS (1)..(1464)

SEQ ID NO: 140072 - protein, 487 aa, Zea mays; identical to SEQ ID NO: 64112

SEQ ID NO: 140073 - DNA, 1260 bp, Zea mays; identical to SEQ ID NO: 64113
  CDS (1)..(1260)

SEQ ID NO: 140074 - protein, 419 aa, Zea mays; identical to SEQ ID NO: 64114

SEQ ID NO: 140075 - DNA, 1269 bp, Zea mays; identical to SEQ ID NO: 64115
  CDS (1)..(1269)

SEQ ID NO: 140076 - protein, 422 aa, Zea mays; identical to SEQ ID NO: 64116

SEQ ID NO: 140077 - DNA, 1290 bp, Zea mays; identical to SEQ ID NO: 64119
  CDS (1)..(1290)

SEQ ID NO: 140078 - protein, 429 aa, Zea mays; identical to SEQ ID NO: 64120

SEQ ID NO: 140079 - DNA, 1257 bp, Zea mays; identical to SEQ ID NO: 64121
  CDS (1)..(1257)

SEQ ID NO: 140080 - protein, 418 aa, Zea mays; identical to SEQ ID NO: 64122

SEQ ID NO: 140081 - DNA, 1011 bp, Zea mays
  CDS (1)..(1011)
atgggggccgattactacaaggtcctcggcgtcgaccgcggcgccagcgacgacgacctcaagaaggcctatcggaagctcgccatgcgatggcaccccgacaagaactccaccaataagaaggaggcagaaaccaagttcaaggagatctctgtggcatacgaggtccttagtgatcccaagaaacgtgcaatctatgatcagctaggggaagaagggctcaaggggcagccgcccccaggagcaggaggtcctggcacatctcccttcttccctggcggggttcattccaccgctcaccattttaatccgaggagcgcggacgatatatttaaagagttctttggatcccctggcatgggtggcatgagaacggaaccaggatttcaaaggtcagtgtttggcaacgatatcttctcttcgcgcttccgcgctgagggttccaccagtatgcagcagccattgcgcaaggcagctgcaattgagaatccacttccagtcggccttgcagatctctacaagggtgtgacaaaaaagatgaaaatctcaagagagactattgatgccagcgggagaatctcaaacacagaggatattctgacaatacaagtaaaggctggttggaagaagggaacaaggattacatttcctgacaagggaaatgaagctccaaatatgaaacctgctgatattgttttcatcattgatgagaagccccatgatgttttcactcgggaggggaatgatcttgtcgtgactgagaagatctcactggtggaagcactgactggctataccgcacgtgtcactacgcttgacgggcggagcctatcactgcacatcaactcaataatccatccaaagtacgaagaggtgatgcctggagagggcatgccaatgcccaaggaccccacaaagaagggaaatctgcggattaagttcaacataatgttcccctctaggctgacttctgatcagaaggccgggatcaagaggctattgggttcttag

SEQ ID NO: 140082 - protein, 336 aa, Zea mays
MGADYYKVLGVDRGASDDDLKKAYRKLAMRWHPDKNSTNKKEAETKFKEISVAYEVLSDPKKRAIYDQLGEEGLKGQPPPGAGGPGTSPFFPGGVHSTAHHFNPRSADDIFKEFFGSPGMGGMRTEPGFQRSVFGNDIFSSRFRAEGSTSMQQPLRKAAAIENPLPVGLADLYKGVTKKMKISRETIDASGRISNTEDILTIQVKAGWKKGTRITFPDKGNEAPNMKPADIVFIIDEKPHDVFTREGNDLVVTEKISLVEALTGYTARVTTLDGRSLSLHINSIIHPKYEEVMPGEGMPMPKDPTKKGNLRIKFNIMFPSRLTSDQKAGIKRLLGS

SEQ ID NO: 140083 - DNA, 1290 bp, Zea mays; identical to SEQ ID NO: 64123
  CDS (1)..(1290)

SEQ ID NO: 140084 - protein, 429 aa, Zea mays; identical to SEQ ID NO: 64124

SEQ ID NO: 140085 - DNA, 1041 bp, Zea mays
  CDS (1)..(1041)
atgggggtggactactacaaggtgctgcaggtggggcgcggcgcctctgacgacgagctcaagaaggcttaccggaagctggccatgaagtggcacccggacaagaaccccagcaacaagaaagaagcggaggccaagttcaaacagatctcagaggcatatgaggtgctaagtgattcccaaaagcgggcaatctatgatcaggccggcgaagaggggcttaaggctcaggtcccacctactggagcaggtggtcccagtgggtcttccttctatggagggaatgcatcgacattccagttcaaccctcgcagtgcagatgatatttttgctgagttttttgggttctcaagcccattctcaaccatgggtggcatgggcggaggtgctgagagaggcatgaggggctccaggtttgggatgttcggcgatgacatatttgggtcccaccctcagtttcctggtgaggcatcaatgcatgttccacagcggtctcagaaggctcctccaattgagaatcggttgccatgcaaccttgctgatttgtacaaaggtaccaccaagaaaatgaagatttcacgagaggttttagatgccagcgggagaactttggttgttgaggagatcttgacgatagatataaaacctggatggaagaaagggacaaaaataacatttcctgaaaagggtaatgaggctcctcatataattcctgcagatattgttttcataattgatgagaaaccccatgatgtattcacaagagatggtaatgatctggttatgactcagaagattactttggccgaagccttgacagaatgtactgttaatataacaacattagatggtcggaatctgacagtgcagataaataatatcatctaccctggctatgaggaggttgttccccgagagggaatgccgattcagaaggattcttcaaagaagggaaatcttaggatcaaatttagcattaaattcccctcgaggctgacctcggagcagaaagcagaaatcaagaggctactaggttcatga

SEQ ID NO: 140086 - protein, 346 aa, Zea mays
MGVDYYKVLQVGRGASDDELKKAYRKLAMKWHPDKNPSNKKEAEAKFKQISEAYEVLSDSQKRAIYDQAGEEGLKAQVPPTGAGGPSGSSFYGGNASTFQFNPRSADDIFAEFFGFSSPFSTMGGMGGGAERGMRGSRFGMFGDDIFGSHPQFPGEASMHVPQRSQKAPPIENRLPCNLADLYKGTTKKMKISREVLDASGRTLVVEEILTIDIKPGWKKGTKITFPEKGNEAPHIIPADIVFIIDEKPHDVFTRDGNDLVMTQKITLAEALTECTVNITTLDGRNLTVQINNIIYPGYEEVVPREGMPIQKDSSKKGNLRIKFSIKFPSRLTSEQKAEIKRLLGS

SEQ ID NO: 140087 - DNA, 1290 bp, Zea mays; identical to SEQ ID NO: 64125
  CDS (1)..(1290)

SEQ ID NO: 140088 - protein, 429 aa, Zea mays; identical to SEQ ID NO: 64126

SEQ ID NO: 140089 - DNA, 1257 bp, Zea mays; identical to SEQ ID NO: 64127
  CDS (1)..(1257)

SEQ ID NO: 140090 - protein, 418 aa, Zea mays; identical to SEQ ID NO: 64128

SEQ ID NO: 140091 - DNA, 1347 bp, Zea mays; identical to SEQ ID NO: 64131
  CDS (1)..(1347)

SEQ ID NO: 140092 - protein, 448 aa, Zea mays; identical to SEQ ID NO: 64132

SEQ ID NO: 140093 - DNA, 1347 bp, Zea mays; identical to SEQ ID NO: 64133
  CDS (1)..(1347)

SEQ ID NO: 140094 - protein, 448 aa, Zea mays; identical to SEQ ID NO: 64134

SEQ ID NO: 140095 - DNA, 1467 bp, Zea mays; identical to SEQ ID NO: 64135
  CDS (1)..(1467)

SEQ ID NO: 140096 - protein, 488 aa, Zea mays; identical to SEQ ID NO: 64136

SEQ ID NO: 140097 - DNA, 1089 bp, Zea mays
  CDS (1)..(1089)
atggggcttgactattacaagatcctaggcgtcgacaagggcgccaccgatgacgacctcaagaaggcctaccgcaagctcgccatgaaatggcaccccgacaagaaccccaacaacaagaaggaggccgagaacaagttcaagcagatctcggaggcgtacgaggtgctgagcgacccgcagaagcgcgcggtgtacgaccagtacggcgaggagggtcttaaggggcaggtgccgccgccgggcgccggcggggcggggcccggcggcgcaaccttcttctccaccggcggcgacgggccgacggtgttccggttcaacccgcgcaacgcggaggacatcttcgccgagttcttcggcggctccagccccttcggcggcatgggcggcggtggcatgggcggcagcggcatgggcggtgggatgcccggcatgcggagcggcggtacgaggttctcctcctccatcttcggggacgacatattcggctctgcgttcggcggcggcccggacgggcacggcatgcacgccggcgggcgggccgtgaaggcgccggccatagagcggaagctgccgtgcagcctcgaggagctgtacaagggcaccaccaagaagatgaagatctccagggaaatctctgacgccagtgggaagacgatcccagtggaagagatcctaacgatcgacgtgaagccggggtggaagaagggcaccaagatcacgttcccggagaagggcaacgagacgcccaacacgatcccggcggacctcgtcttcatcatcgacgagaagccgcacccggtgttcacccgcgacggcaacgacctggtggtgacccagaagatcccgctggcggaggccctgacggggtacaccgcgcacgtgacgacgctggacgggcgcagcctgacggtgcccatcagctccgtgatccacccgggctacgaggaggtggtgcgaggggagggcatgccgatacccaaggacccgtccaggaagggcaacctccggatcaagttcgacatcaagttcccggcgaggctcacggcggaccagaagtccggtgtcaagaggctgctcgggcagtag

SEQ ID NO: 140098 - protein, 362 aa, Zea mays
MGLDYYKILGVDKGATDDDLKKAYRKLAMKWHPDKNPNNKKEAENKFKQISEAYEVLSDPQKRAVYDQYGEEGLKGQVPPPGAGGAGPGGATFFSTGGDGPTVFRFNPRNAEDIFAEFFGGSSPFGGMGGGGMGGSGMGGGMPGMRSGGTRFSSSIFGDDIFGSAFGGGPDGHGMHAGGRAVKAPAIERKLPCSLEELYKGTTKKMKISREISDASGKTIPVEEILTIDVKPGWKKGTKITFPEKGNETPNTIPADLVFIIDEKPHPVFTRDGNDLVVTQKIPLAEALTGYTAHVTTLDGRSLTVPISSVIHPGYEEVVRGEGMPIPKDPSRKGNLRIKFDIKFPARLTADQKSGVKRLLGQ

SEQ ID NO: 140099 - DNA, 1011 bp, Zea mays
  CDS (1)..(1011)
atgggggccgattactacaaggtcctcggcgtcgaccgcggcgccagcgacgacgacctcaagaaggcctatcggaagctcgccatgcgatggcaccccgacaagaactccaccaataagaaggaggcagaaaccaagttcaaggagatctctgtggcatacgaggtccttagcgatcccaagaaacgtgcaatctatgatcagctaggggaagaagggctcaaggggcagccgcccccaggagcaggaggtcctggcacatctcccttcttccctggcggggctcattccaccgctcaccattttaacccgaggagcgcggacgatatatttaaagagttctttggatcccctggcatgggtggcatgagaacggaaccaggatttcaaaggtcaatgtttggcaacgatatcttctcttcgcgcttccgcgctgagggttccaccagtatgcagcagccattgcgcaaggcagctgcaattgagaatccacttccagtcggccttgcagatctctacaagggtgtgacaaaaaagatgaaaatctcaagagagactattgatgccagcgggagaatctcaaacacagaggatattctgacaatacaagtaaaggctggttggaagaagggaacaaggattacatttcctgacaagggaaatgaagctccaaatatgaaacctgctgatattgttttcatcattgatgagaagccccatgatgttttcactcgggagggaaatgatcttgtcgtgactgagaagatctcactggtggaagcactgactggctataccgcacgtgtcactacgcttgacgggcggagcctatcattgcacatcaactcaataatccatccaaagtacgaagaggtgatgcctggagagggcatgccagtgcccaaggaccccacaaagaagggaaatctgcggattaagttcaacataatgttcccctctaggctgacttctgatcagaaggccgggatcaagaggctattgggttcttag

SEQ ID NO: 140100 - protein, 336 aa, Zea mays
MGADYYKVLGVDRGASDDDLKKAYRKLAMRWHPDKNSTNKKEAETKFKEISVAYEVLSDPKKRAIYDQLGEEGLKGQPPPGAGGPGTSPFFPGGAHSTAHHFNPRSADDIFKEFFGSPGMGGMRTEPGFQRSMFGNDIFSSRFRAEGSTSMQQPLRKAAAIENPLPVGLADLYKGVTKKMKISRETIDASGRISNTEDILTIQVKAGWKKGTRITFPDKGNEAPNMKPADIVFIIDEKPHDVFTREGNDLVVTEKISLVEALTGYTARVTTLDGRSLSLHINSIIHPKYEEVMPGEGMPVPKDPTKKGNLRIKFNIMFPSRLTSDQKAGIKRLLGS

SEQ ID NO: 140101 - DNA, 1056 bp, Zea mays
  CDS (1)..(1056)
atggggcttgactactacaagatcctgggcgtcgacaagggcgccaccgacgacgacctcaagaaggcctaccgcaagctcgccatgaagtggcaccccgacaagaaccccaataacaagaaggaggccgagaacaagttcaagcagatctcggaggcatacgatgtcctcagcgacccgcagaagcgcgcggtgtacgaccagtacggcgaggaggggctcaaggggcaggtgccgccgccgggcgccggcggggcgggctcaaccttcttctccaccggcggcgacgggccgacggtgttccggtttaacccgcgcaacgcggatgacatcttcgccgagttcttcggcggctccagccccttcggcggcatgggcgggagtgggatgcccggcatgcgggccggcgggtcgaggttctcctcgtccattttcggggacgatatgttcggctctgcgttcggcggcggcggcccggacgggcacggcatgcacaccggcggacgtgccgtgaaggcgccggccatcgagcggaagctgccgtgcagcctggaggagctgtacaagggcaccaccaagaagatgaagatttccagggaaattgctgacgccagtgggaagacgatgccagtggaagagatcctaacgatcgacgtgaagcccgggtggaagaagggcaccaagatcacgttcccggagaagggcaatgagacgccccacacgatcccggcggacctcgtcttcatcatcgacgagaagccgcacccggtgttcacccgcgacggcaacgacctggtggtgacccagaaggtcccgctggcggaggctctgacggggcacaccgcgcgcctgacgacgttggacgggcgcatcctgacggtgcccatcagctccgtgatccacccggggtacgaggaggtggtgcgcggcgagggcatgcccgtccccaaggacccgtccaggaagggcaacctccggataaagttcgacatcaagttcccggcgaggctctcggcggaccagaagtccggcgtcaagaggctgctcgggcagtag

SEQ ID NO: 140102 - protein, 351 aa, Zea mays
MGLDYYKILGVDKGATDDDLKKAYRKLAMKWHPDKNPNNKKEAENKFKQISEAYDVLSDPQKRAVYDQYGEEGLKGQVPPPGAGGAGSTFFSTGGDGPTVFRFNPRNADDIFAEFFGGSSPFGGMGGSGMPGMRAGGSRFSSSIFGDDMFGSAFGGGGPDGHGMHTGGRAVKAPAIERKLPCSLEELYKGTTKKMKISREIADASGKTMPVEEILTIDVKPGWKKGTKITFPEKGNETPHTIPADLVFIIDEKPHPVFTRDGNDLVVTQKVPLAEALTGHTARLTTLDGRILTVPISSVIHPGYEEVVRGEGMPVPKDPSRKGNLRIKFDIKFPARLSADQKSGVKRLLGQ

SEQ ID NO: 140103 - DNA, 1290 bp, Zea mays; identical to SEQ ID NO: 64137
  CDS (1)..(1290)

SEQ ID NO: 140104 - protein, 429 aa, Zea mays; identical to SEQ ID NO: 64138

SEQ ID NO: 140105 - DNA, 25 bp, Artificial sequence
  primer
atggtcaaggagacaaaactttatg

SEQ ID NO: 140106 - DNA, 28 bp, Artificial sequence
  primer
ttaaaaattttcatctatagcacgtttt

SEQ ID NO: 140107 - protein, 505 aa, Artificial sequence
  consensus sequence
  Variant (2)..(3): Xaa in position 2 to 3 is any amino acid
  Variant (7)..(9): Xaa in position 7 to 9 is any amino acid
  Variant (11)..(15): Xaa in position 11 to 15 is any amino acid
  Variant (17)..(17): Xaa in position 17 is any amino acid
  Variant (21)..(22): Xaa in position 21 to 22 is any amino acid
  Variant (24)..(26): Xaa in position 24 to 26 is any amino acid
  Variant (30)..(32): Xaa in position 30 to 32 is any amino acid
  Variant (33)..(41): Xaa in position 33 to 41 is any or no amino acid
  Variant (43)..(45): Xaa in position 43 to 45 is any amino acid
  Variant (48)..(51): Xaa in position 48 to 51 is any amino acid
  Variant (54)..(55): Xaa in position 54 to 55 is any amino acid
  Variant (57)..(57): Xaa in position 57 is any amino acid
  Variant (59)..(60): Xaa in position 59 to 60 is any amino acid
  Variant (63)..(64): Xaa in position 63 to 64 is any amino acid
  Variant (67)..(68): Xaa in position 67 to 68 is any amino acid
  Variant (70)..(85): Xaa in position 70 to 85 is any amino acid
  Variant (86)..(146): Xaa in position 86 to 146 is any or no amino acid
  Variant (148)..(170): Xaa in position 148 to 170 is any amino acid
  Variant (171)..(238): Xaa in position 171 to 238 is any or no amino acid
  Variant (240)..(257): Xaa in position 240 to 257 is any amino acid
  Variant (258)..(336): Xaa in position 258 to 336 is any or no amino acid
  Variant (338)..(340): Xaa in position 338 to 340 is any amino acid
  Variant (342)..(348): Xaa in position 342 to 348 is any amino acid
  Variant (349)..(349): Xaa in position 349 is any or no amino acid
  Variant (351)..(353): Xaa in position 351 to 353 is any amino acid
  Variant (354)..(369): Xaa in position 354 to 369 is any or no amino acid
  Variant (372)..(383): Xaa in position 372 to 383 is any amino acid
  Variant (384)..(395): Xaa in position 384 to 395 is any or no amino acid
  Variant (397)..(416): Xaa in position 397 to 416 is any amino acid
  Variant (417)..(426): Xaa in position 417 to 426 is any or no amino acid
  Variant (428)..(432): Xaa in position 428 to 432 is any amino acid
  Variant (433)..(433): Xaa in position 433 is any or no amino acid
  Variant (435)..(454): Xaa in position 435 to 454 is any amino acid
  Variant (455)..(466): Xaa in position 455 to 466 is any or no amino acid
  Variant (468)..(473): Xaa in position 468 to 473 is any amino acid
  Variant (474)..(493): Xaa in position 474 to 493 is any or no amino acid
  Variant (495)..(503): Xaa in position 495 to 503 is any amino acid
  Variant (504)..(504): Xaa in position 504 is any or no amino acid
YXXLGVXXXAXXXXXKXAYRXXAXXXHPDXXXXXXXXXXXXAXXXFKXXXXAYXXLXDXXKRXXYDXXGXXXXXXXXXXXXXXXXXXXXXXXXXXXXXXXXXXXXXXXXXXXXXXXXXXXXXXXXXXXXXXXXXXXXXXXXXXXXXFXXXXXXXXXXXXXXXXXXXXXXXXXXXXXXXXXXXXXXXXXXXXXXXXXXXXXXXXXXXXXXXXXXXXXXXXXXXXXXXXXXXXXXXXXXXGXXXXXXXXXXXXXXXXXXXXXXXXXXXXXXXXXXXXXXXXXXXXXXXXXXXXXXXXXXXXXXXXXXXXXXXXXXXXXXXXXXXXXXXXXXXXXXXXXGXXXGXXXXXXXXGXXXXXXXXXXXXXXXXXXXGDXXXXXXXXXXXXXXXXXXXXXXXXFXXXXXXXXXXXXXXXXXXXXXXXXXXXXXXGXXXXXXTXXXXXXXXXXXXXXXXXXXXXXXXXXXXXXXXGXXXXXXXXXXXXXXXXXXXXXXXXXXGXXXXXXXXXXP

SEQ ID NO: 140108 - protein, 19 aa, Artificial sequence
  protein pattern
  Variant (2)..(3): Xaa in position 2 to 3 is any amino acid
  Variant (5)..(5): Xaa in position 5 is any amino acid
  Variant (6)..(6): Xaa in position 6 is Ile, Leu or Val
  Variant (7)..(9): Xaa in position 7 to 9 is any amino acid
  Variant (11)..(13): Xaa in position 11 to 13 is any amino acid
  Variant (14)..(14): Xaa in position 14 is Ala, Asp, Glu, Gln, Ser or Thr
  Variant (15)..(15): Xaa in position 15 is Ile, Leu or Val
  Variant (17)..(17): Xaa in position 17 is any amino acid
  Variant (18)..(18): Xaa in position 18 is Ala, Gly, Asn, Ser or Thr
YXXLXXXXXAXXXXXKXXY

SEQ ID NO: 140109 - protein, 25 aa, Artificial sequence
  protein pattern
  Variant (2)..(2): Xaa in position 2 is any amino acid
  Variant (3)..(4): Xaa in position 3 to 4 is any or no amino acid
  Variant (7)..(7): Xaa in position 7 is any amino acid
  Variant (8)..(8): Xaa in position 8 is Ala, Ile, Leu or Val
  Variant (9)..(10): Xaa in position 9 to 10 is any amino acid
  Variant (12)..(12): Xaa in position 12 is any amino acid
  Variant (13)..(13): Xaa in position 13 is Ala, Asp, Glu, Gln or Ser
  Variant (14)..(14): Xaa in position 14 is any amino acid
  Variant (16)..(20): Xaa in position 16 to 20 is any amino acid
  Variant (21)..(21): Xaa in position 21 is Lys or Arg
  Variant (22)..(24): Xaa in position 22 to 24 is any amino acid
EXXXFKXXXXAXXXLXXXXXXXXXD

SEQ ID NO: 140110 - DNA, 1167 bp, Saccharomyces cerevisiae
  CDS (1)..(1167)
atgaattgcacacttacagataataccagagccataaatgtggcctccaacctcggtgctcctcaacagaggacgatttttgccaaggagagaatatccatcccaggatactacgagataatccaattcctgggcaagggagcctatgggacagtgtgctcagtgaagtttaagggtcgaagcccagctgctaggatagcggtaaagaagatcagcaacatctttaataaggagatccttttgaaaagggccatccgtgagctaaaattcatgaacttcttcaagggccataaaaatattgtaaatctaatcgatctagagatagtgaccagctcgccctatgacggactgtattgctaccaggaactgattgattatgatttggcaaaagtcatacattcgtccgtgcagctctcggagtttcatatcaaatactttctttaccaaatcctgtgtgggctaaagtacatacacagtgcagatgtcatccaccgagatttgaagcctgggaacatattgtgcacattgaatggctgtttgaagatctgcgattttggtctcgctaggggtattcatgccggatttttcaagtgtcattccactgtgcagccccatataaccaactacgttgctacaagatggtatagggcgcctgagctgcttctttccaaccaaccgtatagtaagtccgtagacatatgggctgtagggtgcattcttgcagaattctatgctcgaaagcctgttttcatggggcgtgactccatgcaccagatatttgaaatcatcaaagtcttgggtactcctgataaagatattctgatcaagtttggcaccattaaagcttggaatctaggcaaaaacagtaataaccctgtatataaaaaaatcccatggtccaacattttcccctttgcctcgcatgaagcaatcaatctcatagagtcattacttcattgggactcaacacataggttaaacgtggaacaagctatatcacatccgttcctaaacgaggtgcggaagccagacgacgagcctgtttgccttcagggtcctttcgacttcacctatgaatccgagttgaattcaatgtccaaattaagagactacttggttgaagaagtgaaaaatttcaaaaccgatttgtcctcctcgtctttatag

SEQ ID NO: 140111 - protein, 388 aa, Saccharomyces cerevisiae
MNCTLTDNTRAINVASNLGAPQQRTIFAKERISIPGYYEIIQFLGKGAYGTVCSVKFKGRSPAARIAVKKISNIFNKEILLKRAIRELKFMNFFKGHKNIVNLIDLEIVTSSPYDGLYCYQELIDYDLAKVIHSSVQLSEFHIKYFLYQILCGLKYIHSADVIHRDLKPGNILCTLNGCLKICDFGLARGIHAGFFKCHSTVQPHITNYVATRWYRAPELLLSNQPYSKSVDIWAVGCILAEFYARKPVFMGRDSMHQIFEIIKVLGTPDKDILIKFGTIKAWNLGKNSNNPVYKKIPWSNIFPFASHEAINLIESLLHWDSTHRLNVEQAISHPFLNEVRKPDDEPVCLQGPFDFTYESELNSMSKLRDYLVEEVKNFKTDLSSSSL

SEQ ID NO: 140112 - DNA, 1095 bp, Bombyx mori
  CDS (1)..(1095)
atggctgaagctgcaggtgctgccagcagcaaccccaacgctgagattattcgtggccaagtgttcgaagttggtccacggtacacaagtctgcaatatataggcgagggagcttatggaatggttgtttctgccttcgacaacgtgaagaaatcgaaagtcgcaattaagaaaatatctccattcgaacatcaaacgtattgccagagaacattacgggaaatcaaaattctaactcggtttaagcacgaaaacattatcgatatacgagatattttaagagctgaaactattgatcaaatgaaagacgtttacatcgttcaatgcttgatggagaccgatctttacaagctgttgaagacccagaaattaagtaacgatcacatctgctacttcctgtatcagatccttcgaggactgaaatatattcactctgcaaacgtcctccatagggacttgaagccttctaatttactacttaataccacgtgcgatttgaagatttgcgacttcggtctggcgcgagttgcggatcctgatcacgaccacaccggtttcctcacggaatacgtagccacgcgctggtaccgtgctcctgaaatcatgctcaactcaaagggctataccaaatcaatagatatttggtcagtgggatgtattttggcggagatgttgtccaacagacctatattcccgggcaagcactatttggatcaattgaatcacattttgggagtgctcggttcgccgagtcaggaagatcttgattgcatcattaacgaaaaggctcgtggttacttggagtcgctgccgttcaagcctcgcgtgccgtgggtggacctgttccccggagcggaccctcgcgccttggacctgctccatcgcatgctgactttcaaccctcacaaacgcatcacggtcgaggaagccctagcccatccctacctcgagcagtactacgacccgaatgatgagcccgtagccgaggagcctttccgtttcgcgatggagctcgacgatctcccgaaggagacgctcaagaaatacatattcgaggagacgttgttctttaaacagcagaacgaagacgcgtaa

SEQ ID NO: 140113 - protein, 364 aa, Bombyx mori
MAEAAGAASSNPNAEIIRGQVFEVGPRYTSLQYIGEGAYGMVVSAFDNVKKSKVAIKKISPFEHQTYCQRTLREIKILTRFKHENIIDIRDILRAETIDQMKDVYIVQCLMETDLYKLLKTQKLSNDHICYFLYQILRGLKYIHSANVLHRDLKPSNLLLNTTCDLKICDFGLARVADPDHDHTGFLTEYVATRWYRAPEIMLNSKGYTKSIDIWSVGCILAEMLSNRPIFPGKHYLDQLNHILGVLGSPSQEDLDCIINEKARGYLESLPFKPRVPWVDLFPGADPRALDLLHRMLTFNPHKRITVEEALAHPYLEQYYDPNDEPVAEEPFRFAMELDDLPKETLKKYIFEETLFFKQQNEDA

SEQ ID NO: 140114 - DNA, 1053 bp, Ciona intestinalis; identical to SEQ ID NO: 62751
  CDS (1)..(1053)

SEQ ID NO: 140115 - protein, 350 aa, Ciona intestinalis; identical to SEQ ID NO: 62752

SEQ ID NO: 140116 - DNA, 1095 bp, Ciona intestinalis
  CDS (1)..(1095)
atggctgaaatgacaaacaacatggcgagcataacgttcaaccattatgagttgaataaaactgactgggaggttccttcaaagtatgaggacttgatccctataggctgcggtgcttatgggagtgtgtgttctacttataactctgagcttaaaatgagaatggccgtcaaaaagttggcaagaccgtttcaatctgtgacgcacgctaagcgaacatacagggaactgaggttactgaaacacatgcatcatgagaatgttatcgggctgttagacgtcttcacaccagctactacattggagggattcacggacatgtacctcgtcacacacttaatgggcgcagaccttaaccagatcataaaatcacagaaactgacggacgaccacgtccagtttttaatttatcaaatcctaaggggtttgaagtacattcactctgcagggatcatacatcgagatctcaaaccaagcaatatagcagtgaacgaagactgtgaactgaaaattcttgactttggtctggctagactcacagatgaccaaatgaccggatacgttgcaacgcgatggtatagagcgcctgagattatgttaaactggatgcactacaaccagactgtagatctatggtctgttggttgcattatggccgagctgctcactggaaagaccctattcccaggctctgatcatattgaccagttaaagtcaataatgaatctttgcgggacgccgagagaggatttattggagaaaataatctcgcaatcggcgagaaatttcatcaaaacgcttcccataatccctaagaaggaatttgtcaatgtttttgtcggcgccaaccccaaagccgtggacctgcttgaaagaatgctggtgcttgacactgattgccgactaactgccagcgaagcgctacaacacccctaccttgagaagttccacgaccccgatgatgaaccgagcgccccactgtacgacaaatcttacgaagacgcagaaatatcgattgatgaatggaaacagctagcgtacgatgagattataaactttgaatttacgccggatcttatcgctgatttccagtga

SEQ ID NO: 140117 - protein, 364 aa, Ciona intestinalis
MAEMTNNMASITFNHYELNKTDWEVPSKYEDLIPIGCGAYGSVCSTYNSELKMRMAVKKLARPFQSVTHAKRTYRELRLLKHMHHENVIGLLDVFTPATTLEGFTDMYLVTHLMGADLNQIIKSQKLTDDHVQFLIYQILRGLKYIHSAGIIHRDLKPSNIAVNEDCELKILDFGLARLTDDQMTGYVATRWYRAPEIMLNWMHYNQTVDLWSVGCIMAELLTGKTLFPGSDHIDQLKSIMNLCGTPREDLLEKIISQSARNFIKTLPIIPKKEFVNVFVGANPKAVDLLERMLVLDTDCRLTASEALQHPYLEKFHDPDDEPSAPLYDKSYEDAEISIDEWKQLAYDEIINFEFTPDLIADFQ

SEQ ID NO: 140118 - DNA, 1110 bp, Strongylocentrotus purpuratus
  CDS (1)..(1110)
atggccgaccaaggaggtgcaaaaactaagcggaccaacgaagagaaacctgaaactgtgagaggacaagtcttcgatgtcggtccacgctatgttaccctgaactacatcggggaaggggcttatggaatggtttgtagtgcggtggatacacgacacggaggcaaggtggctatcaagaagatcagtccgtttgagcaccagacatactgccaacgaaccctcagagagattaaaatccttacacgcttcaatcatgaaaatattattaatatccaagatatcatcaaggcagacacaattgaagccatgagagatgtatatattgttcaaagtctaatggaaacagacctgtacaaactgctcaagacccagccgctgagcaacgaccacatctgctacttcctctaccagatccttcgagggctcaagtacatccactcggccaacgtgcttcacagggacctcaaaccaagcaacctgctgctcaatactacctgtgatctcaagatctgcgactttggacttgcacggatagctgaccccggccacgaccacacaggtttcttgacggaatacgtagcgacgcgatggtaccgcgcccccgagatcatgctgaattccaagggttacaccaagtccattgacatctggtcggtcggttgcattctggctgagatgttgagcaacagacccatctttcctggaaaacattatctggatcagttgaaccacatcctgggagttctaggttcgccatcccaagacgacctgaaatgcatcatcaacgagaaggccagagcctacctccagggactaccgttcaagtccaagattcccctcaaatcactcttcccgaaggctgataacaaagctcttgatttcttggagaggatgctttccttcaaccctgacaagaggataactgtagaggaagctctagcacatccctacctggaacaatactatgatccagatgatgagcctgtcaaagaagagccgttcacatttgtcacggagctggatgatttaccaaaggagaaactgaaagagatgatctttgaagaagccagtaaattcaacccatccccaagcccaaatactagctga

SEQ ID NO: 140119 - protein, 369 aa, Strongylocentrotus purpuratus
MADQGGAKTKRTNEEKPETVRGQVFDVGPRYVTLNYIGEGAYGMVCSAVDTRHGGKVAIKKISPFEHQTYCQRTLREIKILTRFNHENIINIQDIIKADTIEAMRDVYIVQSLMETDLYKLLKTQPLSNDHICYFLYQILRGLKYIHSANVLHRDLKPSNLLLNTTCDLKICDFGLARIADPGHDHTGFLTEYVATRWYRAPEIMLNSKGYTKSIDIWSVGCILAEMLSNRPIFPGKHYLDQLNHILGVLGSPSQDDLKCIINEKARAYLQGLPFKSKIPLKSLFPKADNKALDFLERMLSFNPDKRITVEEALAHPYLEQYYDPDDEPVKEEPFTFVTELDDLPKEKLKEMIFEEASKFNPSPSPNTS

SEQ ID NO: 140120 - DNA, 1248 bp, Magnaporthe grisea 70-15
  CDS (1)..(1248)
atgtcggatctccagggccgcaagatattcaaggtgttcaaccaggactttatcgtggacgaacgttacactgtcaccaaggaactcggtcagggagcctacggtatcgtgtgcgccgccgttaataaccagacgtccgagggtgttgccatcaagaaggtcaccaatgttttcagcaagaaaatcctagccaagcgcgccttgcgcgagatcaagcttctgcagcatttccgaggccaccgtaacattacatgtctctatgacatggacataccccgcccagataacttcaacgagacctatctctatgaagagctgatggagtgtgatctggctgccattatccgatcaggccagcccttgaccgatgcgcacttccagtctttcatctaccagattctctgcggcctgaagtacatacactcagccaatgtgctgcaccgtgatttgaaacccggaaacttgctcgtcaacgccgattgcgagctgaagatttgcgactttggtcttgcgcgtggtttctcggtggaccctgaggagaacgctggttacatgactgaatatgtggctaccaggtggtaccgtgcacctgagattatgttgagcttccaaagctacacgaaagcgattgatgtatggtcggttggatgcattttggcagagctgctgggaggcaggcccttcttcaagggtcgcgattacgtcgaccagctcaaccagatccttcatatactcggcacaccgaacgaggagaccctttcgcgaattggttccccgagggcccaggagtacgtccggaacctgccgttcatggccaagaagcctttcccaacactcttcccgaacgccaaccccgatgcgctggaccttctcgatcgcatgctggcgttcgacccctcatcccgtatctcggttgagcaggctctcgagcacccgtatctccacatctggcacgatgcctctgacgaacccgactgcccgaccaccttcaacttcgactttgaggtcgtcgaggacgttggtgagatgcgcaagatgatcctggacgaggtctaccgtttccgtcagcttgtgcgcaccgcccctggtgctggtggccacggtgcaccccacgctccccaggtgccgatccctgcaggtgccggtcaaggtcaatggaaggccgaggacccgcgcccgcaagagtacgtcggtcagatgaatgacctagaggctgagcttgctggcggtttggatcagaggaggtga

SEQ ID NO: 140121 - protein, 415 aa, Magnaporthe grisea 70-15
MSDLQGRKIFKVFNQDFIVDERYTVTKELGQGAYGIVCAAVNNQTSEGVAIKKVTNVFSKKILAKRALREIKLLQHFRGHRNITCLYDMDIPRPDNFNETYLYEELMECDLAAIIRSGQPLTDAHFQSFIYQILCGLKYIHSANVLHRDLKPGNLLVNADCELKICDFGLARGFSVDPEENAGYMTEYVATRWYRAPEIMLSFQSYTKAIDVWSVGCILAELLGGRPFFKGRDYVDQLNQILHILGTPNEETLSRIGSPRAQEYVRNLPFMAKKPFPTLFPNANPDALDLLDRMLAFDPSSRISVEQALEHPYLHIWHDASDEPDCPTTFNFDFEVVEDVGEMRKMILDEVYRFRQLVRTAPGAGGHGAPHAPQVPIPAGAGQGQWKAEDPRPQEYVGQMNDLEAELAGGLDQRR

SEQ ID NO: 140122 - DNA, 1071 bp, Magnaporthe grisea 70-15
  CDS (1)..(1071)
atgtctcgcgccaatccaccaagcaactcttcggggtctcgcaagatctcattcaacgtaagcgagcaatacgacatccaggatgtcgtgggcgagggcgcttatggagtcgtttgctctgcgatccataagccttcgggccaaaaggttgccataaagaagatcaccccgttcgatcattctatgttctgcctacgaaccctccgcgagatgaagctgctccggtacttcaaccacgagaacatcatttccatcctcgacatccagaagccccgaagctacgagaccttcaacgaggtgtacctgatccaggagctcatggagactgacatgcaccgtgtcatccgcacccaagacctatccgacgatcactgccagtacttcatctaccagactctgcgtgctctcaaggcaatgcactcggcaaacgtgcttcaccgtgatctgaagccctcgaatctccttctcaacgccaactgtgatttgaaggtttgcgattttggtctggctcgttctgccgcctcgcaagaggacaactcgggtttcatgacagaatacgtcgctacgcgttggtaccgtgctcccgagatcatgttgacctttaaggagtacaccaaggctattgacgtgtggtctgttggctgcattctggctgaaatgctcagcggaaagcctttgttccccggaaaggactaccaccaccagctcacgctgattcttgacgttctcggcacacccaccatggaggactactatggtatcaagtcccgccgtgcaagggagtacattcgctcgctgccgttcaagaaaaaggttcctttcaggacactcttccccaagacttcggatctcgccttggacctgttggagaagttgcttgcctttaaccccgtcaagcgcatcaccgtcgaggaagctttgaagcacccttaccttgagccgtaccatgaccccgatgatgaacccaccgcaccgccgattcccgaggagttctttgatttcgataagcacaaggataacctgagcaaagagcagctcaagcagttcatctaccaggaaattatgcggtaa

SEQ ID NO: 140123 - protein, 356 aa, Magnaporthe grisea 70-15
MSRANPPSNSSGSRKISFNVSEQYDIQDVVGEGAYGVVCSAIHKPSGQKVAIKKITPFDHSMFCLRTLREMKLLRYFNHENIISILDIQKPRSYETFNEVYLIQELMETDMHRVIRTQDLSDDHCQYFIYQTLRALKAMHSANVLHRDLKPSNLLLNANCDLKVCDFGLARSAASQEDNSGFMTEYVATRWYRAPEIMLTFKEYTKAIDVWSVGCILAEMLSGKPLFPGKDYHHQLTLILDVLGTPTMEDYYGIKSRRAREYIRSLPFKKKVPFRTLFPKTSDLALDLLEKLLAFNPVKRITVEEALKHPYLEPYHDPDDEPTAPPIPEEFFDFDKHKDNLSKEQLKQFIYQEIMR

SEQ ID NO: 140124 - DNA, 1251 bp, Gibberella zeae PH-1
  CDS (1)..(1251)
atgggcgacctacaaggacggaaggtcttcaaggtctttaaccaggactttgttgttgatgagcgctacactgtcaccaaggagctcggccagggagcttacggtatcgtctgtgccgccgtcaacaaccaaaccaacgagggcgtagccatcaagaaggtcaccaatgtttttagcaagaagattctggccaagcgcgccctgcgcgagatcaagctgctccagcacttccgcggccaccgcaacatcacatgtttgtacgacatggacattcctcgacccgataacttcaacgagacctacttgtacgaggagctgatggagtgtgatttggctgccatcatccgatctggccagcctcttaccgacgcccacttccaatcctttatctaccagatcctttgcggtctcaagtacatccactccgcaaacgttctgcaccgagatctcaagcccggtaacctgcttgtcaacgccgactgcgagctcaagatttgcgatttcggtcttgcccgaggtttctcagtcgaccccgaagagaatgctggatacatgaccgagtacgtcgctactcgatggtaccgtgcacctgagattatgttgagcttccagagctacaccaaagctattgatgtttggtctgttggttgtattctggctgagcttttgggcggacgacctttcttcaagggccgtgactacgtcgaccagctgaaccagattcttcacattctcggaacccccaacgaggagaccctctcccgtatcggctcaccccgtgcccaggaatacgtccgcaacctacctttcatgcccaagaagcctttccccagcctgttcccccaggccaaccccgacgctctcgaccttctcgacaagatgctcgccttcgacccttcgtcccgtatcagtgtagagcaggctctcgagcacccttacctgcaaatttggcatgacgcctcggacgagcccgactgccccaccacattcaacttcgactttgaggttgttgaggacgttggtcagatgcgtggtatgattttggatgaggttcaacgattccgacagaatgtccgtaccgtgcccggccaaagcggtggaggtcttcagggccagggtgtccccgttcctctgcctcagggtaatggtcaatggactgctgaggaccctcgacctcaggaatatgctggtcatggtaacaccggacttgagcaggatcttcagggaggcctggatgcttctcgaagataa

SEQ ID NO: 140125 - protein, 416 aa, Gibberella zeae PH-1
MGDLQGRKVFKVFNQDFVVDERYTVTKELGQGAYGIVCAAVNNQTNEGVAIKKVTNVFSKKILAKRALREIKLLQHFRGHRNITCLYDMDIPRPDNFNETYLYEELMECDLAAIIRSGQPLTDAHFQSFIYQILCGLKYIHSANVLHRDLKPGNLLVNADCELKICDFGLARGFSVDPEENAGYMTEYVATRWYRAPEIMLSFQSYTKAIDVWSVGCILAELLGGRPFFKGRDYVDQLNQILHILGTPNEETLSRIGSPRAQEYVRNLPFMPKKPFPSLFPQANPDALDLLDKMLAFDPSSRISVEQALEHPYLQIWHDASDEPDCPTTFNFDFEVVEDVGQMRGMILDEVQRFRQNVRTVPGQSGGGLQGQGVPVPLPQGNGQWTAEDPRPQEYAGHGNTGLEQDLQGGLDASRR

SEQ ID NO: 140126 - DNA, 1116 bp, Apis mellifera
  CDS (1)..(1116)
atggcgggtgaaggttctgcaagtgtgaatccaaattgtgaagttgttcgtggacaaacattcgaagttggtccacgatacacgaatttgtcgtacatgggtgagggtgcctacggaatggtcgtatctgcttatgataatgtaacaaaaacaaaggtagctattaaaaaaatttcaccctttgaacatcaaacatatagtcagagaacattaagggaaataaaaattttgactaggtttaagcatgaaaatataatagatataagagatatattaagggcacctactatagaacaaatgaaagatgtatatattgttcaatgtctaatggaaactgatctctataaacttcttaaaacacaggctattagtaatgatcatatatgttattttctttaccaaatattaaggggattaaagtatattcactctgcaaatgtattacatagagacttgaaaccaagcaacttgctgttaaataccacatgtgaccttaaaatctgtgattttggtttagctagagttgctgatccagagcataatcatgctggttttcttactgaatatgtagcaacaaggtggtatagagctccagaaataatgcttaattccaagggctatactaagtctatagatatttggtcagttggttgcattcttgcagaaatgctttccagaagagcaatatttcctggtaaacactatttagatcaactaaatcatatattgggagtccttggatcgccatcccctgaggatcttgagtgtattataaacgaaaaagcacgaaattatcttcaatcattaccatataaaccaaaggttccatggacaagtttatttccaaatgccgatttgcgagctttagatttgttagataaaatgttaacatttaatcctaacaaacggattgttgtagaggatgctctagcacatccttatttagagcaatattatgatcctgctgatgaaccggttgcagaagaaccatttaagtttgacatggaattagatgatcttccaaaagaagtattgaaacaatatatctttgaagaaactatattatttcaaaagaatcatcaagaaaacgctatctgcaatgaatttgcagaataa

SEQ ID NO: 140127 - protein, 371 aa, Apis mellifera
MAGEGSASVNPNCEVVRGQTFEVGPRYTNLSYMGEGAYGMVVSAYDNVTKTKVAIKKISPFEHQTYSQRTLREIKILTRFKHENIIDIRDILRAPTIEQMKDVYIVQCLMETDLYKLLKTQAISNDHICYFLYQILRGLKYIHSANVLHRDLKPSNLLLNTTCDLKICDFGLARVADPEHNHAGFLTEYVATRWYRAPEIMLNSKGYTKSIDIWSVGCILAEMLSRRAIFPGKHYLDQLNHILGVLGSPSPEDLECIINEKARNYLQSLPYKPKVPWTSLFPNADLRALDLLDKMLTFNPNKRIVVEDALAHPYLEQYYDPADEPVAEEPFKFDMELDDLPKEVLKQYIFEETILFQKNHQENAICNEFAE

SEQ ID NO: 140128 - DNA, 1083 bp, Apis mellifera
  CDS (1)..(1083)
atgccgcagtttcataaagtcgaaataaataggaccgaatgggaggttccggaacgatatcaaatgttaacaccagtaggatcgggagcttatggacaagtgtgttcagcacttgatacaaaaactggtcagaaagtagcaataaaaaaattagctaggccattccaatcagctgtacatgcaaaacgcacctatagagaacttcgtatgttgaaacacatgaatcatgaaaatataattggtttattagatgtttttcatccatcttcttctttagaagattttcaacaagtatatttagtgacgcatctgatgggtgcagatctcaataatattgtaagaactcaaaagctttctgatgatcatgtacaatttcttgtttatcaaatttttcgtggtctcaaatatattcattccgcgggtataatacatagggatttgaagccttctaacatagctgtaaatgaggattgtgagctgaaaattttagattttggattggctaggcctacagaaaatgaaatgactggttatgttgctacaagatggtatagagctccagaaattatgctcaattggatgcattacaatcaaacagttgatatttggtctgttggatgtataatggctgaactattaacagggcgaacattatttccgggaacagatcatattcatcaactgaatttaataatggagatactgggtactccacgagacgaatttatgcaaaaaatattatcagaatcggcaagaaactatatacaaagtttacctccgcttaaaaaaaagaatttcaaagatgttttccgcggagccaatcctttagctatagatttacttgaattaatgttagaattagatgctgagaaacgcattacagcagaacaagctttagctcatccatatcttgcacaatatgctgatccaactgatgaaccagtatctttaccttatgatcaaagttttgaagatatggatttacctgttgaaaaatggaaagaacttgtttatcatgaagttataaattttgtacctcaacaattacctacaatagcttcgggtattgagtctacttcgtaa

SEQ ID NO: 140129 - protein, 360 aa, Apis mellifera
MPQFHKVEINRTEWEVPERYQMLTPVGSGAYGQVCSALDTKTGQKVAIKKLARPFQSAVHAKRTYRELRMLKHMNHENIIGLLDVFHPSSSLEDFQQVYLVTHLMGADLNNIVRTQKLSDDHVQFLVYQIFRGLKYIHSAGIIHRDLKPSNIAVNEDCELKILDFGLARPTENEMTGYVATRWYRAPEIMLNWMHYNQTVDIWSVGCIMAELLTGRTLFPGTDHIHQLNLIMEILGTPRDEFMQKILSESARNYIQSLPPLKKKNFKDVFRGANPLAIDLLELMLELDAEKRITAEQALAHPYLAQYADPTDEPVSLPYDQSFEDMDLPVEKWKELVYHEVINFVPQQLPTIASGIESTS

SEQ ID NO: 140130 - DNA, 1299 bp, Candida glabrata CBS 138
  CDS (1)..(1299)
atgggcttaagcaaaattcttggctccaacgacaatattgtcaacaagaatggttccagtaacactggaggaagtaaaaagtcttcgttcttctcgttgaactcaaaaaggaatacagatgccgcgggcatagtgcctgatttcacaagtatcaaagctccacggaccatatacaagaatgcgaacttttcaatatctgggaaatatgaaattattcaggtattggggaaaggatcatatggtgttgtctgttctgccaaacacaagttagataatgaagaccaagaacagtttacagtagccatcaagaagattacaaacatattctaccgaaaaattctgctgaagcgcgctataagagagataaaattcatgaattatttcaagggtcataaacatattgtaaatcttattgacatagagattgtccaggacaaaccatatgatggcttgtactgctaccaagaattgatagattatgacctcgcgagagttattcactcttcagttcagctttcagagtttcacattcaacatttcatatatcaaatactttgtggtgtgaaatacatccatagcgcggatgttattcatagagatttgaaaccaggtaatatattatgcactgtgaatggctgcttaaagatatgtgattttggtttggcaagaggtgttgcaaaacagtttgtcaacaaaaactcaaagcccaacgaaatcacaaattatgtagcaacaagatggtatagagcccctgaactaattttatctaacaacgaatacactaaatctgttgatatgtggtctgttggttgtatacttgcagaattttacggaagaaggcctatatttatggggaaggattccatacatcaagtatatgaaattaaaaaaatattaggaactccttctagatccttgctggtcaaatatgggacactgaaggcatggaatttattcggtcataacagtaatcataatcttgataacctaaaaagcggaatgccttggtcgactgtgtaccccatggcctcagccactgcactggatctcattgataaattattacaatgggaaccagaaagcagattgaatgttctacagtctcttgaacaccagtttgttcaatcagtccgaaagcccaatgatgaacctatttgctcaaaaggaccatttaatttctcatatgaatataacttgaactctatggacgatctaagacaatgcttaaacgaagaagtagcgcaattttacatagagaggcagcttggcgaagagtactctaaatatatagaagagtaa

SEQ ID NO: 140131 - protein, 432 aa, Candida glabrata CBS 138
MGLSKILGSNDNIVNKNGSSNTGGSKKSSFFSLNSKRNTDAAGIVPDFTSIKAPRTIYKNANFSISGKYEIIQVLGKGSYGVVCSAKHKLDNEDQEQFTVAIKKITNIFYRKILLKRAIREIKFMNYFKGHKHIVNLIDIEIVQDKPYDGLYCYQELIDYDLARVIHSSVQLSEFHIQHFIYQILCGVKYIHSADVIHRDLKPGNILCTVNGCLKICDFGLARGVAKQFVNKNSKPNEITNYVATRWYRAPELILSNNEYTKSVDMWSVGCILAEFYGRRPIFMGKDSIHQVYEIKKILGTPSRSLLVKYGTLKAWNLFGHNSNHNLDNLKSGMPWSTVYPMASATALDLIDKLLQWEPESRLNVLQSLEHQFVQSVRKPNDEPICSKGPFNFSYEYNLNSMDDLRQCLNEEVAQFYIERQLGEEYSKYIEE

SEQ ID NO: 140132 - DNA, 1467 bp, Candida glabrata CBS 138
  CDS (1)..(1467)
atggacgttgagagacagacatttaaggtctttaaccaggacttcaccattgataagaggttcgaattgatcaaagagattggccatggcgcatatggtatagtgtgttctgccaggttcacagaggcaagcgaggagactacagttgctatcaagaaagtgaccaacatcttcagcaaaacacttctgtgtaaaagatcgctcagagagttgaagcttctgagacattttagaggacataagaacattacctgtctttacgatatggatatcgtattctacccagatgggtctataaatggcctttatttatacgaagaactgatggaatgtgatatgcaccagattataaaatctgggcaagcactaacagatgcgcattaccagagtttcacatatcagatcttgtgtggtttaaaatatatccactcagctgacgttctacatcgtgacttaaaaccaggtaatttgctggtgaatgccgattgccaacttaaaatttgtgatttcgggcttgcaagaggttatagtgagaatcccgaagagaacaaccaatttttaactgagtatgtggcgaccaggtggtatagagcacctgaaatcatgctaagttaccaaggttacacaaaggccattgacatctggtcaacaggttgtattttagcagagtttttaggtggcaaaccgttattcaaggggaaggactacgttgatcaactgaatagaattttacaggtcttaggtacaccacctgatgaaactttaaggagagtgggctcaaagaatgtccaagattatattcaccaacttggatacatacaaaagataccattttctgaattattccctaatgcgaatgaagatgctttagatctcctggagggaatgctggcgtttgatccacaaaagagaataactgtggataaggcactagagcatccatatctaaccatatggcacgacccagctgatgaacctgagtgtaacgaaaagtttgaattcagtttcgaaagcgtgaacgaaatggaagatttaaagcgcatggttgttgatgaggtacaaagtttcagggaatttgtaaggcaacctttaatggatgacaaatctcaagaagacgaacaacaacaaggatctcccgagaattaccaacagacaagcccaacgaatatatccccacaacgtttacataataatgggtctcatgatctgttacaggaaccagaatttttgacacagacaccaaatcagaactcaactattccggatcaactacaggaatcattcgttggaatccactcagataatttacctgagcatgatacagatttcccaccgagacctcaagagaacattctggcatcacctatgggactcccatccgcatctgatcgaaactccatgaacaacgattccttcctcgatttagaacgcgagttggagtttggactggataggagatatttatga

SEQ ID NO: 140133 - protein, 488 aa, Candida glabrata CBS 138
MDVERQTFKVFNQDFTIDKRFELIKEIGHGAYGIVCSARFTEASEETTVAIKKVTNIFSKTLLCKRSLRELKLLRHFRGHKNITCLYDMDIVFYPDGSINGLYLYEELMECDMHQIIKSGQALTDAHYQSFTYQILCGLKYIHSADVLHRDLKPGNLLVNADCQLKICDFGLARGYSENPEENNQFLTEYVATRWYRAPEIMLSYQGYTKAIDIWSTGCILAEFLGGKPLFKGKDYVDQLNRILQVLGTPPDETLRRVGSKNVQDYIHQLGYIQKIPFSELFPNANEDALDLLEGMLAFDPQKRITVDKALEHPYLTIWHDPADEPECNEKFEFSFESVNEMEDLKRMVVDEVQSFREFVRQPLMDDKSQEDEQQQGSPENYQQTSPTNISPQRLHNNGSHDLLQEPEFLTQTPNQNSTIPDQLQESFVGIHSDNLPEHDTDFPPRPQENILASPMGLPSASDRNSMNNDSFLDLERELEFGLDRRYL

SEQ ID NO: 140134 - DNA, 1089 bp, Kluyveromyces lactis NRRL Y-1140
  CDS (1)..(1089)
atgccacgaacaatcacgtatgatatcccatcccattatcaactagtagatctggttggtgagggagcatatggtacagtttgctctgcgatacataagccaacaaacacgaaagttgcaattaaaaagatacagccgtttagcagatcgatgtttgttaccaggacgttacgggagttgaaactgttgaaattctttcattcgcatgaaaatatcatatcggtcttggatatagtacgtccgacgtcatggcataaatttgaagcagtttatcttgtacaagagttgatggaaacggatttgcagaagattatcaaccaacaaaatttatcagaggatcatatccaatatttcgtttatcaaatactaagggctttaaaatcgctacattcggcacaagtaatccatagggatttgaaaccaagtaatttgttactgaatagcaattgtgatctcaaagtgtgtgattttgggttggctcgttgcctggcatcgagtgatcaatcaagagagaatatggtgggtttcatgacagaatatgtagctaccagatggtatagggctccagaaatcatgttgtccttccaagaatacacaactgcaatggatatctggtcatgtggatgtatactagcagaaatgatcatgggtaagccgcttttcccaggtaaagattaccaccatcaactctggatcatcttagaagttttagggtctccaactttggaagactttgaacaaatcaagagtaaaagggcaaaagaatacatatctcaactacccatgaagaaaggtataccctgggctaatgtgttaaataaagaagttaaccctcttgctatcgatttattgtccaagatgctaactttcaacccagacaagaggatcagtgcagttgaagcgttggaacatccatatttggcaacatatcatgatccagatgacgagccagattatccccaactaaaccttgaagacaatttttggaaaattgacaacgaggcccgcgataaaaacgaggaagacgatattccactggaactgttgaaaaagatgctttatggtgaagttatgaagcctctaaattga

SEQ ID NO: 140135 - protein, 362 aa, Kluyveromyces lactis NRRL Y-1140
MPRTITYDIPSHYQLVDLVGEGAYGTVCSAIHKPTNTKVAIKKIQPFSRSMFVTRTLRELKLLKFFHSHENIISVLDIVRPTSWHKFEAVYLVQELMETDLQKIINQQNLSEDHIQYFVYQILRALKSLHSAQVIHRDLKPSNLLLNSNCDLKVCDFGLARCLASSDQSRENMVGFMTEYVATRWYRAPEIMLSFQEYTTAMDIWSCGCILAEMIMGKPLFPGKDYHHQLWIILEVLGSPTLEDFEQIKSKRAKEYISQLPMKKGIPWANVLNKEVNPLAIDLLSKMLTFNPDKRISAVEALEHPYLATYHDPDDEPDYPQLNLEDNFWKIDNEARDKNEEDDIPLELLKKMLYGEVMKPLN

SEQ ID NO: 140136 - DNA, 1488 bp, Kluyveromyces lactis NRRL Y-1140
  CDS (1)..(1488)
atgaacgaatacgatgcggtagatagacacactttcaaagtgtttaatcaggacttcacagtggataaacggttccagttgattaaagaaataggtcatggttcgtacgggattgtttgctctgcccggttcactgaagctgcagatgaaaccacggtggctattaagaaagttaccaacgttttctcaaagactctgctctgcaaaagatctctaagggaactgaaacttctaagacattttagaggtcataaaaatatcacttgtctatacgatatggatattgtgttccagccggacggtatgttcaatggtctttatttgtacgaggaattaatggaatgtgatatgcatcaaattgtaaaatcgggtcagcccttaacagatgcccattaccaatcgttcatctaccagattctttgtgggttaaaatatattcattcagcagacgtgctccatcgtgatttgaagccagggaatcttttggttaacgctgattgtcagttgaagatttgtgatttcggattggccagagggtacagcgagaatccagtagaaaataaccaatttttgaccgaatacgtggcaacgagatggtacagagcaccggaaattatgttgagctatcaaggttatacaaaggctattgacgtatggtcttgtggttgtatcttggcggaattgctaggtgggaaacctatctttaagggtaaagattacgtcgaccaattgaataggatcttacaagtcttggggactcctccagaggaaactttgaaaagaatcggatcgaaaaacgtccaagactatatccaccagctaggatatattccaaagataccattcagcactttatacccaaatgccaacccggatgcattgaaccttcttgagggaatgttaagctttgatcctcaacttagaataacagtcgatgatgctctacaacatccgtatttgtccatctggcatgatcctgcagatgaaccgatatgtacagaaaagttcgatttttcttttgaaagtgtcaatgagattgaacaacttaaacaaatggtaattgacgaagtgaccgatttcaggcaatatgtgagattacccctcttacacgagcaacagcaacaacaggggaagacagacggtggttttgatgatcaaatacgagaagatcaacgcacatttcaagcgcagctagaagaacaagtgaacaatggtagaactgcatctaacgttccatcgttcgatgagccgttttctagtcaaatgatgggttccgcgtcacaacaagatcctcttgttggtattcattcggataatttaccaagccatgaacttgacttccctcctaggcctagtgagaatgtgctagattcgccaatgggtctaagtcatcagcaaacgcataacggctctcctgagtgccaagatataaatgaccttttaggattagaaagagaactagaatttggattagatagacagttttaa

SEQ ID NO: 140137 - protein, 495 aa, Kluyveromyces lactis NRRL Y-1140
MNEYDAVDRHTFKVFNQDFTVDKRFQLIKEIGHGSYGIVCSARFTEAADETTVAIKKVTNVFSKTLLCKRSLRELKLLRHFRGHKNITCLYDMDIVFQPDGMFNGLYLYEELMECDMHQIVKSGQPLTDAHYQSFIYQILCGLKYIHSADVLHRDLKPGNLLVNADCQLKICDFGLARGYSENPVENNQFLTEYVATRWYRAPEIMLSYQGYTKAIDVWSCGCILAELLGGKPIFKGKDYVDQLNRILQVLGTPPEETLKRIGSKNVQDYIHQLGYIPKIPFSTLYPNANPDALNLLEGMLSFDPQLRITVDDALQHPYLSIWHDPADEPICTEKFDFSFESVNEIEQLKQMVIDEVTDFRQYVRLPLLHEQQQQQGKTDGGFDDQIREDQRTFQAQLEEQVNNGRTASNVPSFDEPFSSQMMGSASQQDPLVGIHSDNLPSHELDFPPRPSENVLDSPMGLSHQQTHNGSPECQDINDLLGLERELEFGLDRQF

SEQ ID NO: 140138 - DNA, 1320 bp, Kluyveromyces lactis NRRL Y-1140
  CDS (1)..(1320)
atggaagctaatatcatttccaatcaatccaattggaatgcgaggcaaatgccgaacgtaagcagagcaaccaagaaattgaagaagctactagacccgtatgtggatcatatgaaacagtcatacgaactagatcaaaacaatcacatctatgtggatcctattttgactaaacgctccatttatagtccagcaaatttctctgtgcccggaagatatgagattttacaagtgttagggaaaggctcatatggcacggtggtgtctgctgtggataaagggaatccaacccacgaagtccaacttgccatcaaaaaagtgacgagcatttttactagagaaatcttgttgaagcgggccattagagaattgaagtttatgagttattttaaaggacacagaaatattgtttcgttgattgatctcgaaattgtcaacgaagaaccttattcaggattatattgttaccaggagttggtagattatgatcttgcaagggtaatacattcgaatgtactgttttctgagtttcatatcaagcattttttgtaccagatcctatgtgggatgaaatatattcacagtgcagacgtcatccatagagatcttaagccaggtaatattttgtgttctatcacaggtgaaatcaaaatctgtgattttggtttggcaagaggaatttcaccgagttttactgtcgcaggagggatatcaaaccatattacaaattatgttgcgactcgttggtacagggcaccagaattgattttatctcataaacgatactcgaagagtgtggacatgtgggcagttggttgtatattggccgaattttacggacgcaaacctgtctttatggggaacgattctttacaccaagtgatggagatccaaaagatacttggtacaccaaaacaaattgtgatacgtacatatggctcttcgagatgttatgatatattcagcacatccaaaccgcaatataaaaaaacaccttggtgtgagattttcccatatgcatcatctgaagctgtcgatttaatggaaaggctcatcgattggaacccagaagctagactcacagtagaagaagcattggatcatccatttttgcagcaagtgagaaatcctgaagcagagccaatttgcccccatggtccatttgattttacatacgagaaacatctctattcgatggaaagactaagggaatgtttatgcgatgaggtcagcaaattccacaatgatcgccaaacaaaagattttgtatctcctcctctaatgactcctcattttattgcagaatccaactcatactag

SEQ ID NO: 140139 - protein, 439 aa, Kluyveromyces lactis NRRL Y-1140
MEANIISNQSNWNARQMPNVSRATKKLKKLLDPYVDHMKQSYELDQNNHIYVDPILTKRSIYSPANFSVPGRYEILQVLGKGSYGTVVSAVDKGNPTHEVQLAIKKVTSIFTREILLKRAIRELKFMSYFKGHRNIVSLIDLEIVNEEPYSGLYCYQELVDYDLARVIHSNVLFSEFHIKHFLYQILCGMKYIHSADVIHRDLKPGNILCSITGEIKICDFGLARGISPSFTVAGGISNHITNYVATRWYRAPELILSHKRYSKSVDMWAVGCILAEFYGRKPVFMGNDSLHQVMEIQKILGTPKQIVIRTYGSSRCYDIFSTSKPQYKKTPWCEIFPYASSEAVDLMERLIDWNPEARLTVEEALDHPFLQQVRNPEAEPICPHGPFDFTYEKHLYSMERLRECLCDEVSKFHNDRQTKDFVSPPLMTPHFIAESNSY

SEQ ID NO: 140140 - DNA, 1083 bp, Debaryomyces hansenii CBS767
  CDS (1)..(1083)
atgaacaatgaacaaccaccaccacaacaggctcacacgagacaaatttcgttcaacgtgtcagaccactatcagattctcgaagtggtaggtgaaggggcatatgggatcgtttgctcagctatccacaagcctacaaaccagaaggttgctataaagaaaatcgagccatttgaaaggtcgatgctatgccttcggacccttcgagagttgaagttgcttaaacatttcaatcatgaaaacattatttctatccttgccatacagcgacctatcaacttcaacttatttaacgaaatctacttgattcaggagcttatggagactgatttacacagggttatcaagacgcagaagctaagtgacgatcacatccagtactttatttatcagacattgcgggcattgaagaccatgcacctggcaaatgtattgcatcgagacttgaagccttcgaacttgttgttgaactccaactgtgatttgaagatctgtgactttggattggctcgatccattgcgtccagcgaggataactttggatttatgactgagtatgtggccacaaggtggtatagggccccagaaatcatgttaacgttccaggaatatactactgccattgacgtgtggtctgtgggatgtattttggctgaaatgttggtgggaagaccgttgtttccggggagagactaccataaccaactttggcttatcatagaggtattgggaacacctaacatggaagactactataatattaagctgaaacgtgctcgagaatatattcgttcgttacccttcgtgaagaaggttccatttgcaaacttgttcaacagtgaggccattaacccattagctatcgacttattggaaaacttgttggtatttaatccggcgaagagaataacagtggacaatgcattgaaccacccataccttaatatataccacgacccgaacgacgagccgatctctgaaaagatccccgaagatttctttgatttcgataaacgtaaagatgagttatcaattgaagacttgaagaaacttctctatgatgaaattatgaaaccgttataa

SEQ ID NO: 140141 - protein, 360 aa, Debaryomyces hansenii CBS767
MNNEQPPPQQAHTRQISFNVSDHYQILEVVGEGAYGIVCSAIHKPTNQKVAIKKIEPFERSMLCLRTLRELKLLKHFNHENIISILAIQRPINFNLFNEIYLIQELMETDLHRVIKTQKLSDDHIQYFIYQTLRALKTMHLANVLHRDLKPSNLLLNSNCDLKICDFGLARSIASSEDNFGFMTEYVATRWYRAPEIMLTFQEYTTAIDVWSVGCILAEMLVGRPLFPGRDYHNQLWLIIEVLGTPNMEDYYNIKLKRAREYIRSLPFVKKVPFANLFNSEAINPLAIDLLENLLVFNPAKRITVDNALNHPYLNIYHDPNDEPISEKIPEDFFDFDKRKDELSIEDLKKLLYDEIMKPL

SEQ ID NO: 140142 - DNA, 1512 bp, Debaryomyces hansenii CBS767
  CDS (1)..(1512)
atgccacaagatacagagacaatgtattctggacgtgttgtgaataaggtttataaccaagatttcatcattgatagaagattcaagatagtgaaagaattagggcatggggcttatggaatcgtatgttcggccaagtatgacgatggatctgataatgaagatggaagctatgtagctattaagaagatcaccaatattttcagcaagaaaatattgtgtaagagatctttgagagaattgaaattgctacaattcttcagaggacacaagaatattacatgtctatatgatttggatattattcctaatccaataaccggagaattcaacgaaatatatctttatgaagaattaatggaatgtgacatgcatcaaatcattagatcaggtcaacacttaacggattcgcattatcaatcattcatttatcagacattgtgtggtttaaagtatattcatagtgctgacgtcttgcatcgtgatttaaaaccaggcaatttattagttaacgctgattgtgaattgaagatttgtgattttggattagcaagggggttcctggaatgtcctgagcagaatgttgggttcatgactgaatatgtagcaactaggtggtacagagctcctgagatcatgttgagttttacaaattatactaaagcaattgatatctggtcagttggttgtatattggccgaattattaggagggaaaccaattttcagaggtaaggattatgttgatcaattgaatcaaattttacttattttaggaaccccgaaggaatcaacattaactaagattggatctgtcagagctcagaattatgtgagatccttaccgtttatgcgaaaggttcattattctgaattgtttccaactgcaaatccgttggctctagatttattggaaaaaatgctcactttagatccgtatgaaagaattaccgttgaagaagcgttaaaccatccatatttatctgtttggcatgatccacaagatgaaccagagtgtcaaataaaatttgatttcaagtcgtttgaaactgtcgatgatatgaagtcaatgaaaaatcttataattgatgaggtcaagaattttagagattttgtcagaaaaccattacaagaacaacagcaaattcaactacaaatgcagatacagcaacaggaaagagagaaacaaaaaaatgattccatggatttatcaactccaataaatcagcaacaatttaatgaaatgttaagttcaagttctaactctaactccaattcaaattcaaacccagagacgggggttaatacagacactccaaagatgacgaatgataatgacttgcagtattatcaatctattccaaaaccacaggaacttgatgaatttacattttcacataatagtaagggcttatctccgacagataataatgacaatcatactgatttatttagattggaagaagaactagggtttggcttagatggtgctgggatgttcaataatatttaa

SEQ ID NO: 140143 - protein, 503 aa, Debaryomyces hansenii CBS767
MPQDTETMYSGRVVNKVYNQDFIIDRRFKIVKELGHGAYGIVCSAKYDDGSDNEDGSYVAIKKITNIFSKKILCKRSLRELKLLQFFRGHKNITCLYDLDIIPNPITGEFNEIYLYEELMECDMHQIIRSGQHLTDSHYQSFIYQTLCGLKYIHSADVLHRDLKPGNLLVNADCELKICDFGLARGFLECPEQNVGFMTEYVATRWYRAPEIMLSFTNYTKAIDIWSVGCILAELLGGKPIFRGKDYVDQLNQILLILGTPKESTLTKIGSVRAQNYVRSLPFMRKVHYSELFPTANPLALDLLEKMLTLDPYERITVEEALNHPYLSVWHDPQDEPECQIKFDFKSFETVDDMKSMKNLIIDEVKNFRDFVRKPLQEQQQIQLQMQIQQQEREKQKNDSMDLSTPINQQQFNEMLSSSSNSNSNSNSNPETGVNTDTPKMTNDNDLQYYQSIPKPQELDEFTFSHNSKGLSPTDNNDNHTDLFRLEEELGFGLDGAGMFNNI

SEQ ID NO: 140144 - DNA, 1518 bp, Yarrowia lipolytica CLIB122
  CDS (1)..(1518)
atgatacgagcggaccgacacacgtacaaggtgttcaaccaggaattcaccatagacaagcggttccaggtgaccaaagagctgggccatggcgcgtacggcattgtgtgtgcagccaagtacactgggacgcctgatgggcctggagttgctatcaagaaggtgaccaacattttctcgaaaaacattctgtgtaagcgggcgttgcgggagctcaagctactgaaccacttccgggggcacaagaacatcacctgtctgtacgatatggacattgtggacaccaacaatttcaacgagctgtatctgtacgaagagctcatggagtgcgatatgcatcagatcatccggtccggccagcctctgactgacgcccattaccagtcgtttgtttaccagattctcgccggtgtcaagtacattcattccgccgatgttctccatcgggatcttaaacccggcaatttgctggttaacgccgactgtgagctcaagatttgcgatttcggacttgcgcgtggattctcttccgacgacgaaaagaatgccggtttcctgacagaatacgtcgccacccggtggtacagagccccggagatcatgctctctttccagtcttacacaaaggccattgacatctggtccgtgggctgcattctggccgagcttctgggaggaaagccgctgttcaagggcaagaactacgtcgaccagctcaatcaaattctgcactacctcggaacgccctcggaggagactctcaagcgaatcggcagtcccagagcccaggagtacgttcggggtcttcccttcatgcccaagattcccttttccacgctattccccaccgccaaccccgaggctctggatctgctggagaaaatgcttgccttcgatcctgcggagcgagtgacggttgaggaggctcttgagcacccctacctgaagatctggcacgatccccgagatgagcctgtgtgtcccactccgttcgacttctcgttcgaggaggtcaatgacatggaggcaatgaagcagatgattctggacgaggttgtggacttccgggccatggttcgaaagcctgtcgatgagcagacacgaatcagagacgagcagatcgaggagcagcggagagaggaggagaagcaggaggtggagagacaacagaaggaggctgaacgtcagaagcaacaccagcaggaagctgagagacagcaacaccagcagcagcaacatcaccctcaacagcaggactctccatccaccctgtcgggcttctcggactcggaccagtctgctaacccccacttttacgagtacgccggctttggagtcggctcacagacctcggacatgggccagccacccgtcattcagcgaaaggactctctgggtatccccgaggaggacttcaagtaccaggacccgccaccaaagccccaggagtccggacgccagggagatggcgacctggagctcgagctggagtacggcttggatggatggagaagttga

SEQ ID NO: 140145 - protein, 505 aa, Yarrowia lipolytica CLIB122
MIRADRHTYKVFNQEFTIDKRFQVTKELGHGAYGIVCAAKYTGTPDGPGVAIKKVTNIFSKNILCKRALRELKLLNHFRGHKNITCLYDMDIVDTNNFNELYLYEELMECDMHQIIRSGQPLTDAHYQSFVYQILAGVKYIHSADVLHRDLKPGNLLVNADCELKICDFGLARGFSSDDEKNAGFLTEYVATRWYRAPEIMLSFQSYTKAIDIWSVGCILAELLGGKPLFKGKNYVDQLNQILHYLGTPSEETLKRIGSPRAQEYVRGLPFMPKIPFSTLFPTANPEALDLLEKMLAFDPAERVTVEEALEHPYLKIWHDPRDEPVCPTPFDFSFEEVNDMEAMKQMILDEVVDFRAMVRKPVDEQTRIRDEQIEEQRREEEKQEVERQQKEAERQKQHQQEAERQQHQQQQHHPQQQDSPSTLSGFSDSDQSANPHFYEYAGFGVGSQTSDMGQPPVIQRKDSLGIPEEDFKYQDPPPKPQESGRQGDGDLELELEYGLDGWRS

SEQ ID NO: 140146 - DNA, 1071 bp, Yarrowia lipolytica CLIB122
  CDS (1)..(1071)
atgagcaaaccaaaaccctccgaggtccgaaccctggcgttcaacgtgtccgaccactaccagatcctggacatggtcggagaaggcgcatatggcattgtgtgttccgcgttgcacacgccctccggccagaaagtggcaatcaaaaagatcacgccgtttggccggtccatgttctgtctccggactctacgagagatcaagctgctgcgccacttcagccacgaaaacatcattggcattctggacgtgcaaaagcccgcgtccttcgagtcctttaacgaggtctacctcattcaggagctcatggacacagatctgcatcgggtgatccgaacccaggagctgtccgacgaccactgccagtactttgtgtaccagacgctgcgagccatcaaggcactgcactcggcaaacgtgttgcatcgggacctcaagcccagcaacctgctcctaaacgcgtcgtgtgacctcaagatttgcgactttggcctggcccgatcggcagcgtccaccgaagacaactttggcttcatgaccgagtacgtggcgacccggtggtacagagcgcccgaaatcatgctcacgttcaaggagtacacaaaggccattgacatgtggtcgattgggtgcattttggcagagatgctgggcggccggcctctgttccctggcagagactaccactcgcaactgaccatgattctggacgttctgggcacacccaccatggaagactactactcggtcaagtcgcggcgtgcacgggagtacatccggtcgctgccgttcaagaagaagctgccgttttcgcagctgttccccaaggcgaatcctctggcaattgatctgcttgagaagctgctgacgttcaacccggccaagcgaatcaccgtggaggaggctctggtgcacccgtatctggagcagtaccatgatgccgacgatgagcctaccgccgaacccattcccgacgagtttttcgactttgaccggaataaggatgagctgagtgtggagcagctcaagacactgatttacaacgagatcatgtactggaagaggccgtaa

SEQ ID NO: 140147 - protein, 356 aa, Yarrowia lipolytica CLIB122
MSKPKPSEVRTLAFNVSDHYQILDMVGEGAYGIVCSALHTPSGQKVAIKKITPFGRSMFCLRTLREIKLLRHFSHENIIGILDVQKPASFESFNEVYLIQELMDTDLHRVIRTQELSDDHCQYFVYQTLRAIKALHSANVLHRDLKPSNLLLNASCDLKICDFGLARSAASTEDNFGFMTEYVATRWYRAPEIMLTFKEYTKAIDMWSIGCILAEMLGGRPLFPGRDYHSQLTMILDVLGTPTMEDYYSVKSRRAREYIRSLPFKKKLPFSQLFPKANPLAIDLLEKLLTFNPAKRITVEEALVHPYLEQYHDADDEPTAEPIPDEFFDFDRNKDELSVEQLKTLIYNEIMYWKRP

SEQ ID NO: 140148 - DNA, 1272 bp, Candida albicans SC5314
  CDS (1)..(1272): transl_table=12
atgatgaatatagatcaacatcatcagcttcaacagcaacatcaacaacaaatgttacaacaacaagctcaggctcaggctcaggctcaagctcaagcacaacaacaacaacaacaacaacaacaggcagcagccgcagccgcagcagctaacgctgcagctactacttcttcttcttcccctcgtcaagtttcattcaacgtatctgatcattatcaaatattagaaattgttggagaaggagcatatggaatagtttgttcagccattcataaaccatcacaacaaaaagttgccattaaaaaaattgaaccatttgaaagaagtatgttatgtttacgtacattacgagaattaaaattattaaaacattttaatcatgaaaatatcattagtatattagctatacaacgaccaattaattatgaatcatttaatgaaatttatttaattcaagaattgatggaaactgatttacatcgagtcattagaactcaaaatttatctgatgatcatatacaatatttcatttatcaaactttaagagctttaaaagctatgcattcagctaatgtattgcatcgagatttaaaaccactgaatttattattaaattcaaattgtgatttaaaaatttgtgattttggtttagcaagatcaattgcttcacaagaagataattatggattcatgacagaatacgtagctacaagatggtatagagctccagaaatcatgttaacttttcaagaatatactactgctattgatgtttggtcagttggttgtatattggcagaaatgttgagtggtagacctttattccctggtagagattatcataatcaattatggttaattatggaagttttaggaacaccaaatatggaagattattataatattaaatctaaacgagcaagagaatatattagaagtttacccttttgtaaaaaaattccgttcagtgaattatttgccaataccaacaacaatactagtactagtactagtaatactggcggtaggacaaatattaatccattggcattagatttattagaaaaattattaatttttaatcctgctaaaagaattactgttgaagatgctttaaaacatccttatttacaattatatcatgatcctaatgatgaaccaattagtgataaaatcccagaagattttttcgattttgataaaatgaaagatcaattaacaattgaagatttgaaaaaattgttatatgaagagattatgaagccattataa

SEQ ID NO: 140149 - protein, 423 aa, Candida albicans SC5314
MMNIDQHHQLQQQHQQQMLQQQAQAQAQAQAQAQQQQQQQQQAAAAAAAANAAATTSSSSPRQVSFNVSDHYQILEIVGEGAYGIVCSAIHKPSQQKVAIKKIEPFERSMLCLRTLRELKLLKHFNHENIISILAIQRPINYESFNEIYLIQELMETDLHRVIRTQNLSDDHIQYFIYQTLRALKAMHSANVLHRDLKPSNLLLNSNCDLKICDFGLARSIASQEDNYGFMTEYVATRWYRAPEIMLTFQEYTTAIDVWSVGCILAEMLSGRPLFPGRDYHNQLWLIMEVLGTPNMEDYYNIKSKRAREYIRSLPFCKKIPFSELFANTNNNTSTSTSNTGGRTNINPLALDLLEKLLIFNPAKRITVEDALKHPYLQLYHDPNDEPISDKIPEDFFDFDKMKDQLTIEDLKKLLYEEIMKPL

SEQ ID NO: 140150 - DNA, 1134 bp, Candida albicans SC5314
  CDS (1)..(1134): transl_table=12
atgtctgcagatggagaatttacaagaacccagatatttgggactgtttttgaaatcaccaatagatacactgagctaaatcccgtgggaatgggagcatttggtttggtgtgctcagccgttgatagattaactggtcaaaatgttgcagtgaaaaaagtcatgaaaccttttctgacctcagtattggcaaaaagaacctacagagaattaaagttattgaaacatttgaaacatgagaatttgattaccttggatgatattttcatatctcctttggaggatatttactttgtcaatgaattgcaaggtactgatttgcataggttattgaactcaagacctttggagaaacaatttattcaatatttcacataccaaataatgagaggtttaaaatacattcattctgccggtgttattcatcgtgatttgaaaccatccaacatcttgatcaatgaaaactgtgacttgaaaatctgtgactttggtcttgcaagacttcaagatccacaaatgacgggttacgtgtcaaccagatattatcgagcaccagaaatcatgttaacttggcaaaaatacgacactgaagtcgacttgtggtctgtgggttgtatcttagcggaaatgattgaagggaaaccactattccccgggaaagatcacgtgcatcaattctccattataacagaattattgggctcacctcctgctgatgtgatcgatactatttgttccgaaaacactttaagatttgtccaatcattaccacatagagaccctatcccatttagtgaaagatttgcttcctgtactcacgttgaaccggaggctattgatttattggctaaattgttggtttttgaccctaagaaaagaatcagtgctgttgaaggtttgacccatccttatatggaggcataccatgatccaaccgatgagcctgtttgtgagagtaaattcgattggagttttaatgacgcagacttgccagtggatacttggagagttatgatgtacagtgaaattttagactttcatcaaactgttggtgtggcaaatgaaactgagggttccgaacaaccagacctgcaagtggagcaaaacaacttggattccgccaacggagcttaa

SEQ ID NO: 140151 - protein, 377 aa, Candida albicans SC5314
MSADGEFTRTQIFGTVFEITNRYTELNPVGMGAFGLVCSAVDRLTGQNVAVKKVMKPFSTSVLAKRTYRELKLLKHLKHENLITLDDIFISPLEDIYFVNELQGTDLHRLLNSRPLEKQFIQYFTYQIMRGLKYIHSAGVIHRDLKPSNILINENCDLKICDFGLARLQDPQMTGYVSTRYYRAPEIMLTWQKYDTEVDLWSVGCILAEMIEGKPLFPGKDHVHQFSIITELLGSPPADVIDTICSENTLRFVQSLPHRDPIPFSERFASCTHVEPEAIDLLAKLLVFDPKKRISAVEGLTHPYMEAYHDPTDEPVCESKFDWSFNDADLPVDTWRVMMYSEILDFHQTVGVANETEGSEQPDSQVEQNNLDSANGA

SEQ ID NO: 140152 - DNA, 1602 bp, Ustilago maydis 521
  CDS (1)..(1602)
atgtcgattgccaatgcctcttcttcgactgcttctcacgacttggacgccgctgatgccgatccttgtccatccgcttgtacatccgtatccgctctgtgtaacatgtcgacactaccctcaccgcgccctttcggatatcgcccgacgtatgtacctgcgatggtcgcctcgggtgtatcggccgtcaccgtcacgaccaattcacatcggccaccttcaaaatcccactcgatctcctcggtcgactcgttggcatctgtctcatcgaatgcaccctccacaccaacgcatgatgccgacgatgtacgcttcgaaatggccgtcattcccaaactggttcgtgcctctgctgatgcatatctcgatcgcgtgggcaaaccgctgccgccatcgcctgcgccccaaatcgttgcaacgtctgcaaccaccaaaacgaatgcacaagcggctcgttctgtcgctgctgctgctgctgctgctgctgctgctgctgctgtgccgccctcccattctgcactccgcaacgaaaaccacaaaaacgccattagtttccgcgtgggtagcaagtacaaggtctgcgagatcatcggcgaaggcgcctatggtgttgtctgcagcgccatccaccgcgccaccggtcaaaaggtcgccatcaagaagatccaaccctttgagcaccagatgtttgcgctgcgaaccttgcgcgagctcaagctactgcgcttctttcaagaatgcgacgtctcggaaaacatcatcagcatcctcgacattatcaaacccagcacctatgaagcgttcaccgaggtgtacttggttcaagagctcatggagaccgacctgcatcgagtcatccgtacccaggagctgtctgacgaccattgtcagtatttcacgtatcagacccttcgcgctctcaagcccatgcactgtgccgacgtgatccaccgcgatctcaagccgagcaacgtgctgctcaacgccaactgcgatctcaaggtttgcgatttcggcttggctcgttcagtgctcactgcggaccaggacaccggcttcatgaccgaatacgtcgccacgcgatggtaccgtgctccggagattatgcttaccttcaagcagtacaccaaagcgatcgatgtatgggcagtcggatgcatcctcgctgagatgctcaccggtcggccactgttccctggtcgcgactaccaccagcaactctcgctgatcctcgacgtgctgggaacgccgacactcgaggaattccaaaacatcaacagccgtcgatcgcgcgactacattcgatcgatgcccttccgcaagcgtcgagaattccgtactctctttccaaaagcttcacctgaagcaatcgatttcttgcaaaagacactcacctttgacccccgcaaccgtctcacggtagaagagtgtctccagcatccttatttgtcggcttatcacgatcctgatgacgagcctggtgcgccacgtctcgacccagactttttctactttgacatgcaaaaggagagcatcaccaaggaggatctgcgcaaggaactctggtaccaggtacaagaatttcagccgcttcttcgttga

SEQ ID NO: 140153 - protein, 533 aa, Ustilago maydis 521
MSIANASSSTASHDLDAADADPCPSACTSVSALCNMSTLPSPRPFGYRPTYVPAMVASGVSAVTVTTNSHRPPSKSHSISSVDSLASVSSNAPSTPTHDADDVRFEMAVIPKLVRASADAYLDRVGKPLPPSPAPQIVATSATTKTNAQAARSVAAAAAAAAAAAAVPPSHSALRNENHKNAISFRVGSKYKVCEIIGEGAYGVVCSAIHRATGQKVAIKKIQPFEHQMFALRTLRELKLLRFFQECDVSENIISILDIIKPSTYEAFTEVYLVQELMETDLHRVIRTQELSDDHCQYFTYQTLRALKPMHCADVIHRDLKPSNVLLNANCDLKVCDFGLARSVLTADQDTGFMTEYVATRWYRAPEIMLTFKQYTKAIDVWAVGCILAEMLTGRPLFPGRDYHQQLSLILDVLGTPTLEEFQNINSRRSRDYIRSMPFRKRREFRTLFPKASPEAIDFLQKTLTFDPRNRLTVEECLQHPYLSAYHDPDDEPGAPRLDPDFFYFDMQKESITKEDLRKELWYQVQEFQPLLR

SEQ ID NO: 140154 - DNA, 1077 bp, Strongylocentrotus purpuratus
  CDS (1)..(1077)
atgtctgcttttcattcactgccagaggacttccatcacattgaactcaataaaacgatatgggaagtccccaatcggtatgtgcgactggaacctgtgggctcaggagcgtatgggcaagtatgtgcggcagaagatacccggcagaaaggtttgagggtagccattaagaagctgtccagaccgttccaaacagtcatacacgccaagaggacctacagagaactgcgccttctcaaacatatgagacatgaaaatgtaatcagcctgcttgactgtttcacccctgaccgagtcaacttctcagatgtttacatggtgacccatctcatgggagccgaccttaacaacatcatcaagtgtcagaaactctctgatgaccatgtccagttcctcatctatcaggttctcaggggcctcaagtacatccattctgctggtgtgattcatcgagatctcaagcccagtaacatagctgtcaatgaagactgtgaactcaggatcctggactttggattagcacgtagcacagacgatgagatgacaggatatgtagctaccagatggtatagggcacctgaaatcatgctcaattggatgcactacactgagaaagttgacatctggtccgtaggctgtatcatggcagagctcctcacacagaaaaccctcttcccagggtgtgatcacatagaccaactgaataagatcattgctatcacagggaaaccagacgagaccttcttacagaagatcgcaagtgagagtgcaaagacatacctgatgagcatggctgcctaccctaagagggacttcagcactatcttcctaggggccagtcgcaaggctgtcgatcttctggagaagatgctacaattggatgaggacagaaggctgagtgctgagcaggctcttcagcacccctatctgtctaagtaccatgatccagatgatgaaccaattgcagccatgtttgatgatagtcaggagaacagcgacatcgtaatagatgaatggagacaacgcgttttgaaagaagtaacagaatttgttgcagacccagctccgatggattga

SEQ ID NO: 140155 - protein, 358 aa, Strongylocentrotus purpuratus
MSAFHSLPEDFHHIELNKTIWEVPNRYVRLEPVGSGAYGQVCAAEDTRQKGLRVAIKKLSRPFQTVIHAKRTYRELRLLKHMRHENVISLLDCFTPDRVNFSDVYMVTHLMGADLNNIIKCQKLSDDHVQFLIYQVLRGLKYIHSAGVIHRDLKPSNIAVNEDCELRILDFGLARSTDDEMTGYVATRWYRAPEIMLNWMHYTEKVDIWSVGCIMAELLTQKTLFPGCDHIDQLNKIIAITGKPDETFLQKIASESAKTYLMSMAAYPKRDFSTIFLGASRKAVDLLEKMLQLDEDRRLSAEQALQHPYLSKYHDPDDEPIAAMFDDSQENSDIVIDEWRQRVLKEVTEFVADPAPMD

SEQ ID NO: 140156 - DNA, 1119 bp, Tribolium castaneum
  CDS (1)..(1119)
atggcggaagccacaggtgtatcaagtgtaaatccgaatgcagaagttgtaaggggtcaggtatttgaggtgggcccccgttacacgaacttatcatacattggagaaggcgcatacggaatggtcgtatcagcactggataccgccacaaatacaaaagttgcgattaagaaaatatcccctttcgagcatcaaacttattgccagaggactctcagagaaattaaaatactcacaaggtttaaacacgaaaatattatcgacatacgggacatacttcgagcggttacgatagatcagatgagggacgtttacattgtacagtgtttaatggaaaccgacctctacaaacttcttaaaacacagagactgagtaacgaccacatatgttacttcctataccaaatccttcgagggttgaaatatatacactcggcaaatgtacttcatagggatttgaaaccaagcaatcttctcctaaatacaacctgcgatcttaaaatatgtgattttggattggctcgagtggccgaccccgaacacgatcatacagggttccttactgaatacgtagcaactagatggtatagagcgccggaaatcatgcttaattcaaaagggtacacgaagtctatagatatatggtcggtgggttgtattttagcagaaatgttatcaaaccgacccatctttcccggaaagcattatttagatcaattaaatcacattctcggagtgttggggtccccgtcggaagaagatctcaattgtattataaacgaaaaagcgagaagttacattcagtctttgccatataaacccaaagttccttggtcaaaactattcccaaacgccgaccccaaagcgctagaccttctggataagatgttaacgtttaatccgcataaaagaataggtgtcgagggatcgttagcgcatccgtatttagagcagtattatgatccagcagacgagccggtggctgaaactccattccgctttgatacagaactggacgacttaccgaaagatcagctgaaacggttaattttcgatgagacgatacttttcaaacagagacagcagcaggaacagcaacaagcgatggctgcgtcatag

SEQ ID NO: 140157 - protein, 372 aa, Tribolium castaneum
MAEATGVSSVNPNAEVVRGQVFEVGPRYTNLSYIGEGAYGMVVSALDTATNTKVAIKKISPFEHQTYCQRTLREIKILTRFKHENIIDIRDILRAVTIDQMRDVYIVQCLMETDLYKLLKTQRLSNDHICYFLYQILRGLKYIHSANVLHRDLKPSNLLLNTTCDLKICDFGLARVADPEHDHTGFLTEYVATRWYRAPEIMLNSKGYTKSIDIWSVGCILAEMLSNRPIFPGKHYLDQLNHILGVLGSPSEEDLNCIINEKARSYIQSLPYKPKVPWSKLFPNADPKALDLLDKMLTFNPHKRIGVEGSLAHPYLEQYYDPADEPVAETPFRFDTELDDLPKDQLKRLIFDETILFKQRQQQEQQQAMAAS

SEQ ID NO: 140158 - DNA, 1059 bp, Tribolium castaneum
  CDS (1)..(1059)
atgtcgggttttcacaaagtggaagtcaacaaaaccgtctgggaagtacccgtgaggtaccaaatgctctcagcggtgggttctggagcatacggccaagtttgctcagctgtcgacacttactgtaataagaaaaaagttgccataaagaagttagctcggccttttcaatcagcagttcatgccaaaaggacgtaccgagaactaaaactgctcaaacacatgagacatgaaaatgtcataggcttattggatgttttttacccacaacacgataatagccagatctatctagtcacgcacttaatgggggccgatttaaacaacatcatacgtacccaaaaactcaccgatgatcacgtgcaatttttagtataccagatcttacgcgggttaaaatacatacactcggcagggataatacatagggacttgaagccgtcaaatattgccgtaaacgaagactgtgagttgaaaattttggatttcggccttgccaggccaactgagaccgaaatgacgggatatgtggcaactcggtggtacagggcgcctgagataatgctaaactggatgcactacaaccagacagttgatatctggtcagttggttgcatcatggccgaactgttaaccggacgtacgttattcccaggaacagatcacatccatcaactcaacttaattatggaaatcctgggcacgcccagtgacgaatttatgcaaaaaatcacctctgagagtgccaggagttacataaagtcgctgtgcccgttacctaagaaagacttgaatcagtattttctgggcgccaatccccaagccgtccatctgttgagtcttatgctggagctggatagcgataagaggatcactgcggaaagggcgttggcacacccgtacttagcggcctatgccgaccccaacgacgagcccatctcagcgccttacgatcaaagtattgaagacatgaaccactcggttgaaaagtggaaagaactagttttggaagagatcaaatcgttcgtctacaaaccgccacaaaatgaagagtcgtaa

SEQ ID NO: 140159 - protein, 352 aa, Tribolium castaneum
MSGFHKVEVNKTVWEVPVRYQMLSAVGSGAYGQVCSAVDTYCNKKKVAIKKLARPFQSAVHAKRTYRELKLLKHMRHENVIGLLDVFYPQHDNSQIYLVTHLMGADLNNIIRTQKLTDDHVQFLVYQILRGLKYIHSAGIIHRDLKPSNIAVNEDCELKILDFGLARPTETEMTGYVATRWYRAPEIMLNWMHYNQTVDIWSVGCIMAELLTGRTLFPGTDHIHQLNLIMEILGTPSDEFMQKITSESARSYIKSLCPLPKKDLNQYFLGANPQAVHLLSLMLELDSDKRITAERALAHPYLAAYADPNDEPISAPYDQSIEDMNHSVEKWKELVLEEIKSFVYKPPQNEES

SEQ ID NO: 140160 - DNA, 2065 bp, Puccinia triticina
  CDS (571)..(1788)
tcactccaaaattgcacctagtgttcgcatatcattgatgccttgccaacctttcccatggctgggatccaactcgacttccgaaagctgagcaggggccgagtaggtccaaccgaaccagctagcaccgacaaaccaagctgattcggtggtgtagctcgggcgagagagattaagaaagcggccaccgcaaaaaaaaagagaagaaaaacccagccccatcagtaaaaaaaccaggccaaacaacttcacctataggtccgagtgaagaaagccttccaaatccctccagtctggttggttctgcccctatcccgcctgcttcaacacccagtccaactttcacctccatctccacctccacaccggtgagcagtctagcgtcagtagcaactggattctactatatatacacgccagcgtgtccatccaacttatccattcccatcctctcacatcctatcattccaaccatttctagaactccctagcacctctcgcttgcctgatccaaagccagttcaactttttcctttcctccatccccatcatcttcatctttaacacgagatggcttctgctgctgtagctctcccgagctctgccaccggtggatcaatgaatcctactgcgcccgcctcaacctctgtcaacgccactactatcaacatcaccaatgccccagccaacaagccaaagcaagctggatcccgggccgtcggcgaacctagaagggtcaggttcaacgttgggtcgaaatatcacgttatggatgtcatcggcgagggtgcctacggggtggtctgctcggccatacatcgcccaactggccagaaggtcgccatcaagaagattgtccccttcgaccactcaatgttctgtcttagaaccttgcgagaattgaagttgctcaagtatttccaagaacacaacgtctctgaaaacattgtttcgattgtggacatcatccgacctcctaccatcgaagccttcaaggaggtctatcttatccaagaattgatggagaccgacatgcaccgagtcatcagaacgcaagttttatcggatgaccattgccaatacttcatctacccgacgctgcgagccatgaaggccctccattcggcagatgtgatccatcgggatttgaagccatcgaaccttttactgaacgccaactgtgacctcaaggtctgcgaatttggattggctcgctcgattcggactgccgagcaggagacgggcttcatgactgaatacgtggccacccgatggcacagagcccccgagatcatgctcaccttcaagcaatacaccaaagccatcgacgtctggtccgtcggctgcatcttgggcgagatgctctccggacgccccttgttcccgggccgggactaccatcaccaactgacgttgatcctggacgtgcttggtaccccaactcttgacgagttctacgccatcaactctcgccgttctcgggactacatccgagcccttcccctccgcaagaagcgtcccttcgccaccatctaccccaacgcttcacccttggctatcgacttcctcaccaaaaccctcaccttcgaccccaagaagcgactcactgtcgaggaagctctacagcatccttacctggaggcctaccacgaccctgaagacgagccaactgctcccccacttgatgaagacttctttgcctttgaccgacagaaagacgagatcagcaaggaggaactcaagcggctattatttgaggaaatcaacagctttcactttaccacttgagcactccgttcctctccctttcgtctcttatccctcttccctcttagtcgtcgagctccactgtattcttccgtttcttccttatcccctttccacttcttggttattttttctgcgccattcacaatcccttcgccacctcatgcatccttgatggaagtcctaataagcagacacttcaatgtaacataactacccaaaatcaaatatttcgcctactggagcaagcttgtaatacttttattctcctctccgaactaatcaataaatgaactgt

SEQ ID NO: 140161 - protein, 405 aa, Puccinia triticina
MASAAVALPSSATGGSMNPTAPASTSVNATTINITNAPANKPKQAGSRAVGEPRRVRFNVGSKYHVMDVIGEGAYGVVCSAIHRPTGQKVAIKKIVPFDHSMFCLRTLRELKLLKYFQEHNVSENIVSIVDIIRPPTIEAFKEVYLIQELMETDMHRVIRTQVLSDDHCQYFIYPTLRAMKALHSADVIHRDLKPSNLLLNANCDLKVCEFGLARSIRTAEQETGFMTEYVATRWHRAPEIMLTFKQYTKAIDVWSVGCILGEMLSGRPLFPGRDYHHQLTLILDVLGTPTLDEFYAINSRRSRDYIRALPLRKKRPFATIYPNASPLAIDFLTKTLTFDPKKRLTVEEALQHPYLEAYHDPEDEPTAPPLDEDFFAFDRQKDEISKEELKRLLFEEINSFHFTT

SEQ ID NO: 140162 - DNA, 1128 bp, Citrus sinensis
  CDS (1)..(1128)
atggctgacgtggcgcaggtcaacggcgtaggtcaaacggctgattttcctgcggtaccgacgcacggcggtcagtttatacagtacaatatatttggaaacttgtttgaaatcacggccaagtatcggcctccgatcatgccgattggtcgcggtgcgtacgggatcgtttgctcggtgttgaatacggagacgaatgagctcgttgcgataaagaaaatagcgaacgcttttgataaccacatggatgccaagcgaacgcttcgtgagattaagcttctgcgacatttggatcatgaaaatgtgatagctgtaagagatgtggttcctccaccgttacgaagagaattcactgatgtctatattgctgcggaactcatggacactgaccttcaccaaattattcgctcaaatcaaagtttatccgaggagcactgccagtatttcttgtatcaacttcttcgaggactcaagtatatccattcagcaaatgttattcatcgggatttgaagcccagcaatctcttattaaatgcaaattgtgatttaaaaatttgtgattttggtcttgctcgtccaacctcagagaatgagttcatgacagagtatgttgtcacaagatggtaccgagcccctgagttgttattgaactcatctgactacactgctgcaatagatgtgtggtctgttggctgtatatttatggagcttatgaacagaaggcctctgttcccaggaaaagatcacgtgcatcagatgcgcttattgatagagcttcttggaacaccaacagatgctgatctggggtttgtccgtaatgaggatgcaaaaagatatatacgacaacttccccaacatcctcgtcaatcgttagcccaagtttttccacatgttcatccactggctattgatcttgtagacagaatgcttacatttgatcccatgaagagaattactgttgacgaagcactagcccatccttatcttgcaagattacatgatgaagccgatgaaccggtctgcccagagccattttcttttgattttgagcaacaaagcctgggagaagagcaaataaaggacatgatttatcaggaggcattagcactcaatccgggatttgcttaa

SEQ ID NO: 140163 - protein, 375 aa, Citrus sinensis
MADVAQVNGVGQTADFPAVPTHGGQFIQYNIFGNLFEITAKYRPPIMPIGRGAYGIVCSVLNTETNELVAIKKIANAFDNHMDAKRTLREIKLLRHLDHENVIAVRDVVPPPLRREFTDVYIAAELMDTDLHQIIRSNQSLSEEHCQYFLYQLLRGLKYIHSANVIHRDLKPSNLLLNANCDLKICDFGLARPTSENEFMTEYVVTRWYRAPELLLNSSDYTAAIDVWSVGCIFMELMNRRPLFPGKDHVHQMRLLIELLGTPTDADLGFVRNEDAKRYIRQLPQHPRQSLAQVFPHVHPLAIDLVDRMLTFDPMKRITVDEALAHPYLARLHDEADEPVCPEPFSFDFEQQSLGEEQIKDMIYQEALALNPGFA

SEQ ID NO: 140164 - DNA, 1266 bp, Aspergillus niger
  CDS (1)..(1266)
atggccgacttgcagggtcgcaagatcttcaaggtcttcaaccaggactttatcgtcgatgagcgctacaatgtcaccaaggagctgggccagggcgcatacggcattgtctgcgccgcgacaaatgctcacactggtgagggtgtcgccatcaagaaggtcaccaacgtcttcagcaagaagatcctagccaaacgcgccctgagagagatcaagctgctccagcacttcagaggtcaccgtaacatcacttgcttgtatgacatggacattccccgcccggacaacttcaacgaaacgtacctgtacgaggaattgatggaatgcgatttggccgctattattcgctccggacagcccctaaccgatgcccatttccaatccttcatttaccaaatcctctgcggtctcaaatacatccattcggccaacgttctgcaccgtgatttgaagcctggaaaccttctcgtcaatgcggactgcgagctgaagatttgcgatttcggtctggcccgtggtttctctatcgacccggaggagaatgcaggatacatgacggaatatgtcgccacaagatggtaccgtgcgccggagatcatgctgagcttccagagctacacgaaagccatcgatgtttggtccgtgggttgcattttggccgagctgctaggtggtcggcccttcttcaagggccgtgactatgtcgaccagcttaaccagatcctccactatctgggtactcctaacgaggagactctgagccgcattggctcacctcgtgcccaggagtacgttcgcaacttgcccttcatgcctaagattcccttccagcgcctgttccccaatgccaatcccgatgccctcgatctgctcgatcgcatgcttgcattcgacccgacatcgcgtatctcggttgaggaggcccttgagcatccttacttgcacatctggcacgacgcctcggatgagcccacctgcccgacgaccttcgacttccacttcgaggtggtcgaggacgtgcaggagatgcgccacatgatttacgacgaggtagtgcgcttccgggctctggtccggcagcagtcgcaggcgcaggccgccgcgcagcagcagcagattgcccagcagaccaatgtgcccatccccgacaaccaacaaggtggatggaagacggaggaacctaagccccaggaagcgctcgccgcaggcggtggccaccacaacgatctggaatcgtcgctgcagcggggcatggatgtgcagtag

SEQ ID NO: 140165 - protein, 421 aa, Aspergillus niger
MADLQGRKIFKVFNQDFIVDERYNVTKELGQGAYGIVCAATNAHTGEGVAIKKVTNVFSKKILAKRALREIKLLQHFRGHRNITCLYDMDIPRPDNFNETYLYEELMECDLAAIIRSGQPLTDAHFQSFIYQILCGLKYIHSANVLHRDLKPGNLLVNADCELKICDFGLARGFSIDPEENAGYMTEYVATRWYRAPEIMLSFQSYTKAIDVWSVGCILAELLGGRPFFKGRDYVDQLNQILHYLGTPNEETLSRIGSPRAQEYVRNLPFMPKIPFQRLFPNANPDALDLLDRMLAFDPTSRISVEEALEHPYLHIWHDASDEPTCPTTFDFHFEVVEDVQEMRHMIYDEVVRFRALVRQQSQAQAAAQQQQIAQQTNVPIPDNQQGGWKTEEPKPQEALAAGGGHHNDLESSLQRGMDVQ

SEQ ID NO: 140166 - DNA, 1065 bp, Aspergillus niger
  CDS (1)..(1065)
atggtgcagcaaatgcctcctcaaggggggtcgcgaaagatctctttcaacgtttccgaccagtatgagatccaggatgtcattggtgagggagcttacggtgttgtatgctctgctatccacaagccttctggccagaaggtcgccatcaagaagatcacccccttcgaccactcgatgttctgcttgcggactctgcgtgagatgaagctgctgcgctacttcaaccatgaaaacatcatttccattctggatatccagaggcctcggaattatgagagcttcaacgaggtgtatctgattcaggaactgatggagacggatatgcaccgggtcattcgtactcaggacctctccgatgaccactgccaatactttatctaccagaccttgcgtgcgctcaaggccatgcactccgccaacgtcctccaccgtgatctcaagccctccaaccttctcctcaatgcaaactgcgacctgaaagtctgcgactttggtctggcccggtcagccgcatcaaccgacgacaactctggattcatgacggaatacgtcgcgacacggtggtaccgtgccccggagatcatgttgacgttcaaggaatacaccaaggcgatcgatgtctggagtgttggatgtatcctggcggaaatgctgagtggaaagccgctcttccccggaaaggactatcaccaccaactgactctgattcttgatgtcctgggcacgccaactatggaggactactacggcatcaagtctcgccgggctcgggagtacattcgctcattgcccttcaagaagaagattcccttccgcgcaatgttccccaagagcaacgagctggcgctggaccttttggagaagcttctggcgttcaaccctgcgaagcgtatcactgtcgaggaggcgttgcgtcatccgtacctcgagccgtaccatgaccctgatgacgagccaacggcgcccccgattcccgaaggcttctttgattttgacaagaacaaggatgcactcagcaaggagcaactgaagctcctgatctacgaggagattatgcggtaa

SEQ ID NO: 140167 - protein, 354 aa, Aspergillus niger
MVQQMPPQGGSRKISFNVSDQYEIQDVIGEGAYGVVCSAIHKPSGQKVAIKKITPFDHSMFCLRTLREMKLLRYFNHENIISILDIQRPRNYESFNEVYLIQELMETDMHRVIRTQDLSDDHCQYFIYQTLRALKAMHSANVLHRDLKPSNLLLNANCDLKVCDFGLARSAASTDDNSGFMTEYVATRWYRAPEIMLTFKEYTKAIDVWSVGCILAEMLSGKPLFPGKDYHHQLTLILDVLGTPTMEDYYGIKSRRAREYIRSLPFKKKIPFRAMFPKSNELALDLLEKLLAFNPAKRITVEEALRHPYLEPYHDPDDEPTAPPIPEGFFDFDKNKDALSKEQLKLLIYEEIMR

SEQ ID NO: 140168 - DNA, 1419 bp, Dunaliella salina
  CDS (1)..(1419)
atggcgtcgcgatccgaggagtccatcaactatgaggccgcgggcaacaatagcttgtacaacagctttttggtctgtggcagtgtgtttgagtgtctgtcccgctactccccactgaagcccattggcaaaggagcatacggtgtggtttgctcagctcgagactcagagaccaaccaaaaagtggccatcaagaaaatttcgaatgcatttgagaacctcgtggatgccaaacgcacactgcgtgagatcaagctggtgcgacacctcaaccacgagaatgtagtccagatcatggaccttatcccgccaatggttcacagcaacttcaaggacctgtatgtggtgtacgagctcatggacactgacctgcaccagatcatcaggtcacctcagccgctatccgacgaccactgccagtacttcctgtaccaagtgctgcgaggacttaagtacatccattctgctgccatcctgcaccgcgatctcaagccatccaacctactggtcaacgccaactgtgacctcaagatttgcgactttggcttagcacgctctacgtccagtagccgagtggagttcatgacagagtatgtggtgaccaggtggtacagagcccctgagctactgctctcatgctctgagtacgggactgccattgacgtatggtctgtgggctgcatctttgcagagctcttggggcgcaagccgctgttccccggcaaggactacgtgcaccagctgaacctcattacgcgggtcatcggctcacctgcggaaagcgagctgggcttcatcagcagcgacaaggcacgccgctacatcagatcccttcctcgtgcggagccagctgacttcatgcgcatgtggccaaatgcaaatcccaaggctgtggaccttgtgaagaagatgctcatgttcgaccctaacaagcgcatcacagttgaagaagccttagcccatgagtatctggccactttgcacgacataagcgatgagcctgtgtgcgcgaatccattcaatttcgaccttgagagcgatgaccttacgcctgatgtggtgcgaggcatcatcctaaaagacatggctgcgcttcacccgagtcaagcagatggcatcaatgcagcagcctcagcctgcctgtgtggggcttcccctgcgcagcagcaggagcagcaggcaacaaccattcctcaaggggcgatgcagcagcagcagcagcagcaagaaggagagagctctagctctaaggcaggcccacagcagcagcagcagcagcagcagcagcagcatgagcatgagcaataccaaaaacaagttccaagaaaagaagaggagaagactgacgggcttggcggtgagcagggagagggtatggcagcaagcagtgccgacagaggcagccactcaggcaactag

SEQ ID NO: 140169 - protein, 472 aa, Dunaliella salina
MASRSEESINYEAAGNNSLYNSFLVCGSVFECLSRYSPLKPIGKGAYGVVCSARDSETNQKVAIKKISNAFENLVDAKRTLREIKLVRHLNHENVVQIMDLIPPMVHSNFKDLYVVYELMDTDLHQIIRSPQPLSDDHCQYFLYQVLRGLKYIHSAAILHRDLKPSNLLVNANCDLKICDFGLARSTSSSRVEFMTEYVVTRWYRAPELLLSCSEYGTAIDVWSVGCIFAELLGRKPLFPGKDYVHQLNLITRVIGSPAESELGFISSDKARRYIRSLPRAEPADFMRMWPNANPKAVDLVKKMLMFDPNKRITVEEALAHEYLATLHDISDEPVCANPFNFDLESDDLTPDVVRGIILKDMAALHPSQADGINAAASACLCGASPAQQQEQQATTIPQGAMQQQQQQQEGESSSSKAGPQQQQQQQQQQHEHEQYQKQVPRKEEEKTDGLGGEQGEGMAASSADRGSHSGN

SEQ ID NO: 140170 - DNA, 1092 bp, Pisaster ochraceus
  CDS (1)..(1092)
atgaacaacccagtaacaggatcaggagaaacgttatctgatgacgggtatcatcgatatgaactgaataaaactacatgggaggtgccggttcagtaccaaaaactctccgcagtgggagctggtgcatatggatccgtgtgctcatccttaaacacaaaaactggcataaagattgctatcaagaagctttctcgaccatttcagtctgcgattcatgccaagagaacgtaccgagagcttcgacttctacagcatatggatcatgaaaacatcatcagtctactagatgtgttttgtagaggagataccttatcaagctttcgggacgtatacatggtgacacatttgatgggtgcagatctgaatagtattacaaaaacacagaaactctctgatgaacatgtgcagttccttgtgtatcaaatacttcgtgggctcaagtacattcattcagttggtgtaatccatcgtgatctgaagcccagtaacttggctgtgaatgaagactgcgaattgaggatactagattttggtcttgctcgtcaagctgatgatgagatgacaggttacgtagctacacgatggtatagagcaccagaaatcatgctgaattggatgcattacaccaatactgtggatatgtggtctgttggatgtataatggcagaacttctcacaggtaaaacgctatttcctggatcggatcacattgatcagttgagtcgcatcatggatctaactggtacacctgatgatgaaatccttgccaaaatccagagtgaagatgcacggaactttgttaaatctcaacctaaaactaagaaaaaagattttcgtggatattttgctggagcaaacgaaattgctgttgaccttctggagaaaatgcttctgttggatgtagacaagcgtatcactgctgaagaggcactgagtcatccttatgttgccaaatatcatgatgaaagtgatgagcctattggtaagcagtttgatgattcctttgaacagcaagacttgactgtgcagcagtggaaagagcttacttttcagctgattcaagcagtaagacatcaaagcagaaggtaa

SEQ ID NO: 140171 - protein, 363 aa, Pisaster ochraceus
MNNPVTGSGETLSDDGYHRYELNKTTWEVPVQYQKLSAVGAGAYGSVCSSLNTKTGIKIAIKKLSRPFQSAIHAKRTYRELRLLQHMDHENIISLLDVFCRGDTLSSFRDVYMVTHLMGADLNSITKTQKLSDEHVQFLVYQILRGLKYIHSVGVIHRDLKPSNLAVNEDCELRILDFGLARQADDEMTGYVATRWYRAPEIMLNWMHYTNTVDMWSVGCIMAELLTGKTLFPGSDHIDQLSRIMDLTGTPDDEILAKIQSEDARNFVKSQPKTKKKDFRGYFAGANEIAVDLLEKMLLLDVDKRITAEEALSHPYVAKYHDESDEPIGKQFDDSFEQQDLTVQQWKELTFQLIQAVRHQSRR

SEQ ID NO: 140172 - DNA, 1452 bp, Triticum aestivum
  CDS (112)..(1221)
gataaagtcaatcatcagctcagcctcagcctcatcccgttgcgcgtgcgtgcgtgcgtgttgcctcgctcctgtgattgggttttgagagtttcttggctgtgcttgagaatggacggcgctccggtggccgagttccggccgacgatgacgcacggcggccgcttcctcctctacaacatattcggcaaccagttcgagatcacggccaagtaccagccgccgatcatgcccatcggccgcggcgcctacgggatcgtctgctcggtgatgaacttcgagacgagggagatggtggcaagtaagaagatcgccaacgccttcgacaacaacatggacgccaagcgcacgctccgggagatcaagctcctcaggcacctcgaccacgagaacatagtaggcctccgagatgtgatcccgccggcgatcccgcagtccttcaacgacgtctacatcgccactgagctcatggacacggacctccaccacatcatccgctccaaccaagaactctcggaagaacactgccagtacttcctgtaccagctgctgcgcggcctcaagtacatccactcggcgaacgtgatccaccgcgacctcaagccgagcaacctgctgctgaacgccaactgtgacctcaagatctgcgacttcggcctggcgcggccgtcatcggagagcgacatgatgacggagtacgtggtcacgcggtggtaccgggccccggagctgctgctcaactccaccgactactccgcggccatcgacgtctggtccgtcggctgcatcttcatggagctcatcaaccgcgcgccgctcttcccggggagggaccacatgcaccagatgcggctcatcacggaggtgatcggcacccccaccgacgacgacctgggattcatccggaacgaggacgccaggaggtacatgaggcacctgccgcagttccctcgccggtccttcccgggccagttccccaaggtgcagcccgccgcgctggacctcatcgagaggatgctcacctttaacccgctgcagaggatcacagttgaagaggcgctggagcacccttacctagagcggcttcacgacgtcgccgacgagcccatctgcacggaccccttctcctttgacttcgagcagcaccctctgacggaagaccagatgaagcaactcatattcaacgaagccctggagttgaaccccaacttccgatactagatgattcattcctagttacccaacccccaacagtatgatttcggtataaaactgtctgtaaataggagtaagatcaaagaacatggtagattgcgcactgcatttgtttgtttattcgtgtaagttgttgctgcttcttcaaacctttgtccctcagctgtgcgaataaaaagtttggagcatgatttgagggcaaatcattctctagtttatgaagaaatggtttttatt

SEQ ID NO: 140173 - protein, 369 aa, Triticum aestivum
MDGAPVAEFRPTMTHGGRFLLYNIFGNQFEITAKYQPPIMPIGRGAYGIVCSVMNFETREMVASKKIANAFDNNMDAKRTLREIKLLRHLDHENIVGLRDVIPPAIPQSFNDVYIATELMDTDLHHIIRSNQELSEEHCQYFLYQLLRGLKYIHSANVIHRDLKPSNLLLNANCDLKICDFGLARPSSESDMMTEYVVTRWYRAPELLLNSTDYSAAIDVWSVGCIFMELINRAPLFPGRDHMHQMRLITEVIGTPTDDDLGFIRNEDARRYMRHLPQFPRRSFPGQFPKVQPAALDLIERMLTFNPLQRITVEEALEHPYLERLHDVADEPICTDPFSFDFEQHPLTEDQMKQLIFNEALELNPNFRY

SEQ ID NO: 140174 - DNA, 1242 bp, Botrytis cinerea
  CDS (1)..(1242)
atggcagacctgcaaggaagaaaggtcttcaaggtcttcaaccaagactttatcgtcgacgagagatacacagtcaccaaggagcttggtcaaggagcttacggtattgtttgtgctgctacgaattctcaaacacaggaaggtgtcgcaattaagaaagttacaaatgtcttcagcaagaagattttggcaaagcgtgcgctgcgtgagataaagttgctacaacatttcagaggtcatcgtaacattacctgcctttatgatatggatattcctcgaccagataactttaatgaaacatatctctatgaagagctcatggagtgtgatctcgctgctatcgtacgatccggtcaacccctcactgatgcacatttccaatctttcatttaccaaatcctttgcggtctaaaatatattcattccgcgaatgttctccatcgtgatttgaagcccggtaatttgctggtcaatgccgactgcgagttgaagatctgtgatttcggtcttgctagaggtttctctgtcgaccccgaagagaatgcaggatacatgaccgaatacgttgctacaagatggtatcgtgcccctgaaattatgttgagcttccagagctatacaaaagctatcgacgtatggtcagtaggatgtattctcgcagaattgctaggcggtcgtcctttcttcaaaggtagagattatgttgatcaactcaaccaaattttacatatccttggtacaccaaatgaagaaaccctttcaagaattggatcgccacgagcacaggaatatgttcgaaacctcccatatatggcgaagcgacctttcccaactttattccccaacgccaaccccgacgcccttgaccttcttgatcatatgttagcctttgatccatcttcccgtatcgatgtcgaaactgccctcgaacacccataccttcacatttggcacgacgcctctgatgagcctggatgcccaacaacatttaacttcgattttgaagttgtggaagatgtaggcgagatcagaaagttgattttggaagaggttcacagattcagacaacatgtccgtgttcaacctggtcaacaaggccagagcaacggccctcaagtacctataccacaagaacaagcaagctggcgtgccgaggatccaaggccacaagaagcttatggacaagggccaaatgatcttgaacaagatttacaaggtggtttggatgctatgcgatcgtag

SEQ ID NO: 140175 - protein, 413 aa, Botrytis cinerea
MADLQGRKVFKVFNQDFIVDERYTVTKELGQGAYGIVCAATNSQTQEGVAIKKVTNVFSKKILAKRALREIKLLQHFRGHRNITCLYDMDIPRPDNFNETYLYEELMECDLAAIVRSGQPLTDAHFQSFIYQILCGLKYIHSANVLHRDLKPGNLLVNADCELKICDFGLARGFSVDPEENAGYMTEYVATRWYRAPEIMLSFQSYTKAIDVWSVGCILAELLGGRPFFKGRDYVDQLNQILHILGTPNEETLSRIGSPRAQEYVRNLPYMAKRPFPTLFPNANPDALDLLDHMLAFDPSSRIDVETALEHPYLHIWHDASDEPGCPTTFNFDFEVVEDVGEIRKLILEEVHRFRQHVRVQPGQQGQSNGPQVPIPQEQASWRAEDPRPQEAYGQGPNDLEQDLQGGLDAMRS

SEQ ID NO: 140176 - DNA, 1245 bp, Mycosphaerella graminicola
  CDS (1)..(1245)
atgggtgacctacaaggccgcaaggtcttcaaggtgttcaaccaggacttcatcgtggacgagcggtacactgtgacaaaagagctggggcagggcgcgtacggcattgtgtgtgctgcgacgaacaatcagacgggcgaaggtgtggccatcaagaaggtcaccaatgtcttcagcaaaaagatcctggccaagcgggcattgagagagatcaagctgctgcaacatttccgagggcaccgaaacatcacttgtttgtatgacatggacattccgagaccggacaacttcaacgagacgtacttgtacgaagagctcatggagtgcgatctggcagcgatcatccgatcaggacagcctctgactgacgctcacttccaatctttcatctaccagattctttgcggtctcaagtacattcacagcgcgaatgtgctccaccgtgatttgaagccgggcaatttgctggtcaatgccgactgcgagctgaagatttgcgattttggtctggcaagaggcttcagcgtagacccagaggagaacgcaggatacatgaccgagtatgttgctacgagatggtacagagcgcctgagatcatgcttagtttccagagctacacaaaagctattgacgtctggtccgttggatgcattcttgccgaattgttgggcagcaagcctttcttcaagggccgtgactatgtcgaccagctgaaccagattcttcactacctcggaacaccgtctgagtccacattggcccgcatcggatctcctcgtgcacaggaatacgttcgcaacctgccgtacatgcagaagattcccttccacactctgttccgcaatgccaatccggatgccttggatctgctcgaccgcatgttggccttcgacccaagccaacgtatcgacgtggatgaagctctcgagcaccgctatctctccatctggcacgacgcctcggacgagccaaactgcccgactacattcgactttggcttcgaggttgtggaggaggttccggaaatgcgccaaatgattttgcaagaagtcagacagttccgtcaatccgtacgagcgccgcaacagcaacaatactcacaagggcatcaacagggtcaacaggtgccgatacctgatggctacgatcgcacgcacgaggatcccagaccgcaggagatgggaagcacggatccttatggcttggaaagggagcttcacgacggcttggacgccatgcgatag

SEQ ID NO: 140177 - protein, 414 aa, Mycosphaerella graminicola
MGDLQGRKVFKVFNQDFIVDERYTVTKELGQGAYGIVCAATNNQTGEGVAIKKVTNVFSKKILAKRALREIKLLQHFRGHRNITCLYDMDIPRPDNFNETYLYEELMECDLAAIIRSGQPLTDAHFQSFIYQILCGLKYIHSANVLHRDLKPGNLLVNADCELKICDFGLARGFSVDPEENAGYMTEYVATRWYRAPEIMLSFQSYTKAIDVWSVGCILAELLGSKPFFKGRDYVDQLNQILHYLGTPSESTLARIGSPRAQEYVRNLPYMQKIPFHTLFRNANPDALDLLDRMLAFDPSQRIDVDEALEHRYLSIWHDASDEPNCPTTFDFGFEVVEEVPEMRQMILQEVRQFRQSVRAPQQQQYSQGHQQGQQVPIPDGYDRTHEDPRPQEMGSTDPYGLERELHDGLDAMR

SEQ ID NO: 140178 - DNA, 1077 bp, Aedes aegypti
  CDS (1)..(1077)
atgccacagttctacaaagtagaaatcaacaaaacagaatgggaggtaccgcagaagtaccaaatgctcacccctgtaggaagtggggcttacgggcaagtctgttctgcaacggacacccagcacaacgttaaggtggcaatcaaaaagctggcgcgccctttccagtccgcagtccacgccaaacgaacctatcgtgaactccgcatgttgaagcacatgaaccacgagaacataattggcctgctggacgttttccatcccggaggtaacacactggactccttccagcaggtctacctggtcacccacctgatgggggcggacctgaacaatattatacgaacacaacgtctctcggacgaccatgtacaatttctagtctatcagattctacggggccttaaatacattcacagtgccggtattatacacagggatttgaagccgtccaacatagcagtgaacgaggattgtgagctgaaaattctagactttggtctggcccgccccacagagaacgaaatgaccggttacgtggcgactcggtggtaccgggcgccggaaatcatgctcaactggatgcactacaatcaaaccgtggacatttggtccgtcgggtgcatcatggccgaactgttgacgggtcgaacgcttttccccggcacagaccacatccatcaattaaacctaataatggaaatattgggaacaccgaacgaagaattcatggcgaaaatatcctcggaaagtgctagacactacatccgatcattgcctaaaacggaaaagcgcaacttcagcgatgtgtttcgtggtgccaatccccttgccattgacttgctggagaaaatgctggaattagacgcagataagcgtgttaccgccgaacaagcgttggcacatccatatctcgagaagtacgcggaccccaccgatgagccaacgtcttcgctgtatgatcaaagctttgaagatatggatctacccgtggaaaaatggaaggaactcgtcttccaagaagtacttaatttcgtccctcaacagcatgcacatattggcagtgatggacagtaa

SEQ ID NO: 140179 - protein, 358 aa, Aedes aegypti
MPQFYKVEINKTEWEVPQKYQMLTPVGSGAYGQVCSATDTQHNVKVAIKKLARPFQSAVHAKRTYRELRMLKHMNHENIIGLLDVFHPGGNTLDSFQQVYLVTHLMGADLNNIIRTQRLSDDHVQFLVYQILRGLKYIHSAGIIHRDLKPSNIAVNEDCELKILDFGLARPTENEMTGYVATRWYRAPEIMLNWMHYNQTVDIWSVGCIMAELLTGRTLFPGTDHIHQLNLIMEILGTPNEEFMAKISSESARHYIRSLPKTEKRNFSDVFRGANPLAIDLLEKMLELDADKRVTAEQALAHPYLEKYADPTDEPTSSLYDQSFEDMDLPVEKWKELVFQEVLNFVPQQHAHIGSDGQ

SEQ ID NO: 140180 - DNA, 1164 bp, Medicago truncatula
  CDS (1)..(1164)
atggaaggaggaggagctccaccagctgacaccgtgatgtcagatgctgcaccggcgccgccgcagatggggatcgagaatattccggcaacccttagccatgggggtaggttcattcaatacaacattttcggtaacatttttgaagttactgcaaaatacaaaccacccatcatgccaatcggtaaaggcgcttatggtattgtttgctctgctcataattcggagacaaatgaacatgttgcggttaagaagattgcaaatgcatttgacaacaagattgatgctaagaggactctccgtgaaatcaagctgcttcgccatatggatcatgaaaacgtggttgcaatcagggatatagtgccaccaccccagagggaggtattcaatgatgtttacattgcatatgagctaatggacactgaccttcaccaaatcattcgatcaaatcaagcactatcggaggagcactgtcagtactttctgtaccaaatccttcgtggtttgaagtacatacattctgcaaatgttctgcatagggacttaaaacccagcaaccttctcctgaacgccaactgtgacttaaagatttgtgattttggactggcccgtgtaacatctgaaaccgattttatgactgaatatgttgttactagatggtaccgtgcaccagagcttctgttaaactcttctgattatacagcagcaattgatgtatggtctgttggttgtattttcatggaactgatggatcgaaagcctttgtttcctggcagagatcacgtgcatcagctgcgtctactcatggagttgatcggtaccccgtcagaagatgatttggggtttctgaatgaaaatgctaagagatacattaggcaactacctccttaccgccgtcaatctttccaagaaaagtttccgcaagtccatcctgaagctatagatcttgttgaaaaaatgttaacttttgatccaagaaaaagaattactgttgaagatgcactggcacacccctacttgacatctctgcatgacatcagcgatgaacctgtgtgcatgactcccttcagctttgactttgaacagcatgcgttgactgaggaacagatgaaagaactgatatacagagaggctctagcatttaaccctgagtaccagcagtag

SEQ ID NO: 140181 - protein, 387 aa, Medicago truncatula
MEGGGAPPADTVMSDAAPAPPQMGIENIPATLSHGGRFIQYNIFGNIFEVTAKYKPPIMPIGKGAYGIVCSAHNSETNEHVAVKKIANAFDNKIDAKRTLREIKLLRHMDHENVVAIRDIVPPPQREVFNDVYIAYELMDTDLHQIIRSNQALSEEHCQYFLYQILRGLKYIHSANVLHRDLKPSNLLLNANCDLKICDFGLARVTSETDFMTEYVVTRWYRAPELLLNSSDYTAAIDVWSVGCIFMELMDRKPLFPGRDHVHQLRLLMELIGTPSEDDLGFLNENAKRYIRQLPPYRRQSFQEKFPQVHPEAIDLVEKMLTFDPRKRITVEDALAHPYLTSLHDISDEPVCMTPFSFDFEQHALTEEQMKELIYREALAFNPEYQQ

SEQ ID NO: 140182 - DNA, 1071 bp, Mycosphaerella graminicola
  CDS (1)..(1071)
atgtcgagaaccgcacagcaacagcagcagcaaggctcgcgcaagatctccttcaacgtgtcggagcagtatgatattcaagatgtggtcggagaaggcgcatatggtgttgtctgctcggcgttgcacaagccatccggacaaaaggttgcgatcaagaagatttcgccctttgatcactccatgtttgcgctccgcacgctccgcgagatgaagctcctccgctacttcaaccacgagaacatcatctccattcttgacatccaaaagcccaaatcttacgagaccttcaccgaagtctacctcatccaggaactcatggagacggacatgcaccgcgtcatccgcacccaggaactctcggacgaccactgccaatacttcatctaccagaccctccgcgcgctgaaagccatgcactccgccaacgtcctccaccgcgatctcaaaccctccaatctcttgctcaacgctaactgcgatctcaaagtgtgcgactttggcctggctcgctctgcggccagcaccgaggacaaccaaggtttcatgactgaatacgtcgcgactcgttggtaccgtgcacccgagataatgctcacgttcaaggagtacacgaaagcgatcgacgtgtggtccgtcggatgcatcctcgccgagatgttgagtgggaaacccctcttcccgggcaaagactaccaccatcaactcaccctcatcttggatgttctcggcacaccgaccatggaggattactatggcatcaaatctcgtcgcgcgagagagtatattagaagtctacctttcaagaagaagattccgtggaaagccatgttccccaagacgtccgatttggccttggatttgctggagaaactgctcgcgttcaatcctactaagagaatcacggtggaggaggcactcaagcatccatacctcgagccgtaccacgacccggaggatgagccgaatgcggagcccatcccggaggagttcttcgacttcgacaagaacaaggacaacctttcaaaggagcagctgaagcgactgatttacgaagagatcatgcggtaa

SEQ ID NO: 140183 - protein, 356 aa, Mycosphaerella graminicola
MSRTAQQQQQQGSRKISFNVSEQYDIQDVVGEGAYGVVCSALHKPSGQKVAIKKISPFDHSMFALRTLREMKLLRYFNHENIISILDIQKPKSYETFTEVYLIQELMETDMHRVIRTQELSDDHCQYFIYQTLRALKAMHSANVLHRDLKPSNLLLNANCDLKVCDFGLARSAASTEDNQGFMTEYVATRWYRAPEIMLTFKEYTKAIDVWSVGCILAEMLSGKPLFPGKDYHHQLTLILDVLGTPTMEDYYGIKSRRAREYIRSLPFKKKIPWKAMFPKTSDLALDLLEKLLAFNPTKRITVEEALKHPYLEPYHDPEDEPNAEPIPEEFFDFDKNKDNLSKEQLKRLIYEEIMR

SEQ ID NO: 140184 - DNA, 1134 bp, Phycomyces blakesleeanus
  CDS (1)..(1134)
atgacacaaccatctagacgtaatgatatgtctcgtctccagcaatttgatgctggagaacagtactcaattgtagacattgtaggcgaaggtgcttatggtgtagtttgttctgctgttcacaaacctaccgggcaaacagtggcaattaagcgaattcttccatttgaccatgctatgttttgccttcgtactctccgcgaaatcaaactactcaaatactttaatcatgagaatattatatcgattcttgacattgtcaaaccaaaatcttatgatgagtttaccgaagtatatcttattcaggaactcatggagaccgacctgcacagagtcatccgcacgcaggacttgtcggatgaccattgccagtactttacttaccaaacattgcgtgccttaaaggcaatgcactcggcaaatgtacttcatcgtgatcttaaacccagtaaccttttgttgaacgccaactgtgacctcaagatctgtgatcttggtttggcccggtcagccaactctgctgacgagaacagtggatttatgactgaatatgtagctactcgctggtacagagcacctgaaatcatgttgactttcaaagaatacacaaaggccattgatgtgtggtctgtgggctgtattctggccgagatgttgagtgggaaaccactgttccccggtcgtgactaccatcatcagctcaccctaattctcgatgtactcggtacacctacaatggatgacttttatggcatcaagagtcgaggcgcccgtgattacattagaagtcttccgttcaagaagcgaatcccgtttgcacgacttttcccagaagcaactgttgatcttctggagaagctattatcattcaatccagaccgtcgtattacggttgaagaggcattgaaacacccataccttgaagcataccatgatcctgatgatgaacccaacgcaacaccaatccacgaaagcttttttgactttgacaagtacaaggatcagctgacaaaagagcaattgaaacgtaagtttttttttcacattataaaaagaaagaaagagaggttgactcaaaatatatatataaatatgtatataacagagatgctatacgaagagattactcaataa

SEQ ID NO: 140185 - protein, 377 aa, Phycomyces blakesleeanus
MTQPSRRNDMSRLQQFDAGEQYSIVDIVGEGAYGVVCSAVHKPTGQTVAIKRILPFDHAMFCLRTLREIKLLKYFNHENIISILDIVKPKSYDEFTEVYLIQELMETDLHRVIRTQDLSDDHCQYFTYQTLRALKAMHSANVLHRDLKPSNLLLNANCDLKICDLGLARSANSADENSGFMTEYVATRWYRAPEIMLTFKEYTKAIDVWSVGCILAEMLSGKPLFPGRDYHHQLTLILDVLGTPTMDDFYGIKSRGARDYIRSLPFKKRIPFARLFPEATVDLLEKLLSFNPDRRITVEEALKHPYLEAYHDPDDEPNATPIHESFFDFDKYKDQLTKEQLKRKFFFHIIKRKKERLTQNIYINMYITEMLYEEITQ

SEQ ID NO: 140186 - DNA, 1086 bp, Glossina morsitans morsitans
  CDS (1)..(1086)
atgtataaattttacaaagtagacatattccgtacagaatgggaagtacccgaaatatatcaggatttacagccggtgggctcgggagcttacggacaagtatgcaaggctctagtaaagggaacaaacatgaacgtagccattaaaaagttggcgcgtcctttccaatcggctgttcatgcaaaacgtacttatcgtgaactgcgtctccttaagcatatggatcatgagaatgtgattggtttattggatgtgtttcatccacatccgcttaatgtgactttggaaaattttcaacaaatttacttggttactcatctcatggacgcggatctcaataatattatacgcacgcagcgtttatcggacgatcatgtacagtttttgatatatcaaattttgcgtgggctgaaatatatacatagtgcgggaattatacaccgtgatttgaagccgtcaaatatcgcggtaaatgaagattgtgaattgagaattttggattttggtttagctcggccaacggaaaatgaaatgaccggctatgtcgctacacgttggtatcgagctcccgaaattatgcttaattggatgcattataatcagacggtagatatatggtctgttggatgcattatggcagagctacttaccggacgtacattattccccggcaccgatcatatacatcaacttaatttaataatggaaattttggggacaccatttgatgaatttttgaaaaaaatctcctcggaaagtgcacgaaattatatcaagtctttgccttcaatgaagaggggtaattttaaggatctttttaaaggtgctaatccacttgccattgatttgttagagaaaatgttagaattagatgcagagaaacgtattaccgccgaacaagcgttggctcatccctatatggagaaatattttgaaccaagcgatgaacagacttcacccttatacgatcaaagtttggaagacatggatttatcagtcgagaaatggaaggaattaatttttaaagaggcggtaaacttcaaagcaccagcatctttcgcgcaaatcttgcaacaaattaaatga

SEQ ID NO: 140187 - protein, 361 aa, Glossina morsitans morsitans
MYKFYKVDIFRTEWEVPEIYQDLQPVGSGAYGQVCKALVKGTNMNVAIKKLARPFQSAVHAKRTYRELRLLKHMDHENVIGLLDVFHPHPLNVTLENFQQIYLVTHLMDADLNNIIRTQRLSDDHVQFLIYQILRGLKYIHSAGIIHRDLKPSNIAVNEDCELRILDFGLARPTENEMTGYVATRWYRAPEIMLNWMHYNQTVDIWSVGCIMAELLTGRTLFPGTDHIHQLNLIMEILGTPFDEFLKKISSESARNYIKSLPSMKRGNFKDLFKGANPLAIDLLEKMLELDAEKRITAEQALAHPYMEKYFEPSDEQTSPLYDQSLEDMDLSVEKWKELIFKEAVNFKAPASFAQILQQIK

SEQ ID NO: 140188 - DNA, 1065 bp, Aspergillus oryzae
  CDS (1)..(1065)
atggtgcagcaacttcctccccagggaggttcacgaaagatctccttcaacgtttccgaccaatatgaaattcaagatgtcattggtgaaggtgcctacggtgtggtgtgctctgccatccacaaaccatctggtcaaaaagtcgccatcaagaagatcactcctttcgaccactcgatgttctgcttgcgaactttgcgtgagatgaagctgcttcgctattttaaccatgaaaacatcatctctatcctggatatccaaagaccacgcaactatgagagcttcaacgaggtttatctaatccaggagctgatggagactgacatgcaccgggtcattcgtacccaagatctttcggatgatcactgtcaatattttatttaccagactctacgtgccctcaaagctatgcactcggccaatgttcttcatcgtgatctgaaaccttcgaacctgctcctcaacgcaaattgcgatctgaaagtttgcgattttggcttggcccgctcggccgcctccacagatgataactcagggttcatgacagaatatgtggcgaccagatggtaccgtgcgccggagattatgttgacattcaaggagtacaccaaagcgattgatgtgtggagtgttggttgtattctcgccgagatgctgagcggaaaacccttattccccggaaaggactatcatcaccaattgactcttattttggacgttcttggtacaccgacaatggaggactactatggaatcaaatcccgacgggctcgggaatacattcggtctctccctttcaaaaagaagatccccttcaaggcgctcttcccgaaggccaacgatttggccctggacctcctggagaggctcttggcattcaaccccgctaagcgtattactgtggaagaagctttgcgtcatccatacctggagccgtatcatgaccccgaagatgagcccacggcacctcccatcccggaagggttcttcgactttgacaagaataaggatgcccttagcaaggagcagttaaagattctaatctacgaggagatcatgcggtga

SEQ ID NO: 140189 - protein, 354 aa, Aspergillus oryzae
MVQQLPPQGGSRKISFNVSDQYEIQDVIGEGAYGVVCSAIHKPSGQKVAIKKITPFDHSMFCLRTLREMKLLRYFNHENIISILDIQRPRNYESFNEVYLIQELMETDMHRVIRTQDLSDDHCQYFIYQTLRALKAMHSANVLHRDLKPSNLLLNANCDLKVCDFGLARSAASTDDNSGFMTEYVATRWYRAPEIMLTFKEYTKAIDVWSVGCILAEMLSGKPLFPGKDYHHQLTLILDVLGTPTMEDYYGIKSRRAREYIRSLPFKKKIPFKALFPKANDLALDLLERLLAFNPAKRITVEEALRHPYLEPYHDPEDEPTAPPIPEGFFDFDKNKDALSKEQLKILIYEEIMR

SEQ ID NO: 140190 - DNA, 1065 bp, Bipolaris oryzae
  CDS (1)..(1065)
atggcggaattcgtacgcgcccagatttttggcaccactttcgagattaccagcagatacaccgatctgcagctcgtcggcatgggcgcattcggtctcgtttgctcagcaaaagaccagctcaccaaccaggcggtagctgtgaagaagatcatgaagcccttcagcactccagttctgtccaagcggacatatcgagaactgaagcttttgaagcaccttcgacacgaaaatatcatcagtttgagcgatatcttcatctctcctctcgaggacatctacttcgtcaccgagctcctcggcaccgatcttcaccgtctgcttacctcgaggccgcttgagaagcaatttatccaatactttctctatcagattttgcgtggattgaaatacgtccactccgctggtgtggtgcaccgcgatctcaagcccagcaacatcctcgtcaatgagaactgcgatctcaagatttgcgacttcggtctcgcccgtatacaagacccccaaatgacgggttacgtctcgacgcgatactaccgagcacctgaaatcatgctcacgtggcaaaagtacgacgtggaggttgacatttggagcgcgggttgcatctttgccgaaatgcttgagggcaagcccctgttccctggaaaggaccacgtgaaccaattctccattatcacggagcttttgggcactcccccagatgatgttattcagaccatctgcagtgaaaacacactgcgattcgttcaatcgcttcccaagcgcgagaggcaaccattggccaacaagttcaagaacgctgagcctgatgcggttgatcttctagaaaacatgctggtttttgacccaaggaagcgcgtacgagcagagcaggctctcgctcacgcataccttgcaccataccacgacccgaccgatgagccggtagccgacgagaaattcgattggtcgttcaacgacgcagacttgccagtcgacacctggaagatcatgatgtactcggagatcctcgattaccacaacgttgatgcggcagtccaggagcaggagaacggcagctaa

SEQ ID NO: 140191 - protein, 354 aa, Bipolaris oryzae
MAEFVRAQIFGTTFEITSRYTDLQLVGMGAFGLVCSAKDQLTNQAVAVKKIMKPFSTPVLSKRTYRELKLLKHLRHENIISLSDIFISPLEDIYFVTELLGTDLHRLLTSRPLEKQFIQYFLYQILRGLKYVHSAGVVHRDLKPSNILVNENCDLKICDFGLARIQDPQMTGYVSTRYYRAPEIMLTWQKYDVEVDIWSAGCIFAEMLEGKPLFPGKDHVNQFSIITELLGTPPDDVIQTICSENTLRFVQSLPKRERQPLANKFKNAEPDAVDLLENMLVFDPRKRVRAEQALAHAYLAPYHDPTDEPVADEKFDWSFNDADLPVDTWKIMMYSEILDYHNVDAAVQEQENGS

SEQ ID NO: 140192 - DNA, 1242 bp, Trichoderma harzianum
  CDS (1)..(1242)
atggcggacctccaaggacgaaaggtattcaaggtcttcaaccaggactttgtcgttgacgaacgatataccgtcactaaggagctgggtcagggagcctacggcattgtctgcgccgcggtaaacaaccagacgaacgagggcgtggctatcaagaaggtcaccaatgtcttcagcaagaagatcctcgccaagcgcgctctgcgcgagatcaagctgctgcagcacttccgcggccaccgcaatatcacatgcctgtatgatatggacattcctaggcccgataactttaacgagacatacttgtacgaagaactgatggagtgcgacttggcggctatcatccgttccggccagcctttgaccgacgcccacttccagtccttcatctaccagatcctgtgcggtctcaagtatatccattccgccaacgtcctccaccgagatttgaagcccggcaacttgcttgtcaacgcagactgcgagctgaagatttgcgatttcgggcttgcccgtggcttctctgtcgaccccgaggagaacgctggatacatgaccgagtacgttgccacgagatggtaccgtgcgcccgagatcatgctgagcttccagagctacactaaagctattgacgtttggtctgtcggttgtattcttgctgagctcctgggcggccgaccattctttaagggccgcgactacgtcgaccagcttaaccagattctgcacattctcggaacccctaatgaggagacgctccgccgcataggatcccctcgtgcccaggaatacgtccgcaacctgccgtttatgcccaagaagcctttcccagctctgttccccgacgccaaccccgacgccctcgacctcctcgacaagatgcttgcctttgacccttcacagcgtatcagcgttgagcaggcgcttgagcacccatacctccacatctggcatgatgcttctgatgagcccgactgccccacgacgttcaactttgactttgaagtcgtcgaggatgtgggagaaatgcgaaagatgattctggacgaggtactgcgcttccgacagctggtccgcactgctcctgcttctggcaaccagggcgcggcccagcagatacaagttccgatgccgtcggccggtggccaatggactgccgaggacccgcgaccacaagaatatatgggacaccctaacggactcgagcaggatctccaggcgggcatggacatcaggaggtaa

SEQ ID NO: 140193 - protein, 413 aa, Trichoderma harzianum
MADLQGRKVFKVFNQDFVVDERYTVTKELGQGAYGIVCAAVNNQTNEGVAIKKVTNVFSKKILAKRALREIKLLQHFRGHRNITCLYDMDIPRPDNFNETYLYEELMECDLAAIIRSGQPLTDAHFQSFIYQILCGLKYIHSANVLHRDLKPGNLLVNADCELKICDFGLARGFSVDPEENAGYMTEYVATRWYRAPEIMLSFQSYTKAIDVWSVGCILAELLGGRPFFKGRDYVDQLNQILHILGTPNEETLRRIGSPRAQEYVRNLPFMPKKPFPALFPDANPDALDLLDKMLAFDPSQRISVEQALEHPYLHIWHDASDEPDCPTTFNFDFEVVEDVGEMRKMILDEVLRFRQLVRTAPASGNQGAAQQIQVPMPSAGGQWTAEDPRPQEYMGHPNGLEQDLQAGMDIRR

SEQ ID NO: 140194 - DNA, 1071 bp, Trichoderma harzianum
  CDS (1)..(1071)
atgtctcggtcgaacccccccaacaatgcgtcggcatcacgcaaaatctccttcaacgtcagcgagcagtatgacattcaggatgtcgttggcgagggagcctacggagttgtttgctctgccattcacaagccgtccgggcaaaaggtggccatcaagaagattacccccttcgaccactccatgttctgtctgagaactctgcgagagatgaagctgctgcgctacttcaaccacgaaaacatcatctccatccttgatatccagaagcctcgaagctatgatagcttcaacgaggtctaccttatccaggaactcatggagacggatatgcacagagtcattcgaacccaggacctctccgacgaccactgccagtactttatctaccagacgctgcgagcgctcaaggccatgcactcggcaaacgtcctgcaccgagatctcaagccatccaatctcttgctaaatgccaactgtgatctcaaggtctgcgatttcggtcttgcccgatccgctgcttcccaggaggataactctggattcatgaccgaatacgtcgccacgcgatggtatcgtgcccccgagatcatgttgacctttaaggagtataccaaggctattgacgtttggtctgttggctgcattctggctgagatgctcagcggaaagcctctgttccccggaaaggactaccaccaccagctgaccctgatcctggatgtactcggcacaccgaccatggaggattactacggcatcaaatctcgacgagcaagagaatacatccgctcgctgcccttcaagaagaaggtgcctttccgcaccctcttccccaagacttctgacctggccctggacctcttggagaagctgctggcgttcaaccccgtcaagcgaatcacggtggaggatgctctcaagcacccctaccttgagccatatcacgaccctgaggatgagcccaccgcgcctccgatccccgaggagtttttcgatttcgacaagcacaaagataccctgagcaaggagcagctgaagcaactgatttaccaagaaattatgcggtaa

SEQ ID NO: 140195 - protein, 356 aa, Trichoderma harzianum
MSRSNPPNNASASRKISFNVSEQYDIQDVVGEGAYGVVCSAIHKPSGQKVAIKKITPFDHSMFCLRTLREMKLLRYFNHENIISILDIQKPRSYDSFNEVYLIQELMETDMHRVIRTQDLSDDHCQYFIYQTLRALKAMHSANVLHRDLKPSNLLLNANCDLKVCDFGLARSAASQEDNSGFMTEYVATRWYRAPEIMLTFKEYTKAIDVWSVGCILAEMLSGKPLFPGKDYHHQLTLILDVLGTPTMEDYYGIKSRRAREYIRSLPFKKKVPFRTLFPKTSDLALDLLEKLLAFNPVKRITVEDALKHPYLEPYHDPEDEPTAPPIPEEFFDFDKHKDTLSKEQLKQLIYQEIMR

SEQ ID NO: 140196 - DNA, 1520 bp, Avena sativa
  CDS (170)..(1279)
gcattagcagctcagccagccgcctttttctatttataattccagcctcctccccctacaagaatcgacagccagaactcgaaaagtcaatcagctactgcgtgtctgtgatcgagccgattcgagcggagagacagggggagcagttgattgattgcgcgagaggagaatggacggcgctccggtggccgagttccggccgaccatgacgcacggcggcaggttcctcctctacaacatattcgggaaccagttcgagatcacctccaagtaccagccgcccatcatgcccatcggacgaggagcatacgggatcgtctgctcggtgatgaacttcgagacgagggagatggtggccatcaagaagatcgccaacgccttcgacaacaacatggacgccaagcgcacgctccgggagatcaagctcctcaggcacctcgaccacgagaacattgttggcctcagagatgtgatcccgccgtccatcccgcagtcgttcaacgatgtgtacatcgccaccgagctcatggacacggacctccaccacatcatccgctccaaccaagaactctcggaagaacactgtcagtacttcctgtaccagctgctccgcgggctcaagtacatccactcggcgaacgtgatccaccgcgacctgaagccgagcaacctgctgctgaacgccaactgcgacctcaagatctgcgacttcggcctggcgcggccgtcgtcggagagcgacatgatgacggagtacgtggtcacgcgctggtaccgcgcgccggagctgctgctcaactccaccgactactccgccgccatcgacgtctggtccgtgggctgcatcttcatggagctcatcaaccgggccccgctcttcccgggcagggaccacatgcaccagatgcggctcatcaccgaggtcatcgggacccccaccgacgacgacctggggttcatccgcaacgaggacgccaggaggtacatgaggcacctgccgcagttcccgcgccgcccattcccggggcagttccccaaggtgcagcccgccgcgctggacctcatcgagaggatgctcaccttcaacccgctgcagcggatcacagttgaggaggcgctggagcacccgtacctggagcggctgcacgacgtcgccgacgagcccatctgcacggaccccttctccttcgacttcgagcagcacccgctcactgaagaccagatgaagcagctcatcttcaacgaagccctggaactgaaccccaatttccgatactagatgatccatcctagttccctaccccccccccccccccccccaagtagtatgcttttcagtgtgtgtaaaccggtctgtaaataggagtaaggtcaaggagcccgcgggtagactgagcgctgcatttctttgtttctttcgtgtgagtcgttgctgctatttcagacgattgtgctcggctgtgcgaataagaaggctttggagtatgatgatttgggaccaaaaaaaaaaaaaaaaaaaa

SEQ ID NO: 140197 - protein, 369 aa, Avena sativa
MDGAPVAEFRPTMTHGGRFLLYNIFGNQFEITSKYQPPIMPIGRGAYGIVCSVMNFETREMVAIKKIANAFDNNMDAKRTLREIKLLRHLDHENIVGLRDVIPPSIPQSFNDVYIATELMDTDLHHIIRSNQELSEEHCQYFLYQLLRGLKYIHSANVIHRDLKPSNLLLNANCDLKICDFGLARPSSESDMMTEYVVTRWYRAPELLLNSTDYSAAIDVWSVGCIFMELINRAPLFPGRDHMHQMRLITEVIGTPTDDDLGFIRNEDARRYMRHLPQFPRRPFPGQFPKVQPAALDLIERMLTFNPLQRITVEEALEHPYLERLHDVADEPICTDPFSFDFEQHPLTEDQMKQLIFNEALELNPNFRY

SEQ ID NO: 140198 - DNA, 1113 bp, Saccharum officinarum
  CDS (1)..(1113)
atggacggagctccggtcgccgagttccggccgacggtgacgcacggcggccggttcctgcagtacaacatcttcggcaacctgttcgagatcacgcacaagtaccagcctcccatcatgcccatcggccgcggcgcctacgggatcgtctgctcggtgatgaactttgagacgagggagatggtggccatcaagaagatcgccaacgccttcgacaaccacatggacgccaagcgcacgctccgggagatcaagctgctgaggcacctcgaccacgagaacatcataggcatcagggacgtgatcccgccgccgatcccgcaggcgttcaacgacgtgtacatcggcacggagctcatggacacggacctccaccacatcatccgctccaaccaggagctctcggaggagcactgccagtacttcctgtaccagatccttcgcgggctcaagtacatccactccgccaacgtgatccaccgcgacctcaagcccagcaacctgctgctgaacgccaactgcgacctcaagatctgcgacttcgggctggcgcgcccctcctccgagagcgacatgatgacggagtacgtggtaacccggtggtaccgcgcgcccgagctgctgctcaactccaccgactactccgccgccatcgacgtctggtccgttggctgcatcttcatggagctcatcaaccgccagccgctcttccccggacgcgaccacatgcaccagatgcgcctcatcaccgaggtgatcgggacgccgacggacgatgagctcgggttcatccggaacgaggacgcgcggaagtacatgcgccacctcccgcagttcccgcggcggccgttcgcgagcctgttcccgaaggtgcagtccgtcgcggcgctggacctcatcgagcggatgctaaccttcaacccgctgcagaggatcacagttgaagaggcgctggagcacccgtacctggagcggttacacgacatcgccgacgagcccatctgcacggagccattctcgttcgacttcgagcagcaggctctgacagaagaccaaatgaagcagctgatattcaacgaggccatcgaaatgaaccccaatttccgatattag

SEQ ID NO: 140199 - protein, 370 aa, Saccharum officinarum
MDGAPVAEFRPTVTHGGRFLQYNIFGNLFEITHKYQPPIMPIGRGAYGIVCSVMNFETREMVAIKKIANAFDNHMDAKRTLREIKLLRHLDHENIIGIRDVIPPPIPQAFNDVYIGTELMDTDLHHIIRSNQELSEEHCQYFLYQILRGLKYIHSANVIHRDLKPSNLLLNANCDLKICDFGLARPSSESDMMTEYVVTRWYRAPELLLNSTDYSAAIDVWSVGCIFMELINRQPLFPGRDHMHQMRLITEVIGTPTDDELGFIRNEDARKYMRHLPQFPRRPFASLFPKVQSVAALDLIERMLTFNPLQRITVEEALEHPYLERLHDIADEPICTEPFSFDFEQQALTEDQMKQLIFNEAIEMNPNFRY

SEQ ID NO: 140200 - DNA, 1068 bp, Cochliobolus heterostrophus
  CDS (1)..(1068)
atggcggaattcgtacgcgcccagatttttggcaccactttcgagattaccagcagatacaccgatctgcagcccgtcggcatgggcgcattcggtctcgtttgctcagcaaaggaccagcttaccaaccaggcggtggctgttaagaagatcatgaagcccttcagcactccagttctgtccaagcggacataccgagaactgaagctcttgaagcaccttcggcacgaaaatatcatcagcttgagcgacatcttcatctctcctctcgaggacatctacttcgtcaccgaactcctcggcaccgatctccaccgtctgctcacctcgaggccgctcgagaagcaattcatccaatactttctctatcagattttgcgtggattgaaatacgtccactcggctggtgttgtgcaccgcgatctcaagcccagcaacattctcgtcaacgagaactgcgatctcaagatttgcgacttcggtctcgcccgtatacaagacccccagatgacgggttacgtctcgacgcgatactaccgagcacctgaaatcatgctcacgtggcaaaagtacgatgtggaggttgacatttggagcgcgggatgcatctttgctgagatgctcgagggcaagcccctgttccccggaaaggaccatgtgaaccaattctccatcatcacggagcttttgggcactcccccagatgatgttatccagaccatttgcagtgaaaacacactgcggttcgttcaatcgcttccgaagcgcgagaggcagccattggccaacaagttcaagaacgctgagcctgacgcggttgatcttctagaaaacatgctggtttttgacccgaggaagcgcgtacgagcagagcaggctctcgctcacccataccttgcgccataccacgacccgaccgatgagccggtagccgacgagaaattcgattggtcgttcaatgacgcggacttgccagtcgacacctggaagatcatgatgtactcggagatcctcgattaccacaacgttgatgcggcagtaccggagcaggagaacaacggcagctaa

SEQ ID NO: 140201 - protein, 355 aa, Cochliobolus heterostrophus
MAEFVRAQIFGTTFEITSRYTDLQPVGMGAFGLVCSAKDQLTNQAVAVKKIMKPFSTPVLSKRTYRELKLLKHLRHENIISLSDIFISPLEDIYFVTELLGTDLHRLLTSRPLEKQFIQYFLYQILRGLKYVHSAGVVHRDLKPSNILVNENCDLKICDFGLARIQDPQMTGYVSTRYYRAPEIMLTWQKYDVEVDIWSAGCIFAEMLEGKPLFPGKDHVNQFSIITELLGTPPDDVIQTICSENTLRFVQSLPKRERQPLANKFKNAEPDAVDLLENMLVFDPRKRVRAEQALAHPYLAPYHDPTDEPVADEKFDWSFNDADLPVDTWKIMMYSEILDYHNVDAAVPEQENNGS

SEQ ID NO: 140202 - DNA, 1068 bp, Alternaria brassicicola
  CDS (1)..(1068)
atggcggaattcgtacgcgcccagattttcggcaccactttcgagattaccagcaggtacaccgacctgcagcccgtgggcatgggcgcctttggtctcgtctgttcagccaaggaccagcttactagccaggccgtggccatcaagaagattatgaagcccttcagcactccggtcctgtcaaagcggacataccgagagctgaagctcctgaagcatcttcgacacgagaatattatcagcctgagcgacatcttcatctctcccctcgaggacatctacttcgtcaccgagctcctcgggaccgatcttcaccgcctactgacctccagaccgctggagaagcagttcatccaatacttcctttaccagattttgcgtggtctgaaatacgtccactccgctggtgtcgtgcaccgcgacctgaagcccagcaacatcctcgtcaacgagaactgcgatctcaaaatttgcgacttcggtctcgcccgtatacaggaccctcagatgacgggttacgtctctacccgatactaccgagcccccgagatcatgctcacatggcaaaagtacgacgtcgaggttgatatctggagtgcaggatgcatcttcgccgagatgcttgagggcaagccgctcttccctggcaaggaccacgtgaaccaattctccatcattacggagcttctgggtacccctccagatgacgttatccagaccatctgcagcgagaataccctgcgattcgtccagtcacttcccaagcgcgaacgacaacccttgtccaacaagttcaagaacgccgagccacaagccgtcgatcttctagagaacatgctggtctttgaccccaagaagcgtgtacgagcggagcaggctctcgctcacccatacctcgccccataccacgaccctactgatgagccgatcgcggaggagaagtttgactggtcgttcaacgacgcagacctgcctgttgacacgtggaaaatcatgatgtactctgagatcctggactaccacaatgttgatgcagcggcacaggagcaagagaacaacggcagctaa

SEQ ID NO: 140203 - protein, 355 aa, Alternaria brassicicola
MAEFVRAQIFGTTFEITSRYTDLQPVGMGAFGLVCSAKDQLTSQAVAIKKIMKPFSTPVLSKRTYRELKLLKHLRHENIISLSDIFISPLEDIYFVTELLGTDLHRLLTSRPLEKQFIQYFLYQILRGLKYVHSAGVVHRDLKPSNILVNENCDLKICDFGLARIQDPQMTGYVSTRYYRAPEIMLTWQKYDVEVDIWSAGCIFAEMLEGKPLFPGKDHVNQFSIITELLGTPPDDVIQTICSENTLRFVQSLPKRERQPLSNKFKNAEPQAVDLLENMLVFDPKKRVRAEQALAHPYLAPYHDPTDEPIAEEKFDWSFNDADLPVDTWKIMMYSEILDYHNVDAAAQEQENNGS

SEQ ID NO: 140204 - DNA, 2424 bp, Cryptococcus neoformans
  CDS (1)..(2424)
atgacgagcccttcagctcaaccaatgatcccacgttcccaacctcctaggccatctcacacccagtcctcaccagccatcaattcgacaggcataaaacctaatggttcgccttctgtcatcagacgggctccaagtgttcctgtcaacccaagtactgctgcagcgtcaggaagtttgtcttctcttttgaagagcgaaaatactgcacaagctgtctcacgatcgtctcctccaacagagccgaatgatcttcccagacccattgagccaacacccatgcttcctataacgggtctacccaattcttcctcgtcatcgtccaacgccagacacggttcttcttcttccatttctcggggaccttcagtgactggaaccctaacacctgcgacaacggcccttggcgcgcctatagaaccgactccaccgcagacgggagcgagcaagatggctgcagctgcaaagagaggattggatggatctgctgggaataacgtaaaagtgtacgaagagggtcatccgctgaatgaagagactctcaaacagaggggctaccagacgctcaatattcttaatcaccctttccacctgcctgaccgctggaagcttcttcgaccattaggccaaggtgcctacggtctagtcatccaagtacaagatgccgagacggaaattcctatcgctgtcaagtgtgtgaccagggtgtttgacaaggttattttggcgagaagagcgttgagagagattacgttgctgagacattttggagaacatgataatctgacagggttggtggatatggataacgtctgggatgggtataatgaaatttacctatacatggagcccatggaagcagatcttcatcagatcatccgctccggtcagcccctcgggaatgcgcatatccagttctttatctatcaactcttacgaggcatgaaatacatccactccgccaacgtcatccatcgtgatctcaaacctggcaacttgctcgtaaactcgggttgcgaattgaaaatctgcgattttgggttggccagagggttcaatcccgttaggggcgaggaacctcagggagaggaaggaaaattgacagaatatgtcgcgacgagatggtatagagcaccagagatcatgttgtccaaccgaagatacaccacagctatcgacgtctggtcgatagggtgtatactagccgagttgctggggttaaaacccgtgttcaaggggaaagactatatcgaacaaatgaccctcattcttgaaacacttgggacaccagatgaggagactatggcccgggtggccagtgaaaaggctcttactttcttgaagactttgccaacttatgagaagaaagatctggggagtatattccccgatgccgatcctctagccgtcgacttgaccgataagttattggagtttgatcccacccgtcgaattgacgttccgtcggctttaacacatgcttatgtcgagagataccatgatccggaagacgaaccttcttgcgataagatctttgacaaatgggaggaagtcgaatcgctcagcacgattgaggagttgaaagaggcgatcacgagggagattcaggggttcagagaagaggttcgaatggccgcggaagaggacgatgaagacgaagagtgggctgaaggggagtacttggacgatgaaaacgttttccacgatagtcctgggcccgctttggcatccactctcgagaaattcacctatcctgaccatattgcccccagttcgtctattctcccctcagctgctcgacttgctcctataattcaccaatcccccaaaggcagcaaatccccacacgtcaaatcagctcacttgccctctgtgccttcctccgcaaacagctccaaacccagctccacagcgggctccgctcctcgtacacgcgagcactctccgactacgacttttatcacccccgcagaagattactttacggcacagcatgggtttggagggccaaacggacgtgcgtcgaggcgttcaagtagtcactcaacgtctgggcgacgacctgcgagctttttgttttcaccatttggtgcgggtatgacccaaatcgtccctacacccaacgcatacccccgttcacatgcccaagcttctcctgaacttacaacagccgagaaaacaccccgtgacagacgatcaagcggtctttggcgcacccgctccagagcccaaagccagtctggtaatcttgtcctcgagcgtctcagtagcctcgaaattaatgaccataaagatggagaaaagaataggatcgacgcgctgcatgcggtagtggggttgggtggagatggcgaagtaccaccgatgacggtgtcgccaagtgatgcaccccctagtgaggtgccaaagagcttcggatattag

SEQ ID NO: 140205 - protein, 807 aa, Cryptococcus neoformans
MTSPSAQPMIPRSQPPRPSHTQSSPAINSTGIKPNGSPSVIRRAPSVPVNPSTAAASGSLSSLLKSENTAQAVSRSSPPTEPNDLPRPIEPTPMLPITGLPNSSSSSSNARHGSSSSISRGPSVTGTLTPATTALGAPIEPTPPQTGASKMAAAAKRGLDGSAGNNVKVYEEGHPLNEETLKQRGYQTLNILNHPFHLPDRWKLLRPLGQGAYGLVIQVQDAETEIPIAVKCVTRVFDKVILARRALREITLLRHFGEHDNLTGLVDMDNVWDGYNEIYLYMEPMEADLHQIIRSGQPLGNAHIQFFIYQLLRGMKYIHSANVIHRDLKPGNLLVNSGCELKICDFGLARGFNPVRGEEPQGEEGKLTEYVATRWYRAPEIMLSNRRYTTAIDVWSIGCILAELLGLKPVFKGKDYIEQMTLILETLGTPDEETMARVASEKALTFLKTLPTYEKKDLGSIFPDADPLAVDLTDKLLEFDPTRRIDVPSALTHAYVERYHDPEDEPSCDKIFDKWEEVESLSTIEELKEAITREIQGFREEVRMAAEEDDEDEEWAEGEYLDDENVFHDSPGPALASTLEKFTYPDHIAPSSSILPSAARLAPIIHQSPKGSKSPHVKSAHLPSVPSSANSSKPSSTAGSAPRTREHSPTTTFITPAEDYFTAQHGFGGPNGRASRRSSSHSTSGRRPASFLFSPFGAGMTQIVPTPNAYPRSHAQASPELTTAEKTPRDRRSSGLWRTRSRAQSQSGNLVLERLSSLEINDHKDGEKNRIDALHAVVGLGGDGEVPPMTVSPSDAPPSEVPKSFGY

SEQ ID NO: 140206 - DNA, 1206 bp, Cryptococcus neoformans
  CDS (1)..(1206)
atgtcaacgtctactcgccgccatgtcccagacgacaagctcgccaatcacaaagctgaccccaacgcagctgcaaacgctggccaggtgcaggagcgtacgaccaagggttcttcttcctccgcccctcgcaaagtcaggttcaacgtcggcaacaactaccatgtagtcgatgtcattggcgaaggcgcctatggggtagtcgcttccgccgtccaccgcccatcaggtaccaaagtagctatcaagaagattgccccgtttgatcattcaatgtttgcgttgagaacattgagagagttgaagttgttgaagtactttgcggaggaaggtgttagtgagaatattatctcagtgctggatatcatcaaaccaccttcttacgatacttttaaagaagtctacctcgtccaagaacttctcgaaacagatcttcatcgcgtgatccgaacccaagacctgagcgacgaccattgtcaatatttcttataccaaacatgtagagctttgaaggctttgcattctgctgaaatcatccatcgagacttgaaaccatccaacctcttgctcaatgccaattgtgatctcaaagtatgcgatttcggactcgcacggtcgacacaaaccgccttcccggcggagggcaataaccagggattcatgacggagtatgtcgcaacaaggtggtatagagcaccagaagttatgctttcgtttagaatgtacaccaagtcaattgacgtatggtcagtggggtgtatactcgcagagatgttgagtggaaaaccccttttcccggggaaagattaccacaaccaactagctctcatccttgatgtgttgggtacacctactattgatgaatttcatgccatcacttcaaagaggtcaaaagattatatccgatcgttgccattccgaaagaagaggacgttcgaaagtatttacccgagcgcgaacccgctcgctatcgatttcttgagaaagacacttactttcgatccccgcaaacggtacacagtcgaacaatgtctcgcccacccttacctcgacgcctaccacgacccggaagacgaaccgtccgcgaaaccgctcccaccctcgttctttgagtttgatatgatgaaagatgatatttcgagggaagagttgaagaggctgttgtacgaggagattatggggtttcgtccggttttggaggggtag

SEQ ID NO: 140207 - protein, 401 aa, Cryptococcus neoformans
MSTSTRRHVPDDKLANHKADPNAAANAGQVQERTTKGSSSSAPRKVRFNVGNNYHVVDVIGEGAYGVVASAVHRPSGTKVAIKKIAPFDHSMFALRTLRELKLLKYFAEEGVSENIISVLDIIKPPSYDTFKEVYLVQELLETDLHRVIRTQDLSDDHCQYFLYQTCRALKALHSAEIIHRDLKPSNLLLNANCDLKVCDFGLARSTQTAFPAEGNNQGFMTEYVATRWYRAPEVMLSFRMYTKSIDVWSVGCILAEMLSGKPLFPGKDYHNQLALILDVLGTPTIDEFHAITSKRSKDYIRSLPFRKKRTFESIYPSANPLAIDFLRKTLTFDPRKRYTVEQCLAHPYLDAYHDPEDEPSAKPLPPSFFEFDMMKDDISREELKRLLYEEIMGFRPVLEG

SEQ ID NO: 140208 - DNA, 1464 bp, Brassica napus
  CDS (154)..(1266)
tcttctcatttcagtccctcatctaactgtaatataattatatatataaaggagtcacacaataccttcagattcactatacctcaaagcacaacaagtcaagcttgaagttgacttagcgcgtcatcgattgaaagagagagagagagagagatgaacaacgccggcggccaatatccagattttccggcggtgcagacgcacggaggacagttcataagctacgatatcttcggtagtttattcgaggtcacatccaagtaccgtcctccgattgttccaatcggtcggggcgcatacggcatcgtttgctctgtgttggattcggagacgaacgagcttgtggcgatgaagaagatagccaacgcctttgataatcacatggacgccaagcgtacacttcgcgagatcaagcttcttcgtcatctcgatcatgaaaacatcatagctataagagatgtggttcctccaccacttagaagagagttcagtgatgtttatatcgccactgagttaatggacactgatcttcatcaaatcatcagatccaaccagggcttgtctgaggaacactgtcagtacttcctgtaccagcttcttcgagggctcaagtacatccactcggctaaagttatccacagggatctaaagcctagcaatcttctcctgaacgccaactgcgatttaaagatctgtgattttggtcttgctagacccacttcagagaacgagtttatgactgagtatgttgttaccagatggtatagagcacctgagcttctgctcaactcatcggattacacagctgctatagatgtttggtctgttggttgtatctttatggagctcatgaacagaaagcctttgttccctggtaaagaccatgtccatcagatgcgcttattgacagagttgcttggcacgccgacagaatcagatctcgggtttacacacaacgaggatgccaaaagatacatccggcagcttcccaacttccctcgccaaccgttagctaaactgttctctcatgttaactcattggccattgatctagttgacagaatgttgacgtttgaccccaacgaaagaatcactgttgaagaagctctgaatcacccgtacctagccaagttgcacgacccgaatgatgagccaatctgtctaaagccattctctttcgactttgaacaacaacctctagacgaggaacagataaaagagatgatctacagggaagccattgcactcaatccaacatatgcttagaagagcagcaaccgaatgaatggctaaatatcctgccctctagcatctttgcttgttcttttattcatgtaccttttttccatgtgtaatcctatttgtttgtttaacattgtattactgctagtgagtgagtgcatgtagctctcatgtaaaagtactccagctacgaaatatttacttcacaaaaaaaaaaaaaaa

SEQ ID NO: 140209 - protein, 370 aa, Brassica napus; identical to SEQ ID NO: 63108

SEQ ID NO: 140210 - DNA, 1186 bp, Glycine max
  CDS (10)..(1185)
tcgagaataatggaaggtggaggagctgctccgccggccgacaccgtgatgtccgacgcggcgcctccgccgcagcaagcgatggctatggggatcgagaatattccggcgacgctgagccacggtggcaggttcatccaatacaacatattcggaaacatattcgaagtcaccgccaaatacaagccacccatcatgcccatcggaaaaggcgcatacggcatcgtttgctcggctttgaactcggagacgaatgagcacgttgccatcaagaagattgcgaatgcgtttgataacaagattgatgcaaagaggaccctccgtgaaatcaagctgcttcgtcacatggatcatgaaaacgtggttgcaatcagggatatagtgccaccacctcaaagggagatattcaatgatgtttacattgcatatgagttgatggacactgaccttcaccaaattattcgttcaaaccaaggattatcagaggagcactgtcagtattttctgtatcaaatcctccgtgggttgaagtacatacattctgccaatgttctgcatagggacttaaaacctagcaaccttctcctgaatgccaactgtgacttaaaaatttgtgattttggactggctcgtgtcacgtctgaaactgattttatgactgaatatgttgttacaagatggtaccgtgcaccagagcttctgttgaactcttctgattacactgcagcaattgatgtatggtctgttggttgtattttcatggaactgatggatcgcaagcctttgtttcctggcagagatcatgtgcatcagttgcgtctacttatggagctgattggcaccccatcagaggctgatttggggttcctgaatgaaaatgctaagagatacattaggcaactacccctttaccgccgtcaatctttccaggaaaagtttccacatgtccatcctgaagctatagatcttgttgaaaaaatgttaacttttgatcctagaaaaaggattactgttgaagatgcactggcgcacccgtacttgacatctctgcatgacatcagtgatgaaccagtgtgcatgactcccttcaactttgactttgaacaacatgctttgacggaggaacagatgaaagaactgatataccgagaggctctagcatttaaccctgagtatcagcagtaga

SEQ ID NO: 140211 - protein, 391 aa, Glycine max
MEGGGAAPPADTVMSDAAPPPQQAMAMGIENIPATLSHGGRFIQYNIFGNIFEVTAKYKPPIMPIGKGAYGIVCSALNSETNEHVAIKKIANAFDNKIDAKRTLREIKLLRHMDHENVVAIRDIVPPPQREIFNDVYIAYELMDTDLHQIIRSNQGLSEEHCQYFLYQILRGLKYIHSANVLHRDLKPSNLLLNANCDLKICDFGLARVTSETDFMTEYVVTRWYRAPELLLNSSDYTAAIDVWSVGCIFMELMDRKPLFPGRDHVHQLRLLMELIGTPSEADLGFLNENAKRYIRQLPLYRRQSFQEKFPHVHPEAIDLVEKMLTFDPRKRITVEDALAHPYLTSLHDISDEPVCMTPFNFDFEQHALTEEQMKELIYREALAFNPEYQQ

SEQ ID NO: 140212 - DNA, 1068 bp, Trichoderma asperellum
  CDS (1)..(1068)
atgtctcggtcgaacgcccccaatgcgtcagcgtcgcgcaagatctcgttcaatgtcagcgagcagtatgacattcaggacgttgtcggtgaaggagcctacggtgttgtttgctctgccattcacaagccgtcgggacagaaggttgccatcaagaaaatcacccccttcgaccactccatgttctgtctgagaaccctgcgagagatgaagctgctgcgctatttcaaccacgaaaacatcatctccatccttgacatccagaagcctcgaagctatgacagctttaacgaggtctacctcattcaggagctcatggagacagatatgcacagagttatccgtacccaggatctatccgacgaccactgccagtactttatttaccagacgctgcgtgctctcaaggccatgcactcggccaacgttcttcaccgagatctcaagccctccaacctgctgttaaatgccaactgcgatctgaaagtctgcgatttcggtctggccagatctgccgcctcccaggaagataactcgggtttcatgacggaatatgtcgccacgcgatggtaccgcgcacccgagattatgttgacctttaaggagtacaccaaggctattgatgtttggtctgttggctgcatcctggctgagatgctcagcggcaagcctctgttccctggcaaagattaccaccaccagctgactctgattctggatgtgctcggtacaccaaccatggaggattactacggcatcaagtctcgacgagcacgagagtacatccgctctctgcctttcaagaagaaggtgccattccgcaccctgttccccaagacgtccgatctggcactcgacctcctggagaagctgcttgcattcaaccctgtgaagcggatcactgtggaggatgctctcaagcacccataccttgagccttaccacgaccctgatgacgagcccactgcgcccccgatcccggaggaatttttcgatttcgacaagcacaaagataccctgagcaaggagcaactgaagcagctgatttaccaagagattatgcggtaa

SEQ ID NO: 140213 - protein, 355 aa, Trichoderma asperellum
MSRSNAPNASASRKISFNVSEQYDIQDVVGEGAYGVVCSAIHKPSGQKVAIKKITPFDHSMFCLRTLREMKLLRYFNHENIISILDIQKPRSYDSFNEVYLIQELMETDMHRVIRTQDLSDDHCQYFIYQTLRALKAMHSANVLHRDLKPSNLLLNANCDLKVCDFGLARSAASQEDNSGFMTEYVATRWYRAPEIMLTFKEYTKAIDVWSVGCILAEMLSGKPLFPGKDYHHQLTLILDVLGTPTMEDYYGIKSRRAREYIRSLPFKKKVPFRTLFPKTSDLALDLLEKLLAFNPVKRITVEDALKHPYLEPYHDPDDEPTAPPIPEEFFDFDKHKDTLSKEQLKQLIYQEIMR

SEQ ID NO: 140214 - DNA, 1251 bp, Alternaria brassicicola
  CDS (1)..(1251)
atgggcgacctcgccaaccgtaaagtgttcaaggtgttcaaccaagagttcatcgtcgacgagcgctacaatgtgaccaaggagctgggacagggtgcctatggcatcgtttgtgcggctaccaacaaccagacaggcgaaggcgtcgccatcaagaaggtcaccaacgtcttcagcaagaagatccttgcgaagcgcgccctgcgcgagatcaagctgctccagcacttccgaggccaccgcaacattacatgtctctacgacatggacattccccgcccggacaacttcaacgagtgctacctctatgaggagctcatggagtgcgacctggcagccatcatccgctctggccagccgcttaccgatgctcacttccagtccttcatctaccagattctgtgcggcttgaagtacatccattccgcaaacgtccttcatcgcgatctgaaacctggcaacctcctcgtcaacgccgactgcgagctcaagatttgcgacttcggtctcgcaagaggattctccatggatcctgaggagaacgcaggttacatgactgaatatgtcgctacccgatggtacagagctcctgagattatgttgagtttccagagctacacgaaagctatcgatgtatggtcagtaggctgcatcctcgctgagttactcggaggtaagccctttttcaagggccgcgactacgtcgaccaactgaaccaaattctgcactaccttggaacaccaaacgaagagacactctcgcgcatcggctcgcctcgtgcccaggactacgttcgcaacctaccgtacatgcagaagatctcgttccaatcgctattcaaaaacgccaacccggacgcgctcgatttgctcgaccgcatgctcgctttcgacccgtcaagccgtatttcagtcgaggaagctctagagcacaggtacctacaaatctggcacgatgcctccgacgagccttcctgcccaacgacattcgacttccaatttgaggttgttgaggagattccagagatgaagaagatgattctagacgaggtcagccgcttccgccagatggttcgtgtacaacccggtgcaggcgctggggcgaaccaggcgccgcaagtcccaatacccaacaactacgaccgtgccggctatgaagacccaaggccacaagaagcgttcaaccagggtggatggaacggcagcgacttggagcgtgaccttcagggccttgacggtcgtatgcgatga

SEQ ID NO: 140215 - protein, 416 aa, Alternaria brassicicola
MGDLANRKVFKVFNQEFIVDERYNVTKELGQGAYGIVCAATNNQTGEGVAIKKVTNVFSKKILAKRALREIKLLQHFRGHRNITCLYDMDIPRPDNFNECYLYEELMECDLAAIIRSGQPLTDAHFQSFIYQILCGLKYIHSANVLHRDLKPGNLLVNADCELKICDFGLARGFSMDPEENAGYMTEYVATRWYRAPEIMLSFQSYTKAIDVWSVGCILAELLGGKPFFKGRDYVDQLNQILHYLGTPNEETLSRIGSPRAQDYVRNLPYMQKISFQSLFKNANPDALDLLDRMLAFDPSSRISVEEALEHRYLQIWHDASDEPSCPTTFDFQFEVVEEIPEMKKMILDEVSRFRQMVRVQPGAGAGANQAPQVPIPNNYDRAGYEDPRPQEAFNQGGWNGSDLERDLQGLDGRMR

SEQ ID NO: 140216 - DNA, 1242 bp, Podospora anserina
  CDS (1)..(1242)
atgggcgatctccagggccgtaaggtgttcaaggtgttcaaccaggacttcatcgtcgatgaaagatacaccgtgaccaaggagcttggtcagggcgcatacggcattgtctgtgccgcggtgaacaaccagaccaacgagggtgttgccatcaagaaggtcaccaatgtgttcagcaagaagattttggccaagcgcgccctgcgcgagatcaagctcctgcagcacttcaggggtcaccgaaatatcacctgcttgtatgatatggatattcccagaccagacagcttcaacgagacatatctttatgaggagttgatggagtgcgatcttgctgccatcattcgttccggccagcctcttaccgacgcccatttccagtctttcatttaccaaatcctctgcggtctgaaatacattcactcagccaacgttctccatcgcgatctcaagccaggaaacttgcttgtcaacgccgactgcgaactgaagatttgcgatttcggtctggcgcgtggcttctcggttgatcccgaggaaaatgccgggtacatgactgagtatgtcgcgacgagatggtaccgcgcgcccgaaatcatgttgagcttccagaattacaccaaagctattgacgtatggtctgttggctgcattctcgctgagctccttggcggtcgcccctttttcaagggtcgcgattacgtcgaccagctgaaccaaattctccacattcttggtacccctaatgaggaaactttgtctcgcatcggttcccctagggcccaggaatacgtgcggaatcttcctttcatggccaagaagtcattcccttcgctcttccctaatgccaacccggacgctctcgacctcttggaccgtatgcttgctttcgacccctctcgccgcatcagtgtcgaggaggccctcgaacacccctatcttgccatctggcacgacgctagtgacgagcccgactgcccaaccactttcaactttgacttcgaggtcatcgatgatgtcaatgaaatgcgcaagatgatcctcagcgaggttgtcaacttcagagcccaagtccgcactgtccctggccaggcgggctctgccggtaacatccaacaggcgccatcaaacgtccccattcctgcaggtggacccggccagcagtggacggccgaggacccaagaccgatggagtacggtaaccaaatgcagggtctcgaggctgagctcggaggcagatag

SEQ ID NO: 140217 - protein, 413 aa, Podospora anserina
MGDLQGRKVFKVFNQDFIVDERYTVTKELGQGAYGIVCAAVNNQTNEGVAIKKVTNVFSKKILAKRALREIKLLQHFRGHRNITCLYDMDIPRPDSFNETYLYEELMECDLAAIIRSGQPLTDAHFQSFIYQILCGLKYIHSANVLHRDLKPGNLLVNADCELKICDFGLARGFSVDPEENAGYMTEYVATRWYRAPEIMLSFQNYTKAIDVWSVGCILAELLGGRPFFKGRDYVDQLNQILHILGTPNEETLSRIGSPRAQEYVRNLPFMAKKSFPSLFPNANPDALDLLDRMLAFDPSRRISVEEALEHPYLAIWHDASDEPDCPTTFNFDFEVIDDVNEMRKMILSEVVNFRAQVRTVPGQAGSAGNIQQAPSNVPIPAGGPGQQWTAEDPRPMEYGNQMQGLEAELGGR

SEQ ID NO: 140218 - DNA, 1083 bp, Lytechinus variegatus
  CDS (1)..(1083)
atgtcttctaagagtgagacaaatccattgccgtcgggcttccatgttcttgagctgaataaaacgaaatgggaaatccctattcgctacgtgcgattggaacctgtgggctcgggagcgtacgggcaagtttgtggggcagatgataccaagcaaggaggaagagtagccatcaagaagctgtccagaccgttccaaacagtcatacatgccaaaaggacctacagagaattacgccttctcaaacatatgaaacatgaaaatgttatttgcctgctggactgttttacccctaatccttcttgtttagatgtgtacatggtaaccactctaatgggagcagatcttaacaacataatcaagtgtcagaaactcactaatgaacatgtccagttcctcatctatcaagttcttagaggtctcaagtatattcattctgcaggtgttattcatcgagatctaaagcctagtaatattgcagtcaatgaagactgtgaactcaagatcctggactttggattagcacgtagcacagatgaggaaatgacaggatacgttgctaccaggtggtatcgagcgcctgaaatcatgctcaattggatgcattatacagataaagttgacatctggtcagtaggatgtattatggcagagatcctcacaggaaagactcttttcccagggaatgatcacataaaccaactgaaccgtatagtcaaagttacagggattcaggagaccttcttacaaaagatcacaagtgatagtgcaaggcaatacttgatgacacttcctgcatacccagcatcggattttaaatccatctttacaggagctgatcctgcagcgattgaccttcttgagaagatgcttcaattagatgatgataaaaggttgagtgctgagcaggctcttcaacacccatatgttgctagatttcatgatccagaggatgaaccaactgcccctttatttgatgatagcctagagaacagtgatattgcaatagatgaatggaaacaacgtgtttataaagaaatagtagattttgtaccagaccaaggggattcatgtgtggaatga

SEQ ID NO: 140219 - protein, 360 aa, Lytechinus variegatus
MSSKSETNPLPSGFHVLELNKTKWEIPIRYVRLEPVGSGAYGQVCGADDTKQGGRVAIKKLSRPFQTVIHAKRTYRELRLLKHMKHENVICLLDCFTPNPSCLDVYMVTTLMGADLNNIIKCQKLTNEHVQFLIYQVLRGLKYIHSAGVIHRDLKPSNIAVNEDCELKILDFGLARSTDEEMTGYVATRWYRAPEIMLNWMHYTDKVDIWSVGCIMAEILTGKTLFPGNDHINQLNRIVKVTGIQETFLQKITSDSARQYLMTLPAYPASDFKSIFTGADPAAIDLLEKMLQLDDDKRLSAEQALQHPYVARFHDPEDEPTAPLFDDSLENSDIAIDEWKQRVYKEIVDFVPDQGDSCVE

SEQ ID NO: 140220 - DNA, 1242 bp, Trichoderma atroviride
  CDS (1)..(1242)
atggcggatctccaaggacgcaaagtattcaaggtcttcaaccaggactttgtagttgacgagcgctacaccgtcaccaaggagcttggccagggagcgtatggaattgtttgcgccgcggtcaacggacagaccaacgagggcgtcgccatcaaaaaggtcaccaatgtcttcagcaagaagatcctcgccaagcgcgccctgcgcgagatcaagctgctgcagcacttccgcggccatcgcaacatcacatgtctctatgatatggatataccgcgaccagacaacttcaacgagacatacctctacgaggaactgatggagtgcgacctggcggctattattcgttccggccagccacttacagatgcccacttccaatcctttatttaccagatcctctgcggcctcaagtacatccactccgccaacgttctccaccgagacttgaagccgggcaatctgcttgtgaatgccgattgcgagttgaaaatctgcgatttcggccttgctcgtggcttctctgtcgatcccgaggagaatgccgggtatatgactgagtatgttgccacgagatggtaccgtgcgccagagattatgttgagcttccagagctacacaaaagctatggatgtatggtctgtgggctgcattcttgctgagctcctgggaggcagaccgttcttcaagggtcgagactatgtcgaccagctgaatcagattctgcacattctcggaacaccaaacgaggaaaccctccgtcgcatcggatcgcctcgagcccaagaatacgtccgcaacctaccattcatgccaaagaaacccttcccagctctgttccccgatgctaaccccgacgcccttgatcttctcgacaaaatgcttgcctttgatccttcgcagcgtatcagcgtcgaacaggccctcgagcacccgtaccttcacatatggcacgatgcgtctgatgagcccgactgccccacgacgttcaacttcgactttgaggtggttgaggacgtcggcgacatgcgcaagatgattctggacgaagttttgcgtttccgacaacttgtgcgaacagcccctgcttctggcaaccaagccgccgctcagcagatacaagtcccaatgccccaagctggcggccaatggacggcagaagacccgcgaccgcaggaatacatgggccacgccaatgggcttgagcaggatcttgcagcaggcatggacattaggagataa

SEQ ID NO: 140221 - protein, 413 aa, Trichoderma atroviride
MADLQGRKVFKVFNQDFVVDERYTVTKELGQGAYGIVCAAVNGQTNEGVAIKKVTNVFSKKILAKRALREIKLLQHFRGHRNITCLYDMDIPRPDNFNETYLYEELMECDLAAIIRSGQPLTDAHFQSFIYQILCGLKYIHSANVLHRDLKPGNLLVNADCELKICDFGLARGFSVDPEENAGYMTEYVATRWYRAPEIMLSFQSYTKAMDVWSVGCILAELLGGRPFFKGRDYVDQLNQILHILGTPNEETLRRIGSPRAQEYVRNLPFMPKKPFPALFPDANPDALDLLDKMLAFDPSQRISVEQALEHPYLHIWHDASDEPDCPTTFNFDFEVVEDVGDMRKMILDEVLRFRQLVRTAPASGNQAAAQQIQVPMPQAGGQWTAEDPRPQEYMGHANGLEQDLAAGMDIRR

SEQ ID NO: 140222 - DNA, 1068 bp, Cryphonectria parasitica
  CDS (1)..(1068)
atgtcacggtcccaagctcccaaccctgcggggtcccgcaagatatccttcaacgtcagcgagcagtatgatattaaggacgttgtgggtgaaggtgcctattgtgttgtctgctctgcgatacacaaaccctctggccagaaggtggcgatcaagaagattacccccttcgaccactcgatgttctgcttgcggactctgcgtgagatgaagctgctgcgctacttcaaccatgaaaacatcatttccattctggatatccagaggcctcggaattatgagagcttcaacgaggtgtatctaatccaggaactgatggagacggatatgcaccgggtcattcgtactcaggacctctccgatgaccactgccaatattttatctaccagaccttgcgtgcgctcaaggccatgcactccgccaacgtccttcaccgtgatctcaagccttccaacctactcctcaacgccaactgtgacctgaaagtgtgcgactttggtctggctcgttccgctgcttctcaggaggacaagtcgggcttcatgaccgaatacgttgcgacacgctggtacagagccccagaaatcatgttgacgttcaaggagtacaccaaggctatcgacgtgtggtctgtgggttgtatcctggccgagatgctcagcggcaagcccctgttcccgggcaaggactatcaccaccagctcactctcatcttggatgtcctcggcacccccaccatggaggactactacggcatcaagtctcgccgagctcgcgagtacattcggtcgctgcccttcaagaagaaggtgcccttcaagaccctgttccccaagacctccgagctggctctggacctcctcgagaagctgctggcgttcaatcccgtgaagcgtatcacggtcgaggaggctctgaagcacccatacctcgagccctaccacgaccccgatgatgagcccaccgctcccccaattcccgaggagttcttcgacttcgacaagcacaaggagaacctgagcaaggagcagctgaagcagctgatctatcaggagatcatgcggtaa

SEQ ID NO: 140223 - protein, 355 aa, Cryphonectria parasitica
MSRSQAPNPAGSRKISFNVSEQYDIKDVVGEGAYCVVCSAIHKPSGQKVAIKKITPFDHSMFCLRTLREMKLLRYFNHENIISILDIQRPRNYESFNEVYLIQELMETDMHRVIRTQDLSDDHCQYFIYQTLRALKAMHSANVLHRDLKPSNLLLNANCDLKVCDFGLARSAASQEDKSGFMTEYVATRWYRAPEIMLTFKEYTKAIDVWSVGCILAEMLSGKPLFPGKDYHHQLTLILDVLGTPTMEDYYGIKSRRAREYIRSLPFKKKVPFKTLFPKTSELALDLLEKLLAFNPVKRITVEEALKHPYLEPYHDPDDEPTAPPIPEEFFDFDKHKENLSKEQLKQLIYQEIMR

SEQ ID NO: 140224 - DNA, 1203 bp, Arxula adeninivorans
  CDS (1)..(1203)
  misc_feature (1139)..(1139): r is g or a
atggctgactttatcagaacccagatctttggcacttgcttcgagatcacgtcgcgatatgtggacttgaatccggtaggtatgggcgctttcggcctggtgtgctcggccagagaccagctcaccaaccaaaacgtggccattaagaagattatgaagcccttttctaccccggtgctggccaagcgcacttatagagagctcaagcttctcaagcatctccgacacgaaaacctcatcaccctgtctgacatatttatttccccgctggaagatatctattttgtaaccgagcttttgggtacagaccttcaccggttattgacttcgaggcctttagagcaccagtttattcagtactttttgtaccagattctccggggtctaaagtacgtgcactctgccggggtggtccatcgcgatctcaagccgtctaacattttgatcaatgagaactgtgatctcaagatttgcgattttggactggcccgaatccaggaccctcaaatgactgggtacgtatccactcgatactatcgagccccagaaatcatgctcacgtggcaaaagtatgatgtagaggtggacatttggtctgctggttgcatctttgctgaaatgctgcggggcaagcccttgttccctggtaaggatcacgtccaccagttttccatcatcacagagctcttggggaaccctcctgatgatgtcattgagacaattgggtctgaaaacaccctcaactttgtaaaatctctccccaagagagagcgcattcctctttcccaaaagttccccaacgctgaccctgatgccgtcgatcttcttgagaagatgctggtatttgacccccgcaagcgtatcaacgctgccgatgcattggctcacccatacttggctccataccatgagccttcggacgagccagtggcttcggaaaagtttgactggtcttttaacgatgctgaccttcccgtagacacctggaaggttatgatgtactcggaaattctcgatttccacaatgttgactcgtctgccgttgagcagcagcagcagcaaccacaaccaccacaaccacaactgcaacagcaacaacaaccacctcagcaacctcagcaacctcagcaacctcaacrggctcagcagcctgtgcagcctgtgcaaggagattatgtacctcaagttgctcctaggtcgtag
